United States Patent Application Publication US 2006/0134663 A1 - sequence listing, part 87

SEQ ID NO: 246670 - DNA, 1088 bp, Homo Sapiens
ttggcggcgacctgggcgccccgcagaaccccaatgctaaggccgctgggtccaggaagatccatttcaactggctgcccccttctggcaagccaatggggtacagggtaaagtactggattcagggtgactccgaatccgaagcccacctgctcgacagcaaggtgccctcagtggagctcaccaacctgtacccgtattgcgactatgagatgaaggtgtgcgcctacggggctcagggcgagggaccctacagctccctggtgtcctgccgcacccaccaggaagtgcccagcgagccagggcgtctggccttcaatgtcgtctcctccacggtgacccagctgagctgggttgagccggctgagaccaacggtgagatcacagcctacgaggtctgctatggcctggtcaacgatgacaaccgacctattgggcccatgaagaaagtgctggttgacaaccctaagaaccggatgctgcttattgagaaccttcgggagtcccagccctaccgctacacggtgaaggcgcgcaacggggccggctgggggcctgagcgggaggccatcatcaacctggccacccagcccaagaggcccatgtccatccccatcatccctgacatccctatcgtggacgcccagagcggggaggactacgacagcttccttatgtacagcgatgacgttctacgctctccatcgggcagccagaggcccagcgtctccgatgacactgagcacctggtgaatggccggatggactttgccttcccgggcagcaccaactccctgcacaggatgaccacgaccagtgctgctcctatggcacccacctgagcccacacgtgccccaccgcgtgctaagcacatcctccaccctcacacgggactacaactcactgacccgctcagaacactcacactcgaccacactgccgagggactactccaccctcacctccgtctcctcccacgactctcgcctgactgctggtgtgcccgacacgcccacccgcctggtgttctcctgccctggggcccacatctctcagagtgagctggcagggaggcccggtgcgaagc

SEQ ID NO: 246671 - DNA, 271 bp, Homo Sapiens
aaaaagaattgtttatttaccgaacctggggcatattagatacaaccaattttaaatttacatcttttaaatcagttttgaagtgtttcacacacacaaaaaacttggcatgcaacagttgtcctaaggtgaaagtcacctcattaataaactgttgcaagtgttctcacccaaggtggaagtatggtttatcctgaacatgaaaacctgtaacaaatttaaattaattatataaaactcgttacttgtagttttgcccttgcaaagatcc

SEQ ID NO: 246672 - DNA, 941 bp, Homo Sapiens
  misc_feature (23)..(23): n is a, c, g, or t
  misc_feature (48)..(48): n is a, c, g, or t
  misc_feature (93)..(93): n is a, c, g, or t
  misc_feature (99)..(99): n is a, c, g, or t
aagggtgctgtcattttgggaancagccagagaaccacaggatgcgtnaatcggtctccttgtcttcatgggcatctccgggccaggaagtcntgacgngccacgctggatctggaggacgtccggagctacagggcggagatttcatctcgaaacctggcggccagcagggcgagcccctaccccagagtgaaggtggactttgccctctcgtgccacgaggacttgctggcacccatctctgagcccatcgagtggaaataccacagccctgaggaggagataagccttggacctgcctgctggctctgggattttttaagacgaagtcaacaggcagggtttttgctgcccttgagtggcggggtggacagcgcagccaccgcctgcctcatctactccatgtgctgccaggtctgcgaggccgtgaggagtggaaatgaggaagtgctggctgatgtccgcaccatcgtgaaccagatcagctacaccccccaggatccccgagacctctgtggacgcatactgaccacctgctacatggccagcaagaactcctcccaggagacgtgcacccgggccagagagttggcccagcagattggaagccaccacatcagtctcaacatcgatccagccgtgaaggccgtcatgggcatcttcagcctggtgacggggaagagccctctgtttgcagctcatggaggaagcagcagggaaaacctggcgctgcaaaatgtgcaggctcgaatacggatggtcctcgcctatctgtttgctcagttgagcctctggtctcggggtgtccacggtgggctcctcgtgctgggatccgccaacgtggatgagagtctcctgggctacctgaccaagtacgactgctccagtgcggacatcaaccccatacgcgggatcagcaagacggacctcagggccttcgt

SEQ ID NO: 246673 - DNA, 649 bp, Homo Sapiens
tcagataaaatattataggtttatttaaaacttaattctcaccttgagtatgcaaaatacaaactccacaaaatgttcattttactttgtagtttacaaatatacaaaatagacgtttgcttaaatttatattacatatttattaaggcaaggaactatatagaaaaacacatttgttctgcttaaggcatacttgggaataaaccattgtacaaattattgcacatctgaaaccacagtgcataacagactgtctgcataaaaatgctaaagaagtaaaccaggtatattacctgacttaggtcataaatgttgatcggaagacaaatatagattttccttgtcaaagtatgcagcagtttgaaaactttggcttccttgtttgggtacctttaggacccagactcaccaagcaccatcatttaggctatttaaacatgttttctgtacctgaatttcttcctcttcttctaacatcataataatggcttttagaaggtaaagggaatacaaggtgatcttttatgcttatattgcatcaatacacaattcaagggaattctggtcttccctcccccaactcacggatataatttataccctgatatccacaacttccagtcacccccttggcattttgtaagtccag

SEQ ID NO: 246674 - DNA, 385 bp, Homo Sapiens
  misc_feature (339)..(339): n is a, c, g, or t
cccatctctcccccgggcctgctggttttgggggggagaaggagagaggggactctggacgtgccagggtcagatctcgcctccgaggaaggtgcagctgaacctggtgttttagaggataccttggtcccagagtcatcatgaaggcccttgatgagcctccctatttgacagtgggcactgatgtgagtgctaaatacagaggagccttttgtgaagccaagatcaagacagcaaaaagacttgtcaaagtcaaggtgacatttaggacatgattcttcaacagtgggaagttcagggatgaccacataaagggcccacttaaaggtagggagctantttttgggaagtgaaggattctttgatgggtgcatattcagggagg

SEQ ID NO: 246675 - DNA, 833 bp, Homo Sapiens
tcccttctaaccagaaacaggaaagcaagccattccctaacctccccaccaccaggctatcaccgccttcccagagtttcctctatgatttgcatacccctttgttccctagtcctgagaacacagcagtagctggttcacctgcttgccaacagcctcacacaccccacctaacacagtatcaaaatcccctcttccctggaacagcctctgaatttgcctacacacattccagaactatgacttggtcacacccactcccaggaccagtcaagagtcttgggaacctctctgctacaccgataaatccatggcttccccacttgagagggctcccagtgggtcactgcccaagataaactcagcttccagcatagagaaataaaagctgactcattggttatgatgtctcctgataccatgtgtaggaagtgaactgtctgaccaggcagttctggactcctccagaacccgcttcctgcaaccacacagcacgcaggtaacattatcccgtgtgacccacgcccacaggcaggcccggatgcaggcacagctaagactggccataacctatcgagagtcctggccaatcagctgtgacctgctgtccaagtgcattgtgaccccaggtcggaatgagttctttatgcagacataatgagcagtcctggctggagcctcctgtgcccccaccacaccaagcactctgcgaggcccgcccatgtcttctggctgcctcctgagtgtgcttcacccaccctggcctggtcttcccttccacctccacctttcctttgcttcttttccccccagggtcagagcctctaagccaa

SEQ ID NO: 246676 - DNA, 2051 bp, Homo Sapiens
  misc_feature (215)..(254): n is a, c, g, or t
gggggtcgcgcgctctttttctcgggacgggagaggccgtgtagcgtcgccgttactccgaggagataccagtcggtagaggagaagtcgaggttagagggaactgggaggcactttgctgtctgcaatcgaagttgagggtgcaaaaatgcagagtaataaaacttttaacttggagaagcaaaaccatactccaagaaagcatcatcaacatnnnnnnnnnnnnnnnnnnnnnnnnnnnnnnnnnnnnnnnncgccaccaccgccaatacctgcaaatgggcaacaggccagcagccaaaatgaaggcttgactattgacctgaagaattttagaaaaccaggagagaagaccttcaccccacgaagccgtcttttttgtgggaaatcttcctcccgacatcactgaggaagaaatgaggaaactatttgagaaatatggaaaggcaggcgaagtcttcattcataaggataaaggatttggctttatccgcttggaaacccgaaccctagcggagattgccaaagtggagctggacaatatgccactccgtggaaagcagctgcgtgtgcgctttgcctgccatagtgcatcccttacagttcgaaaccttcctcagtatgtgtccaacgaactgctggaagaagccttttctgtgtttggccaggtagagagggctgtagtcattgtggatgatcgaggaaggccctcaggaaaaggcattgttgagttctcagggaagccagctgctcggaaagctctggacagatgcagtgaaggctccttcctgctaaccacatttcctcgtcctgtgactgtggagcccatggaccagttagatgatgaagagggacttccagagaagctggttataaaaaaccagcaatttcacaaggaacgagagcagccacccagatttgcacagcctggctcctttgagtatgaatatgccatgcgctggaaggcactcattgagatggagaagcagcagcaggaccaagtggaccgcaacatcaaggaggctcgtgagaagctggagatggagatggaagctgcacgccatgagcaccaggtcatgctaatgagacaggatttgatgaggcgccaagaagaacttcggaggatggaagagctgcacaaccaagaggtgcaaaaacgaaagcaactggagctcaggcaggaggaagagcgcaggcgccgtgaagaagagatgcggcggcagcaagaagaaatgatgcggcgacagcaggaaggattcaagggaaccttccctgatgcgagagagcaggagattcggatgggtcagatggctatgggaggtgctatgggcataaacaacagaggtgccatgccccctgctcctgtgccagctggtaccccagctcctccaggacctgccactatgatgccggatggaactttgggattgaccccaccaacaactgaacgctttggtcaggctgctacaatggaaggaattggggcaattggtggaactcctcctgcattcaaccgtgcagctcctggagctgaatttgccccaaacaaacgtcgccgatactaataagttgcagtgtctagtttctcaaaacccttaaaagaaggaccctttttggactagccagaattctaccctggaaaagtgttagggattccttccaatagttagatctaccctgcctgtactactctagggagtatgctggaggcagagggcaagggaggggtggtattaaacaagtcaattctgtgtggtatattgtttaatcagttctgtgtggtgcattcctgaagtctctaatgtgactgttgagggcctggggaaaccatggcaaagtggatccagttagagcccattaatcttgatcattccggttgaaactcatgggccaacttggcccattggcttgcaccggccccgcagacggagtctaactctgatcccccaggctgcactgttcgtcgctgatctccggtcccctgcaccctctgcctcacgggtcccaccttgccccggtcaccttgagctcctgacccagagtctcccacg

SEQ ID NO: 246677 - DNA, 1016 bp, Homo Sapiens
  misc_feature (803)..(803): n is a, c, g, or t
agggctcaagggttcttgttgatgcacgagataagcttggcattccttggcagtattctgaaaatgagaagcatgggatgttcctgatggccttcgagaacaaggcggggctgcctgtggagccggccaccttccagctgtacgtcccggccctgagcgcactctggagggattctggcatcagggaggctttcagccggagaagcgagtttcagctgggggagtcggtgaagtacttcctggacaacttggaccggatcggccagctgaattactttcctagtaagcaagatatcctgctggctaggaaagccaccaagggaattgtggagcatgacttcgttattaagaagatcccctttaagatggtggatgtgggcggccagcggtcccagcgccagaagtggttccagtgcttcgacgggatcacgtccatcctgttcatggtctcctccagcgagtacgaccaggtcctcatggaggacaggcgcaccaaccggctggtggagtccatgaacatcttcgagaccatcgtcaacaacaagctcttcttcaacgtctccatcattctcttcctcaacaagatggacctcctggtggagaaggtgaagaccgtgagcatcaagaagcacttcccggacttcaggggcgacccgcacaggctggaggacgtccagcgctacctggtccagtgcttcgacaggaagagacggaaccgcagcaagccactcttccaccacttcaccaccgccatcgacaccgagaacgtcccgcttcgtgttccatgctgtgaaagacaccantcctgcaggagaacctgaaggacatcatggctgcagtgagcgaggaagccccggggtttgtcgtcgttgagcagcccccacggctgtcggtcagactcttgggtgtgtgttgtctgtgtggtccttgagtgggtttctctttttcaggcttatactcatgaatcttgtctgaagcttttgagggcagactgcctcctgggattgggctatcaa

SEQ ID NO: 246678 - DNA, 512 bp, Homo Sapiens
cgcatcttgctcccatcaggtcatgatttcctggttcttttgtcttataagcgatttttattgtgtcctgaatttttttatattatgagaatttttctttcttattatttcgtagatggttccctattgatgtgtaacctgagagctgggtgggtgtgcgtgtttatcttcctgatgggagaagactgggcgcatcttcgtcccatcagacaagctgacctaggctgacaccttcactcaggcaaacagcaaatctcacagttggaaaaccaaccctcgcttggccctgccccggggcttaatcggcctattctccccctgcctcctcttgccctcccacctactgctctcctccataccctgaaaggatgcattatcttcctccagctcctgctcccaggaccttcgcctcaagccttggcacagtcaaagcgcacccagggtgggaaatttccaaacagtgcaggagggcggccagcggagcccactcactctccttgtgaaacctcgcg

SEQ ID NO: 246679 - DNA, 992 bp, Homo Sapiens
tgaaggagctgagacatatgtgaatgggaagcttgtgacggagccgctggtgctgaagtcagggaataggattgtgatgggcaagaaccacgttttccgcttcaaccacccggagcaggcaaggctggaacgggaacgaggggtccccccacccccaggagcgccctctgagccagtcgactggaactttgcccagaaggaactgctggagcagcaaggcatcgacataaagctggaaatggagaagaggctgcaggatctggagaatcagtaccggaaagaaaaggaagaagccgatcttctgctggagcagcagcgactgtatgcagactcggacagcggggatgactctgacaagcgctcttgtgaagagagctggaggctcatctcctccttgcgggagcagctgccgcccaccacggtccagaccattgtcaaacgctgtggtctgcccagcagtggcaagcgcagggcccctcgcagggtttatcagatcccccagcgacgcaggctgcagggcaaagacccccgctgggccaccatggctgacctgaagatgcaggcggtgaaggagatctgctacgaggtggccctggctgacttccgccacgggcgggctgagattgaggccctggccgccctcaagatgcgggagctgtgtcgcacctatggcaagccagacggccccggagacgcctggagggctgtggcccgggatgtctgggacactgtaggcgaggaggaacggaggtggagctggcagtggtggtggcagtgaggacgggagcccgaggggcggaggtggaggacctccgggcccacatcgacaagctgacggggattctgcaggaggtgaagctgcagaacagcagcaaggaccgggagctgcaggccctgccgggaccgcatgctccgcatggagagggtcatccccctggcccagggatcatgaggatgagaatgaacgaaggtggtgaggtccctgggccccg

SEQ ID NO: 246680 - DNA, 1083 bp, Homo Sapiens
ccctttaaaagccaactttgtacaaaaaagttggccagtctaagaagtcccattgccaaagctttctgcaggagggtgaatgccgcagcttggcagcccctgggtttctcttggaaatggtcagtttcccctcaaagtacccaaagtagccttggcttgagtttttgtccttgcctcctttttagagaagagggcatttagactgcattttcctggttaaagaaggttaaagcaaatgtttattgccttttctagtgaactaactcgtagagatgttctcagcaggaagacagtcttagcactgtcacttagcagattgcacttaagtcccttgtgctggccagatggcgtggctggttgccttaatatgtcccaggacccctgacagggctgcctggcctctccctcgtgctcctcaagagcccagtccatacactgtggatgtcattgctgtcgggttaggaagtcttgtcctagaacgccctggctggtatgaccacagttcatggcggctcttctcgcttgggtcatggtcatcttccagcacctgctgtgctgggaaggccgaggatgggggcccagcactgtccaggcctgctggggcctggctgggagtcctgtgggcagcatggaacatgcagctgggcttcctgtgaccaggcaccctctggcactgttgcttgccctgtgccctggaccttttcctgcccttctccttcctctgctcccttggggctaccccttggcccctcctggtctgtgcaaactccctcagggagcccccctgccctgtagctctcgcttaacttcctagggggctgctgagcccacccagatgttggtgggagttcagcgggggcagcttggtctccccttgtccgcaggggcggaaagggcttgggttttggcccatacaaagggtgggcttacgcccctcaaatcccctggaccggtttccaggggccctggaggcttggggctaccccaccgggaaagggaacattggctggggtcccacgaaccggggggaatggacacgggccccgcccacccgggggggaatacctccgcgggggctgttga

SEQ ID NO: 246681 - DNA, 1872 bp, Homo Sapiens
ttcctagtagccctgaggctgctggccaagaagaagagggaggaggaggagagggacagacgcctcggcccctagaggataccacgagggaggctcaggagctggaggcccagctgtccctggtcagggaggggcctgtgtctgagccagagcctgggacccaggaggttctctgccagctcaagcgagaccagcccagcccgtgtctgagtagcgctgaggattctggggtggatgagggacaggggagcccttcggagatggtccattcctcggagttcagagtagacaacaatcacctgctcctgctcatgatccacgtgttccgagaaaacgaagagcagctgttcaaaatgatccggatgagcaccgggcacatggagggcaacctgcagctgctgtacgtgctgctcacagactgctatgtctacctgctccggaaaggggccacagagaagccatacctggtggaagaggccgtttcttacaatgaacttgactatgtgtcggttggccttgaccagcagacggtgaagctggtgtgcaccaaccgcaggaagcagtttctgctggacacggctgatgtggcgctggctgagttctttttggcttctttgaagtcagccatgatcaaaggctgtcgagaacctccctaccccagcatccttgacggatgccaccatggagaagctggcactggccaaatttgtggcccaagaatcgaagtgtgaggcatctgctgtcaccgtgcgcttctacggccttgtgcactggggaggaccccaacagacgagtccctgggccccacgccctgccactgctcaccccccgagggcaccatcaccaaagaaggcatgctgcactacaaggcgggcacctcctacctgggcaaggaacactggaagacgtgcttcgtggtgctcagcaacgggatcctctaccagtacccggaccgcaccgacgtcatccttctgctctcggtgaacatggggggggagcagtgcggtggctgccggagagccaacaccacggatcggccccacgccttccaggtcattctctccgaccggccctgcctggagctaagtgccgagagcgaggccgagatggccgagtggatgcagcatctctgccaggctgtgtccaaaggggtcatcccccagggcgtagctcccagcccctgcataccctgctgcctggtcctcacggatgaccgcctctttacgtgccatgaggattgccagaccagcttcttccgctctttgggcacagccaagctgggcgacatcagcgccgtctccaccgagccgggcaaggagtactgcgtcttggagttctcccaggacagccagcagctcctcccgccctgggtcatctacctgagctgcacttctgaactggaccgattgctgtctgcactgaactctgggtggaaaaccatctatcaggtggacctccacccacacggcgatccaggaagcctccaacaagaagaaattcgaggatgccttgagccctcatccacagcgcctggcaagcggaagcgacagtcatctgccagcggccgagcctcccgagacccctggtgctgaggcagagctggttggcgtccctggtgggcaggaaaggaaggcacgccagccggcaggcacactgtcacggctgttgtcatgctgtcgggagcctacagtccacccctgccctgggcggcagaaccaccgagtgtggcttaagacagggtccctccactccagggatccagatcaggtgcccggcacccctgggcatcctgcccgacaggtagcgaatggaggtcgctgggggcagagggtccgagccctgtgggctctgcggatgcacgccctcctcccg

SEQ ID NO: 246682 - DNA, 476 bp, Homo Sapiens
agtgctacctccacaaacagagtgctacctccacaacggagacatcagccgaaagcccaacacacgtaagcagaggctcctggccttcttcatagtgctgcactgctcactgaccagctgcccctcgcccgccacctggctggtcgtccaccacggccagcggcagtagcggaagctgctcacgctgtacatgtacaacgccgtgatgcttgtctgggcgcggcagggtgccttcaaggagctggtatatgtgttattcatggtgaagtatgccggcttgactccggacctgctgtcctatgcggctgccctccaagtgcatggggaggcaggaccagtacgccgggaccatcgaaaggtgtctggaacagatgagccaggaggggctgaagctgcaggcactcttcaccgccgttctgctgtttgtggaggtaggcgtgggtgccttgcagagcggtggttaacgcagatctcgg

SEQ ID NO: 246683 - DNA, 702 bp, Homo Sapiens
  misc_feature (20)..(20): n is a, c, g, or t
  misc_feature (123)..(150): n is a, c, g, or t
  misc_feature (205)..(205): n is a, c, g, or t
  misc_feature (399)..(420): n is a, c, g, or t
aaaaaaattgaacctgaaancacttgaacaatgtttgtttgaattgtgtttgttttacccctttgaatgggccttaaaagaaattatcccaaagggagaaagagcagtatgcccacttccttnnnnnnnnnnnnnnnnnnnnnnnnnnnnttgtgctcttttctaatccaaagggtatatttgcagcatgcttgactttaccaantctgatgacatctttacggacactattatcactaagaccttgttatggcgaagtctttagtctttttcatgtattttcctcatgattttttctctttatgtagtttgactatgccttacctttgtaaatatttttgcttgtgttgtcgcaaaggggataatctgggaaagacaccaaatcatgggctcactttnnnnnnnnnnnnnnnnnnnnnnccttcagctgtgctaaacagtatattacctctgtataaaattcttcagggagtgtcacctcaaatgcaatactttgggttggtttctttcctttaaaaaaatttgtataaaactggaagtgtgtgtgtgtgagcatgggtacccatttgataagagaaatgcatttgattgtgaagaagggagagttaaattctccattatgttcgtggtgtaaagtttagagctggaatttattataagaatgtaaaaccttaaattattaataaataactattttggcta

SEQ ID NO: 246684 - DNA, 1154 bp, Homo Sapiens
  misc_feature (18)..(18): n is a, c, g, or t
  misc_feature (116)..(116): n is a, c, g, or t
  misc_feature (436)..(436): n is a, c, g, or t
gtgtaagcttcactctanttccaggggttcacactcaacaattgatggtgttggtaagagcacctgtctcaaagcagcccaggggcctgaaataccctgattcacctacagtgttncccctgggctcagcaggcaacaacattcttttttgttcttttgcagccttttgaaagctgtttacaaataatctaatgtgatatcacaacaatcctataaggttttgattcctcttctgttaaatggagatactagtatctattcattcacctaatggctttattcctatcattttgcagataggaaaactgaattgcaaaagcggttcctggagaacagaatgtgagtttttaagtgacaagggagagggagggggagggagagaaaattctgaagcggcccagttcttggaggatgagggagggagggcaattccctnaatgtccatttgaattcggaagggacaggcaggccggggcggactggagacggcggctcgccttgggaccctctgagcttgcgggccccgctgagcacccaaaggccggccctagagtccaggagaagagcgcagcggcgcggagctcccaggcgttccccgcagcgcgtcctcggtcctggaaccaccgcgccgcgcgtcctggcttccacatctgccccatttgcccgcggatcttgactttttcttggcgggcaaggcctcggtctcctccccgcagcagggctgcccgcggctgcgggaccctcctggtcctgatgcctggcagaatcgaaggggtgagggtacgctctctgcagcagaaagccctgggcttaaagtcctatttattatttggcgttgccacttactggtcggtggctttggtagggcgcgtttctgagcctcagtttccccatttgtaaagccgaagtacatagcgctttccctgcagagttagaaatttcgacgatgtgccgcgcgctctagagcgcgctcagcaagcgggtcccaccgtgcccaaggcaggaccgcggcgcgatgtcacctatgcaaagtcgccgcaactcacgggaatcgcagctgtgtgctcaactttcccctccccgccgccgtctttctccccaaactggcttgggggtcgagtatccggggctctcccccgcactggcgcttcccc

SEQ ID NO: 246685 - DNA, 949 bp, Homo Sapiens
aagcctactttgtacaaaaaagttggctcctctggatttgttcactctgagatctgtttgcagagtgggtgcttagcagacagagtgaagctggctggggggcacagtggtgtgtagtgctgctgtgtatcaaaagaccaaggtattatgggacctggtttcagaatgggatgggtttcttcacctcatgttaagagaagggagtgtgtcctgaagaagcccttcttctgatgttaaaatgctgaccagaacgctcttgagcccaggcatcgttgagcattaacactctgtgacagagctgcagacccctgccttgagtctcatctcagcaatgctgccaccctcttgtctttcagagttgttagtttactccattctttgtgacacgagtcaagtggctcacaacctcctcagggcaccagaggactcactcactggttgctgtgatgatatccagtgtccctctgcccccttccatccccaaccacatttgactgtagcattgcatctgtgtcctgttgtcatttatgttaaccttcaggtattaaacttgctgcatatcttgacatatcttgagattctgcatgtcttgtaaagagaggggatgtgcatttgtgtgtgatgttggatagtcatccacgctcagtttggaccattggaggaacttagtgtcacgcacaaatggggctattcctacgcttagaatagggcttgtctgcccactttagaagagtccaggttggtgagcatttagagggaagcagggcagaactctgaacgacaatacgtctctctgagcagagacccctttgttcttgttatccacccatatggacttggaatcaatcttgccaaatatttggagagattgtgtggatttaagagacctggatttttatattttaccagtaaataaaagttttcattgatatctgtccttgaaaaaaaa

SEQ ID NO: 246686 - DNA, 418 bp, Homo Sapiens
  misc_feature (15)..(15): n is a, c, g, or t
  misc_feature (239)..(239): n is a, c, g, or t
caatgaaaacttttntttactggtaaaatataaaaatccaggtctcttaaatccacacaatctctccaaatatttggcaagattgattccaagtccatatgggtggataacaagaacaaaggggtctctgctcagagagacgtattgtcgttcagagttctgccctgcttccctctaaatgctcaccaacctgggactcttctaaagtgggcagacaagccctattctaagcgtaggantagccccatttgtgcgtgacactaagttcctccaatgggtccaaactgaggcgtgggatgactatccaacatcacacacaaatgcacatcccctctctttacaaggacatggcaggaatctcaaggatatgttcaaggatttggcaggcaagtttaatacctggaagggtttaacataa

SEQ ID NO: 246687 - DNA, 719 bp, Homo Sapiens
  misc_feature (706)..(706): n is a, c, g, or t
taaagcttggttcaccagccggactgaagaattgaaccgggaggtcgctggccacacggagcagctccagatgcgcaggtccgaggttactgacctgcggcgcaccctcaagggtcttgagattgagctgcagtcacagctgagcatgaaagctgccttggaagacacactggcagaaacggaggcgcgctttggagcccagctggcgcatatccaggcgctgatcagcggtattgaagcccagctgggcgatgtgcgagctgatagggagcggcacatgcgacggatgtgccgctccgggcaccgatctcgccaagatcctgagtgatttgcgaagccaatatgaggtcatggccgagcagaaccggaaggatgctgaagcctggttcaccagccggactgaagaattgaaccgggaggtcgctggccacacggagcagctccagatgagcaggtccgaggttactgacctgcggcgcacccttcagggtcttgagattgagctgcagtcacagctgagcatgaaagctgccttggaagacacactggcagaaacggaggcgcgctttggagcccagctggcgcatatccaggcgctgatcagcggtattgaagcccagctgggcgatgtgcgagctgatagggagcggaacgggtatcctcaagagtcgaggagcatactaatgtcatcagtggagagaaagcnaaatatagtgccc

SEQ ID NO: 246688 - DNA, 1100 bp, Homo Sapiens
gccaacggcgagctagaggtgaagatccgcgactggtaccagaagcaggggcctgggccctcccgcgactacagccactactacacgaccatccaggacctgcgggacaagattcttggtgccaccattgagaactccaggattgtcctgcagatcgacaacgcccgtctggctgcagatgacttccgaaccaagtttgagacggaacaggctctgcgcatgagcgtggaggccgacatcaacggcctgcgcagggtgctggatgagctgaccctggccaggaccgacctggagatgcagatcgaaggcctgaaggaagagctggcctacctgaagaagaaccatgaggaggaaatcagtacgctgaggggccaagtgggaggccaggtcagtgtggaggtggattccgctccgggcaccgatctcgccaagatcctgagtgacatgcgaagccaatatgaggtcatggccgagcagaaccggaaggatgctgaagcctggttcaccagccggactgaagaattgaaccgggaggtcgctggccacacggagcagctccagatgagcaggtccgaggttactgacctgcggcgcacccttcagggtcttgagattgagctgcagtcacagctgagcatgaaagctgccttggaagacacactggcagaaacggaggcgcgctttggagcccagctggcgcatatccaggcgctgatcagcggtattgaagcccagctgggcgatgtgcgagctgatagtgagcggcagaatcaggagtaccagcggctcatggacattaagtccgcggctggagcaggagattgccacctaccgcagcctgcttcgaggaacgggaagatcccttccaccattttgtctgccttccaaggtcctcttgagggcagcagggctctgggggcttctgcttgtccctttgggaggggtggccttctggggtaacggggatggggaaaggaaagggacccctttaccccccggtttttttctcctggaactggggcaataaaaaattttatggggcccccggggcgacacacaagtaatggccctccacacctccgaggcgctatctcttgggc

SEQ ID NO: 246689 - DNA, 2080 bp, Homo Sapiens
ggcagtcagctcctgacattacaaaaaaagcttcaaaaattggaatctggccctcaaaccccacaacaggaattaatcaatctcgccttcaaggtgttcaacaatagagaagaggcagccaagcagcaacgtctttcagagctgcaattgcttgcctctgctgtaagacaaaccccagccatgccttcagcacacaaaaacttcagagcaaccaaaccacagcctctaggcactcctttaaaaccatctcatggaccttgcttcaagtgccgcaaaactggccactgggccaaggaatgcctgcagcccgggattcctcctaagcctgtcccacctgtgcgggaccccactggaaatcggactgtccaactaatatcacagccccttctagggtccctggagctctggctcaaagctctctggctgactccttcccagatctcctcggcttagtggctgaagactgatgctgcccgatcgcctcagaagccccttggaccatcacagatgccgagcttcgggtaactctcacagtggagggtaagtccatcccctttttaatcaatacgggggctacccactccacattaccttcttttcaagggcctgtttcccttgcccccataactgttgtgggtattgacggccaagcttctaaaccccttaaaactccccaactctggtgccaacttggacaatactcttttatgcactcttttttagttatccccacctgccccgttcccttattaggccgagatattttaaccaaattatctgcttccctgactattcctggattacagctgcatctcattgctgcccttcttcccaatccaaagcctcctttgcatcttcctctcgtattcccccaccttaacccacaagtatgggatatctctactccttccttggcgactgatcatgtgccccttaccatctcattaaaaccttatcacccttaccctgttcaatgccaatgtcccatcccacagcatgctttgaagggattaaagcctgttatcactcgcctgctacagcatgggcttttaaagcctataaactctccttacaattcccccattttgcctgtcctaaaaccggacaagtcttacaggttagttcaggatctgtgccttatcaaccgaattgttttgcctatccaccctatggtgtcaaacccatatactctcctatcctccatacctccctccacaatccattattatgttctggatctcaagcatgctttttttactattcctttgctcccctcgtcccagcctctcttcgctttcacttggactgaccctgacacccattaggctctgcaaattacctgggctgtactgctgcaaggcttcatagacagcccccattacttcagtcaagcccaaatttcatcctcatctgttacctatctcggcataattcttcataaaaacacaggtgctctccctgctgatcatgtccgattaatctcccaaacctcaatcccttacaaaacaacaactcctttccttcctaggcatagttagtgcggtcagaattcttacacaagagccaggactgcaccctgtagtgtttctgtgcaaacaacttgaccttactgttttatcctagccctcatgtctgcgtgcagcggctgccgctgctttaatagttttagaggccctcaaaatcacaaactatgctcaactcactctctacatttctcataacttccaaaatctattttcttcctcatacctgacgcatatactttctgctacccagctccttcagctgttctcactctttgttaagtcctacaattatcattgttcctgccctggacttcaatccggcctctcacattattctggataccacacctgacccccatgactgtatctctctgatccacctgacattcaccccatttccccaaatttccttatttcctgttcctcatcctgatcacgcttgatttattgatggcggttccaccaggcctaatcgccacacaccagcaaaggcaggctatgctatagcacaagccactagcccgcctcttagaacctctcatttcctttccatc

SEQ ID NO: 246690 - DNA, 948 bp, Homo Sapiens
gggcgcccgagaggccagctcagacctcccggctcgacaggcggcgcgggcggcggtaaaatgtcggttccaggaccttaccaggcggccactgggccttcctcagcaccatccgcacctccatcctatgaagagacagtggctgttaacagttattaccccacacctccagctcccatgcctgggccaactacggggcttgtgacggggcctgatgggaagggcatgaatcctccttcgtattatacccagccagcgcccatccccaataacaatccaattaccgtgcagacggtctacgtgcagcaccccatcacctttttggaccgccctatccaaatgtgttgtccttcctgcaacaagatgatcgtgagtcagctgtcctataacgccggtgctctgacctggctgtcctgcgggagcctgtgcctgctggggtgcatagcgggctgctgcttcatccccttctgcgtggatgccctgcaggacgtggaccattactgtcccaactgcagagctctcctgggcacctacaagcgtttgtaggactcagccagacgtggagggagccgggtgccgcaggaagtcctttccacctctcatccagcttcacgcctggtggaggttctgccctggtggtctcacctctccagggggcccaccttcatgtcttcttttggggggaataccgtcgcaaaactaacaaatctccaaaccccagataattgctgcttggagtcgtgcataggacttgcaaagacattccccttgagtgtcagttccacggtttcctgcctccctgagaccctgagtcctgccatctaactgtgatcacttgccctatccgaatatcttcctgtgatctggcatcagtggctctttttcctgctcctgggcttctggcgggcctctccctggcaagccgtggctttttgcggcgtcgccctg

SEQ ID NO: 246691 - DNA, 1888 bp, Homo Sapiens
atcccccggtgatacacttctggatttccgtttccttttctgtaaaatgaggagcttggaagatccggaaaatgaggcccataggaaacaagtgacttgctgagtccagataacactgactgtcagagagaaacatgaaccagaagctactgaagttggagaacttgctacgatttcacactatttataggcaactgcacagtctgtgtcaaagaagagcattaagacagtggaggcatgggttttcatctgcttaccctgtgtggacagctcaactgtgtgcctggccctggccaacagatgtgctcaatggggctgctttatctcagtataggcttctagtaacaaaaaaggaagaaggaccatggaaatctcagttatcttcaacaaaatctaaaaaggtggtagaagtatggattggaatgactattgaggaactggccagggcaatggaaaaaaacacagattatgtatatgaagctttattgaacactgatattgacctagattcactggaagcagactcacatttagatgaagtctggatcaaagaagtgataacgaaggcagggatgaagttaaagtggagtaaattaagacaggacaaagtcagaaaaaatcaagatgctgtaagaaggccccaggcagatccagctttattaaccccaaggtccccagttgttactataatgggccatgttgatcacgggaaaacgacattacttgacaaatttcgaaaaactcaagtggcagcagtggaaactggaggcatcactcagcacattggtgcctttcttgtctctctgccttctggggaaaagataacttttcttgatactccaggacatgctgctttctcagcaatgagagccagaggtgctcaggtcactgacattgtcgtattggttgtagctgcagatgatggagtgatgaaacaaactgtagaatctattcagcatgccaaagatgcacaggttcctattatccttgccgtaaataaatgtgacaaagctgaggctgatcctgagaaagtgaaaaaagagctgctggcttacgatgtggtatgtgaagattatggaggtgatgttcaagcagtgcctgtctccgcacttacgggcgataatctgatggctttggcagaagcaacagttgctcttgcagaaatgttagaattgaaagcagatcccaatggtccagtggaaaggaacagtaatagagtctttcacagacaaagggaagaggtcttgttactacagctataattcaaagaggaactttaagaaaaggctctgttctggttgctggaaaatgtttgggcaaaagtacgcttaatgtttgatgaaaatggaaaaacaattgatgaggcctatcccagcatgccagtgggaattacaggctggagagaccttccttctgcaggagaagaaattcttgaagtagaatctgaggtgtatcaagcttaattcctatatattagatataatataatgattttaaatgccagtttacaatgttataccaaatatgtgtattaatgttaaccaatctagattataaggggctgtgaggatgcaagttgtgctattttagcattagactatagaattttgggggtggggataagatttttaaatcatttcaattatacaagctctcaaattaaaattttacatgtttcttgaaacttataaaagtagtagtttcatacatgagttaagctaatttcctaatgcaggacaacacaaaggctttaatctagcagttattgatgtctatttcatcaaataatacgtttttcccctataaagccaaggcacgtgaagttgttgactggaggaaatatgacagaacgagaaaggtcggaggatctgaaatatagcccatcctg

SEQ ID NO: 246692 - DNA, 1413 bp, Homo Sapiens
ttacactgaattgtaaaaccattcgttgttgtttacaattgccaaaaatctcaaaaggctctgtatttatgtaattctttgaaattattattttattttgatttctcagttattgactggctgggtgtgacttagtacataagtactcaatattataaaaacctcaaataattgacttgattttacacaacatccttcccttttctacaagttaatttttttacaaatcatttgggttatctcctaaataggttatattttattgcttctagaaacaatgtttcaaaatatatgtgcattatacctcttccttgtctcaaccgccatgaaaattctgaacactccaaattcagttgaataatccaaaacaaaatttataagtataaaataattttacttcttatagtaatagtatactttaaaaagcctcagggtatattatcttctgaccagctacaattcagtgcagctacattgagcatctatgtctgctctagttgaggactactaggcctatttcactgctgtgtagcctcagtgcctaacatgggtgccaaataaatattcgtagaattacactgaattgtaaaaaccattcgtttttgtttacaattgccaaaaatctcaaaaggccctgtatttatgtaattctttgaaattattattttattttgatttctcagttattgactggctgggtgtgacttagtacataagtactcaatattataaaaacctcaaataattgacttgattttacacaacatccttcccttttctacaagttaatttttttacaaatcatttgggttatctcctaaataggttatattttattgcttctagaaacaatgtttcaaaatatatgtgcattatcagtaataatttgtataaatatttcccacaacaattttcataattttcaaagactaatttcttgactgaagatattttgctagggaagtgaaactttaaaattttgtagattttaaaaaatattgttgaatggtgtcatgcaaaggatttatatagtgtgctcccactaactgtacagatcaggacacatatttttagacatctaagtctgtagcttaaatggaggttactcttccatcatctagaattgtttacttagtaattgttgtttcttttattattatagacttactatcagttttattttgccaagtatgcaacaggtatatcactagtatatgaaaatgtaaatatcacttgtgtactcaaacaaaagttggtcttaagcttccaccttgagcagccttggaaacctaacctgcctcttttagcataatcacatttttctaaatgatttctttgttcctggaaaagtgatttgtattagtttacatttgtttttggaagattatatttgtatatgtatcatcataaata

SEQ ID NO: 246693 - DNA, 976 bp, Homo Sapiens
ttggcttcctgtacagtttcaatgacaacaactctattcaccctctggtcgaggtccaaagaaaagatacttctgcaatcctggacatgaaatgatatacaaccacttcctgttgtgtcacacttgcctgcagtaacatgctgtaaggtttgtggcataggagcagtgggccataccatataatcaaggtgtcacatcccggtggctggacatgccctcttgggcttggcagatgccagtggatccatacaactgctccgcctggtggaatctgaggtcagtgacttgcacttgttctgtggggcagaagggacctgaatagagagggttggggaggaggctgtgctgatacagacatttttctaaaacgatctctcttcaatggtgagctatatataaacgttctaagataatgtggagtctatttttaagttgtattgcgttctacatccaactccaagaggaagtcacctcatgtgtcaccagcagaagggctgaagtgacaggatgttcattgacctgtcagtggatctgaaagttctctaaggagagcctgggcaagcattcttaggttgatgctggggcccagagtagcagtgagcatcctgtgtgaagatggcatttctcactgattattggaaaagcactagaagagccacgtgctggagccattgtccagccttgccctggaggagcagtgtctggctttgtccctagattggtccactgggaaaactggaaaggccggggaccagcccttgaaagatcatcagcagtgactccacagggcagctccacctcctgatggtgaatgagacgaggcccaggttgcagaaagtggcctcatggcaggcacatcaattcgaggcctggattgctgctttcaattactggcatccagaaattgtgtattcagggggcgacgatggccttctgaggggctgggacaccagggtacccggcaaatttctcttca

SEQ ID NO: 246694 - DNA, 1110 bp, Homo Sapiens
  misc_feature (921)..(973): n is a, c, g, or t
ttggttagcgttttgtcagaagcgtccgcgccgcgaggaggaggccctgctggtttctgtgcgggctcttgtcaggatggtgaagctgttcatcggaaacctgccccgggaggctacagagcaggagattcgctcactcttcgagcagtatgggaaggtgctggaatgtgacatcattaagaattacggctttgtgcacatagaagacaagacggcagctgaggatgccatacgcaacctgcaccattacaagcttcatggggtgaacatcaacgtggaagccagcaagaataagagcaaaacctcaacaaagttgcatgtgggcaacatcagtcccacctgcaccaataaggagcttcgagccaagtttgaggagtatggtccggtcatcgaatgtgacatcgtgaaagattatgccttcgtacacatggagcgggcagaggatgcagtggaggccatcaggggccttgataacacagagtttcaaggcaaacgaatgcacgtgcagttgtccaccagccggcttaggactgcgcccgggatgggagaccagagcggctgctatcggtgcgggaaagaggggcactggtccaaagagtgtccgatagatcgttcaggccgcgtggcagacttgaccgagcaatataatgagcaatacggagcagtgcgtacgccttacaccatgagctatggggattcattgtattacaacaacgcgtacggagcgctcgatgcctactacaagcgctgccgtgctgcccggtcctatgaggcagtggcagctgcagctgcctccgtgtataattacgcagagcagaccctgtcccagctgccacaagtccagaatacagccatggccagtcacctcacctccacctctctcgatccctacgatagacacctgttgccgacctcaggagnnnnnnnnnnnnnnnnnnnnnnnnnnnnnnnnnnnnnnnnnnnnnnnnnnnnntccacttcatattacgggcgggatcggagccccctgcgtcgcgctacagccccagtccccactgttggagagggctacggttacgggcatgagagtgagttgtcccaagcttcagcagccgcgccggattctctgta

SEQ ID NO: 246695 - DNA, 1010 bp, Homo Sapiens
gcggaccccaggcctctgccaggttcggtccgccatcctcgtcccgtcctccgccggcccctgccccgcgcccaggatcctccagctcctttcgcccgcgccctccgttcgctccggacaccatggacaagttttggtggcacgcagcctggggactctgcctcgtgccgctgagcctggcgcagatcgatttgaatataacctgccgctttgcaggtgtattccacgtggagaaaaatggtcgctacagcatctctcggacggaggccgctgacctctgcaaggctttcaatagcaccttgcccacaatggcccagatggagaaagctctgagcatcggatttgagacctgcaggtatgggttcatagaagggcacgtggtgattccccggatccaccccaactccatctgtgcagcaaacaacacaggggtgtacatcctcacatccaacacctcccagtatgacacatattgcttcaatgcttcagctccacctgaagaagattgtacatcagtcacagacctgcccaatgcctttgatggaccaattaccataactattgttaaccgtgatggcacccgctatgtccagaaaggagaatacagaacgaatcctgaagacatctaccccagcaaccctactgatgatgacgtgagcagcggctcctccagtgaaaggagcagcacttcaggaggttacatcttttacaccttttctactgtacaccccaatcccagacgaagacagtccctggatcaccgacagcacagacagaatccctgctaccagagaccaagacacattccaccccagtggggggtcccataccactcatggatctgaatcagatggacactcacatgggagtcaagaaatggagcaaacacaacctctggtcctataagacaccccaaattccagaatggctgatcatcttggcatccctcttggccttggctttgattcttgcagtttgcattgcagtcaacagtcgaagatgtgtgggca

SEQ ID NO: 246696 - DNA, 591 bp, Homo Sapiens
aaaaaagttggctcttggtgtgcccaattaagtttgaagagccactccatccccaaattcaagattagaaagatccctgactgcttctcaagatccagaacattccttgacagagtatattcaccatttagaagtgatccagcaaagattgggaggggtactaccagattctacttcaaagaaatcctgccacccgatgattaaacagtgaataaaatgtcatggctctttcctgcgacaattctatttgaggaaaagatttgtttttcccttttcccaaggaagctcgtgggacagcatgggcactactcttcatgtgcggtgacacttgcccccagatgccttgaattaagtgtcctcacctttatgcatgactgcaaagccagctggagcattttctatggagcctccgtatgttttaggcccttgaccttcgtgaggtgacgggcactcactcccatgagccctggctgtgtgctgttgtgtgcctatcggcagatccatccttcctgcctccaaggaggatacacagagaatggcttcctgttgttttgtttattttcttaacgtggacagatggaaacttcattt

SEQ ID NO: 246697 - DNA, 787 bp, Homo Sapiens
aagtgtgagtctcactatgttcagttttatatgtttacatgttttcttttgagatattagcatatctagttttctaaatccagatcatcctatataaagaaattcaagagagatgcaagctttgttagtgagagagattaagattgcagactgaagagcataaataacagtaatatccccatctcaaattctaactttcaactccagttttgctccctacgtcacaccttggatatgaattcacatgatctacatcagtgcgatggctaggaaatactttttttggtggaaaaaccttagcatccagtgtttatatttgggaggtatttagctgtagttttctttgaagtttgaatgcatggttgacaggtttaccatgtaaaaatgcatgtcttattaaaaacaacgttaagtgtcaactttttcaaatcaaaaagcaatattgagtcatcaggcacttggaatgctctttggaacctacaaatgattagattcatttccacccacagggtgaaacattcatttctatgtttaattaatttctatgtttaattaattaaactatattttaaaggttaaatcatgaacttcgaggatgggttcatagacatgaagtagaaaggaccaagtcaagaagaatgacaaataatcaacagaaaacccgtattcttcaggtatgtttctgtttgtctttgaacaatagttggcgtatttgttggaagcttctcccagctgggttactctcttccctagaaggtttggtaaacttgagctttagcctcttccc

SEQ ID NO: 246698 - DNA, 1038 bp, Homo Sapiens
ttggctttccagctttttgcctgaaagctttgcagaagaaatggcgaaaagtcttttgaagacagcctctctgtctggaaggacaaaattgctacatcaaacaggattgtcactttatagtacatcccatggattttatgaggaagaagtgaaaaaaacacttcagcagtttcctggtggatccattgaccttcagaaggaagacaatggcattggcattcttactctgaacaatccaagtagaatgaatgccttttcaggtgttatgatgctacaacttctggaaaaagtaattgaattggaaaattggacagaggggaaaggcctcattgtccgtggggcaaaaaatactttctcttcaggatctgatctgaatgctgtgaaatcactaggaactccagaggatggaatggccgtatgcatgttcatgcaaaacaccttaacaagatttatgagacttcctttaataagtgttgcgctggttcaaggttgggcattgggtggaggagcagaatttactacagcatgtgatttcaggttaatgactccagagagtaagatcagattcgtccacaaagagatgggcataataccaagctggggtggcaccacccggctagttgaaataatcggaagtagacaagctctcaaagtgttgagtggggcccttaaactggattcaaaaaatgctctaaacataggaatggttgaagaggtcttgcagtcttcagatgaaactaaatctctagaagaggcacaagaatggctaaagctattcatccaagggccaccggaagtaattagagctttgaaaaaatctgtttgttcaggcagagagctatatttggaggaagcattacagaacgaaagagatcttttaggaacagtttggggtgggcctgcaaatttagaggctattgctaagaaaggaaaatttaataaataattggtttttcgtgtggatgtactccaagtaaagctccagtgactaatatgtattaatgttaaatgatcttaaatatgaacttcgcctttaaa

SEQ ID NO: 246699 - DNA, 1083 bp, Homo Sapiens
aagatgaattgagtttttctttaaaaataaaaaccccacaaaaaagccagaacaccctacccaacccagcccagtgtaacaggttagccattaacacagaataaagaaggtcccagccacacacgtcattactcggcagagggtgtccagcctggtcggccgacgtcacagtggatggccctgcgtggctgggacacagacagggagcaggcatggcacctgcgccacgcagagcagcaaggctgagcatgaccactggaaataaataaacatggtgccgacagcatctttaaattagtaagacgttagcacaaaacaaaaaagcacaacgactgaaaatgcacttgcttgttgtggtgggttgtgcttgaaaacacctgaagcccacaagtggaaaccgctggggacgtttgtcagtggagtgtggagaaaaagggacggaaaaatcaagtcttctgagacagtcccctgcggtggccctggtccctgtggaattccagcacagcaggagggggagggggaagcaggcctcagtcagcaccgcgggacacggcccctaccttctgaagtggggtccccaggctggagtggggcacacagcaccaaggatcacagactggaccccccaccaaccttctgcggaggagctcccaccccagctcagacgcccagaagagacctgcgcagtgtgaagacggaccccagcggccccagccatttcactagcagctactttccacaacagacgctggcagcccccatgctcgcccacagccgcagcagccaacaggcaagtgcgtgccgtcgagaggccgccggctccctgtatccttgaggcatgtccacgtcccagagcaggaggttggaacagaacggcatcccgaggacccctagccgaggcgggaaggtaagaggctgacgtcgtgcgtgggccccgccggccccagtgggaagcagtggtgcgtgcctccagggagcacttctcctggacccggggccgtggctgcctacgatgtccactgcctcctggattcacacagcaatgcaccaggcaggcctcgtgccgaattcgccacccaggcc

SEQ ID NO: 246700 - DNA, 2024 bp, Homo Sapiens
ttggggctcgctggccggggctccgcggctcccgtggttgccatggcggcggttgtcgcggcgacgaggtggtggcagctgttgctggtgctcagcgccgcggggatgggggcctcgggcgccccgcagccccccaacatcctgctcctgctcatggacgacatgggatggggtgacctcggggtgtatggagagccctccagagagaccccgaatttggaccggatggctgcagaagggctgcttttcccaaacttctattctgccaaccctctgtgctcgctttcgagggcggcactgctcacaggacggctacccatccgcaatggcttctacaccaccaacgcccatgccagaaacgcctacacaccgcaggagattgtgggcggcatcccagactcggagcagctcctgccggagcttctgaagaaggccggctacgtcagcaagattgtcggcaagtggcatctgggtcacaggccccagttccaccccctgaagcacggatttgatgagtggtttggatcccccaactgccactttggaccttatgacaacaaggccaggcccaacatccctgtgtacagggactgggagatggttggcagatattatgaagaatttcctattaatctgaagacgggggaagccaacctcacccagatctacctgcaggaagccctggacttcattaagagacaggcacggcaccacccctttttcctctactgggctgtcgacgccacgcacgcacccgtctatgcctccaaaacccttcttgggcaccagtcagcgagggcggtatggagacgccgtccgggagattgatgacagcattgggaagatactggagctcctccaagacctgcacgtcgcggacaacaccttcgtcttcttcacgtcggacaacggcgctgccctcatttccgcccccgaacaaggtggcagcaacggccccctttctgtgtgggaagcagaccacgtttgaaggagggatgagggagcctgccctcgcatggtggccagggcacgtcactgcaggccaggtgagccaccagctggggcagcatcatggacctcttcaccaccagccctggcccttgcgggcctgacgccgcccagcgacagggccattgatggcctcaacctcctccccaccctcctgcagggccggctgatggacaggcctatcttctattaccgtggcgacacgctgatggcggccaccctcgggcagcacaaggctcacttctggacctggaccaactcctgggagaacttcagacagggcattgatttctgccctgggcagaacgtttcaggggtcacaactcacaatctggaagaccacacgaagctgcccctgatcttccacctgggacgggacccagggggagaggttccccctcagctttgccagcgccgagtaccaggaggccctcagcaggatcacctcggtcgtccagcagcaccaggaggccttggtccccgcgcagccccagctcaacgtgtgcaactgggcggtcatgaactgggcacctccgggctgtgaaaagttagggaagtgtctgacacctccagaatccattcccaagaagtgcctctggtcccactagcacctgcgcagactcaggccaggcctagaatctccggttggccctgcaagtgcctggaggaaggatggctctggcctcggtcctcccccaaccctgcccaagccagacagacagcacctgcagacgcagggggactgcacaattccacctgcccaggacttgactctggcgtgtgcttggccctcctcctcgcccacggcgcctcagatttcaggaccctcctcctcgcccacggcgcctcagacctcaggaccctgccgtctcacgcctttgtgaaccccaaatatctgagaccagtctcagtttattttgccaaggttaaggatgcacctgtgacagcctcaggaggtcctgacaacaggtgcctgaggtggctggggatacagtttgcctttatacatcttaggg

SEQ ID NO: 246701 - DNA, 1418 bp, Homo Sapiens
agaaccccagccctcaaatacctttaatcagctgcttccaggacatagtcgagaagcactggatatcctggaacaaatttcgacatttagccccatggatcggttaacagcagaagaagcactctcccatccttacatgagcatatattcttttccaatggatgagccaatttcaagccatccttttcatatagaagatgaagttgatgatattttgcttatggatgaaactcacagtcacatttataactgggaaaggtactcatgatatgtcagttttcagagcatgattggtctgtacataacaactttgatattgatgaagttcagcttgatccaagagctctgtccgatgtcactgactgacgaagaagtacaacgttgatccccgaaaactatttggatggagctcgggacaagtatctggaggatcctgcttttgataccaaacttactctactgagccttgttggcaatactcagatcatcatgaaaacaaatattgtgatctggagtgtagccatacttgtaactacaaaacgaggtcatcatcatatttagataacttagtttggagagagagtgaagttaaccattactatgaacccaagcttattatagatctttccaattggaaagaacaaagcaaagaaaaatctgataagaaaggcaaatcaaaatgtgaaaggaatggattggttaaagcccagatagcgctagaggaagcatcacagcaactggctggaaaagaaagggaaaagaatcagggatttgattttgattcctttattgcaggaactattcagcttagttcccagcatgagcctactgatgttgttgataaattaaatgacttgaatagctcagtgtcccaactagaattgaaaagtttgatatcaaagtcagtaagccaagaaaaacaggaaaaaggaatggcaaatctggctcaattagaagccttgtaccagtcttcttgggacagccagtttgtgagtggtggggaggactgttttttcataaatcagttttgtgaggtaaggaaggatgaacaagttgagaaggaaaacacttacactagttacttggacaagttctttagcaggaaagaagatactgaaatgctagaaactgagccagtagaggatgggaagcttggggagagaggacatgaggaaggatttctgacaacagtggggagttcctctttaacaagcagctcgagtccataggcatcccacagtttcacagtccagttgggtcaccacttaagtcaatacaggccacattaacaccttctgctatgaaatcttcccctcaaattcctcatcaacatacagcagcattctgaaacatctgaactaaaacactcagcagacatttatctttgtattttcatgaaatgtgttttgtctttttta

SEQ ID NO: 246702 - DNA, 763 bp, Homo Sapiens
  misc_feature (61)..(107): n is a, c, g, or t
ttggctttgcaggtactgcaaattcaacttcaaatatggtgtaggttttgctagattccannnnnnnnnnnnnnnnnnnnnnnnnnnnnnnnnnnnnnnnnnnnnnngctcagtggcaccctccctagtgtccatgggttagggccatgctggggaaaacgggccggtatttacacacgcgcaaaacacccagagacggcacaaggaggttgaactcatgtttcagttcgcgaacattgactccttacgaaagtcacttcattctaactagatgcgcccacttccggtcattatttcgtttgcatgatgtattgcttcttcacgttttgtttttattgagcacggagtagaattccagggctgccttgacttcttccctgcatgctccctcccagtgactttccttccctttcacatgaggatctgccgttcatgttgctttctcctttgtcctcttggacttgagggcattgtgaaaagctttgctgtgatttaaaaatgccagcaattttaatctagcagtgttgaagctgggaattttttggcgcaatccatgtagcagtgacccaggcttgggagccagaaacaagtgtgacctgggattttatttaacacaactgttgccaaagagttggctttgtttatttggttttggcggggagaggagtggtatttgatgctttctgtggacaatgtaaccctaaacacatcatgtattttaaatgccacctacataaataaaacataagcatattgaaaaaaa

SEQ ID NO: 246703 - DNA, 1486 bp, Homo Sapiens
  misc_feature (734)..(762): n is a, c, g, or t
  misc_feature (982)..(1024): n is a, c, g, or t
ctatcctctttgttttcccccacagactcctcaacaagtggcttctaagacaagactggggttgttttcttactgaaaatcctgtgtttatccagtcttttccttgttcaagtttctgagtttagcttacctaacagcaaaacagaatcctcaaatttctcacagagcaatgaaaagcaaaacagttggtttctctgatcaacatcattttcagtatgaaaacaaaagttatgactcctagacctttgaaatatttacaaattgtactttaaacaacgagatttttcagtgtgcttctaaaacaaagtaaagggatcagaaaatgtggttcaagtcaagtgtgcaaagctctcgaagaaaggtcctgcagcctggacaggagtacaaatattctcttatacaagttaaatgtactcttttcctccacaacatttttgaaatgaaacagcaaatgcatttatactcacaaatcagtcaaaaggcctcttctccttattaagccctttacacacagatgataaaagcaaggttttcctacaatagatgtggccctaccacatattcaagatacaatcatcctaccatcagttaggttatgctttaaatattttgaaatcaggtatccttaactactgatttccttttagaaactatcttgagtgttagattttcataattacaccatttttaacttttagctttttaaacttctagacaaactatatgtttaagcnnnnnnnnnnnnnnnnnnnnnnnnnnnnngtaatatcagagttttaatttcaaccagctggcacaacaatgagagtgtcagactttctgaaagtactcgagaaataatgaataaattcttaatgttttcccctccaccgccctttttttattctccaagattaggaattactacggattaggtttttgaaaataaagtttcctttttggaaaatggtctacattcagaaatgtcttagaacaagcattnnnnnnnnnnnnnnnnnnnnnnnnnnnnnnnnnnnnnnnnnnntaaaattacagtacatcatcgctcctagaaaattcaccatacaagacgatcctttcaaaggttcataaataaaagtcttcttgactcgaaatcgtttcctgcatcgtgatgaaaagtatgcagaaaactaagaagaatcgcaagttttcagtagggtgatgtccaaactacttgatctggtgcggggcggagagactgttttgcttttgatccaagtgaagacaatagaaatgtgctcgtccccacttcctcaagtcctcaaaaccttgtcttgcccgggagctgcccctttcaggcagagttggaggtgctgcggagaagccggtgcccgtgcggctgcgagtgcggctgtgggtgtgggtgcggtatttggtgcggatgggggtccggctgagggttgtgggtcccagtgaggatgacagtgtggatgtgcatgtggatcggatacgggtgaactgctgg

SEQ ID NO: 246704 - DNA, 428 bp, Homo Sapiens
atgcgttgcagtgaaagttgtaaactccaccacagggcctggcgagcacctgcggaacgccctgtggcacacaggaaacacccctgaccaggtaagaagcaaagccctgaaggagctgtgtttcaacctttccttttccttttccttcaggtgcgcaccctgtggcatgaccctcgtcacataggctggaaagatttcaccgcctacagatggcgtctcagccacaggccaaagacgggtttcattaggtacgatcatactgattcactttcacttacagtcacatttctgaaaagcacacccagcaagtccttgattagggttctttacattcttctgctgcatctttagtctcctgctcatctgctattgtattctctggagaactgagtttcagatgttggtgttttgatgaaagccaacttttt

SEQ ID NO: 246705 - DNA, 466 bp, Homo Sapiens
  misc_feature (124)..(124): n is a, c, g, or t
  misc_feature (394)..(408): n is a, c, g, or t
ttggcgagggttccaggctgtgtgtggggcccaagcatgccccacccacccctcctgggcccaggcagcacctggagcccacagagtctgtgtgtagccaggaagccccgcctcaggtagccanccgccggggcactggctgctctgtcttggtccctgttaaccctcccacctcctctcttggactccctccccaccccaacccactctttctttctcctttaacccaatggagactttctgatgcatcattttctttgctgtgccaaagcaggtcagaagagggagaggaggggctgggggtgaggggccaggccatggccaaggggccagctgcccctcatttatcactctgaccttcacagggacagatctgatttatttattttggttnnnnnnnnnnnnnnnggaacagaaacaactttgcattgcattggcttgacccataaactaagttatatccgtg

SEQ ID NO: 246706 - DNA, 871 bp, Homo Sapiens
  misc_feature (626)..(626): n is a, c, g, or t
  misc_feature (668)..(685): n is a, c, g, or t
  misc_feature (816)..(825): n is a, c, g, or t
cgacgaggatgatgtgcgtcttcacggtggtcatgacctacagtatcacctgccccatcatcgtgcccttcgggctcatgtacatgctgctgaagcacctggtagacaggtacaatctctactacgcctacctgccggccaagctggacaagaagatccactcgggggctgtgaaccaggtggtggccgcgcccatcctctgcctcttctggctgctcttcttttccaccatgcgcacggggttcctagctcccacgtctatgttcacatttgtggtcctggtcatcaccatcgtcatctgtctctgccacgtctgctttggacacttcaaatacctcagtgcccacaactacaagattgagcacacggagacagatactgtggaccccagaagcaatggacggccccccactgctgctgctgtccccaaatctgcgaaatacatcgctcaggtgctgcaggactcagaggtggacggggatggggatggggctcctgggagctcaggggatgagcccccatcatcctcatcccaagatgaggagttgctgatgccacccgacgccctcacggacacagacttccagtcttgcgaggacagcctcatagagaatgagattcaccantaagggggagggaaggggcccctggaaggcccacattcctgnnnnnnnnnnnnnnnnnnacttcccaagggacacttaaaacggctaaaaaattttattaaaatctaaaagccccctttcctcccccaagccccctggcttttcctttaaagggaattttaaaaccttgggggggtttttccactggctnnnnnnnnnnatgaaatggacggggaaaggcaactccccccccaacccctccggtg

SEQ ID NO: 246707 - DNA, 1362 bp, Homo Sapiens
  misc_feature (1143)..(1143): n is a, c, g, or t
  misc_feature (1267)..(1267): n is a, c, g, or t
  misc_feature (1302)..(1302): n is a, c, g, or t
  misc_feature (1310)..(1310): n is a, c, g, or t
  misc_feature (1320)..(1320): n is a, c, g, or t
  misc_feature (1336)..(1336): n is a, c, g, or t
gaaaaacatttaaacagctgccattctccatgagttgaactgggaacatacacatggccaattcttttctttagggtgaccaatttttacattcaaagcatacactaataacactgaaaggatactcaatacagaaagaatgcagggggaaaaatagccttgtggtgtttttttgttctctctgctacccatcaaacgctgggcataacatgggaggagcaaaggcagtgaagggcccttcagtattccatttccttacccaagaacagggagctaagggaggaggccattcctgtcattccagttttagaagctccacatcgaagacgagagtggcatgtggtgggatgatgcctgggtgcccagtggcaccataggcataatctggagatatagtcagtttggctctctgacccacactcatctgtgaaaagaacaaggaagacagactcagctggacacatgccccaactgtctctgtaagaaaaagagctgtttacctaggtgttccttggccaggatggtattgactttccagtgactttgcagctgcccaggcatcaccacctccttgtgcaggacttggaggttggcagtcatattccatcacccctgcatctcactccaagaagcccaatggcagttcaaaacccctcctgactctcagaacggtcaggccctcaacctttctacgcaagtcttaatgactaatgctaggcaggtaacattccagatgtctcaccacctagtccccttcagtgatctgtcacttaaaggacatgttaagtgccatctatgctcttcttgaaaaaggaatactcaactttgctttaaaaaaatatatacacaggaagtaatacttgagggtagtctattttttctgtattttttctatttatactcttttacccatataggaaaacttcaaaaaagacaatatgattttctgggctacaaaatagcatttactgaataccatttgtgaaaatattgatatgcctacaacagaaaacatctttggaaggacataccagacatttgctgtgaggagaacagtatggatagtgagtgaccagtaaggagagatttctactttaaaaaatatatttgtgtatattttcagtttcaaattaaatacacaantaaggtataaaatatctactttctggaacagtgaggcagggttctctggcaggtattttccatcctttggactttatctctggcttttggggtctccatggtggtatggttccccggacttttnccaacttccaccaggacgggggggtggaataaggnggggaggnccggggggtnttgaaggggtttaggnccctgggttccctcaggaggtcgggg

SEQ ID NO: 246708 - DNA, 715 bp, Homo Sapiens
gttaaaagaacagatgacacatctggttcccagaggtccagggacttggcgtctctggctctgtcgactgatttcatactctctccaatctccaagcccggagacccaggtccccgcacaaatagtaatgacactcactaacaaaactaactaatactaacatctcagacgctcaggaaatagaaaccgtctgaactatcctgcccgccatcatcctagtcctcatcgccctcccatccttacgcatcctttacataacagacgaggtcaacgatccctcccttaccatcaaatcaattggccaccaatggtactgaacctacgagtacaccgactacggcggactaatcttcaactcctacatacttcccccattattcctagaaccaggcgacctgcgactccttgacgttgacaatcgagtagtactcccgattgaagcccccattcgtataataattacatcacaagacgtcttgcactcatgagctgtccccacattaggcttaaaaacagatgcaattcccggacgtctaaaccaaaccactttcaccgctacacgaccgggggtatactacggtcaatgctctgaaatctgtggagcaaaccacagtttcatgcccatcgtcctagaattaattcccctaaaaatctttgaaataggacccgtatttaccctatagcaccccctctaccccctctagagccaaaaaaa

SEQ ID NO: 246709 - DNA, 651 bp, Homo Sapiens
ctcatttccagaaaggctcatacctggcttgcagggtaagcatctgtcctgttcattccaggtgtccagaatcctctcagagttcattgaagggtgttcacccatcccacccaaggcttggcacactgccagtgtcttagcagggtcttgtgagggctgggggcatccaggcactcagaagggcaaaggaaccaccctacccatttggcctctggagggggcagaagaaagaaagaaacctcatcctatattttacaaagcatgtgaattctggcattagctctcataggagacccatgtgcttccttgctcagtgcaaaactgatgattctacttgctgtagatgaatggttaacacgagctagttaaacagtgccattgttttgccagtgaagcctccaaccctaagccactgggacggtggccagagatgccagcagcctctgtcgcccttagtcatataaccaaaatccagaccttatccacaacccgggggcttggaaaggaaggtattttggagatcacaccctccggttatgttgctccagtaaaatcttgcctggaaagaggcagtcttcttagcatgttgagctgagttcatgggggtttccctgtagccagtcctaacctggccatccatgtcgatgtctg

SEQ ID NO: 246710 - DNA, 907 bp, Homo Sapiens
  misc_feature (640)..(640): n is a, c, g, or t
  misc_feature (718)..(718): n is a, c, g, or t
  misc_feature (721)..(721): n is a, c, g, or t
  misc_feature (724)..(728): n is a, c, g, or t
  misc_feature (730)..(730): n is a, c, g, or t
  misc_feature (734)..(734): n is a, c, g, or t
  misc_feature (738)..(738): n is a, c, g, or t
  misc_feature (740)..(740): n is a, c, g, or t
  misc_feature (782)..(782): n is a, c, g, or t
ttggatttcttttgctgtgcagaagttttttcatttaattaagtcccatgtatttatttttgttgcatttgcttttgggttcttggtcatgaagtctttgcctaagccaatgcctggaaggatttttccggtgttatcttctagaatttttatggtttcaggttatagatttaagtctttggttcatcttgagttgatttttgtataatgtgagagatggggatccagttttattcttctacatgtggcttgccaattatcccagcaccattcattgaatagggtgtcttttccccactttatgtttttgtttgctttgttgaagatcagttggctgtaagtatttgggtttatttctgggttctcttctgctccactggtctaggtacctatttttatagcggtaccatgctgttttggtaactatagccttgtaggatagtttgaagttgagtattgtgtacttccagatttgtactttttgcttagtagttttgctttggctatgtaggctctgttttggttccatatgaattttaggtttttgttttttctagttctgtgtagagaatgtcactgtagttttgagtgtatacatgtgtgggtgctgataattgtgtattttcctttggggtggaanagggaaacaattcaagctgagaaaagtattctcaaagatgcatttttataaattttattaaacaatttttgcaaaaanaanaannnnnanaaanaaananaactttgtcggccgcctcgggccctcgaaaagcttttctagnaccatttcgttttggcgccgccgggcccagtaaggtaaagtgaacactgggtccataagctggttttcccaaagaaaatccctgggccctgaaactaagggcctttggaaattcctcacccaaat

SEQ ID NO: 246711 - DNA, 876 bp, Homo Sapiens
  misc_feature (586)..(586): n is a, c, g, or t
agtggctcctgtaaggcagcaaggtagcgtggccggcgcgcgagctggggttgtgtccctgctgggctgccgttccagctggactgccgccatggaactcagcgccgaatacctccgcgagaagctgcagcgggacctggaggcggagcatgtggaggtggaggacacgaccctcaaccgttgctcctgtagcttccgagtcctggtggtgtcggccaagttcgaggggaaaccgctgcttcagagacacaggttctgtacagagtaatgagatgtgtgacggctgcaaaccaggtgtttttttctgaggctgtgttgacagctgctaatgagtgtgttggtgttttgctcggcagcttggatcctagcatgactatacattgtgacatggtcattacatatggattagaccaactggagaattgccagacttgtggtaccgattatatcatctcagtcttgaatttactcacgctgattgttgaacagataaatacgaaactgccatcatcatttgtagaaaaactgtttataccatcatctaaactactattcttgcgttatcataaagaaaacagaggttgtngcttgtagcccatgctgtttatcaagcaatgctcagcttgaagaatattcctgttttggagactgcctataagttaatattgggagaaatgacttgtgccctaaacaactcctgcacagtctgcaacttcctgaggcctgttctgaaataaaacatgaggctttaagaatcatgtgttcaatgtagacaatgcaaaatttgtagttaaatttgacctcagtgtcctgactacaattggtatgcctatactcgagtctctaattgtaatgactttgtttatccaatatcag

SEQ ID NO: 246712 - DNA, 1252 bp, Homo Sapiens
ctgtatcccggggagacgacagagactgaagattggtcactgtaaagcagttgaaagaatttattcagcaaccagaaaataagctggtactagttaaacaattggataatatcttggctgctgtacatgatgtgcttaatgaaagtagcaaattgcttcaggagttgagacaggagggagcttgctgtcttggccttctttgtgcttctctgagctatgaggctgagaagatcttcaagtggagttttagcaaatttagctcatctgcaaaagatgaagttaaagtcctctacttatgtgccacctacaaggcactagagactgtaggagaaaagaaagccttttcatctgtaatgcagcttgtaatgaccagcctgcagtcaattcttgaaaatgtggatacaccagaattgctttgcaaatgtgttaagtgcattcttttggtggctcgatgttaccctcatattttcagcactaattttagggatacagttgatatattagttggatggcatagagatcatactcagaaaccttcgctcacgcagcaggtatctgggtggttgcagagtttggagccattttgggtagctgatcttgcatttcctacgactcttcttggtcagtttctagaggacatggaagcatatgctgaggacctcagccatgtggcctctggggaatcagtggatgaagacgtccctcctccatcagtgtcatcaccaaagctggctgcgcttctccgggtatttagtactgtgctgaggagcattggggaacgcttcagcccaattcgggtcctccaattactgaggcatacgtaacagttgttctgtacagagtaatgagatgtgtgacggctgcaaaccaggtgtttttttctgaggctgtgttgacagctgctaatgagtgtgttggtgttttgctcggcagcttggatcctagcatgactatacattgtgacatggtcattacatatggattagaccaactggagaattgccagacttgtggtaccgattatatcatctcagtcttgaatttactcacgctgattgttgaacagataaatacgaaactgccatcatcatttgtagaaaaactgtttataccatcatctaaactactatttcttgcgttatcataaagaaaaagaggttgttgctgtagcccatgctgtttatcaagcaatgctcagcttgaagaatattcctgttttggagactgcctataagttatattggagaaatga

SEQ ID NO: 246713 - DNA, 1539 bp, Homo Sapiens
  misc_feature (23)..(23): n is a, c, g, or t
  misc_feature (31)..(31): n is a, c, g, or t
  misc_feature (918)..(997): n is a, c, g, or t
  misc_feature (1115)..(1187): n is a, c, g, or t
aagtgggctggaagggaaggcancccctggnatgacccccatcccccagcacccacgggatctggcgggggcaagaggaggggccgaggcaggcgctggtggaggaagtcggcaggggcctccgggagcctctgggtcacactggctactgtgtacttgtgccaccctgtgtgttcccggagtagctcccgtagtcgtagttcccgtagtatggcggccactggccctggttctgatagtactggttccactgctgggcatactgctgatactggttatagctgggctgagggtaggtctgtgcggtggggggtggcggtggggtatagggggccgggttgtaaccgccgtagctcccatagttgtaggcaggtggtggtggaggtggaggcggtggggctgtgtagccctggctgtaacctccctggttgtagggtggctggctgtaactcggctggaaagtggagggaaaaaagccaaagctctgtgaaatagaggaaatctgcagatgtgaaatgctgggatggaaaaagggcctttttaagtggttggcccacaggggcccttcccttgcctagtggacattgtttgtgggctgagaaggaggagagccagctccatgccatggtagggcaggatgaagggcaagccccagggctgtgatgtggactctaaccccagctctgagacccccagggagcaaggtacacggcacttcttgaaatctcagttttcttttttataaaatgagaatcacaatagaacaagaacaactcctttagcttgccctgggtatccaataagcttgtgtgtataaaccactgggtactcaacaggtggtggtagttgttactggaagatctgctgagaaacagtagtggcaattgactaagtgcttcccaagtacaggttggatcnnnnnnnnnnnnnnnnnnnnnnnnnnnnnnnnnnnnnnnnnnnnnnnnnnnnnnnnnnnnnnnnnnnnnnnnnnnnnnnnagatgaaatttctgggccaaggaaaaaggacttgaccccaggtctgcctagtcccagagctatagtgccacccattcctcacaacaaaccttggaagggacttctactaacacctttnnnnnnnnnnnnnnnnnnnnnnnnnnnnnnnnnnnnnnnnnnnnnnnnnnnnnnnnnnnnnnnnnnnnnnnnnggtttggatctgtgcctgcccaactcttgttctaagaaatattctagttagctgggcctgggaaccatccattggtctcctggcagctgattccaggcccggcatgaggaaagtgcttgggaaatggctgtgcgataactgaaaacctctctggtttacaggagcctgtgcataccagagccagggcactggctttccaagaatgggaactgagcctggagctgctcaggattgaagctctctgtgcagagggcaagtcctcagcaaccttagtgccctggttattatgtccaaaagacaaagaggtcagccagcctgggcaaggggtgactccagtcaagtgctttcccaa

SEQ ID NO: 246714 - DNA, 1159 bp, Homo Sapiens
  misc_feature (911)..(911): n is a, c, g, or t
  misc_feature (914)..(925): n is a, c, g, or t
cctagcactgccttgtactggagagacattaagaaggactggagttggtgtattggtgccagcctattcctgctgctttcattgacagtattcagcattgtgagcgtaacagcctacattgccttggccctgctctctgtgactatcagctttaggatatacaagggtgtgatccaagctatccagaaatcagatgaaggccacccattcagggcatatctggaatctgaagttgctatatctgaggagttggttcagaagtacagtaattctgctcttggtcatgtgaactgcacgataaaggaactcaggcgcctcttcttagttgatgatttagttgattctctgaagtttgcagtgttgatgtgggtatttacctatgttggtgccttgtttaatggtctgacactgctgattttggctctcatttcactcttcagtgttcctgttatttatgaacggcatcaggcaaagatagatcattatctaggacttgcaaataagaatgttaaagatgctatggctaaaatccaagcaaaaatccctggattgaagcgcaaagctgaatgaaaacgcccaaaataattagtaggagttcatctttaaaggggatattcatttgattatacgggggagggtcagggaagaacgaaccttgacgttgcagtgcagtttcacagatcgttgttagatctttatttttagccatgcactgttgtgaggaaaaattacctgtcttgactgccatgtgttcatcatcttaagtattgtaagctgctatgtatggatttaaaccgtaatcatatctttttcctatctgaggcactggtggaataaaaaacctgtatattttactttgttgcagatagtcctgccgcatcttggcaagttgcagagatggtggagctagnggnnnnnnnnnnnngcccttttcagtttgtgcactgtgtatggtccgtgtagattgatgcagattttctgaaatgaaatgtttgtttagacgagatcataccggtaaagcaggaatgacaaagcttgcttttctggtatgttctaggtgtattgtgacttttactgttatattaattgccaatataagtaaatatagattatatatgtatagtgtttcacaagcttagatctttaccggatacgggga

SEQ ID NO: 246715 - DNA, 370 bp, Homo Sapiens
  misc_feature (112)..(126): n is a, c, g, or t
actatctttttcccatctgaggcacctggtggaataaaaacccgtatattttaccttgttgcagataatccttccccactcttggccaattgcacgagattgttgagcttgnnnnnnnnnnnnnnngcccttttcagtttgtgcactgtgtatggtccgtgtagattgatgcagattttctgaaatgaaatgtttgtttagacgagatcataccggtaaagcaggaatgacaaagcttgcttttctggtatgttctaggtgtattgtgacttttactgttatattaattgccaatataagtaaatatagattatatatgtatagtttttcacaagcttagatcttgtgcctcgtgccggggtcctctaga

SEQ ID NO: 246716 - DNA, 1411 bp, Homo Sapiens
ttgggtatgtgccacaaattgtgaactttgtccagaagattgtggacaacggttacggctatgtctccaatgggtctgtctactttgatacagcgaagtttgcttctagcgagaagcactcctatgggaagctggtgcctgaggccgttggagatcagaaagcccttcaagaaggggaaggtgacctgagcatctctgcagaccgcctgagtgagaagcgctctcccaacgactttgccttatggaaggcctctaagcccggagaaccgtcctggccgtgcccttggggaaagggtcgtccgggctggcatatctagtgctcggccatggcaggcaccctcctaggggcttcgatggacattcacggaggtgggttcgacctccggttcccccaccatgacaatgagctggcacagtcggaggcctactttgaaaacgactgctgggtcaggtacttcctgcacacaggccacctgaccattgcaggctgcaaaatgtcagagtcactaaaaaacttcatcaccattaaagatgccttgaaaaagcactcaacacggcagttgcggctggccttcctcatgcactcgtggaaggacaccctggactactccagcaacaccatggagtcagcgcttcaatatgagaagttcttgaatgagtttttcttaaatgtgaaagatatccttcgcgctcctgttgacatcactggtcagtttgagaagtggggagaagaagaagcagaactgaataagaacttttatgacaagaagacagcaattcacaaagccctctgtgacaatgttgacacccgcaccgtcatggaagagatgcgggccttggtcagtcagtgcaacctctatatggcagcccggaaagccgtgaggaagaggcccaaccaggctctgctggagaacatcgccctgtacctcacccatatgctgaagatctttggggccgtagaagaggacagctccctgggattcccggtcggagggcctggaaccagcctcagtctcgaggccacagtcatgccctaccttcaggtgttatcagaattccgagaaggagtgcggaagattgcccgagagcaaaaagtccctgagattctgcagctcagcgatgccctgcgggacaacatcctgcctgagcttggggtgcggtttgaagaccacgaaggactgcccacagtggtgaaactggtagacagaaacaccttattaccagagagagaagaaccagagacgggttgaagaggagaagaggaacgaagcaaagacggaggcggcccggaggaaacaggaacaagaagcagcaaagctggccaagcatgacgattccccccagtgagatgttcttgtcagaaaccgacaatactccaagtttgatgacaatggtctgcccacacattgaa

SEQ ID NO: 246717 - DNA, 1521 bp, Homo Sapiens
ttacaacttggtcggtgcaaagcttacagactgcagccacccggccgagcatttgccaaggtgatgtaaaatattcacgggaacacgccgtctcgatgttctactcacaactggttctctccctagctcccgaggaaaagtaacatgaggcccatgtggctgctttctcttctcagcagaaggtgctgatgttattagtggcttgccaagctatggttggagggggatgtcaggggcacgctgtggggctgacctttctgtctctgactctgttttgtagtacaaaattggacagctgtacatgatcagcaaacacagccatgaacagagtgaccggggagaaggggtggaggtcgtccagaatgagccctttgaggaccctcaccatggcaatgggcagttcaccgagaagcgggtgtatctcaacagcaaactgcctagttgggcatagagctgttgtccccaaaatattttatgtgacagagaaggcttggaactattatccctacacaattacagaatacacatgttcctttctgccgaaattctccattcatatagaaaccaagtatgaggacaacaaagggaagcaatgacaccattttcgacaatgaagccaaagacgtggagagagaagtttgctttattgatattgcctgcgatgaaattccagagcgctactacaaagaatctgaggatcctaagcacttcaagtcagagaagacaggacggggacagttgagggaaggctggagagatagtcatcagcctatcatgtgctcctacaagctggtgactgtgaagtttgaggtctgggggcttcagaccagagtggaacaatttgtacacaaggtggtccgagacattctgctgattggacatagacaggcttttgcatgggttgatgagtggtatgatatgacaatggatgatgttcgggaatacgagaaaaacatgcatgaacaaaccaacataaaagtttgcaatcagcattcctcccctgtggatgacatagagagtcatgcccaaacaagtacatgacaatggatgaagtccgagaatttgaacgagccactcaggaagccaccaacaagaaaatcggcattttcccacctgcaatttcctaatctccagcatccccctgctgccttctttccgtccgcagggcgcccttctagtggctccatccaccccctctctccacagaaggcccccgcaatttccggtccctctccccaaaaatcgggccccgggaacaagatctgccccccgcaaacctcttcacactttccaaaaaccctggggaaaaaaagcccccccctggaaattttcccccgggccatgccactcctttcacaaataaggcccctggtccgggccccaaactcgggaggaaaacctttaatattaaaatatccctccctgggggttttctatgattttcgcgcggtcgcaacctacgtcaacgtcatatcgacaagataaaaatcttcgttctggtccccccctcggactcttttt

SEQ ID NO: 246718 - DNA, 1228 bp, Homo Sapiens
  misc_feature (185)..(317): n is a, c, g, or t
  misc_feature (979)..(996): n is a, c, g, or t
gatagtatcgtgcaggtacttgtgagcaaggggagctgctgtttcctgtccctttatgatgggaaatatctagacaagttcccaaccctctgcactgcaggctgcatggcacggagggtcttgtaacaccagctggggctggccttcttttaggagcttcagtggttctgaaaacttttatttgnnnnnnnnnnnnnnnnnnnnnnnnnnnnnnnnnnnnnnnnnnnnnnnnnnnnnnnnnnnnnnnnnnnnnnnnnnnnnnnnnnnnnnnnnnnnnnnnnnnnnnnnnnnnnnnnnnnnnnnnnnnnnnnnnnnnnttgaaactttttcaggttcttccagggttactgggctattaaatatttctatttcattataagtcagtttttcaaagttatattatcttaattaccttttttatatgtattagtgtagagtagcattttatattttgatatcctccttatgcatagtttttcactttttattcctagtttttcgtttttaataagactttcaagaaatttattttattggccttttgaaaaaagcagctttagataaagtaagcagttctgctttcattttataatttatttctacttttgtttcattaatcttttcctccggcatgccttggattttgttgtgttactctttttctagaggctcgcattgtgtgtctggttcacttatgatcacgcttgcctacttttaagaatggaagaggggaggtggagggtggctgcacagtcgagggtgtgaggcagtcttgctctagccccaccatgccctcagcccgctgtggccacgctggttcctcaattgctggggcgtgcagtgtctgtaagggaggctactgatgccatccgaggaagatgtaaggtttcgtgtgggcagcgagagcctagcaggcatgtggggtgcccagcaaagggtaacagtggacagttgttgcctcattccacagagttttgannnnnnnnnnnnnnnnnnaatggtcactccatcaacatcccccatggccagagcctgagctggtccccagagacacaggcattcagctgacagcctcgccttcacgctgctgctgttctcatgggggacaggcctcaggtggcaatgcacaaatcattagttaagggcagttgtgacagttaccaaggagtgtagtcccccgccccccgcccagtgaaaacagccctaaccaggggtggggacctttggg

SEQ ID NO: 246719 - DNA, 572 bp, Homo Sapiens
  misc_feature (17)..(17): n is a, c, g, or t
  misc_feature (44)..(44): n is a, c, g, or t
  misc_feature (78)..(78): n is a, c, g, or t
  misc_feature (176)..(176): n is a, c, g, or t
  misc_feature (189)..(189): n is a, c, g, or t
  misc_feature (198)..(198): n is a, c, g, or t
  misc_feature (220)..(220): n is a, c, g, or t
  misc_feature (505)..(505): n is a, c, g, or t
  misc_feature (518)..(518): n is a, c, g, or t
  misc_feature (551)..(551): n is a, c, g, or t
aaggacaagtctggcangctgaaccatcaggagttcaaatcttncctgcgctccctgggctatgacctgcccatggtngaggaaggggaacctgaccctgagttcgaggcaatcctggacacggtggatccgaacaggtaaattaattaaggccaggtgctgtgagcctctgcccngggcacccacctnccctccctnctcaggctcttgcttcccccgntcctagagatggccatgtctccttgcaagaatacatggctttcatgatcagccgcgaaacttagaacgtcaagtccagcgaggagattgagagcgccttccgggccctcagctcagagggaaagccttacgtgaccaaggaggagctctaccagaacctgacccgggaacaagccgactactgcgtctcccacatgaagccctacgtgggacgggcaagggcccggagcttccccaccgcgtttcgattacgtgggagtttcacccgttcgctttttcgtggaantgaggccattccnggggttcacccacccttcggtggtttgccctgngtttggctttgttggcatgtt

SEQ ID NO: 246720 - DNA, 1189 bp, Homo Sapiens
ccctgaccaacccagagaagagcagcaccaaagaaacggagagaaaagaaaccaaagccgaggaggagctggatgccgaagtcctggaggtgttccacccgacgcatgagtggcaggcccttcagccagggcaggctgtccctgcaggatcccacgtacggctgaatcttcagactggggaaagagaggcaaaactccaatatgaggacaagttccgaaataatttgaaaggcaaaaggctggatatcaacaccaacacctacacatctcaggatctcaagagtgcactggcaaaattcaaggagggggcagagatggagagttcaaaggaagacaaggcaaggcaggctgaggtaaagcggctcttccgccccattgaggaactgaagaaagactttgatgagctgaatgttgtcattgagactgacatgcagatcatggtacggctgatcaacaagttcaatagttccagctccagtttggaagagaagattgctgcgctctttgatcttgaatattatgtccatcagatggacaatgcgcaggacctgctttcctttggtggtcttcaagtggtgatcaatgggctgaacagcacagagcccctcgtgaaggagtatgctgcgtttgtgctgggcgctgccttttccagcaaccccaaggtccaggtggaggccatcgaagggggagccctgcagaagctgctggtcatcctggccacggagcagccgctcactgcaaagaagaaggtcctgtttgcactgtgctccctgctgcgccacttcccctatgcccagcggcagttcctgaagctcggggggctgcaggtccctgaggaccctggtgcaggagaagggcacggaggtgctcgcccgtggcgcgtggtcacactgctctacggcctggtcacggagaagatgttcgccgaggaggagggctgagctgacccaggagatgtccccagagaagctgcagcagtatcgccaggtacaccctcctgccaggccctgtgggaaacagggctggttgcgagatcaccggccccccctccctgggcgctgcccggagcatgaatgccccgtggagaaaggtggcctgccaaacacctggggccgttccctccctggaccaaccctggcccgggaacccggcttaccggttccggggaccccccccggcgttcggggct

SEQ ID NO: 246721 - DNA, 1015 bp, Homo Sapiens
  misc_feature (895)..(895): n is a, c, g, or t
  misc_feature (971)..(971): n is a, c, g, or t
  misc_feature (997)..(997): n is a, c, g, or t
ttgggcctgtggtgggcgctgcgggtgtttgcaggaggttgcagtactcgctgggctgaggtcgtctcgggtgaggaggtcgcgccggaagtggctctagccgtggcgcctcggcgtagtaaggagcctgcaacagagttttgttgtttagggggcgcggcaccgcaccgctcccttcaccttgcagcagccatggcgaaaggcagagtcgccgaacgatcgcagttgggcgctcaccacacgacccccgtgggggacggggcagcggggacgcggggtctcgcggcgcctggcagcagagaccaccagaaggaaaaatcctgggtagaagctggatcagcaagaatgtcactccttatattggtgtccattttcttatctgcagcttttgttatgtttttggtatataaaaattttcctcagcttagtgaagaagaaagagtgaatatgaaggttcccagagatatggatgatgccaaggctctaggaaaagttttatccaaatacaaggacaccttttatgttcaagtacttgtagcttattttgctacatatattttcttgcaaacatttgctattccaggctctatatttctcagtatactctcagggtttctttatccctttccactagccttatttcttgtttgtttgtgttctggacttggtgcctctttctgttatatgctttcctatttagttgggagaccagttgtatacaaatacctaacagagaaagcagtaaaatggtcacagcaggttgaacgtcatagagaacatctcattaactacattatatttttgagaataacaccatttctgcctaattgggtttattaatatcacatctcctgtgataaaacgtgccattgaaagttttttttattggtacttntctaggtgtcgcacctccttcttttgtagccattaaggcaggaacaacactgtatcaacttacaacagcaggagangctgtttcctgggaactcaatatttnttctgatgatcttggctg

SEQ ID NO: 246722 - DNA, 675 bp, Homo Sapiens
aaaatgtttatttttaatgatatgagaaaaattttcgttaggccacaaaaacactgcacccctgaacattttagaaaaggtatgtcagactgggattaatgacagcatgattttcaatgactgtaaattgccataaggaaatgtactgattgccaatacaccccaccctcattacatcatcaggacttgaagccaagggttaacccagcaagctacaaagagggtgtgtcacactgaaactcaatagttgagtttggctgttgttgcaggaaaatgattataactaaacgctctctgatagtgcagagacttcccagaagacaccccggaattgtactgaagagctattacaatccaaatattgccgtttcataaatgtaataagtaatactaattcacagagtattgtaaatggtggatgacaaaagaaaatctgctctgtggaaagaaagaactgtctctaccagggtcaagagcatgaacgcatcaatagaaagaactcggggaaacatcccatcaacaggactacacacttgtatatacattcttgagaacactgcaatgtgaaaatcacgtttgctatttataaacttgtccttagattaatgtgtctggacagatcatgggagtaagtgattcttctaagaattagatacttgtcactgcgcacactag

SEQ ID NO: 246723 - DNA, 671 bp, Homo Sapiens
ccttttgtgtgtggtttttcacagtaaatatatccttattttattgaacacttaaaaaatctaaattagtacatatctgcaaatttataaatggcaatttcaatggaaaacaaattttataagtaccacaaagcagacaacaaaatgtctctttaaaaaatgaacaaattcaaatgtataaggaaatttcagctcattttttcttcatttcctaggggaacgcaattgttttcatgctaaagatggcgcttccttgaactaggggacacgtcaggcatggaccaccacgtggagagggaggctaacagcatctgcccacatcccagccgcctgtgacagaatcttccatacacatggctcccagatgagcaccaaagggagaccacagcagatacgattctgtggacttgagaaccaaatctatacaaatattttcaactctaagtccccaagagaacattaacatttttgtctatgaaataatttttccagcaatgaatttttttgatattccacgagctgggagggaacaagcataccttgaagacatatgtattggcatcaaatgtcacataaacacacaacagctgggaacacacatgctatgtatgtccaccatgtgatcacaaccacagcacatgtgaagtgctacaattactcctcagagccaa

SEQ ID NO: 246724 - DNA, 501 bp, Homo Sapiens
cagcctgacctgcctggtcaaaggcttctatcccagcgacatcgccgtggagtgggagagcaatgggcagccggagaacaactacaagaccacgcctcccgtgctggactccgacggctccttcttcctctatagcaagctcaccgtggacaagagcaggtggcagcaggggaacgtcttctcatgctccgtgatgcatgaggctctgcacaaccactacacgcagaagagcctctccctgtccccgggtaaatgagtgcgacggccggcactgtatcccggggagatgaaggaggagcagtgttatctgtttttgagtcttctacctcttcaatgacatcgtcaagttcgtcctcaatatcaatcacatcatcatcatgtccatcatgagcttcaacaatagcagttccaagcaccagtaacatacacagcaaccacttcccttccatgatctctagcctcccgagaccgcgggggtgcccgtgcccctccccggataca

SEQ ID NO: 246725 - DNA, 296 bp, Homo Sapiens
  misc_feature (40)..(40): n is a, c, g, or t
  misc_feature (54)..(54): n is a, c, g, or t
  misc_feature (110)..(110): n is a, c, g, or t
  misc_feature (186)..(186): n is a, c, g, or t
  misc_feature (233)..(233): n is a, c, g, or t
  misc_feature (235)..(235): n is a, c, g, or t
  misc_feature (249)..(249): n is a, c, g, or t
  misc_feature (256)..(256): n is a, c, g, or t
  misc_feature (261)..(262): n is a, c, g, or t
actacggtgactacaccatggttttgatatctggggcaanggacaatggtcagncgtctcttcagcctccaccaagggcccatcggtcttccccctggcaccctcctccnaagagcactctgggggcacagcggccctgggctgcctggtcatgactacttccccgaccggtgacgtgtctgaatngcctgaccagcggcgtgcacaccttcccggctgtccctacaggtccntngagggaatcttaanttccctncgcanncgttggttgacccggtggccccttccaagcaggc

SEQ ID NO: 246726 - DNA, 791 bp, Homo Sapiens
aaatgtgataggtaattctacccactttttgtattgtttcctttgttgaattatttttgaaaaccactacaaaattccttattttgagacaaggcaaatctaagcctttgtgcaccatcattgttccccaagcctggccacatttgcagatgatttcaccatttatttgatagtgggcacacttcttttgcagtgctttgtgttctcttacaatgtaaagttccctataagtatcaaagggaaagaatcatcatggagaactgacaaaataccagtgtgtagttcatgggttattggacctggagctcatccgcatgcctgcggtattctacacggcattccttccttccctcctgcttcccaggcttgttattgcaactaaggcaatgcttctcttctacacatacctctcaaggggcatgttgcctttcataacttctttcaagtctgttggttatattaacttgactttagttgttcaaaaatttgagaacaaatgatgagcatacaaaaatacgtgccttggatcaaaatggctttggttcttacacttctcttttcctgccccagtgcagtttatttaaaacatagacatttaaaataggaatataattgagaggctaaaggagaggaagttgtaaaataaatgaatctcatttgcactattttgaaagaacatttacaatgcaacctgcttcaccccttgtggaaaaatgtaaaaatgggtctttctggactcacttgaattctggggtcatattgacgtgatgcattttctcaattacaggata

SEQ ID NO: 246727 - DNA, 1381 bp, Homo Sapiens
aaaaacattcattttattatgggaatctaaaacccatgatcgtgtctgatactgtaagccttttagcgtactcaaatgggtccaacattcaatatggacagccagctagctcacaagaaatgaaatgtaatgcacaaatatgtttgactggtaaaatcccagaggcttggtaataaagtgcagcaaactttccttatattgaataagaactccagtaacctctggatatttttggtaaaaattaaagaaaaggtactgcagtcaagagacaggtaatctttaaacttcaaaagactggctgccagggaccacagtgaaaaattagacctggagccaatgaaaaacactagcttggaaggaatgggtttttccaaaaatgcaaaattagcatttacagatgcttaggatactatgatttgacaggcttacagtgataaaacaacaaagatgaacagttacaatatttatacgtgtagtgtgtaaagaacacaggttttttaattggcagcaagaaattctatgacagcttctgagacaagtaatcctatgccctatatccaccccatgccaatgacgaccagtcaaaatggtaacacagagtaaaaagtgatctactgtatgtgagtcagaaagtacttgaaaagtgacaaaactgtatgttattaaatgacaaaacatatttagaggctttatttaaaaatctctcactgttcattatcaaagttacaagattgcataccaatagacagactgtaaacataggaaattttcgttaaggaaagatgggtttactgtaattcaatcttttacaaaaaattacttgcaagttattgataacagaatttctcttttactttcttaattctcttgaaaattaaaccaatgtttccactttcatgagctaaagttcaaccatggtcaccttaggaaatacccctgtttatttgttaatcagaaatacaaatcgagtggcacatacttccattttcttcttaggccaaaggtttcagcttcattatattttacagaagaccttcagtggtccggtaagtctttcatgtcacagctgaggtttaatgatggcagtggaggaaagcagaggtgatgcaaagtaagaccagcccagttgccttatctgacatggaatctttttcctgtctggcttgcagcagcgaagtgtttctggtcaggttgcctccaccaaacctgattgaagcaaaagggtgacatgctctgataaatcccatttaaggatgattctgttcaggcaaatagttgatccttcaatctgttggctgtgggatgatactaatatgaagaaaattatccgggtagctcagatgttcactcagccactgcaggtggatatttgaatggttta

SEQ ID NO: 246728 - DNA, 326 bp, Homo Sapiens
aagagtataaggtttacacaattattctcataatgtgacgcaatgcctagcaaggccaaaaatgctagagaaaataacgggatctcttccttgtaaacttgtacagtatgtggtgactttttcgatattacagctttttgtacatgatttagagactaattttgtacatgaacgcgccagatagactataaataattctctacatacaagtaggtagatatgtatgtaattgcttttgataatcatttcgtatgcctgggtttatggactgtgcgaaggttggaagtgggtctgctatttctagtatggtgacttatattgctgcg

SEQ ID NO: 246729 - DNA, 1005 bp, Homo Sapiens
ttccattttggcgccttttttaacaaggcccggggtttccacccaggccctgggcccaaagggaggaggaattggggacttttcaggccggggaaaggttttcccaggagggattcccaggaacttggccatccaacccccttggggggcccgggatccatcaaatgctttcttttccaggaggggagaggacccaggtaaactttccgtggattcatgcgaactttggctcatttccgccccattgagggataatgaaaagagcaaagatgtgaatggacccgaaccactcaacagccgaagcaacaaactgcactttgcttttcgactatatgatttggataaagatgaaaagatctcccgtgatgagctgttacaggtgctacgcatgatggtcggagtaaatatctcagatgagcagctgggcagcatcgcagacaggaccattcaggaggctgatcaggatggggacagtgccatatctttcacagaatttgttaaggttttggagaaggtggatgtagaacagaaaatgagcatccgatttcttcactaaaggagaccaaactgttccttgcggtctagtatttaagaactggaacttgaaagtcctccttctaccaactccacctccaccccctcattccccttctcccaaagtactactgctgttgcatgacaaccccaaatatgttctgtcaacacaaacctgcctttggtgtataaacagggcattacagaatggtacaccctatatatttctgttcagtatccattcactagttcttcatttataaatatcatcttccccattctgctgctgaatgccacacatccatccagtctgagaaagtgagagaggcaatcatgccaagaacaagccagcaaagctctttcaccagatgtagactgtagccctgctgccttccctccagcgagtctgccagcatgcttcttcatcctttttatatgttctttcctcgtgccgaattcgccacccaggcc

SEQ ID NO: 246730 - DNA, 1081 bp, Homo Sapiens
ttggccctccttccctcctgtcgccgtctcttctggcgccgctgctcccggaggagctcccggcacggcgatgggttctcgggcctccacgttactgcgggacgaagagctcgaggagatcaagaaggagaccggcttttcccacagtcaaatcactcgcctctacagccggttcaccagcctggacaaaggagagaatgggactctcagccgggaagatttccagaggattccagaacttgccatcaacccactgggggaccggatcatcaattccttctttcccgggggagagggaccaggttaacttcccgtggattcatgggaactttggctcatttccgccccattgaggataatgaaaagagcaaagatggtgaatggacccgaacccctcaccagcggaagcaacaaactgcactttgcttttcgactatatgatttggataaagatgaaaagatctcccgtgatgagctgttacaggtgctacgcatgatggtcggagtaaatatctcagatgagcagctgggcagcatcgcagacaggaccattcaggaggctgatcaggatggggacagtgccatatctttcacagaatttgttaaggttttggagaaggtggatgtagaacagaaaatgagcatccgatttcttcactaaaggagaccaaactgttccttgcggtctagtatttaagaactggaacttgaaagtcctccttctaccaactccacctccaccccctcattccccttctcccaaagtactactgctgttgcatgacaaccccaaatatgttctgtcaacacaaacctgcctttggtgtataaacagggcattacagaatggtacaccctatatatttctgttcagtatccattcactagttcttcatttataaatatcatcttccccattctgctgctgaatgccacacatccatccagtctgagaaagtgagagaggcaatcatgccaagaacaagccagcaaagctctttcaccagatgtagactgtagccctgctgccttccctccagcgagtctgccagcatgcttcttcatcctttttatatgtctt

SEQ ID NO: 246731 - DNA, 261 bp, Homo Sapiens
cctctttgtgagactgctaccaaaatacaccacattctacagtaggtcagctaagctaagctatcgggcccataccccgaaaatgttggttcatacccttcccatactaataaatcccattatctacactacccttatcataacagtaatatccggaaccatactagtaataatcagctcacactgactaccccaactaaacacatattcagaaaaaacaagcccatatgaatgtggatttgaccccataggatcagcacg

SEQ ID NO: 246732 - DNA, 374 bp, Homo Sapiens
caatcgcacacataggatgattgacagcagtattaccatataacacaaccataacaatcttaaacctactaatttacatcacaacaacactagcaatattcatactattaatccacagctcagcaaccacaactttatccctatcccatacatgaaacaagatacccgtcatcacaagcctaataatagtaaccctactctcaataggaggcctgcctccactatcaggatttatgccaaaatgaataattattcaagaaataacaaaaaatgaaagcatcatcatgccaacactcatagcaataacagcactgctaaacctctatttctacatacgactagcctactcatgcccgtaccatgccgtaagcgca

SEQ ID NO: 246733 - DNA, 621 bp, Homo Sapiens
atgtatgtcgcatgacattcaccacggaactggcaaaaagagggcttaacctctgtctttagatttacagtctaatgcttactcagccattttacctatgttcgtaaatcgttgactatactcaacaaaccacaaagacatcggcatcctgtacctactatttggtgcctgagcaggaatagtgggcactgccttgagcctactaattcgcgctgaactaggtcagcccggaaccctacttggcgatgatcaaatcttataatgtaattgttacagctcatgcctttgtaataatcttctttatatgtaatacccattatgattggcggttttggtaactgactcgtaccgctaataatcggagctcccgatatggcctttccacgtataaacaacataagtttctgactacttccaccatccttcctattacttctggcatcctcaatagtagaagccggagcgggtactggatgaactgtatacccacctttagctggaaacttagcccatgcaggggcttcagttgatttaacaattttctccctacaccttgcaggtgtatcatcaatcctaggggctattaatttcattaccacaattattaacatatgccgtacc

SEQ ID NO: 246734 - DNA, 194 bp, Homo Sapiens
cggtacccattctccctatggcccattaacttatgctctacacaccctataacgccttgccaaaccccaaaaacaaagcagagtgtacaaatacaataagcctaacttacactaaacaacatttaacaacacaaaccaccatatcttataaaacacttacttaaatacgtgctacgaaagcaggcacctacccc

SEQ ID NO: 246735 - DNA, 1654 bp, Homo Sapiens
  misc_feature (937)..(937): n is a, c, g, or t
  misc_feature (1051)..(1051): n is a, c, g, or t
tttaccatgttagtaaactgtgctttctattattatcatctatacataaaacctgagcagcaactgtgtgctgaagcaaccgtgtgtgaagtcttcacaaaagaaagaaagacttcaaagccaaagaatgtcctatttgctaatatgagcaaatattttgtttcacaatgtactatcatttattggtgactgcaataatttactgtcagtaaatgccaataactagttagttagaaattgtaaagtaggccaaataagaagcagagagagaaaaaaaatcacctccctaagaaaagggttttcctacagacttgaatgcactctgctttttcagaagagatactgtaccagtcagggaaatagatgacactcactcagaattatctgaggagggttctataaaaagattttttgcaaaagtgcgagcacattatgtagaaaccacaagtccgccaggactagtaaaagccagactcccactgaggccactaatcctgaagggatgaggagggagcagttaccaaaatccagaggtggagaaggctgtgtggaaaagagggtcccctctcggagctaagaccctcaggggaggccagcccgaggcatcccgcaagggaatcagggaagaacacctccacctactacctccctccgacccccagctcccagctctccggctcccccactgacccaacatcccaaagggcaagaaagcttgatgacttggcctttacaagtccagcccctgggcatggagcaaggaagagggatgggcagcgggtctggaggggtgagccgggagagctttaacccagtcatcgtccggcttagtctcagatccaggtgttcattgttcagtagtcgactattcagagtctttcgaggagactgatgaaacagtttatgaatgataaacatggggtacagggttttgganacgggtgcttaagcataaactataaaatgagaagaataaggtactttattcttctgtggcagggaacccaacacttgggtttacgttgcagggcaacacctgtgatgaacaaancacatggtagcgatagcccattcatgaaaaagcccattcatgaaaaactaacagctattcttttcacagggatagtcaaaaaatgagttgaagggaaaaaagtatctccagttggagccaaaacagccatctctagtttgaaaatacactcaacaaatgttggtgattagagataacaggaaccgggcaagggaggaatttttacatacgttcaagcttttcactttgcagccacactctgattttatcaaaattcttatccatccaaccgatgttttcttcaatggtttcaattgtctgttggacacaacggagctgagaaccattttctttcaaagagctgaagaatccttttacctcttcaagccgtgttcttgtggagaattgatttgttgtacccattaccatgtgggctatggaagatgagccaagttcaaacttttgtacaagtttgttccagtttttcctcagaaattgccaggccagtgggtatcctactgggttcctgccaatgagtgtaagaatttgtggaaactcctgagtttttattttatctcccttaaagctttccgatatcccggaactccgggccggtaccagcct

SEQ ID NO: 246736 - DNA, 1570 bp, Homo Sapiens
gtctcgattcctctcttgattaatcatcttcaagctgaaagtatcgttgttcatacttacgcagctcatgctcttgaacggctctttactagtgcgagggcctaacaatgccactctctttacagctgcagaaatcgcaccgtttgttgagattctgctaacaaaccttttcaaagctctcacacttcctggctcttcagaaagatgaatatattatgaaagctatcatgagaagtttttctctcctacaagaagccataatcccctacatccctactctcatcactcagcttacacagaagctattagctgttagtaagaacccaagcaaacctcactttaatcactacatgtttgaagcaatatgtttatccataagaataacttgcaaagctaaccctgctgctgttgtaaattttgaggaggctttgtttttggtgtttactgaaatcttacaaaatgatgtgcaagaatttattccatacgtctttcaagtgatgtctttgcttctggaaacacacaaaaatgacatcccgtcttcctatatggccttatttcctcatctccttcagccagtgctttgggaaagaacaggaaatattcctgctctagtgaggcttcttcaagcattcttagaacgcggttcaaacacaatagcaagtgctgcagctgacaaaattcctgggttactaggtgtctttcagaagctgattgcatccaaagcaaatgaccaccaaggtttttatcttctaaacagtataatagagcacatgcctcctgaatcagttgaccaatataggaaacaaatcttcattctgctattccagagacttcagaattccaaaacaaccaagtttatcaagagttttttagtctttattaatttgtattgcataaaatatggggcactagcactacaagaaatatttgatggtatacaaccaaaaaatgtttggaatggttttggacaaaaattattattcctgaaattcagaaggtatctggcaactgtcgcagaaaaacgatctgtgcggttggcataacccaatttactaacagaatgtcccccaatgatggaaccctgattttaccaaactgtggactccattattacagtctttgattggtctttttgagttacccgaagatgataccattcctgatgaggaacattttattgacatagaagatacaccaggatatcagactgccttctcacagttggcatttgctgggaaaaaagagcatgatcctgtaggtcaaatggtgaataaccccaaaattcacctggcacagtcacttcacaagttgtctaccgcctgtccaggaagggttccatcaatggtgagcaccagcctgaatgcagaagcgctccagtatctccaagggtaccttcaggcagccagtgtgacactgctttaaactgcatttttctaatgggctaaacccagatggtttcctaggaaatcacaggcttctgagcacagctgcattaaaacaaaggaagttttccttttgaacttgtcacgaattccatcttgtaaaggatattaaatgttgctttaacctg

SEQ ID NO: 246737 - DNA, 770 bp, Homo Sapiens
  misc_feature (234)..(234): n is a, c, g, or t
  misc_feature (241)..(241): n is a, c, g, or t
  misc_feature (515)..(515): n is a, c, g, or t
aaatgtcaaaggcatctcggttgtgaaaccttgttctagagcctctccctgctcccgtgctgtgaggatcttaagactcctaaactcacagatgattgttttcaacctatttatctcaccatcctcaatgatcagaagtccaccttgagatggacttactcctagttctgccgcattctgggtttctttccagacccctcttcctcctctcacctgggccagcagggaggttgncagaggncaggaaagatgcccccaaacttaaatggaatgtcatcaggtgaagagctacctcttaccttaactcttattcggtgggatacaggttcctaatagggatagagttaagtgcggagcaacagcaggatgaggataattaagagacctgaattaatttttaatattttaaaaaaggaaagttgctgggaagctggtaaacagaaacagaagattagaggcctcactagaaagagacactggtgttagcagagagatattgaggggctgtaagctanaggtttgaaatctaaagatagagtggaaaagggagtaggcacccccaccagcccctgcttgacatctgctttagttcattccagcaggaaggaggagaagggcagggaggtagggagcttctcaggcaaagccagcttcagctttgataatctcacccacctaccccatttaagggagttccgggtttaaggagttttaaaaacagggtgggcacccaggaccatcatttcagggaggacagggaactcatttcc

SEQ ID NO: 246738 - DNA, 1910 bp, Homo Sapiens
  misc_feature (662)..(693): n is a, c, g, or t
tccaggagatagcaggaagtaacaatgacgtagccagatctactccatcaatgtcaccaatgttatgaatggagtggcctcctactgccgtccctgtgccctagaagcctctgatgtagggctcctcctgcacctcttgtcctgctggttactatattgaccgagattcaggaacctgccactcctgcccccctaacacaatcctgaaagcccaccagccttatggtgtccaggcctgtgtgccctgtggtccagggaccaagaacaacaagatccactctctgtgctacaatgattgcaccttctcacgcaacactccaaccaggactttcaactacaacttctccgctttggcaaacaccgtcactcttgctggagggccaagcttcacttccaaagggttgaaatacttccatcactttaccctcagtctctgtggaaaccagggtaggaaaatgtctgtgtgcaccgacaatgtcactgacctccggattcctgagggtgagtcagggttctccaaatctatcacagcctacgtctgccaggcagtcatcatccccccagaggtgacaggctacaaggccggggtttcctcacagcctgtcagccttgctgatcgacttattggtgagtaactccgctgcctcagccttgtttgagannnnnnnnnnnnnnnnnnnnnnnnnnnnnnnnaagagagtgtgaggttaccagtctgggaggtaaaaggccccacatgaggggcccaacctcttgacctgtgttttctattccactctgtgtgcaaagtgctcccagggactctgacaaacccttgtttcaccctttcataagccactcagggatgtgatgagatgaagtgaggttggatgttgacaggtattggaagaattgaagtggttgccagctaatgctactagtgagaactaattaggagctctaatttggcaggggtgacaacagatatgactctggatggaatcacctccccagctgaacttttccacctggaagtccttgggaataccgggacgtgatcttcttttataggtccaatgatgtgaccccagtccttgcagttctgggagatcaaccacccatccgcgtcaggtgcagtccacagaaaactgtccctggaagtttgctgctgccaggaacgtgctcagatgggacctgtgatggctgcaacttccacttcctgtgggagagcgcggctgcttgcccgctctgctcagtggctgactaccatgctatcgtcagcagctgtgtggctgggatccagaagactacttacgtgtggcgagaacccaagctatgctctggtggcatttctctgcctgagcagagagtcaccatctgcaaaaccatagatttctggctgaaagtgggcatctctgcaggcacctgtactgccatcctgctcaccgtcttgacctgctacttttggaaaaagaatcaaaaactagagtacaagtactccaagctggtgatgaatgctactctcaaggactgtgacctgccagcagctgacagctgcgccatcatggaaggcgaggatgtagaggacgacctcatctttaccagcaagaagtcactctttgggaagatcaaatcatttacctccaagaggactcctgatggatttgactcagtgccgctgaagacatcctcaggaggcccagacatggacctgtgagaggcactgcctgcctcacctgcctcctcaccttgcatagcacctttgcaagcctgcggcgatttgggtgccagcatcctgcaacacccactgctggaaatctcttcattgtggccttatcagatgtttgaatttcagatctttttttatagagtacccaaaccctcctttctgcttgcctcaaacctgccaaatatacccacactttgtttgt

SEQ ID NO: 246739 - DNA, 1050 bp, Homo Sapiens
  misc_feature (481)..(543): n is a, c, g, or t
  misc_feature (662)..(692): n is a, c, g, or t
  misc_feature (707)..(758): n is a, c, g, or t
  misc_feature (909)..(941): n is a, c, g, or t
ccctttaaaaggcaactttgtacaaaaaagttggcctggagtggcgcgtaggcggtgtacgccatctgcttcatcctagcggccatcgccatcctgctgaacctgggggagtgcaccaacgtgctacccatccccttccccagcttcctgtcggggctggccttgctgtctgtcctcctctatgccaccgcccttgttctctggcccctctaccagttcgatgagaagtatggcggccagcctcggcgctcgagagatgtaagctgcagccgcagccatgcctactacgtgtgtgcctgggaccgccgactggctgtggccatcctgacggccatcaacctactggcgtatgtggctgacctggtgcactctgcccacctggtttttgtcaaggtctaagactctcccaagaggctcccgttccctctccaacctctttgttcttcttgcccgagttttctttatggagtacttctttccnnnnnnnnnnnnnnnnnnnnnnnnnnnnnnnnnnnnnnnnnnnnnnnnnnnnnnnnnnnnnnnaattccttgcactctaaccagttcttggatgcatcttcttccttccctttcctcttgctgtttccttcctgtgttgttttgttgcccacatcctgttttcacccctgagctgtttctcnnnnnnnnnnnnnnnnnnnnnnnnnnnnnnnaagacggattctcannnnnnnnnnnnnnnnnnnnnnnnnnnnnnnnnnnnnnnnnnnnnnnnnnnnggaatcggacgaagaaccacaggatgttgaagacaactgtctgaagtatttgtgagggacagcgatgtggccctctgtgttaaaaataacgtgtcctgctttggcagagagaagaaaataaccactgcccgctttcaaggcaagatcgacnnnnnnnnnnnnnnnnnnnnnnnnnnnnnnnnncctggccatgaggacaaaaattactgagtggcccttaaagagggaagtttgttttcagctgttctcttttgcccgtaggtgggagggtggggattgctgcctcctatct

SEQ ID NO: 246740 - DNA, 936 bp, Homo Sapiens
gaaaacttaaatgccttatagataccaagtatctcctcacaatattgaattccatgaaaccacttatctttgcatgcaatgaagcatccacaaaaccatttcagctgaaggatgtagcaaagaacaggaaaggctccgccgtccagtgcttgctcactgcacactcaggtacttccagcagtgaatccaggatttgaacactggggagtaaggggggagcccagcttgcagcccgcagttgttcacagccatgaggtcgccaactagcaggaaggggtaggtcagcatgctcactgcaatctgaaacccagagaggcctgagtgccagtgacccaccccggcccagggagcagggacacaccacgccaacaccctgtaccaagacctgcctccagccattaccagggttggcctcctaggccccgcttgggtccgcaaggcagtgggaaggaaggacagctggcacaacttacccccatcacgaacttggtatagctccggatggccagggcctggctgaactgaggagacagaagggaagagtggtttgccacaggcacctcaggatgcagacttcagcaacacatgccctcaccccaccctgtgtggtgagctcctcacaagcacgctgcacatgcctttcctgtcagccctcacagtcactgcccagagaaggcgtggggggcagaaacggggtaagtggactgaagggagtcccgagaaggagacccggtaagagggatcagctgccgctgcctgtgcaacccaccggactgtgagcctcaagggctgagcctgtgtctgcttgatcaacatccagggcttggcacgcagtcagtgctaagacagacatgcaccctgaaacccaaagacgaatcctggcctgtggggtgaggtgagggcaagtccaggcttatcgccacctccacctcccaa

SEQ ID NO: 246741 - DNA, 1195 bp, Homo Sapiens
  misc_feature (766)..(774): n is a, c, g, or t
ttggcaacatttatgctatatgaaatccattaaaatgtttagcttagaattaagtttttaattgaaccaattatgtttgtaggccctttgaacggacgattaccatgcataaggatagcactggacatgttggttttatctttaaaaatggaaaaataacatccatagtgaaagatagctctgcagccagaaatggtcttctcacggaacataacatctgtgaaatcaatggacagaatgtcattggattgaaggtaaggaacagactttgtgccatgttctgctgcagttttagaaaatgtctgtcttttgactgtatttaggtggcgctgttttcatattgacttaggtgggagatggggaacgtggggcctgaactcttggtctggccagtcaccggaattatttgggctgtcatctagaactacagttcctataacaagtgggctggaataaatgatctcagaagtacctcacactagaattctgtggaaatatgggcaacaaagatttagaatatgaatagtggcccagcatttctcaatccaggaatataaggaaatgaataatagttttggttcatattaatactttatttttatagtttttctcctccacaaattcctaaataagtctgtcttaaggtcaaaaagttttaagcatgacctcctcatttcatagaatttgatttagaatacacagttaataagaggagatggtaatattgtatatggggaaaattatctaatattcagaaaggaaaagnnnnnnnnnggttaaaatattcaactcagtttacttaagcagtttggttactagctgtaaaatagtgtacaattaaacttggtaagaaatactagaaaaaattagaaataccaagacatatattttgtatttctttaccaagactggcatagttttgtatttattaaataaagcctctgtggaattaatttttaatatgtgtttttatcaggactctcaaattgcagacatactgtcaacatctgggactgtagttactattacaatcatgcctgcttttatctttgaacatattattaagcggtaagtaaacaattcctcaacttaatgcatatggtcatgtgacttaatataagcactatactttaattctcagccctttggttcttttacccaagaatgggatactggtgttttattctagaaattt

SEQ ID NO: 246742 - DNA, 708 bp, Homo Sapiens
cggagttcttgagatatcatcggctgaggttgaatcggccccgcagacgctcggcaggtgtcttgatattatcatctgctgagggtggagctgagggtgcaaggggagtgaactgacgctcggaaggttcattgagattatcatccgctgagcggtggaagcggcccctcgcgagacgctcggcaggtgtcttgatatgtatcatctgctgagggtggagctgagggtggaaggggagtgagctgacgctcggaaggtgtcttgagattatcatccgctgagggtggaagcggcccccgcagacgctcggcaggtgtcttgatattatcatctgctgagggtggagctgagggtggaaggggagtgagctgacgctcggaaggtgtcttgagattatcatccgctgagggtggaagcggccccgcgcagacgctcggcaggtgtcttgatattatcatctgctgagggtggagctgagggtggaaggggagtgagctgacgctcggaaggtgtcttgagattatcatccgctgagggtggaagcggcccccgcagacgctcggcaggtgtcttgatattatcatctgctgagggtggagctgagggtggaaggggagtgagctgacgctcggaaggtgtcttgagattatcatccgctgagggtggaagcggcgccccgcagacgctcggcaggtgtcttgatattat

SEQ ID NO: 246743 - DNA, 894 bp, Homo Sapiens
ggggtggctgggccggggaaatggcggcttcaggagagagcgggacttcaggcggcggaggcagcaccgaggaagcatttatgaccttctacagtgagagctggaaattaaaaggaaagagagagaagccaaagagatgcatgaaaggaaacgacaaagggaagaagagattgaagctcaagaaaaagccaaacgggaaagagagtggcagaaaaactttgaggaaagtcgagatggtcgtgtggacagctggcgaaacttccaagccaatacgaaggggaagaaagagaagaaaaatcggaccttcctgagaccaccgaaagtaaaaatggagcaacgtgagtgaccgcccaaggtcacaggcacagaacctttcccctgctatctcccttcctgcttcgaaggactcattctttcctcccacttccaccccaacatagagtagtatttgctttttagtccattttgttttcaatacgatttaatatcgatcagagtaattcttttgtacattgaaatgaggggcttggtttaaaaaaagaccttttcctctccctgcccctagaacaaccagtattagaaggtgccaccattggtgctgccttctcttcccacagcctgtaactcagtgttttgtacttcactgaattgtgatggttagaaacttcgtggatagtttgtggaaatcatccaattaaacatactgcttaaaacatgtgttgctgtgacttcagagacaagcctggaaggggcaccttaggaagccctttcgcttcagttgctcgcttctgggtgtgctcccttcgaaggcccagataagacagggaacacttgtgagcacacagagcagcatctgatgcctgtggtgtttggcatgtgccccctgtctactga

SEQ ID NO: 246744 - DNA, 1575 bp, Homo Sapiens
ttggatgttacctgcactatacctgatggcgtgccaatagatatcacagtgaagttgatggtctgccttgtacatctcaacattcttgaaccacttaatcctctcttgacaacactagtagaacagaatcctgaagatatgggagacctatacctagatgttgctgaagcttttctggatgttggtgaatataattctgcacttcccctcctcagtgctcttgtttgctctgaaagatacaaccttgcagtagtttggcttcgtcatgcagaatgtttaaaggccttaggctatatggagcgagctgctgaaagctattggcaaggtggttgatctggccccactccatttggatgcaaggatttcactttctacccttcagcagcagctgggccagcctgagaaagctctggaagctctggaacccatgtatgatccagatactttagcacaggatgcaaatgctgcacagcaggaactgaagttattgcttcatcgttctactctgttgttttcacaaggcaaaatgtatggttatgtggataccttacttactatgttagccatgcttttaaaggtagcaatgaatcgagcccaagtttgtttgatatccagttccaagtctggagagaggcatctttatcttattaaagtatcgagagacaaaatatcagacagcaatgaccaagagtcagcaaattgtgatgcaaaagcaatatttgctgtgctcacaagcgtcttgacaaaggatgactggtggaatcttctgttgaaggccatatactccttatgtgacctatcccgatttcaagaggctgagttgcttgtagattcctcattggaatattactcattttatgatgacaggcaaaaacgcaaagaactagaatactttggtctgtctgctgcaattctggacaaaaatttcagaaaggcatacaactatatcaggataatggtaatggaaaatgtcaataaaccccagctctggaacattttcaatcaagttaccatgcactcccaagatgtacgacatcatcgcttctgtctccgtttgatgctgaaaaacccagaaaatcatgccctatgtgtcttaaatggacacaatgcattgtatctggtagttttaagcatgcgcttggacagtatgtgcaagcctttcgcactcaccctgacgaacctctctatagcttctgtataggcctaagctttattcatatggcatctcagaagtatgtgttacggagacatgctcttatggtacagggcttttcctttcttaatcgatacctcagtttacgtgggccctgccaggaatcattctacaattggggccgtggccttcatcagtgggagctgattcatcttgcaaatccacctaatatcaagaagggccctgggagctccctccactttgtgggagaggggtatagaacctggacccaggcagacttacgcacgcaggatattgcctaacaactgtctctccatcgaaccagaaccagggtgcaaacggacacggcccaaacgctcacggcaaacaaaggacaagcattgagccaacgaaacggagac

SEQ ID NO: 246745 - DNA, 440 bp, Homo Sapiens
aacaataaaatagctctttgtttattcactttgatttggatcattggaaatattaaacaataaataaaacagagcgggggctgaggaaagcaggatcttgctgaagtcattcgaatgcatcccaaccagtgctcagctgcgtaacgacatggagagaggcaggggggaatagaaagcaaatttaaaaacaccaacacccaaacacacaagactgcacacaagaaaaagtgctcaagaaactttggctttgaagggaattcagtgaagggaagcgattgtgcaggaggaagggaagaaacccatgatcaccctaaggggcggggggctggagggcgaggccctgagacaggctagggttaaagctgacgtcccacagctcaggaggtacaaccgatggcagttttgtactaggaagatgctgagtgatgaggctgggtgat

SEQ ID NO: 246746 - DNA, 835 bp, Homo Sapiens
  misc_feature (550)..(550): n is a, c, g, or t
  misc_feature (597)..(597): n is a, c, g, or t
  misc_feature (603)..(603): n is a, c, g, or t
ggctttttcatagtcctcctggcatcctcaaccctgcggattcccacccctgatcctgatccgttccgtgacgatcctgtcacacagccagaccagtcgacaccttcttcgtttgattctctcgaaatctccagatcagaagaaagagaattcgagtagctcgtctactccgctgagtaatgggcccctgaatggtgatgttgactactttggtcagcaatttgaccagatctctaaccggactggcaaacaggaagctcaggcaggcccatggcctttttcaagttcgcaaacccagccagcagtgagaactcaaaatggggtatctgaaagagaacagaacggcttctctgtcaaatcctccccgaacccttttgtgggaagccctcccaaaggactgtccatacagaatggcgtaaagcaggacttggaaagctctgtccagtcctcaccacatgactccatagccattatcccacctccacaaagtaccaaaccagggaagaggcagaaggactgctaagtcttcagccaatgacttgcttgcatncagacatctttgctcctccccgtcttcagaaccttcaggccaggggngttcancccacaggacaaccttacagccctgcagcccaaccctctggatctcttcaaaacaagtgctcctgccccagtggggcccctggtgggtctaggtggtgtaactgtcacactccctcaggcaggaccatggaacacagcatctttggtcttcaatcagtccccttcaatggctccgggagccatgatgggtggtcaaccttcaggttttagtcagccccggacgcgtgggtcg

SEQ ID NO: 246747 - DNA, 352 bp, Homo Sapiens
aaacacggtgcatactttaaaagccaaatatatttttaaaagatcatgcttataataagtaaattacacattaaggatacatcttaataaagtagatgaatataaaggcacactcgtaaaatttgagcgcagaaaggacagttctttttgttttgtttctaatgtcggaagaaaatagaaagagatatattaaaatcattgttttcaagtgaaggtttctgtcagttgaagtagttagcaatggcttcttttctcccgtgtccaaagcaggctcttcctgcgctgacttctgaggaggtgtacagtcctctgccatgtataggcgatacatcaaggcgacggccactgcaga

SEQ ID NO: 246748 - DNA, 1348 bp, Homo Sapiens
  misc_feature (1141)..(1141): n is a, c, g, or t
  misc_feature (1213)..(1213): n is a, c, g, or t
  misc_feature (1261)..(1261): n is a, c, g, or t
  misc_feature (1278)..(1278): n is a, c, g, or t
  misc_feature (1319)..(1319): n is a, c, g, or t
  misc_feature (1330)..(1330): n is a, c, g, or t
ttggagggtcgcggcagctgcggggagagatgactggggagcgacccagcacggcgctcccggacagacgctgggggccgcggattctgggcttctggggaggctgtagggtttgggtgtttgccgcgatcttcctgctgctgtctctggcagcctcctggtccaaggctgagaacgacttcggtctggtgcagccgctggtgaccatggagcaactgctgtgggtgagcgggagacagatcggctcagtggacaccttccgcatcccgctcatcacagccactccgcggggcactcttctcgcctttgctgaggcgaggaaaatgtcctcatccgatgagggggccaagttcatcgccctgcggaggtccatggaccagggcagcacatggtctcctacagcgttcattgtcaatgatggggatgtccccgatgggctgaaccttggggcagtagtgagcgatgttgagacaggagtagtatttcttttctactccctttgtgctcacaaggccggctgccaggtggcctctaccatgttggtatggagcaaggatgatggtgtttcctggagcacaccccggaatctctccctggatattggcactgaagtgtttgcccctggaccgggctctggtattcagaaacagcgggagccacggaagggccgcctcatcgtgtgtggccatgggacgctggagcgggacggagtcttctgtctcctcagcgatgatcatggtgcctcctggcgctacggaagtggggtcagcggcatcccctacggtcagcccaagcaggaaaatgatttcaatcctgatgaatgccagccctatgagctcccagatggctcagtcgtcatcaatgcccgaaaccagaacaactaccactgccactgccgaattgtccctccgcagctatgatgcctgtgatacactaaaggccccgtgatgtggactttcgaaccctgagctcgtggacccctgtggttagctgccaggagctgttagtccaccagctccgggcattgtcttctttctccaacccagcacaatccagaagttccgattggaacctgaccctgcgatggagcttcagcaatggtacctcatggcggaaagagacagtccagctatggccaggncccagtggctattcatccctgggcaaccctgggagggcagcatgggatggagaggagcaggccccccagctntcacgtcctgtattgagaaaggccggaaccattacaacagagagcatnttccgttggccaaaatncagtgttttatgggggacattttggaggttgtggccattgncacaaggggtnttttggccttcaaggttt

SEQ ID NO: 246749 - DNA, 621 bp, Homo Sapiens
taaatattcattatccttcattaaaaattttaagttacaaacattttgattgatagtcagtcatggtggtgcacctagtccttactctgaaaccaaatatcctgccatctggggactttcaccagccctgtcggttatcttaccgcaacaccaaagaggaggctcagccttccccagttccctgagttcacattgattcaattctacagctcactagacctgcccaagacaggaccaatcaatgtcccgggagggcagagagggtggtggggccacacttagccatatggaaagacagtattctcagatgagggcaggacttttttgtgggagaggacgcctagctttcagtcctaaaggaagtgatttccctggtaaagggaaggtgattttgccaaggctggagtctaaaggaagatggaactgtctttcaggcgtctccagcagaccctctacagacccgtgttcctgaaggcagagtcctgaaggcagaatacccctgtgcagtggcacagctcagagtgtcccatagacactgattttggccacggagatgctctctgttgtaggtttccggcctttctcatacaggacgtagagctggggggcctgctcctctcc

SEQ ID NO: 246750 - DNA, 708 bp, Homo Sapiens
  misc_feature (294)..(351): n is a, c, g, or t
acatggaagccatagaatttattcgaatttgcagaagcatgagataatgtaccacaaaagagtttgattttacaacataaagtatggtaggaagtggtcaatgtacacagtgttgtcagcaaaatcccgaggcagggcagtttcacattttttgaaaggtggtggacgacaactacacttgtccttaaagtaaaataaaagcaggagagacccagcagagaccaacctgatttgcagttagcatcagaatctaaatctagtatcacaactttaagaaactaaaagaaaactatnnnnnnnnnnnnnnnnnnnnnnnnnnnnnnnnnnnnnnnnnnnnnnnnnnnnnnnnnncacaactcttaataatggctccatgttcagtagaagaaaatatttactggagaaaccacagctattcaggtttgataataaaccaaccctcattggtatcattaccgttagtggtcattaaattcattgaagttgaaaggcacaacttaagcaggaaagttatcatcttaaatatatattataacttctcaaatgggaaaataagtcccaaacttaatagtctgtcatcaagaaacacaaaatcatttgccttgttaataaattcacagtctgagtgcatctttccatcctgcttatctcctgaggagataagcaggattgtttgtggaggaggaagacactctgagttcgtccggc

SEQ ID NO: 246751 - DNA, 1293 bp, Homo Sapiens
ttggaatctttcttgggcctagaaaacattggtccgacgaagaaaagttgagactagatcccgttgaaaacttgtcctgaaatctccatcactcctgagttattgtccccaccaccatctagaggttaccgctccccgttcggcgtcgggagctccagggctggccgtgggtgctgcgccctgtctgttgggatcacgaagctgcacctctgggtccgctgttgtatttggaaattagcagcagcattttgatcatttttctcttcaccttccagtctctccatttatgaggtcacagtgagtcccgtctcaaggacacgtgttcaccatgggcttaaacttgatgaaaggagcagggagaagtcgtttataggtcattgggtgatgcttggtcctttgatgccctgggtgtaccaggggacccccgccacttggaaccgggttctgtctacctgtagacacctgagaaaaatcggtgatggaaaagctcacctctaatgattcatctccgtgtctcctattaaaattgctggcggagttcttttctggtggattggaacagcttggtgattgctgagcatctcccgtccctctcttttccagtttgtatttcttatctgggaagattttaccaggacctcaaagacagagatgtcacattctcaccagccactattgaaaacgaacttataaagttctgccgggaagcaagaggcaaagagaatcggttgtgctactatatcggggccacagatgatgcagccaccaaaatcatcaatgaggtatcaaagcctctggcccaccacatccctgtggagaagatctgtgagaagcttaagaagaaggacagccagatatgtgagcttaagtatgacaagcagatcgacctgagcacagtggacctgaagaagctccgagttaaagagctgaagaagattctggatgactggggggagacatgcaaaggctgtgcagaaaagtctgactacatccggaagataaatgaactgatgcctaaatatgcccccaaggcagccagtgcacggaccgatttgtagtctgctcaatctctgttgcacctgagggggaaaaaacagttcaactgcttactcccaaaacagcctttttgtaatttattttttaagtgggctcctgacaatactgtatcagatgtgaagcctggagctttcctgatgatgctggccctacagtacccccatgaggggattcccttccttctgttgctggtgtactctaggacttcaaagtgtgtctgggatttttttattaaag

SEQ ID NO: 246752 - DNA, 1615 bp, Homo Sapiens
  misc_feature (1373)..(1373): n is a, c, g, or t
  misc_feature (1546)..(1560): n is a, c, g, or t
acaaaaagagaactttgtacaaaaaagttggctccggagctgcccttcgccatgtccgcgcacaatcggggcaccgagctcgaccttagctggatctccaaaatacaagtgaatcacccggcagttctgaggcgtgcggaacaaatccaggctcgcagaaccgtgaaaaaggagtggcaggctgcttggctcctgaaagctgttacctttatagatcttactacactttcaggtgatgatacatcttccaacattcaaaggctctgttataaagccaaatacccaatccgggaagatctcttaaaagctttaaatatgcatgataaaggcattactacagccgccgtttgtgtttatcccgcccgggtgtgtgatgctgtaaaagcactcaaggctgcaggctgtaatatccctgtggcatcagtggccgctggatttccagctggacagactcatttgaagacacgattagaagagatcagattggctgtggaagatggagctacagaaatcgacgtggtaattaacagaagcttggtgctgacaggccagtgggaagccctgtatgatgagattcgtcagtttcgcaaggcctgtggggaggctcatcttaaaactatattagcgacaggagaacttggaactcttactaatgtctataaagccagtatgatagcaatgatggcaggatcagattttattaagacctctactggaaaagaaacagtaaatgccaccttcccggtagctatagtaatgctgcgggccattagagatttcttctggaaaactggaaacaagatagggtttaaaccagcaggaggcatccgcagtgcaaaggattcccttgcttggctctctcttgtaaaggaggagcttggagatgagtggctgaagccagaactctttcgaataggtgccagtactctgctctcggacattgagaggcagatttaccatcatgtgactggaagatatgcagcttatcatgatcttccaatgtcttaaatcagtcaccagttccagaaaagttctttacgacaatgtttaaaaattatttttctacgtaattgctaaaattatttaagttaaaaaattgggcagtaggtaactggcattcctctctttaaaatttctaccgaacttaatggaatggaaaaagcaaactcatccacatgtggtactcatttcaggcacatctgaaatgatcttaattactagaagatctgcactattaactttgtgaagagtttctcctaaaaactttaagtaaaatgttaatggtagctttgataacatcaaattctaagggagaaaaaaacaatattaaaccgcccaagcagtgtgccctagccagaggaaaatgcaacatnctcgcaagcgctgctgtaacgacttcaggagtcactgattcagcactaatttcctgctgtgaaaactcatctttcatttttgccgtggataggcgcttttattaattgttgtcctaatgaaatttctgacattgtcatatacaacgatgaatatcattaaaatttttaaaatnnnnnnnnnnnnnnncgacgcgtgggtcgacgatatcccgggcattcccggaccggtaccagcctgcttt

SEQ ID NO: 246753 - DNA, 170 bp, Homo Sapiens
cccccatgcttttgtttggctgctgtaatttttaagtatttgagtttgaacagattagctctggggggagggggtttccacaatgtgagggggaaccaagaaaattttaaatacagtgtattttccagcttcctgtctttacaccaaaataaagtattgacacaagagaa

SEQ ID NO: 246754 - DNA, 992 bp, Homo Sapiens
  misc_feature (491)..(500): n is a, c, g, or t
  misc_feature (619)..(640): n is a, c, g, or t
ctaacgcagttcttaacgtttgggggcgtgttttattccattgccacagcctactctaccttttctaccaccccgcagtatctgcctctgggtccagggtcctttctgctccggcactgggggctctcaagaggtggggctgccacgtgggtggcctctccctggagctgagcccaccctgggggaccctggatcatgcccctttgcccccagcccttggtttgcagggaggccgcctggcgatgcccagcctgaaacagcacccctggcagggctgctcagtggcagctctcactttgtgctcaacaggaagcaatcagaaacacataccagaagccaaatctacgccaacaatttctcagacaacgaaaaagcaaagagcaaaatcaacatgatttggaaaaggaattttaaaccttaaattaaaaaaagaaaacattttcacacagaagaattatctgctttgagaaataaagaaattagaaggtgtnnnnnnnnnntttttcaaaccccaaataatgataaaaatagatgtatcctctgtaaaaatctggactaaactattcagtcattcatggttattcagtattcagagcatgaagtgaaacaccaaagtatnnnnnnnnnnnnnnnnnnnnnnggaatccgagatactgtcgtttgttgccggcctcggcgtggacgccccgaccatgggccacgcagggcgtctgcctcctcccaccttccgcagacctcaggccttcaaagctcttccttggtcctgctcagttttgtggcatgttcttctataaacttgctcaaatgctccagatctctgtctccaccctcaaatttaactgggttctttttgtccccactgggggcgaagtagatggtggggaagccctccaccttatagcggtcgctggggacgtcgttggcagtggcgtccatcttggcgatgaccaggcccttttggcccttgtacttctaggccaggctgttgccaa

SEQ ID NO: 246755 - DNA, 268 bp, Homo Sapiens
ggccggaccagatatcgtggcactaacgtgtctttgtttcacagactgtgtgatcaagtaaatgtgctgtagatctttgcctcattcacagcggaggtgagagttagaatttatacctattgttcatgccacgtttctcctcatggatgcacgcatcccctattatttgtttcttttaataatgtcacgagcaccaatgagcttactacccaacttcaaaactaggactctaacaataacttctgtcatatctcatcctgtaacgccc

SEQ ID NO: 246756 - DNA, 1087 bp, Homo Sapiens
  misc_feature (405)..(433): n is a, c, g, or t
ttggctggattttctctttccttggaaatagtaaagaactactcttcgactgcttttgacctcacagtgaccctcaaatacactggaattcgcaataaatccagtatggtggttatagatgtaaaaatgctatcaggatttactccaaccatgtcatccattgaagagttgctacctgtgtttatgaaaacatcacggcaccgaggaatgttccataaaacagaacgtgacgtagaaaagagtggacattgagttctgcagtggcgctgtcatttgttctaaaatctattctctatccttccctaacaatttcttcaaagcttgaaaacaagggccaagtgatgaagactgaagtcaagaatgaccatgttcttttctacttggaaaatgtaagtttagccatannnnnnnnnnnnnnnnnnnnnnnnnnnnnccttccaaggataattggatgcttcaatttcttatagatatgtatgataggatctgtaaaaggaaaaaataagggacgttaaggattaccagtgttttatcccactgatcatcttctccttgctagttccaaggctatttcatatatgccctggctatgtgactagatagctttccattttagaaacatcatctccctatcaaacacagtctggtcacagagtagatatgtaattattttataatttgactaaactcttacaatgtttgccataattttttgaaattacaattgcgtactgaaggtatgtggtgtgacgttttgatatatatagtgagctgattgttatcatctagcgtgactatatgtgaattagctgactaacacatctctctcttcacacagttacctcttctttttttgtgacaaagcacttaagatctactctcttagggaatattacatatacagtacagcattgttaactgtaggccaccgctgtacccgagatttgtagaatgtattcatcctgcacagctgaagctttctatcctttgaccagcatctccccattttcccatccctgataactgccattctactctctgcatctatgaactcaactttagatttaacttacaggtgagatcctgc

SEQ ID NO: 246757 - DNA, 553 bp, Homo Sapiens
gggcaccttttcaattcgatggactcttggacctcaatctctgccagtagtttgtgagtgactaactgcataattcaagtagccccggggcggaggcaaaaaatttaccaccgatgattccatttgtgtgctgggattaagcaaaagaaacgttatttttcaacctgtggcagagctgaagaagcaaacggattttgagcacaggattcccaaagaacagtggtggctcaagctacggcccctcatgaaaatcctggccaagtacaaggccagctatgacgtgtcggactcaggccagctggaacatgtgcagccctggagtgtctgacccagtcccgcctgcatgtgcctgcagccaccgtggactgtctgtttttgtaacacttaagttattttatcagcactttatgcacgtattattgacattaatacctaatcggcgagtgcccatctgccccaccagccccagtgcgtgctgtctgtggagtgtgtctcatgctttcagatgtgcatatgagcagaattaattaaacatttgcctatgactccaaca

SEQ ID NO: 246758 - DNA, 951 bp, Homo Sapiens
  misc_feature (497)..(510): n is a, c, g, or t
tataaagtgcagattatatagtgtttattctcagatttgaaactatttctaacttaaagtagaaaacatttggaaaagtgtttagaaatatttttgcattttcttaacagtgcttatcaatatacatagttatctactagttccttttatcagcattcaacttatgtagaggtagaagttaaacatacagtgttatttagccaacttcaggtaaactcagtaaattgttagattaaagccattttgcctcaaatacttattagcctgactagtttggggctgtcagggatcatccaaattaaaaatccaactaaaattctgcagctctacacaactatgcagacatagattgaaaactgttgtgttcctccccgccactactgagagatgggaaaaattaaagtaaattaattaatgttttactaattaaatgtttttctccagtttaagggggttgaaaaatagcaataattttaagaaaccatttactgttttgnnnnnnnnnnnnnnaaataacacatatctggattatgtttctaatgtgaatttttggcatttgaaagaaagtaggtatccctattaggctaataggcagtgaagtatcttgatctcttaatcctctgtattgctcaaatattagcattatccatactcatttattaatgtaggggttacttagtgaaaccctgaactaaaataaggcagaggtgtagtattagaagaaagactcatagaaggcagggtaggatgttaggcacgctaaatggaaaatatgtgttataatttttatttcataagtgaacttgataatagaaaatgcatttttttataaataaaaagtaggtgtctgaataaaaatacctctacttgggtagaggtatttaaaattctataattttgttctgctatggctaattcttacagaaccctctttctgccaacttttttgta

SEQ ID NO: 246759 - DNA, 633 bp, Homo Sapiens
atttttgagtctcttcaaggaagatttgcaggcgtggagtgttcatcgtgcaccccctgaaattgtgttgctaaaattctatatttaccatctcctctcatggggagtgcagtaacagtcctctatgaaaatagctggcctaggaggaagtggggagaaagacaattgcaacaacctcacagaagtttcacaatcacaccaaagccctgggtggaaaggcactcacagtatgtatctcggagctggatccaagtggcttctgcaacccttctcttgcctcttagcacccacaccaagttcgtaatagccagtcatgcgtgattcacattacccagcaagcttctaattatcactgtggaattcttggtgtgccacagaaacatttatcagttattataacatcagaaagccaagttcatgggctctcctgatgactgttcactggttctttgtcgactctgtatcccacaggtgcagagaagagcatttcttagaattctagtctaacagagtcccctgggctgacctctccatccctgctggctgggacagattccattgagtcattcctcttaaagaaatgcctagtccagctgccacctgcacccaggttgctctttactccatgataag

SEQ ID NO: 246760 - DNA, 1049 bp, Homo Sapiens
  misc_feature (930)..(930): n is a, c, g, or t
  misc_feature (936)..(936): n is a, c, g, or t
  misc_feature (980)..(980): n is a, c, g, or t
ttggcccccttggaggccgtacctttctctttggactgtgacagtggacacctaacagcctgagccatgtgtggctgtcttatcccccaagggttgtccaggcccgttctgcagggctgttgtgtagactgcagacatccatacctcaccacagaccaaagatgacctcgtgtcagactgtgggctgatgagaggtagagcagcatgcatcgaggcctgagggtgcagggcgccctctcttggcctggaggaattgctcctaactagagtaagtttccacgagggtcccaggcagagctgcagagctggaaccggaggctccacagtccttgcctgctcatggacctccttcagagcacctttctacagactggactgcccagctccgtggggtggcatctggtttctggtgctattctgccaagttatcgagctcctcctcatgtttcaacattccatcttcccgtttctatcctcgactccaaagtaagccttcttagctccaatcagggatgaggggctcaacctcttctgtcctcaaagaggccaaacgcagtgccacagtcggtagccttcacttttagatgtcctattcatgtaaaaaagaaggtgcccccaccaggcttacatcagcaataagcaattctaatgcaacgatggtgtccacattttaccccagtgtgtgcccatgtatgcctttgtgcccgtgtaattattgttagcgcccctttcacttagaggggtgatgataaactgtggccaccttgattacaacccacatttcctgctttggggagcttccaagtaacaggccatttcttacctccctccaggaacagtgggcactgcccaccacctcgtgtctgctcataggatgacgctggagatccccacacttactctaccctcttggcaaattggcattccggnggtggnttttgtttcctttaacacattaaataaatgagtatataggatgngaggggaggggtgagaacaactagctgtagcatgtgtaggctatatactttaccattcgacttctttcc

SEQ ID NO: 246761 - DNA, 625 bp, Homo Sapiens
  misc_feature (430)..(430): n is a, c, g, or t
  misc_feature (591)..(591): n is a, c, g, or t
  misc_feature (595)..(595): n is a, c, g, or t
  misc_feature (607)..(607): n is a, c, g, or t
tgtctatgctcagaatccaagcggagagagtcagcctctggttcagactgcagtaaccactattcctgacaccaactgacctgaagttcactcaggtcacacccacaagcctgagcgccagtggacaccacccaatgttcagctcactggatatcgagtgcgggtgacccccaaggagaagaccggaccaatgaaagaaatcaaccttgctcctgacagctcatccgtggttgtatcaggacttatggtggccaccaaatatgaagtgagtgtctatgctcttaaggacactttgacaagcagaccagctcagggtgttgtcaccactctggagaatgtcagcccaccaagaagggctcgtgtgacagatgctactgagaccaccatcaccattagctggagaaccaagactgagacgatcactggcttncaagttgatgccgttccagccaatggccagactccaatccagagaaccatcaagccagatgtcagaagctacaccatcacaggtttacaaccaggcactgactacaagatctacccgtacaccttgaatgacaatgcttggagctcccctgtggtgatccncgcntccactgccaangatgcaccatccaacctg

SEQ ID NO: 246762 - DNA, 588 bp, Homo Sapiens
atgaatatttcacaccatggtcgcctctgatgcaattgtcagcagcacctgccaacagacatgagtgatgtggccatggcttggggatggtatgtgtataacttgtaagaggagttatgatgcgggtgaggagagctggaagcagagtggggtagactaatagaacacttaccatcaggtattctgggagtctgcatctttagggatggtgttacaggtcataggtactattctctagattgctagttcttgtacaaagcaggactgcattttctgctggattgtatgacatattgaatactggaaactttggaaccactagagatatatatagaaaaaggagaaaacagggaagaggcataagttatagtaaggtaagtaaaggtatcacccccacacctcctacttatccaatctttacactatagactcatcacttttataatcaggaatataatgaataaatattgtattctcttcctttataggcttggcaacttccctagctcagctttgaacatacagttttaaaaagtaagtccatagtagaagtcttattattcaacagaaggtaggtaggggttacac

SEQ ID NO: 246763 - DNA, 663 bp, Homo Sapiens
ttgtacaaaaaagttgggtccggtctactaccaaggttcctgtgcaggaccaggttcttttgctgggctccaagatcttaaagccacggagaagcctctcatcttatggcattgacaaagagaagaccatccaccttaccctgaaagtggtgaagcccagtgatgaggagctgcccttgtttcttgtggagtcaggtgatgaggcaaagaggcacctcctccaggtgcgaaggtccagctcagtggcacaagtgaaagcaatgatcgagactaagacgggtataatccctgagacccagattgtgacttgcaatggaaagagactggaacatgggaagatgatggcagattacggcatcagaaagggcaacttactcttcctggcatcttattttattggagggtgaccaccctggggatggggtgttggcaggggtccaaaagcttatttcttttaatctcttactcaacgaacacatcttctgatgatttccgaaaattaatgagaatgagatgagtagagtaagatttgggtgggatgggtaggatgaagtatattgcccaactctatgtttctttgattctaacacaattaattaagtgacatgatttttactaatgtattactgagactagtaaataaatttttaaggcaaaatagag

SEQ ID NO: 246764 - DNA, 2604 bp, Homo Sapiens
  misc_feature (1561)..(1573): n is a, c, g, or t
ttagaagcgctggtaggccttggagaggcgggttaggaagagtggagactgctgcacggactctggaaccatgaacatatttgatcgaaagatcaactttgatgcgcttttaaaattttctcatataaccccgtcaacgcagcagcacctgaagaaggtctatgcaagttttgccctttgtatgtttgtggcggctgcaggggcctatgtccatatggtcactcatttcattcaggctggcctgctgtctgccttgggctccctgatattgatgatttggctgatggcaacacctcatagccatgaaactgaacagaaaagactgggacttcttgctggatttgcattccttacaggagttggcctgggccctgccctggagttttgtattgctgtcaaccccagcatccttcccactgctttcatgggcacggcaatgatctttacctgcttcaccctcagtgcactctatgccaggcgccgtagctacctctttctgggaggtatcttgatgtcagccctgagcttgttgcttttgtcttccctggggaatgttttctttggatccatttggcttttccaggcaaacctgtatgtgggactggtggtcatgtgtggcttcgtcctttttgatactcaactcattattgaaaaggccgaacatggagatcaagattatatctggcactgcattgatctcttcttagatttcattactgtcttcagaaaactcatgatgatcctggccatgaatgaaaaggataagaagaaagagaagaaatgaagtgaccatccagcctttcccaattagacttcctctccttccacccctcatttcctttttgcacacattacaggtggtgtgttctgtgataatgaaaagcatcagaaaagcttttgtactttgtggtttcctctattttgaattttttgatcaaaaaactgattagcagaatatagtttggagtttggcttcatcttcctggggttcccctcactcccttttttgtcaaccccatctgtagcctcttcctctactcaggcagtctacccgccacgatgagaagtgggaccagcagagggcgccaacttcaggagtccgctttcccaccaggcttcattcacccagtggacctgaactgtttggtagagccacccggcccttccttcctcattgttgtttggtatgcgcacagttcctgtgggactgggccgtgagttttccattggaaagaagttcagtggtcccattgttaactcagcctcaaatctcaactgtcaggccctacaaagaaaatggagagcctcttctggtggatgctttgctccctctgagctgcccatgctggtctggcaaacacacctttctgctttgccttcacaaaagtaatgtgttccctttcccaccccttgcctgaccctcagggagtcagcctgcttccatccatgggtgggaagacttcagcacaaaggacagactaattcttgtcaggcatttttgaaaaggctgattatgtgtatcacggtacagcatcgtagggttcccctaaacttgccctgnnnnnnnnnnnnnagtttgttatccccttactgagcggcctctactaggtggctgtgattaaatgtcccaagcaaggatagggaaggggaatggttgagcctctggagatcattgtaaccaatcctgccagacctgtttggggcagtggggagcaaacctagataaggacctgtttggggcagcagggagcaaaatctcctttaacaaccaagcagttcctcattcacatcaacagagcgaggctgtgataacttaggaggcagcaatcctaatagtccttcagtgcattttagtctgtctccaactggacaccagtaggtagtgtcaagccagagattcggggcagtagataaatgttcattttactgatgcactttagtttttggtctgttacctgttttccagaaatttgtggccttttaggcgggagttaggcgaccaaaccagtgagagccccaatccctgcagttttgtggcttcaagtgtgggtggacagtcctaatggggatctccagctccttcctgtgggctgccacagacagctacccccagaagggtcaatgttgggagtggttgtggctctgagctgctctacagagcttcagtgtgagaggatcgagccattgaaagctcattaccagtaggacataatttttggctctccctattcacaaccagtgcacagtttgacacagtggcctcaggttcacagtgcaccatgtcactgtgctatcctacgaaatcatttgtttctaagttgtgtttattcctggagtgacatgccaccccgaatggctcactttcactgaggatgctgtcctctgatttagctgctgcctccagcctctggcttgagaacttactaaaggcacttccttcctgttaaacccctgttaactctccataaatttggtgattctctgctaggcctaagattttgagttaacatctcttgaagccaaactccaccttctgtgcttttttgcttgggataatggagtttttctttaggaaacagtggccaaggaatggacaaggtattt

SEQ ID NO: 246765 - DNA, 431 bp, Homo Sapiens
  misc_feature (13)..(13): n is a, c, g, or t
  misc_feature (33)..(33): n is a, c, g, or t
  misc_feature (66)..(66): n is a, c, g, or t
  misc_feature (73)..(73): n is a, c, g, or t
  misc_feature (99)..(99): n is a, c, g, or t
  misc_feature (138)..(138): n is a, c, g, or t
  misc_feature (155)..(155): n is a, c, g, or t
  misc_feature (159)..(159): n is a, c, g, or t
  misc_feature (197)..(197): n is a, c, g, or t
  misc_feature (199)..(199): n is a, c, g, or t
  misc_feature (202)..(237): n is a, c, g, or t
ctggggaaccttncctaagggcactccctcccngttaaacccccggttaactccccccataaattngggtgantcccctgctaggccctaagattttgngttaacatcctccttgaagcccaaactcccaccttctgngcttttttgccttgggntaanggagtttttctttagaaacagtgccaagaatgacaagntnttnnnnnnnnnnnnnnnnnnnnnnnnnnnnnnnnnnnncacctacttttaaagaaaatgcctaacagatttttaatatagttatctctaccactttcttttctagtttcttgattttcagctcaggctgcattctaactcatactgtgaagacaaaggtgtttttgattcagaaatatatgaaatctgcatagtcttaatttgtaaaaaataaagaaaattccttaaccttt

SEQ ID NO: 246766 - DNA, 308 bp, Homo Sapiens
aaccagtattctcagagataccatcagagaacaaacactaatgttaattgcccaattgagtgcttcatgcctttagatgtacaggctgacagagaagattcccgagagtaaatcatctttccaatccagaggaacaagcatgtctctctgccaagatccatctaaactggagtgatgttagcagacccagcttagagttcttctttctttcttaagccctttgctctggaggaagttctccagcttcagctcaactcacagcttctccaagcatcaccctgggagtttcctgagggttttctcataaa

SEQ ID NO: 246767 - DNA, 519 bp, Homo Sapiens
  misc_feature (458)..(458): n is a, c, g, or t
tcaagttgtggaatgtaaatcttttattaaaacagttgtctttccacagtagtaaagctttggcacatacagtataaaaaataatcacccaccataattataccaaattcctcttatcaactgcatactaagtgttttcaatacaattttttccgtataaaaatactgggaaaaattgataaataacaggtaagagaaagatatttctaggcaattactaggatcatttggaaaaagtgagtactgtggatatttaaaatatcacagtaacaagatcatgcttgttcctacagtattgcgggccagacacttaagtgaaagcagaagtgtttgggtgactttcctacttaaaattttggtcatatcatttcaaaacatttgcatcttggttggctgcatatgctttcctattgatcccaaaccaaatcttagaatcacttcatttaaaatctggcggnattgaatcttcgaagcagaacagcatgtcgcccgtattcagcaaagcatgcttgtgaatcc

SEQ ID NO: 246768 - DNA, 1580 bp, Homo Sapiens
  misc_feature (74)..(105): n is a, c, g, or t
  misc_feature (249)..(291): n is a, c, g, or t
  misc_feature (1366)..(1424): n is a, c, g, or t
attccaagtgagatgtacaactttacaagtttagtattttatttaaatctacatgcagaaactgaaacatggtnnnnnnnnnnnnnnnnnnnnnnnnnnnnnnnngatgtaatcaagttgtcgcatacagatgtgctctccgactaaatatactacgcctgctggaaagcaaaccgaagacagctgtcctaagaaattaacagattgtcagaaacagactaaggaccctcatttctatttagtgggggnnnnnnnnnnnnnnnnnnnnnnnnnnnnnnnnnnnnnnnnnnngctctacttgtttccatactttgtttagagacagaggctgtaaacccatgaaggtcaacaaaatattctcatccacttcttgttgtccttcgttcgttttctgtgacatgttgacgggcatgttttgttttcaatgatacttacaatgggctcacctagatccctgttcttgggctggtatcacttttctaagccatctgaattaatgctctctgtatagtaaaatagtctccacatttttcttttaccttaataggcaattttatagcactgactctgatggataaaacggatttttctccctcatcccttgttcctcttgaaacaaattcctaaacaaaagccttcctggtggattatctggtatttggatatctttcatcattttgttgtcctgcatgtaagttttactagaagattttcctgcttgctctatacttttctactgtagtcctggagcccccaaatgtatcttcttccaacgtgggatgttcaattcagagacactgaaactcaaatcaagtttaaagctcaagttcatttcccccacaccattaccatcacaacccgtttcttctctggctcaatcatctccttcacgctctccttggtgtaagtgctcagtagtcaagtgaaccatctcatttcttgactgccattctcaagagaagattaaccctcgcgagatttccattacaaaaggccttttccgccttgtctggaagcgtcggcttgttccggtgttggcagaggctggtgtttctgcctcctggccccagcctgtcccaggtttagattcgcaactctctagaccgacctgctgagatgtgtccactgctctcattcaattgctggaggactccactaaccacaacatcagatacaggacctaatgaaatgacacgtgctgctggatcaacgtctcctaaaggaacaaacagggtcacatcagagagcttactgccacaggacaaagtccagcaagatggcgtctgcaacgctacccaccaccaccaagtcactcccccaagttacaggtggccctggcatctgcgggttccacatccatggaccnnnnnnnnnnnnnnnnnnnnnnnnnnnnnnnnnnnnnnnnnnnnnnnnnnnnnnnnnnntacagtatatcaactatctccatagcatctacactttattaggtattacaagtaatgtagagatgatgtaaagtacacgggaggatgtgcatatgttatacataaatgctacaccattttttaccagggacttgaatgtctgtgcattttggccaa

SEQ ID NO: 246769 - DNA, 381 bp, Homo Sapiens
  misc_feature (73)..(73): n is a, c, g, or t
  misc_feature (78)..(78): n is a, c, g, or t
aaggtgaagttgtttttcacttggagaaggcggagggctcttcctgggacggagacctcctcctccggagttnagttnagaatccgggctgctgctttgaggatcttcccaccatacagacagcgagatccaagaagagggctggccgggggaaagtcacctcccagtgtggctgcactggaactgactaaaggctttaccttggatagttgcgtattcctggtgagagccttacatctcccacagtttctgcagagtgactgactccattctggcagcccaggaagtcctgggtgctaaatgtgatggccacatgtagttgttaggggattgttgtgtgtgtcccccaactgcctgggtactttttcctgatccctgggg

SEQ ID NO: 246770 - DNA, 575 bp, Homo Sapiens
tccgttaagaaaaacatgctgtcgtaccacagcctgtgcatctctcggagcaaaacccctgtggacgacccgatgagcctgctatacaacatgaacgactgctactccaagctcaaggatgtggtgcccagcatcccccagaacaagaaggtgagacaagatggaaatcctgcagcacgtcatcgactacatcttggacctgcagatcgccctggactcgcatcccactattgtcagcctgcatcaccagagacccgggcagaatcgagcgatccaggacgccgctgaccaccctcaacacggatatcagcatcctgtccttgcaggtaagacctgctccggggtccccgccccgccgccgcacactcccgcggtcgtctgggctgtcactaggagatccgtagcccagacggtgactttcgtatgagctatttaactttattttcttcagaatctgctgtagattgagctgtgcgtgaaattgctagtaagttctgacatgttaatgcgtctgtctttaaatctgaattgttaccataaacgtgtttaatggaacttgctggtctgtggactac

SEQ ID NO: 246771 - DNA, 446 bp, Homo Sapiens
  misc_feature (20)..(20): n is a, c, g, or t
  misc_feature (424)..(424): n is a, c, g, or t
  misc_feature (435)..(435): n is a, c, g, or t
gagcccggtgccaagcgcantaagctcagcaggcggcaggcggcctgagcttcagggcagccagctccctcccggtctcgccttccctcgcggtcagcatgaaagccttcagtcccgtgagtccgttagaaaaacagcctgtcggaccacagcctgggcatctcccggagcaaaacccctgtggacgacccgatgagcctgctatacaacatgaacgactgctactccaagctcaaggagctggtgcccagcattcccccagaacaagaaggtgagcaagatggaaatcctgcagcacgtcatcgattacatcttgggaccttgcagattcgccctgggacttcggcattcccattatttgttcagccttgcattcaccagaggacccggggcaggaaccaggggttccaggggcgccttttgnacccacctttnaacaagggttt

SEQ ID NO: 246772 - DNA, 1128 bp, Homo Sapiens
catataaaaggcaactttgtacaaaaaagttgggggatgacagctctccccaggaatcctgctgcctgctgagaaacatggtcagcaagtcccgctggaagctcctggccatgttggctctggtcctggtcgtcatggtgtggtattccatctcccgggaagacaggtacatcgagcttttttattttcccatcccagagaagaaggagccgtgcctccagggtgaggcagagagcaaggcctctaagctctttggcaactactcccgggatcagcccatcttcctgcggcttgaggattatttctgggtcaagacgccatctgcttacgagctgccctatgggaccaaggggagtgaggatctgctcctccgggtgctagccatcaccagctcctccatccccaagaacatccagagcctcaggtgccgccgctgtgtggtcgtggggaacgggcaccggctgcggaacagctcactgggagatgccatcaacaagtacgatgtggtcatcagattgaacaatgccccagtggctggctatgagggtgacgtgggctccaagaccaccatgcgtctcttctaccctgaatctgcccacttcgaccccaaagtagaaaacaacccagacacactcctcgtcctggtagctttcaaggcaatggacttccactggattgagaccatcctgagtgataagaagcgggtgcgaaagggtttctggaaacagcctcccctcatctgggatgtcaatcctaaacagattcggattctcaaccccttcttcatggagattgcagctgacaaactgctgagcctgccaatgcaacagccacggaagattaagcagaagcccaccacgggcctgttggccatcacgctggccctccacctctgtgacttggtgcacattgccggctttggcttacccagacgcctacaacaagaagcagacccattcactactatgagcagattcacgctcaagtccatggccggggtccagggccataatgttctcccaagaggcctgggccattaagcggaatgctggcagaatgggagcttatcaagaacctcacgttccttctgacccttggcaagaagctggtagcctgtcggttgcctac

SEQ ID NO: 246773 - DNA, 547 bp, Homo Sapiens
  misc_feature (63)..(87): n is a, c, g, or t
tatactctgttcttagccactggggagtatttttagttccgtttctttttttaaacttagctnnnnnnnnnnnnnnnnnnnnnnnnnttaaatctcagagtttgtgtaattttaatcttttttagccccactgccctttcaattttatatcacatactaataagcaatttaaacaaatcccttaaggttttctagaataattttttagatgataaataagtattcttagcagggcataaaaaatacaaataataacttttttgtttattaatatatgttcaggtgtagacatcacaagtcacaaaaatataaagaaaacggcccaaataaagcccatatttttgcacacatctatttattgtacccaaccttttgatgcataattaaaccacttatccagttgctagtctagactaaaagttcttgcatggtagggaccatgactgcttcatctatttttctaatgactatatgaattggaagcaattagtttatttgtttgagtctccagacctcctcatcatttttcactcaagacagagtataa

SEQ ID NO: 246774 - DNA, 460 bp, Homo Sapiens
gtaccctacctaaatggctgtaggggtatgttcgtcttactccagaagactttgctagagctcagaagtactgcaaatatgctggcagtgctttgcagtatgaagatgtaagcactgctgtccagaatctacaaaaggctctcaagttactgacgacaggcagagaatgaagcctttgtatgacagacccatgtatttttggcatgaggaactaacagtccattactctatcttcagcctatcaggatcacagttttaaggaagacttggttttgttgaatatgacaatgaaatctgtgtgtatcagatttttattgaagcattcatctgcagcctcaaccagttttcattgaccatttactagattcaatcgtctctgagtatatagggctgatgggagcaagatgtcttgctcccatcaggatattggtactcttcatcctgacagatggggtaacga

SEQ ID NO: 246775 - DNA, 1187 bp, Homo Sapiens
ttggcttttttttcagatgaaattctaaatggaatcctaaactataaaaacaatcaagagtagaaagagggggtggggggtgattctgcccttcttggcacccctctttcttccttcagatgaaataaacagagccccagagatttaaagtgacttgtctgataggctggattcgactgcctgccttttgcacttcaccatctgtcagtctctcattcactgaataattatttattgagtgctattattatgtgctgggtatgatgctgtgtactgaggaaataatttagattcaaattagacatggacccttccctccactagttgctgcaaaaggacaaatagttttacttattacttatcacttaagttgtcctctgtaaattttaagattatattcccatagcgtacagaaagtagtgtgctttccctagagcacatatccccactgacacttgacaaagagctaattcagtagtctcctagtctccagaaaagagtacaagtaaatagtaagaaggaaccatgtacaggaaagaacttggattgtcatcccgtaatactcactcatcaaatctctaaatgttgttttatcatgtgtcatcagattgtccataattgctctccaactgaaagagataaggattacaacatgtaattatgttgttactgttaaagaacagtattctaactttccaggggagtagctgatttcatcagactgtgaggtgcatcatgctgaatacaaataagagggcaacttactgattaacacaagaggcatccatctgaaagaaactgggatccataaagaggtcaaaagcttctttttttctaagctctctgtgtgtactgatacccactaagactgctgagcagctggacacaagctcgataactaggggcattatgtgcactgtgatttctgaggtagggcacaacataatgcataatatttacaagtaaaggaataacccgctccttttcatcactatagaaaaccatatccaaaagatgagccaaaacctcagagagtaatgtcaatgcatggacactatatacagaaggagttatgtttgcggtttccattgcaggtgataacatatcttcaacatcagattccaaattggttccatctaccattattttgggagaaggcttaacttcaagatttcgtcgcagccatg

SEQ ID NO: 246776 - DNA, 788 bp, Homo Sapiens
  misc_feature (79)..(79): n is a, c, g, or t
  misc_feature (87)..(87): n is a, c, g, or t
  misc_feature (717)..(725): n is a, c, g, or t
cttcacctcttttctcagctccctgcagcatgggttctgggccttccttgctgctcgccgccctcctgctgcttctacntgcggcgnacggcgccgtgcgctgcgacacacctgccaactgcacctatcttgacctgctgggcacctgggtcttccaggtgggctccagcggttcccagcgcgatgtcaactgctcggttatgggaccacaagaaaaaaaagtagtggtgtaccttcagaagctggatacagcatatgatgaccttggcaattctggccatttcaccatcatttacaaccaaggctttgagattgtgttgaatgactacaagtggtttgccttttttaaggatgtcactgattttatcagtcatttgttcatgcagctgggaactgtggggatttatgatttgccacatctgaggaacaaactggttattaaatagagcatctgttgagggactcttttaaaaccacagccatgaacagacgttggggctaagagacagagcagcctgcgacagtgtggacctacctgtagcagctagcaaaggcctctagcagctacagtcccttctggagtctttatttgcatgcaaaatgcaaaggagtcctggtgacctacctccaaggcagctgccctcctgaacactcccttggaaaacagtaaacatcattttggaatgtgaacaaccagagactacacaggagaaaggnnnnnnnnnttctgaagatgcaaaatcttgggtggcttcaccgttcagttttttaataaaaggaacaatata

SEQ ID NO: 246777 - DNA, 971 bp, Homo Sapiens
  misc_feature (791)..(855): n is a, c, g, or t
aaaagaactaaatgttggaggcctcagggattggtccactgtcctctctacttttctccaaaatgaactccagggctttcaatttcatgtgctaaagactctcaatgtgatgtgccaaggcctctcaaataatgccagtaccattagaattacatgtaagctcctcaagaacagagactttggactttgcctatactcttcaatgtctcatgggagttccagaaatgtctgttagttgaccaacttcaacacaggcctcttttctcaggtctagactcccatctgcacatgtgacatatccaactaattttaccccaaaacaacctctggtgcaccattttccaccaaaaactttgttttctcaatctcaggaaatgatacttccatctattcaggagctcaaaccagaaacctgtaagattccttcccacttcattcttcccctacacccagtgaattcaagacctactgaatctacttccaacatatctttcattatattatcctaatctccactaccataaaccttgtatagtctaagtcaactacaaaggccacctaattggtcttttggtctcacatttgccctacgtttccctctgcctagcatatcctttccccgaactcttcagattttggttacatatcatttcctcaggaatcatatccaatccaatccagatgatgcttccaactccctttagtttctcaaaaacctcttgttcttttctttcactgtatttataaccattgtttgtttgtttttattttttgagagagggtcgggtctnnnnnnnnnnnnnnnnnnnnnnnnnnnnnnnnnnnnnnnnnnnnnnnnnnnnnnnnnnnnnnnnngctcaggcgatcctcccacttcaaactcctgcaccatagtcccagctacttgggactacaggcgtgcgccaccaggctcagctaattttggggtttgttttttgtttctgaaacag

SEQ ID NO: 246778 - DNA, 412 bp, Homo Sapiens
  misc_feature (372)..(372): n is a, c, g, or t
  misc_feature (382)..(382): n is a, c, g, or t
  misc_feature (391)..(391): n is a, c, g, or t
acgagggtgctgagccgggcataggggcgagagaaggcccagaggcgacagtcagagagaagcaactgcgccccggtgaagagaagctcgcccatcaccggctgggagccagctttcagttaagatggcagggcagaactgttgcttgactccaacatctgcctctgggtggtcctacccatcgttatcactcttcgtagacatgatccgccactacgtgtccatcctgctggagagcgacaagaagctcacccaggaacaagtatctgacaggggacgaggcacccacagtccctctcccataagcctgccaagaagattgatgtggcccgtgtaaccttttgacctggtacaagcttgaacccacagganttcattgggnttggcctgnaacatggaaggcgactttttt

SEQ ID NO: 246779 - DNA, 1552 bp, Homo Sapiens
  misc_feature (1081)..(1089): n is a, c, g, or t
ccctaatagacaactttgtacaaaaaagttgggggtgttctgaatgacttctgtgaaaaaaataatttgaatttcctaatgggttcttggtggcccaatcttgaagatctttatgaagcaaatgttccagtgtataggtttattcagcgacctggagatttggtctggataaatgcaggcactgttcattgggttcaggctattggctggtgcaacaacattgcttggaatgttggtccacttacagcctgccagtataaattggcagtggaacggtacgaatggaacaaattgcaaagtgtgaagtcaatagtacccatggttcatctttcctggaatatggcacgaaatatcaaggtctcagatccaaagctttttgaaatgattaagtattgtcttctaagaactctgaagcaatgtcagacattgagggaagctctcattgctgcaggaaaagagattatatggcatgggcggacaaaagaagaaccagctcattactgtagcatttgtgaagtggaggtttttgatctgctttttgtcactaatgagagtaattcacgaaagacctacatagtacattgccaagattgtgcacgaaaaacaagcggaaacttggaaaactttgtggtgctagaacagtacaaaatggaggacctgatgcaagtctatgaccaatttacattagctcctccattaccatccgcctcatcttgatattgttccatggacattaaatgagaccttttctgctattcaggaaataacccagttctgcaccactggtttttgtagctatctcgtaaggctgctggctgaaaactgtgtctatgcaaccttccaagtgcggagtgtcaaccaactggacgggagagagtactgctcctactccaggactctcacaaagctgatgagctgtacttcagaaaaaaataataatttccatgttttgtatatatctgacaaaactggcaacatcttacagactactgacttgaagacaacctcttttatatttctctatttctgggctgatgaatttgttttcatctgtcttttcccccttcagaattttccttgnnnnnnnnntactagcctagctggtcatttctttgtaaggtagttagcaattttaagtctttctttggtcaacttttttttaatgtgaaaagttaggtaagacacttttttactgcttttatgtttttctgtcttgttttgagaccatgatggttacacttttggttcctaaataaaatttaaaaaattaacagccaagtcatataggtaatggattgcacatagactaaggaatgaacttcagatttgtgatttttgtttctaatcttgatgtaaatttacactatttataaatacatatttattgcttgaaaatatttgtgaatggaatgctgttattttttccagatttacctgccattgaaattttaaggagttctgtaatttcaaacactactcctattacattttctatgtgtaaataaaactgcttagcattgtacagaaacttttattaaaattgtttaatgtt

SEQ ID NO: 246780 - DNA, 183 bp, Homo Sapiens
atatccccaaagcagcatttatttacccattgaattccaaaacatttattttagaagtctggcatttcataatcacccatcttgattgacatgggctgacacacatggcgctgtcaggatacacaaggacaatagccaaagagttacaaaaaataaatccatgattcttaaacaattgcaacc

SEQ ID NO: 246781 - DNA, 502 bp, Homo Sapiens
gcagttttgtttttctttatttgtctacattcagcttaattcagatgtactgcctgaatgacccagacataaaaagaaaccccccactctttcccactggtttttaaaataaaatcttcacttataaaactgaaacactaaagcattaaaatacagaaagctcgtttaactcacttcacaaaagcattaacaaatgacgtatcccttctgtaactatttaaagacaaactgagttaccactaacacgaagtgtgaatagacagagggatactgaactgcaaaaactcaaaaactctacccagacaaagttgtaatggcaactaacaaaccattgaagacacggagtcccaaacacggctaaatatgggtcacaggacgggccacagggtgacccgctgcacctcacgacacagcaacgtggacgggatgggggcgggggctggagggccagctgacatgttaactgtgatgcataaaacgcgatcttctgggccattcacgc

SEQ ID NO: 246782 - DNA, 411 bp, Homo Sapiens
gcccccgctcctgtcccgcaccgcctgccgcgtcggctctcggccctgccctgtccgccgtccgccttccggtagggttcgggccttccggatgcggcttgggcgctcttcggggacctccgtggcgcggaagacccgagcctgccggggggctggccgcggcgccgcacctggccgcctcggcgttcgtgactcagccgccccatcccgagtcgcctcaaggggctgcggggaggccgcagcaccttctggaagacttggccttccgctctgacgcagggccgaggtgggcagtcacaggccgacgagccggcggccctgaaggtgagtgaggccctcggcagctgcagccggggtgtctggtacccccccggcgtggtgcttagcccaggactttcagacgcggctcgc

SEQ ID NO: 246783 - DNA, 839 bp, Homo Sapiens
  misc_feature (134)..(134): n is a, c, g, or t
gaaaaaaggcactaaggttgcaaaagcttctcatttcagagagatgccaggatcctaagtgcctgccaaacttaccaattctaaggaataagtggatggatggcattactgattcctacattactgattgattnctcatccgcaaattgttttattaaaaacattctacatcatgtgtggggagataaggaggataaaatgaagagaaagaatattattgaggggaagttcttctgaatacaaaatgtgtttaattttttaaataagtattacattcacagggttcaaactatttgaagtaaagagattatatataaagaatccatccctcaacttacccaggtggtcacttttctttttcttgtgtatctgcccagtattcattcctgctgatatcagtcaataatgaatgatacgtgttttcttcacttttttcattcttgtcaggtaggcagactgtgtaggacttttctggcacttgcccttttcataacaatctatcttggagaactttccctatgagaacatacagagcttcctgtacacagttgcatgtactgcattatgcaaatgctttatattttatgtaacctgtccactgtgggtaggcacttgagttgttttagtcttttgctatcaaacagttctgggatgattaaccctgatttactgcaaaattgaaattgctctgttattctgctggaatggtggtaagtgaactgaaaattccagtcactcttgggctagactcaacgttcttaaaaactatgtggccatcaccaaattagttattttgaaccttaatttcttcacctctaaaatggaggtaatacttacct

SEQ ID NO: 246784 - DNA, 1181 bp, Homo Sapiens
  misc_feature (998)..(998): n is a, c, g, or t
  misc_feature (1161)..(1161): n is a, c, g, or t
  misc_feature (1168)..(1168): n is a, c, g, or t
ttgggaaaaaaggacctgagtaagatgaagagccttctggacattctgacagacccctcgaagcggtgtcccctgaagaccttgcaaaagtgtgagatcgccctggagaaactcaagaatgacatggcggtgcccactcccccaccgcccccggtgccaccgaccaaacagcagtacctatgccagccgctcctggatgccgtcctggccaacatccgctcacctgtcttcaaccattccctgtaccgcacattcgttccagccatgaccgccattcacggcccacccatcacggccccagtggtgtgcacccggaagcgcaggcttgaggatgatgagcggcagagcatccccagtgtgctccagggtgaggtggccaggctggaccccaagttcctggtaaacctggacccttctcactgcagcaacaatggcactgtccacctgatctgcaagctggatgacaaggacctcccaagtgtgccaccactggagctcagtgtgcccgctgactatcctgcccaaagcccgctgtggatagaccggcagtggcagtacgacgccaaccccttcctccagtcggtgcaccgctgcatgacctccaggctgctgcagctcccggacaagcactcggtcaccgccttgctcaacacctgggcccagagcgtccaccaggcctgcctctcagccgcctagccaagactgcagggatggcccgcagcctcatcggggccaaggacacacgcctcctgtcagacacttctaggtgttggcttccttagagagcctggggttaaggttagctttcctgcttttatcttctgccttggggacctgccaaacgaaatcccacacctgtacagaactgggataggcgcagtggagcgggttgcttggggggcgttggccgacttcttagagaaggccctccatgtgacttcctcccaggagccagatgcgatcctcaggctgctctcaccgtggcctgtccacgttcncaggtccatctcagcagcgtgagggtgcactcagggtgttgttagagcgtctcgtgtgtgctagacgcacccctactcgttcctatagaacacagaggacataggaaacccttaaaacacacatgggattctctggtcacagttttggggtttcaggctatgntgctttnggcaggtggagca

SEQ ID NO: 246785 - DNA, 868 bp, Homo Sapiens
  misc_feature (73)..(73): n is a, c, g, or t
  misc_feature (81)..(81): n is a, c, g, or t
cggacgcgtgggtcgacccacgcgtccgctcatggatgaggatgtggaagaagaggatgactcagagatctcnagggtacnagcgtggagaatgctttcttcgatgagaaggaagacacctgtgctgccgtgggggagatctctgtgaacaccagtgtggccttccttccatacatggaaagtgtctttgaagaagtatttaaactgctggagtgccctcacctgaatgtgcggaaggcagcccatgaggctctgggtcagttttgctgtgcactgcacaaggcctgtcaaagctgcccctcggaacccaacactgctgctttgcaggctgccctggcccgagtcgtgccatcctacatgcaggcagtgaacagggagcgggaacgccaggtggtgatggccgtgctggaggccctgacaggggtgctccgcagctgtgggaccctcacactgaagccccctgggcgcctcgctgagctctgtggcgtgctcaagggctgtgctgcagaggaagacagcctgtcaggatactgacgaggaggaggaagaggaagatgatgatcaggctgaatacgacgccatgttgctggagcacgctggagaggccatccctgccctggcagccgcggctgggggagactcctttgccccattctttgccggtttcctgccattattggtgtgcaagacaaaacagggctgcacagtggcagagaagtcctttgcagtggggaccttggcagagactattcagggcctgggtgctgcctcagcccagtttgtgtctcggctgctccctgtgctgttgagcaccgcccaagaggcagaccccgaggtgcgaagcaatgccatcttcgggatgggcgtg

SEQ ID NO: 246786 - DNA, 936 bp, Homo Sapiens
tgggcggtttcagtcctgatgtataatttgaccctagttagaatggttatctgaggaagtggcctgtacgatttctgcttttttaaatgtgtggctccctttcttcattgattaacgtatgattatttttataaatgttccatggcagtgggaagggattctctgtcacattccacatctggatcagttcctccccattttgttggtcaaatccgatctgccatatcctgtgtaatgacaagtgagttgcattctcaccgtcactcctggggtctctccgcttcccctgagctggctcagcagtctgctccatgtgttttgatgcagggtgacccattggtattcccgacactaacgcccccgtctgtggactgcttgctgcttgggcttcactgtgtctggtgttgacagtgcagacctaaaggtgtgcacacatgtgcacacacactccgctgtcttcttgtttgcactggacttaaatatctatgagggttattttcaactgctgaatttggaatgatttttatatcttttctgctttctgcccatgtacatgtgtttattttacactgttgtgattggtagttactatgtggggacacaattacttgggctgaaataatccacctgttgtggttggggtcctctggggcattccagggtgagaggttgtcactgccacctgggccatgtgggccggcaccagcattttgtggttacgaattctacagtcacaaatatctttgggcaaatccccttctatacctcaaggcagcttttggtttgcaaccccactggccagagggaagggccagtcacttggctctctcactgccctgcgccccagatggttctagggctgctgttttcccttggcctgccaacaccactgtttgtgacttctgctcattggttccgatggtacgagctgatgat

SEQ ID NO: 246787 - DNA, 446 bp, Homo Sapiens
  misc_feature (18)..(18): n is a, c, g, or t
  misc_feature (27)..(27): n is a, c, g, or t
  misc_feature (33)..(33): n is a, c, g, or t
  misc_feature (41)..(41): n is a, c, g, or t
  misc_feature (112)..(112): n is a, c, g, or t
ctgccactgggaattttnacccctaancgcttnaaccgaancctcctcaaagcaacatggccaaaagtttgaattttggcaacccccgttccatttcctgaacacgttttgnctgccctccctaccctttcctaagcgtccatgccaaattccgagaatggagaaggacgcctgcccggtcccctgagcggtgtggagagggcggaaggtggactcccagcgcagcttgaggggctgaggacggaggctgcagcatctgtgtcgttcctactgagcacgcttctctgcctcgctcctgactcagcactttgttcactggctcagcagttatgtttacacatcatttttatgttcctgctttgtaattcatgtttgagatgggtggccactgtacagatatttattacgctttccagactttctgaatagatttttttgaataaaca

SEQ ID NO: 246788 - DNA, 393 bp, Homo Sapiens
  misc_feature (62)..(62): n is a, c, g, or t
taacgcctttacctgatcctcctcaaagcacatggcaaagtttgatttggcaccccgttcanttctgacacgttttgctgccctcctacctttctaagcgtcatgcaaattccgagaatggagaaggacgctgccggtccctgagcggtgtggagagggcggaaggtggactcccagcgcagcttgaggggctgaggacggaggctgcagcatctgtgtcgttctactgagcacgcttctctgcctcgctcctgactcagcactttgttcactggctcagcagttatgtttacacatcatttttatgttcctgctttgtaattcatgtttgagatgggtggccactgtacagatatttattacgctttccagactttctgaatagattttttt

SEQ ID NO: 246789 - DNA, 451 bp, Homo Sapiens
cggccgggggcgccgaggcggtgacctcaggccagctcctcgtgaagcactacggcctcacagaggctggtaacatcagccccagtcaggaccccaagggggagctgcagggccagaatgtgctgaccgtccggtactcgctggagctgactgctgcccgctttggcttggatgtggaggccgtgcggaccttgctcaatacagggctggagaagctcttccaggcccggaagcatcggcccaagccccacctggacagcaagatgctggctgcctggaatggcttgatggtgtcaggctatgttgtgactggggctgtcctgggccaagataggctgatcaactatgccaccaatggtgccaagttccttattcggcacatgtttgatgtggccagtgccgcctgatgcggacctgctacaccggcctggggggactgtggtaccgctgg

SEQ ID NO: 246790 - DNA, 604 bp, Homo Sapiens
  misc_feature (294)..(294): n is a, c, g, or t
tgtctttccggcagcggctaaatgctcactctcccttgattagcgttattattctcagttgacaaaagaggcttaaggagcttgagtaacccgcccaaggtcacgcgcaagggctgggaaccccgccatgtctggctttggagcccaagatcttagggatcacccatggctccagggaggtgttggggcctaaggtgatagggtggacatgcctggagggtcctggccagcttcttaccactacttgtctctcctggctccaggcttgatggtgtcaggctatgcttgtgactnggggctgtcctggggccaagacaggctgatcaactatgccaccaatggtgccaagttcctgaagcggcacatgtttgatgtggccagtggccgcctgatgcggacctgctacaccggccctggggggactgtggagcacaggttgggggctgggtagaccgggagggcccgtctccccaacgcgtccccagcctacctctgccctacttctcccctccatgtggactccagtcctggctctgccaggtgcttgctgtgagtttgtagcttccctgggcccatttactcatctggtaagagggctaggagg

SEQ ID NO: 246791 - DNA, 1170 bp, Homo Sapiens
gcgcgactggagtctggggctgcggcttcccagaggcgcgagtcgcttttccaggagccgaggcccaaacggggccgggcctgaagggtcccccgccagcccgcggccgcgccatcaatcgccgccgcctcgtcccgcttctcggctgaggcgccgcgcggccaggcagcgggtccaggcctcagccgcgcgcccaggggcctccggggccctcccgggtcagcatgcccggggtgaaactgaccacccaggcctactgcaagatggtgctgcacggcgccaagtacccgcactgcgccgtcaacgggctcctggtggccgagaagcagaagccgcgtaaggagcacctccccctgggcggccccggcgcccaccacaccctcttcgtggactgcatccccctcttccacggcaccctggccctcgcccccatgctggaggtggctctcaccctgattgattcatggtgcaaagatcatagctacgtgattgctggttattatcaagctaatgagcgagtaaaggatgccagtccaaaccaggttgcagagaaggtggcctccagaatcgccgagggcttcagcgacactgcgctcatcatggtagacaacaccaagtttacgatggactgcgtagcgcctacgatccacgtgtacgagcaccatgagaacagatggcggtgcagagacccacaccatgactactgtgaagactggccagaggcacagaggatctcagcctcgctcctggacagccggtcctacgagacgctcgtggatttcgataaccacctggatgacattcggaatgactggacaaacccagagatcaataaagctgtcctacacttgtgctaggcaggcaccgctgtgactgggctccgggcctttccactacgttgaagaagaaaacctatttttaaatgtaaataaaatatctggtagcctgtgtggaaagctgaccgttttaagaagtggcatgtgccttgaaagggggcagaatgttcagtcggtcgtgtttttaacacagagtctctagaagaggtgcagacatcccgtctgactgtccctgtggactctctcagttgtatgttgctataatcctccaaatcaaagctctttctgcttgtgcaagattgttcctattaaacagttttaactaaccttttat

SEQ ID NO: 246792 - DNA, 556 bp, Homo Sapiens
accataaaaaacaactttgtacaaaaaagttggccacataacgcacccaaagatactccagaaacatttgctgagtacctagtacgtgtgaggtgctgtgaggatagagcagagaggactgtgccccagctgtgatgctggcagaggtgacactaagagggaaatgagatatttggggcagaatccactgggctctcttggccatccgctgccttgggtctgttgaggtgggtgcccaaaggctgccttcttgaccagaacctgctgtgcgcttcacagaacctcctcttcattggaaatgctgggcacattgcagtcagtgagctgctgccaaaacggcgttttttttaatccccagaggccccgccggttggtgatcaccctcaggtcctgccagggagacacagtgaggaggttggctaattgctgctttcaggccctggaaatcagtcgccaaggcccaggagaaccccggtgagtccgtccagttgaggcagaggcaataacctcccattgctcggccctgcgcctgccccagtcctggcagggggcgccg

SEQ ID NO: 246793 - DNA, 236 bp, Homo Sapiens
tatcaggataataatgttagttcactgatatattacaaaacttatagcacaaaacttccagtgtttttctgtaaaaattatatgtgagttaattgacatttcaaagacagcttttacacatcagcctttaccaagtacattatataggcgttctcttagatgttgggattcaaagaggtgcgagatggtgggctttgtgcccggagagaagctgattgtccacctattagaactgg

SEQ ID NO: 246794 - DNA, 501 bp, Homo Sapiens; identical to SEQ ID NO: 164744
  misc_feature (51)..(167): n is a, c, g, or t

SEQ ID NO: 246795 - DNA, 428 bp, Homo Sapiens
ccataaagccaagccatgcttatcatcattgcagtatccaatcctgcagtggtgctgcctgcctgttgtgggtgctcagtatttatctccaagtccccccttttgcccatcgcctgctgctttcccactcagcgccacctcagtcccacaaaggcccggctgggatcctgtggcctccgtgctgaccaacgtcaactacaattcccagcaaggcaccgcgcctgggtacacttgagcttccgggaggacgccgcggaattgtagtcctcgccgggcgtgggcccttgaggtgtgctgggagctgtggtccggtcggcggcgcgcaagttggctagtctctgcggccacctccggaagggtccgccggctgtgctggtgaggtggtttcgggggtgttctccgtcctgatccaggtatttgaggagctg

SEQ ID NO: 246796 - DNA, 525 bp, Homo Sapiens
ctttaaagccctctttgtacaaaaaagttggccatgttcttggccatgctagctgtagtgtcctgtgcgtctataggatcgggtgaaccaccaaccggcaattgaaagctgcacagcctgaaattacctttattcaattaatgcaaaaacaaaaggggagatgttggaggccgaaggaatgagggtcgtgaccaactcagtataccactggaggctctgtgagcaaacagcaaactgttctcatgaaagcaggatgttggcgaactgacaaactctgtctgccgccagaaggaatgctgggggcagtcatgtcccaggtcccgtgctccttgaggttatccacaggaacatccagaacctgttgaacaaagaaaggaatcatgtgggcctgtgttaaatcaaatagctgaccgacagttatcccttcctccctattcactctacctaataaatatgaagggctgtaaaagctcaggtccctgttccctagtatcaaggagccccctgaccccttctttcaaacag

SEQ ID NO: 246797 - DNA, 2876 bp, Homo Sapiens
  misc_feature (180)..(219): n is a, c, g, or t
  misc_feature (2214)..(2227): n is a, c, g, or t
  misc_feature (2284)..(2293): n is a, c, g, or t
ttggctaaatttctttcagtctgtaagtttcctgcttttccttcttttaaaatgccacttagttgttgaagatcctggttctttgtcctgtagaattttccacattgtgggtttggctgattgcatcctcacgacatgtctcttctgcatgatggggacttgatagagtcaggttcttgnnnnnnnnnnnnnnnnnnnnnnnnnnnnnnnnnnnnnnnngcaacaaagcattaaaggtggcaccatgtgccacctttaatggttattaatccatttatttccaggttattaatcattgtgctgtgcagcctgattagtcaggcctgggttataaatcatccctggagcactaggaggggaccctaggattggtccttaaaaccatatggactatatgtggaaggatgtttctccaaaggaaaattgtggtgacattctggaaaaaaacaggacctggaggctgggcagacaaaaaaagttgtatcatgtgaaactcatcagctcttctcagcaattaacgtctggattttgattacaggtgcagtctttgcaagccacatttggaacttttgagtccatcttgagaagctcccaacataaacaagacctcacagagaaagctgtgaagcaaggggagagtgaggtcagccggatcagcgaagtgctgcagaaactccagaatgagattctcaaagacctctcggatgggatccatgtggtgaaggacgcccgggagcgggacttcacgtccctggagaacacggtggaggagcggctgacggagctcaccaaatccatcaacgacaacatcgccatcttcacagaagtccagaagaggagccagaaggagatcaatgacatgaaggcaaaggttggctccctggaagaatctgaggggaacaagcaggatttgaaagccttaaaggaagctgtgaaggagatacagacctcagccaagtccagagagtgggacatggaggccctgagaagtacccttcagactatggagtctgacatctacaccgaggtccgcgagctggtgagcctcaagcaggagcagcaggctttcaaggaggcggccgacacggagcggctcgccctgcaggccctcacggagaagcttctcaggtctgaggagtccgtctcccgcctcccggagggagatccggagactggaggaagagctccgccagctgaagtccgattcccacggggccgaaggaggacggaggcttcagacactcggaagcctttgaggcactccagcaaaggagtcagggactggactccaggctccagcacgtggaggatggggtgctctccatgcaggtggcttctgcgcgccagaccgagagcctggagtccctcctgtccaagagccaggagcacgagcagcgcctggccgccctgcaggggcgcctggaaggcctcgggtcctcagaggcagaccaggatggcctggccagcacggtgaggagcctgggcgagacccagctggtgctctacggtgacgtggaggagctgaagaggagtgtgggcgagctccccagcaccgtggaatcactccagaaggtgcaggagcaggtgcacacgctgctcagtcaggaccaagcccaggccgcccgtctgcctcctcaggacttcctggacagactttcttctctagacaacctgaaagcctcagtcagccaagtggaggcggacttgaaaatgctcaggactgctgtggacagtttggttgcatactcggtcaaaatagaaaccaacgagaacaatctggaatcagccaagggtttactagatgacctgaggaatgatctggataggttgtttgtgaaagtggagaagattcacgaaaaggtctaaatgaattgcgtgtgcagggcgcggatttaaagtccaatttctcatgaccaaaaaatgtgtggttttttcccatgtgtcccctaccccccaatttcttgtcccctcttaaagagcagttgtcaccacctgaacaccaaggcattgtattttcatgcccagttaacttatttacaatatttaagttctctgcttctgcatttggttggtttcctgaagcgcagcccctgtgaataacaggtggcttttcatggatgtctctagtcagagaaaaatgataaaggcttaaattgaggattaacagaagcagattaacctcagaaatcctgtctggctggcagatttcaagtnnnnnnnnnnnnnnggtgggttggggggacccttttctttctagttgtctttaaggaaaattaattttacnnnnnnnnnngttctggccgaaatttttatgagatatctctcacttgtcttccactttgaaccggttaaagctcatagctgtcagctctgaatgaggaggggagaagcccctgggtctttctttgaaaggaatccgctgcttgagggctgcctccctcatggtgtgcgtgtcgtttctcttcctgacgcatcttgtgatatcagaggtaactatgcaaagcatccaggcggttctgaatgtgaagcactacacccagcagagtcccggtgccctctgtccccactgccggcccatgttctctctccggaggtcaccaaggaatgcacaggtttcgactaccagaaaggggagtccttgggttctttcaaaaaattcgtgaggagagctgtctacagtggaatagggggtctccctggggaatgcaggccaagtccttttattttaacatgatgtccatgaagaggtttgccgtctgggcagccctgtcggcaaggagcgtgcatactgcgtttgtgtaattgtttgctgtatctcccttccctctgagctgtattgttctttaatggctgtcttgcccttcccaaaaaaattg

SEQ ID NO: 246798 - DNA, 899 bp, Homo Sapiens
gacagggcccgggcagccccggatccccctcccctcttcgatgacacaagcggtggttattccagccagcccgggggatacccagccacaggagcagacgtggccttcagtgtcaaccacttgcttggggacccaatggccaatgtggctatggcctatggcagctccatcgcatcccatgggaaggacatggtgcacaaggagctgcaccgttttgtgtctgtgagcaaactcaagtatttttttgctgtggacacagcctacgtggccaagaagctagggctgctggtcttcccctacacacaccagaactgggaagtgcagtacagtcgtgatgctcctctgcccccccggcaagacctcaacgcccctgacctctatatccccacgatggccttcattacttacgtgctcctggctgggatggcactgggcattcagaaaaggttctccccggaggtgctgggcctgtgtgcaagcacagcgctggtgtgggtggtgatggaggtgctggccctgctcctgggcctctacctggccaccgtgcgcagtgacctgagcacctttcacctgctggcctacagtggctacaaatacgtgggaatgatcctcagtgtgctcacggggctgctgttcggcagcgatggctactacgtggcgctggcctggacctcatcggcgctcatgtacttcattgtgcgctctttgcggacagcagccctgggccccgacagcatggggggccccgtcccccggcagcgtctccagctctacctgactctgggagctgcagccttccagcccctcatcatatactggctgactttccacctggtccggtgaccccctggccccagatggcactgagtttttcgttcattgaagatttgatttccttg

SEQ ID NO: 246799 - DNA, 398 bp, Homo Sapiens
  misc_feature (341)..(341): n is a, c, g, or t
  misc_feature (346)..(346): n is a, c, g, or t
  misc_feature (359)..(359): n is a, c, g, or t
  misc_feature (371)..(371): n is a, c, g, or t
acgacctggttgttgatttggacaaccagcggcaactcgtgtccaacctggaaaagaagcagaggaaatttgatcagttgttagccgaggagaaaaacatctcttccaaatacgcggatgagagggacagagctgaggcagaagccagggagaaggaaaccaaggccctgtccctgggctcgggcccttgaagaggccttggaagccaaagaggaactcgagcggaccaacaaaatgctcaaagccgaaattggaagacctgggtcagcttccaaggatgacgttgggcaagaacgtccatgagctggagaattccgagcgggccctgggagacccagatnggagngagatgaagacgnagcttggaaganctgggaggacgagctgcaaccacggag

SEQ ID NO: 246800 - DNA, 2407 bp, Homo Sapiens
  misc_feature (984)..(1066): n is a, c, g, or t
  misc_feature (2133)..(2133): n is a, c, g, or t
ttggcttctcccccatattagtcaataaatcctggaaattctacccactaaagtcctttacatgtgttctaaactttccatctctactgccactgccttaaaccaggcctctatcacttcctaccattattccctaaaattcattaggtcaggaacaggtctcactcactgccgtctccagtatcttgcacagcacctggttgatagttggtgctcggtacatatgtaccttaaagagtgaagccggattaacggattactgcaatacccttcccacatgttctccctatttccaggctatttctctctcgacttctatgatctttgctttggactccccaaatactcatcactcctcttattaattcttgcctcctgaaagatccatatccaattcttcaatgaatatttaaggaactgctactacataccaggttctgcgcttgttgtaaagaaatttccttagcattataggtctcaaatttaatcaaatctcttccaactggtacttaccgattgttgatatcagagtcaaaaccttcacgaaactcttcctcgctcacttcacagcccaggatatgcacttgctccccactaaggcagagatgagaagggattgtcaaagagtgggcacaggtgccctatccagggtaggccggggagacactgtgggatactcaccacagtgcagatttcttgacaagcgccttcaagagactgcgcccctcccactccacggaatctgcagagcgagggacggataaagggtctcggaggaccccatcctagccctacctgtctcggcccgcaacctccccgaagccgtcggtgccactcccaggcccctgtgtggcccccgcgggctgcccacgcctgtcccccagctcccggttccgctgggctttaccctcgccaggggtggctttctgagccgcccgctccgtgcccctctctgcagcctctcctgccactcggggcccccgnnnnnnnnnnnnnnnnnnnnnnnnnnnnnnnnnnnnnnnnnnnnnnnnnnnnnnnnnnnnnnnnnnnnnnnnnnnnnnnnnnntcatcgggatgatgcggacgcagtgtctgctggggctgcgcgcgttcgtggccttcgccgccaagctctggagcttcttcatttaccttttgcggaggcagatccgcacggtaattcagtaccaaactgttcgatatgatatcctccccttatctcctgtgtcccggaatcggctagcccaggtgaagaggaagatcctggtgctggatctggatgagacacttattcactcccaccatgatggggtcctgaggcccacagtccggcctggtacgcctcctgacttcatcctcaaggtggtaatagacaaacatcctgtccggttttttgtacataagaggccccatgtggatttcttcctggaagtggtgagccagtggtacgagctggtggtgtttacagcaagcatggagatctatggctctgctgtggcagataaactggacaatagcagaagcattcttaagaggagatattacagacagcactgcactttggagttgggcagctacatcaaggacctctctgtggtccacagtgacctctccagcattgtgatcctggataactccccaggggcttacaggagccatccagacaatgccatccccatcaaatcctggttcagtgaccccagcgacacagcccttctcaacctgctcccaatgctggatgccctcaggttcaccgctgatgttcgttccgtgctgagccgaaaccttcaccaacatcggctctggtgacagctgctccccctccacctgagttgggggttgggggggaaagggagggcgagcccttgggatgccgtttgatgccctgtccaatgtgaggactgcctgggcagggtctgcccctcccacccctctctgccctgggagccctacactccacttgggagtctggatggacacatgggccaggggctctgaagcagcctcactcttaacttcgtgttcacactccatggaaaccccagactgggaccacaggcggaagccctaggagagccgaatcagtgtttgtgaagaggcaggactggcccagagtgacagacatacggtgancccaggaggctcaaagagaagccaagtcagctttgttgtgatttgattttttttaaaaaactcttgtacaaaactgatctaaatcttcactcctgctccaagggctgggctgtgggtgggatactgggattttgggccactggattttccctaaatttgtcccccctttactctccctctatttttctctccttagactccctcagacctgtaaccagctttgtgtcttttttccttttctctcttttaaaccatgcattataactttgaaacc

SEQ ID NO: 246801 - DNA, 897 bp, Homo Sapiens
gaactttcttcttgtccttgagcagtgcccatttccctcagcattgaccgtctggagtttgaccttctgtatcctgccatcaagggtgacaccattcagctctacctgggggccaagttgttggactcacagggaaaggtgaccaagtggttcaataactctgcagcttccctgacaatgcccaccctggacaacatcccgttcagcctcatcgtgagtcaggacgtggtgaaagctgcagtggctgctgtgctctctccagaagaattcatggtcctgttggactctgtgcttcctgagagtgcccatcggctgaagtcaagcatcgggctgatcaatgaaaaggctgcagataagctgggatctacccagatcgtgcagatcctaactcaggacactcccgagttttttatagaccaaggccatgccaaggtggcccaactgatcgtgctggaagtgtttccctccagtgaagccctccgccctttgttcaccctgggcatcgaagccagctcggaagctcagttttacaccaaaggtgaccaacttatactcaacttgaataacatcagctctgatcggatccagctgatgaactctgggattggctggttccaacctgatgttctgaaaaacatcatcactgagatcatccactccatcctgctgccgaaccagaatggcaaattaagatctggggtcccagtgtcattggtgaaggccttgggattcgaggcagctgagtcctcactgaccaaggatgcccttgtgcttactccagcctccttgtggtaacccacctctcctgtctcccagtgccgccttggatggcatgccatcagtgaaggctgggtcccagactgggagtatcgggtgtgagctctatatacctcccac

SEQ ID NO: 246802 - DNA, 995 bp, Homo Sapiens
gacggtagcagcagcatggccgcgatctatgggggtgtagaggggggaggcacacgatccgaggtccttttagtctcagaggatgggaagatcctggcagaagcagatggactgagcacaaaccactggctgatcgggacagacaagtgtgtggagaggatcaatgagatggtgaacagggccaaacggaaagcaggggtggatcctctggtaccgctgcgaagcttgggcctatctctgagcggtggggaccaggaggacgcggggaggatcctgatcgaggagctgagggaccgatttccctacctgagtgaaagctacttaatcaccaccgatgccgccggctccatcgccacagctacaccggatggtggagttgtgctcatatctggaacaggctccaactgcaggctcatcaaccctgatggctccgagagtggctgcggcggctggggccatatgatgggtgatgagggttcagcctactggatcgcacaccaagcagtgaaaatagtgtttgactccattgacaacctagaggctgctcctcatgatatcggctacgtcaaacaggccatgttccactatttccaggtgccagatcggctagggatactcactcacctgtatagggactttgataaatgcaggtttgctgggtctttgccggaaaattgcagaaggtgctcagccagggagaccccctttcccgctatatcttcaggaaggctggggagatgctgggcatgactcatcgttagcagtgttgcccgacgattgacccggtcttgttccacaggccaagatcggactccccatcctgtgcgtgggctctgcgctgcaagcagctgcgagctgctgaaccgaacgcccccacaacggcgcctgacccagggccacacacgatccaaggctcacgaaacctcttctccaggcttcacccctgactgaacgctgaccgcacatcctccgaacatgagcggggccaggcctag

SEQ ID NO: 246803 - DNA, 1211 bp, Homo Sapiens
ttggagcatatttaaaaggctcttggcacgggcagcattggttgagcaggtaggtttggctagggggaaatgtttaacttgttctgaaagaaaaacttatgtctgtagggtccaagaaacagctattccagagtcagtgtcagctgagtctggaacatatgaagtgaggtttacttctaagaacacaagtgactgcacactaattttgtcaaggcatcttttcactactttgctgtagatttttcttcttcattggtcagtttgtcattgtctttgtagttctctttatgataatcctttatacttgctctcagattccacaggcctctgtttatagagtggcaaaggcaggcgagctgtggtttattgtttataaatttttttataaatgttatggtattcaaagccactgacatttaatatttactgaagccattccttagacagcagtggtctttatccctttctggaaagaaaaggaaaatgaagggtaattactgtcaccatggagattgtagaggtaaggttggggtataggtcaggcctggcctttctttgtcatctgcttatagtctagtgctaagtatgccactaagtttcagatatatggaatactttatttttttaaaggtatataaactctgagttattgagaattaagtattcactgtatattaaggggaagcttttgccaagttgtggtcttcaaatttatgtttactcttcctattggcagaatagtgctatttaagagtaaaccaaaggataagcagagggagtccctataaccaaagatggacagcatagccctggatagccagataaaccactctttgtattaagaaatgtttctttcctagtggtgaggggtgggtaactgtgaaagagctttatatcttgtctattcatggtattatagctgtatattcccaggatgataagcttgattgaaatcctgtatttagtcatatattatttgcgctgcttcatttgtatcatgtgcaatctctagaccaaccctatttttaaactctggtacagcatcattttgtacatattcccagctgcagaactagtatcacttatctcagcaaaagagattgtttgcatggaaagattaatagcactgattagatttctaatattttgcatttttgaaatgtttgttttctacgtgattatatttaaaactttagtaaatactaaaatga

SEQ ID NO: 246804 - DNA, 1528 bp, Homo Sapiens
gcttttttatacattgaaaaactttgtacaaaaaagttggctcatgttggcaaatcatttggttcacacgctgtgtcccgattctataacaatagctgaggatgtatcaggaatgccagctctgtgctctccaatttcccagggagggggtggttttgactatcgactagccatggcaattccagataagtggattcagctacttaaagagtttaaagatgaagactggaacatgggcgatatagtatacacgctcacaaacaggcgctaccttgaaaagtgcattgcttatgcagagagccatgatcaggcattggttggggataagtcgctggcattttggttgatggatgccgaaatgtatacaaacatgagtgtcctgactccttttactccagttattgatcgtggaatacagcttcataaaatgattcgactcattacgcatgggcttggtggagaaggctatctcaatttcatgggtaatgaatttgggcatcctgaatggttagacttcccaagaaaaggaaataatgagagttaccattatgccaggcggcagtttcatttaactgacgacgaccttcttcgctacaagttcctaaataattttgacagggatatgaatagattggaagaaagatatggttggcttgcagctccacaggcctacgtgagtgaaaaacatgaaggcaataagatcattgcttttgaaagagcaggtcttcttttcattttcaacttccatcccagcaagagctacactgactaccgagttggaacagcattgccagggaatttcaaaattgtgctagattcagatgcagcggaatatggaggggcatcagagactggaccacagcactgactttttttctgaggcttttgaacataatgggcgtccctattctcttttggtgtacatttcaagcagagtgggccctcatccttcagaatgtgggatctggccgaatttgaagaggcctgatttcagcttcccccagatgcagatttgtgtttcgttttcttgttatcactgtcacacagcttataacatgtatgcttttcagaatacagttgtctaggcaagccatcaagtgtctgaaattcaatattggtttatgcaaatacagcaaacttttatttaagtagatgggagaatatgtttaaaatcattaggaatcctagaccatattttcaagtcatcttagcagctaggattctcaaaatggaagtgttatcatataatatgttaaaaacattttgctttcctggctaattatttgatccttttaaattccaatttgaatcatttgtcatgtatgattatcttctgttaaatgttcacagtatttaagatggatatttggtggctctatttgttctgatatcttttggtctaaattatgaggtaccaagattgtttctttgtttctttttttcaaattgtgtttagaaatactgtaataaatatgcagtagtgatataaagaattatatccaaggtaatataaaagccattacgtatg

SEQ ID NO: 246805 - DNA, 1828 bp, Homo Sapiens
  misc_feature (1380)..(1380): n is a, c, g, or t
  misc_feature (1386)..(1386): n is a, c, g, or t
  misc_feature (1732)..(1741): n is a, c, g, or t
ttggcaatgagtttgatttcctgggctcaggagaggatggggaaggggctccagaccctcggcggtgcactgtggatgggagcccccatgagctggaaagccgtcgggtcaaactccaaggcattctggctgacctgcgggatgtggatgggctgcccccaaaagtgactggcccgcctcctggcacaccccagccccggccacatgaagacgtcttcatcatggacactatcgggggcggggaggtgagcctgggggacttggcagatctcaccgtcaccaacgacaacgacctcagctgcgatctgtctgacagcaaagatgcttttaagaagacgtggaaccccaagttcaccctgcgctcgcactacgacggcattcgttccctggccttccaccacagccagtcggctctgctcaccgcctccgaggacggcacgctcaagctctggaacctgcagaaggcggtcacggccaagaagaatgcggcgctagatgtggaacctatacatgctttccgggctcacaggggcccagtgttggctgtggctatgggcagcaacagtgaatactgctacagtggcggggcagatgcctgcatccatagttggaagattccagacctcagcatggatccctatgatggctacgacccaagcgtgctgagccacgtcctggagggccacggggacgccgtgtggggcctggccttcagtcccacctcccagcgcctggcctcctgttctgctgatggcaccgtccgcatctgggaccccagcagcagcagcccggcctgcctctgcacctttccccacagccagcgagcacggggtccccacctcagtggccttcaccagcaccgagcctgcccacatcgtggcctccttccgctctggcgacaccgtcttgtatgacatggaggttggcagtgccctcctcacgctggagtcccggggcagcagcggtccaacccagatcaaccaagtggtgagtcatccaaaccagcctctcaccatcaccgcccacgacgacaggggcatccgcttcctggacaatcggacaggtaagccggtgcactccatggttgcacacctggacgcagtcacctgcctagccgtggaccccaacggcgcattcctgatgtcaggaagccatgactgctccctgcgtctctggagcctggacaacaaaacgtgcgtgcaggagatcacggcccaccgcaagaagcacgaggaggccatccacgctgttgcctgccaccccagcaaggccctcattgccagtgctggcgctgatgccctggccaaggtcttcgtatgatgcccacctggccctgccctggccgccacgctggctggggtgtagggccgggcaggtggngctgangggactcccagcctcgctggaggtgcaaaggcctggcctctgtctgtttgccatggagcctggtggtgctaacggcccctttccccaggaatccctccccaacggctgcctttccccaagcatccagccctgggggatgggccccttttcaaggaatcaccccccgagggagggccctcggggggtttccccccttggggccccttgaacagccggcttcctgggtattcagaagcctggctttttccagaagggggcagcaaaaggcccaagggcccggggtggtccttttagggaatccagtttttttcccaagaaactcccagaaaaagggggcccagggttnnnnnnnnnntttggaagctccccgggctcccccccagtatcccccgaattccttcatcaaaagccttgggggcaagggaaactggtgacactgggg

SEQ ID NO: 246806 - DNA, 395 bp, Homo Sapiens
  misc_feature (360)..(360): n is a, c, g, or t
ggaaaagcattcgtcaaagagagcttaaaatgcatcgccaacggggtcacctccaaggtcttcctcgccattcggaggtgctccactttccaaaggatgattgctgaggtgcaggaagagtgctacagcaagctgaatgtgtgcagcatcgccaagcggaaccctgaagccatcactgaggtcgtccagctgcccaatcacttctccaacagatactataacagacttgtccgaagcctgctgggaatgtgatgaaggacacagtcaggcacaatcagagacagcctgatgggaggaaatttgggcctaacatgggcaggcctttttcccacattctggcaggacaggacccattgttgncccaaaccacaccccacgggtttgacttttcaacc

SEQ ID NO: 246807 - DNA, 1054 bp, Homo Sapiens
  misc_feature (904)..(904): n is a, c, g, or t
  misc_feature (922)..(922): n is a, c, g, or t
  misc_feature (964)..(964): n is a, c, g, or t
  misc_feature (978)..(978): n is a, c, g, or t
  misc_feature (990)..(990): n is a, c, g, or t
ttggctcgattgaaacttctgaatccagatgaccttagagaagaaatcgtcaaagccggattgaaatgtggacccattacatcaactacaaggttcatttttgagaaaaaattggctcaggctttactggagcaaggaggaaggctgtcttctttctactaccatgaggcaggtgtcacagctctcagccaggacccacaaaggattttgaagccagctgaagggaacccaactgatcaggctggtttttctgaagacagagattttggttacagtgtgggcctgaatcctccagaggaggaagctgtgacatccaagacctgctcggtgccccctagtgacaccgacacctacagagctggagcgactgcgtctaaggagccgcccctgtactatggggtgtgtccagtgtatgaggacgtcccagcgagaaatgaaaggatctatgtttatgaaaataaaaaggaagcattgcaagctgtcaagatgatcaaagggtcccgatttaaagctttttctaccagagaagacgctgagaaatttgctagaggaatttgtgattatttcccttctccaagcaaaacgtccttaccactgtctcctgtgaaaacagctccactctttagcaatgacaggttgaaagatggtttgtgcttgtcggaatcagaaacagtcaacaaagagcgagcgaacagttacaaaaatccccgcacgcaggacctcaccgccaagcttcggaaagctgtggagaagggagaggaggacaccttttctgaccttatctggagcaacccccggtatctgataggctcaggagacaaccccactatcgtgcaggaagggtgcaggtacaacgtgatgcatgttgctgccaaagagaaccaggcttccatctgccagctgnactcctggacgtcctggnagaaccctgacttcatgaggctgatgtaccctgatgacgacnaggccatgctgcanaagcgtatccgnttacgtggtggaacctggtacctcaccccccccggaccaggatgggcctatgaacccacccgtt

SEQ ID NO: 246808 - DNA, 905 bp, Homo Sapiens
ccagtatgagtctttttcatcaggaaaatcacattctggctcagtccaaggtaacactggaggcaatgatattgatggctatgtttataagcaggaggcaacagtgaaagtattgaatcctggctttcttctttcatctgtttgaagaaaacatgggacaataaactgcttgctgatggcctttttctcaggatctttgttgcaaacagagctgtaccaagctaaagaaggcaggagagaaagtttttgaggatggtgtgtgtaatcggtcactatttactgtgtgagttccactggagacaagcacactttctccaatcccagagtctacacctgactgggaatttttcattctggattctgattgagggaaaatactgatatccaatgggctataaggaggacctttcagtttctgtaacagcatctgagttctatgcatgtcctggaaaggcacctgcccactggctaattcacatgctgtaatcccaacactgtaaatatctgacttcacattatacccatgtaaatcctgtctcagtagttctggactcagccacggctgcactgatgtgctgaactgtgggaaatcatacacagccctatgcctctgtccatgcttaaccaaactatgcagatgggacaggccagagagggtcactaggccatcaccagaaatgaggatatggctggctttaatactcctgtgaatacagccattttggtgcagatagttcaaccctctcacggctccaaagagaatgttttttattaaagtttcactcattccttcaggaaaataggtcctcaagagttgacttgctgaaccataggccataaatggagaaataacccaaagccagcctgccaacagtgaaaactgtccaataagttgtaatattggg

SEQ ID NO: 246809 - DNA, 905 bp, Homo Sapiens
aggatgtggggaggcagcgtgtttgagctgctggtgcggtggtcatgcgcgatgcccaaggccaagggcaaaacccggaggcagaagtttggttacagtgtcaaccgaaagcgtctgaaccggaatgctcgacggaaggcagcgccgcggatcgaatgctcccacatccgacatgcctgggaccacgctaaatcggtacggcagaacctggccgagatggggttggctgtggaccccaacagggcggtgcccctccgtaagagaacggtgaaggccatggaggtggacatagaggagaggcctaaagagcttgtacggaagccctagtgtgctgaatgacctggaggcagaagccagccttccagacacagaagggaaatactctgtctcgggacctcattgactatgtacgctacatggtagagaacccacggggaggactataaggccatggcccgtgatgagaagaattactatcaagataccccagaacagattcggagtaagatcaacgtctataaactgcttttacccagcagagtggcaagacttcctcgattctttgcagaagaggaagatggaaggtggagtgactggtttacatcacagctgggcccgaggctgaggcgtcccccgggaccagtgaaagctggagccagggtgtaagggcaaggagggtgcctgtgtggctccagaggagctgggccagggtcccatggaactcagaagggttacacacacacgtgcacaactcccggctctggggaaagaactgttctcagaggctccaaatttatattcatctggggggttcacgggaaaaagccgaaccttggctggttttcaagggtggggtggaggtaaatatagtggtggtaacttaattaagccaaattatttttttt

SEQ ID NO: 246810 - DNA, 2210 bp, Homo Sapiens
  misc_feature (1440)..(1440): n is a, c, g, or t
gcgcgcgagctgcgggcgctgctgctgtggggctgccgcctgcggcctttgctgcgggcgccggcgctggcggccgtgccgggaggaaaaccaattctgtgtcctcggaggaccacagcccagttgggccccaggcgaaacccagcctggagcttgcaggcaggacgactgttcagcacgcagaccgccgaggacaaggaggaacccctgcactcgattatcagcagcacagagagcgtgcagggttccacttccaaacatgagttccaggccgagacaaagaagcttttggacattgttgcccggtccctgtactcagaaaaagaggtgtttatacgggagctgatctccaatgccagcgatgccttggaaaaactgcgtcacaaactggtgtctgacggccaagcactgccagaaatggagattcacttgcagaccaatgccgagaaaggcaccatcaccatccaggatactggtatcgggatgacacaggaagagctggtgtccaacctggggacgattgccagatcggggtcaaaggccttcctggatgctctgcagaaccaggctgaggccagcagcaagatcatcggccagtttggagtgggtttctactcagctttcatggtggctgacagagtggaggtctattcccgctcggcagccccggggagcctgggttaccagtggctttcagatggttctggagtgtttgaaatcgccgaagcttcgggagttagaaccgggacaaaaatcatcatccacctgaaatccgactgcaaggagttttccagcgaggcccgggtgcgagatgtggtaacgaagtacagcaacttcgtcagcttccccttgtacttgaatggaaggcggatgaacaccttgcaggccatctggatgatggaccccaaggatgtcggtgagtggcaacatgaggagttctaccgctacgtcgcgcaggctcacgacaagccccgctacaccctgcactataagacggacgcaccgctcaaacatccgcagcatcttctacgtgcccgacatgaaaccgtccatgtttgatgtgagccgggagctgggctccagcgttgcactgtacagccgcaaagtcctcatccagaccaaggccacggacatcctgcccaagtggctgcgcttcatccgaggtgtggtggacagtgaggacattcccctgaacctcagccgggagctgctgcaggagagcgcactcatcaggaaactccgggacgttttacagcagaggctgatcaaattcttcattgaccagagtaaaaaagatgctgagaagtatgcaaagtttttttgagattacggcctgttcatgcgggagggcattgtgaccgcccaccgagcaggaggtcaaggaggacatagcaaagctgctgcgctacgagtcctcggcgctgccctccgggcagttanagcccagcctctcagaatacgccagccgcatgcgggccggcacccgcaacatctactacctgtgcgcccccaaccgtcacctggcagagcactcaccctactatgaggccatgaagaagaaagacacagaggttctcttctgctttgagcagtttgatgagctcaccctgctgcaccttcgtgagtttgacaagaagaagctgatctctgtggagacggacatagtcgtggatcactacaaggaggagaagtttgaggacaggtccccagccgccgagtgcctatcagagaaggagacggaggagctcatggcctggatgagaaatgtgctggggtcgcgtgtcaccaacgtgaaggtgaccctccgacctggacacccaccctgccatggtcaccgtgctggagatgggggctgcccgccacttcctgcgcatgcagcagctggccaagacccaggaggagcgcgcacagctcctgcagcccacgctggagatcaaccccaggcacgcgctcatcaagaagctgaactcactgcgccaagcgagcctggcctggctcagctgctggtggatcagatatacgagaacgccatgattgctgctggacttgttgacgaccctagggccatggtgggccgcttgaatgagctgcttgtcaaggccctggagcgacactgacagccagggggccagaaggactgacaccacagatgacagccccacctccttgagctttatttacctaaatttaaaggtatttcttaacccgaa

SEQ ID NO: 246811 - DNA, 1214 bp, Homo Sapiens
  misc_feature (683)..(683): n is a, c, g, or t
  misc_feature (782)..(782): n is a, c, g, or t
  misc_feature (895)..(1141): n is a, c, g, or t
gggcccaatcctatgctttgttggccctcctggagttggtaaaacaagtgtgggaagatcagtggccaagactctaggtcgagagttccacaggattgcacttggaggagtatgtgatcagtctgacattcgaggacacaggcgcacctatgttggcagcatgcctggtcgcatcatcaacggcttgaagactgtgggagtgaacaacccagtgttcctattagatgaggttgacaaactgggaaaaagtctacagggtgatccagcagcagctctgcttgaggtgttggatcctgaacaaaaccataacttcacagatcattatctaaatgtggcctttgacctttctcaagttctttttatagctactgccaacaccactgctaccattccagctgccttgttggacagaatggagatcattcaggttccaggttatacacaggaggagaagatagagattgcccataggcacttgatccccaagcagctggaacaacatgggctgactccacagcagattcagataccccaggtcaccactcttgacatcatcaccaggtataccagagaggcaggggttcgttctctggatagaaaacttggggccatttgccgagctgtggccgtgaaggtggcagaaggacagcataaggaagcccagttggaccgttctgatgtgnactgagagagaaggttgcagagaacacatcttagaagatgaaaaacctgaatctatcagtgacactactgacttggctctaccacctggaatgccgatntttgattgatttccatgctctgaaagacatccttggggcccccgatgtatgaaatggagattgaaaaatgatggattagttcattcttgcattcctataaagaaatacctgannnnnnnnnnnnnnnnnnnnnnnnnnnnnnnnnnnnnnnnnnnnnnnnnnnnnnnnnnnnnnnnnnnnnnnnnnnnnnnnnnnnnnnnnnnnnnnnnnnnnnnnnnnnnnnnnnnnnnnnnnnnnnnnnnnnnnnnnnnnnnnnnnnnnnnnnnnnnnnnnnnnnnnnnnnnnnnnnnnnnnnnnnnnnnnnnnnnnnnnnnnnnnnnnnnnnnnnnnnnnnnnnnnnnnnnnnnnnnnnnnnnnnncaaagaaccacctgagactgggtaatttataaagaaaagaggtttaattggctcacggttctgaaagttctaa

SEQ ID NO: 246812 - DNA, 832 bp, Homo Sapiens
ggggtggaggcgatggctgctgatatttctatgcttattcacactaccaatgtgtctcccgttattctttcctgatgggaaatatccctttggagggaaaccctcttgcttcggtgaaatcgtcactgtatcgttctcgttctcttcagccttggggtttgcctgaggggccaatatgcccactggaggtacattctttgagtctggaaagattaaaggtgctgttccacccagggaaccatctggtctcccttggttactaccagggttctgtgaggttgtggatgtcatggcaccagggggttcctttccggcggtaactgtttctgcatgtgtttctgtcttcactttgtgatccacgctgccacgccactcttctgaagaccttggaagaggtttctctacgtgcaagtcctggtttgctggactgactaggtccgaagccacctcaccttttctcttcatctatgtcagcatcctgaacagcaacactcccactttcaggaggaccactcttcaaagacagtatatcatcaagcgtaaccgtgtctcccccagcctccgcactgttcgaagatgcgctcctcctaatatttggggatgtaatcttctgaactatagcttccaatttcaatccccgtcctttccgtgggggcagtattttggtcttagcagggcttgtgagggtaacagcagggcagtttctactatctggacttggaaggtccttggaggaatctctcttagggatagacttgatatcctgactgtgagaaagatgggcataggaattgaatgctttatcagcgccttcttttgatgagtgaaccaa

SEQ ID NO: 246813 - DNA, 570 bp, Homo Sapiens
gacccctgcagaacttggcctgggaacctctaaaccgtaccttattatgcccttctcaatgcccacctgggccagattggttaaaaggttcaaccaggtagcagcatgtctcccagaaaaatggtttgaaaattctgccatgaggacatctattccacagctagaaaacttcattcagtttttattgcagtctgcacataaattatctagaagtgaattcagggatgaagtcgaagaaataattcttattttggtgaaaataaaagctttgaatcaagcagaatccttcataggggggcatcacctagaccatcttaaatccctaattaaagaagattgaataaactttattggaaaatgctaaaattttaatgtcgttacactcagttcctttgtttgagaagaagctggtgcctctctcttctttattccctgtaatagaaggtaggatttgaaaaaaagcaggactccacctctgtattcccccgtgctttaccttctggcatcatgaaaagctgccatgattctgtggtggtctaaggaattaaatgcactggagctttaagagct

SEQ ID NO: 246814 - DNA, 1074 bp, Homo Sapiens
  misc_feature (805)..(814): n is a, c, g, or t
actgctgattccctctagcagaagtctggtaatctctgcttgacgatcaagttcactttgagttattcttaattcctgttcagacttaagtaagaatatagttttagaatctcttcagaagactcagtccatcttatatacatttattttagatggttaaaaaaaatcccccgaacaaacctcaagttataatctggcaattccgcaattctgactttgtatctagaactggtcccctggtttctagactttagcttttctgtattactccaccatggacaactgagttcccagtacttgattgaaaagaatctgttacactaaagcttaatgatacactcttaagagcctacaaaaactactaagagaaagccaagatattttcataaattttctagtatcaattttgctaaattttactattttacaaaattttaagatgaccagttttacaagtataaagtaatattgctgcaaaaattctcaattattactacagtttttactttgaagttaaagagtcttcagtctcaaatgcaaaagactttagagtgaagccataggattttcaccttgcgtttagttgccaaacacttgttgctagcaccagtttttaggttcattcaaaggattctttgtcctacattttaaatgtctttctttcaaattttcttttcaaactatgcataaaaaatgtcttaagcagaatactatctattaagatacactagggttttaaaaagctttttaagttatgatcgaacttcaatcagtagtgtgctgttaaattcttccccaagaaatnnnnnnnnnngctctcatatccagattttcatgatataaatactcccaccacagctgatttccagctactaacgtgaagtcacacactgtggagctgggaagagatgtaaataacagtatgccactactggtttcaaccatctgataaaggaggcttactgctgcgacaaaacagttcactgaaaaatcaacaagatctaaaaatagcaaatagtggcaaaaaacatcttctcaaacctttagtcagagttggttgttaataagtgccaa

SEQ ID NO: 246815 - DNA, 765 bp, Homo Sapiens
  misc_feature (299)..(339): n is a, c, g, or t
ttgggctgagtttgtttacgttgctaacagatctagcccctgctttccctagttccagttccaagatggggaaatccttcgccaacttcatgtgcaagaaagactttcatcctgcctccaaatccaatatcaaaaaagtatggatggcagaacagaaaatatcatatgataagaagaaacaagaagaattgatgcagcaatatcttaaagaacaagaatcatatgataatagattgcttatgggagatgaacgtgtaaagaatggccttaatttcatgtatgaagccccaccaggagcnnnnnnnnnnnnnnnnnnnnnnnnnnnnnnnnnnnnnnnnnccgaatacaaatttgaatggcagaaaggagccccacgagaaaaatatgccaaagatgacatgaacatcagagatcagccctttggtattcaggttcgaaatgtgaggtgcattaaatgtcacaaatggggtcatgtcaacacagatcgagaatgtcctttgtttggtctttctggaatcaatgcaagttcggttcccactgatggctcagggccatcgatgcacccctcggagctaatagcggagatgagaaacagtgggtttgcactgaaacgaaatgtactggggagaaacttgaccgcaaatgatccatcacaggagtatgttgcaagtgagggtgaacgaagatccagaagttgaatttttaaagtcactaacaaccaaacaaaaacagaaacttctcatgaaattagatcgactggagaag

SEQ ID NO: 246816 - DNA, 1121 bp, Homo Sapiens
  misc_feature (903)..(952): n is a, c, g, or t
ctttgtacaaaaaagttggtgagtcggtggctacgagatcaatggaaccatgaacgcccacctgccgtttgctgtcattggcagcacagaagaactgaagataggcaacaagatgatgagggcgcggcagtatccttggggcactgtgcaggttgaaaacgaggcccactgcgactttgtgaagctgcgggagatgctgattcgggtcaacatggaggatctgcgggagcagacccacacccggcactatgagctgtatcgccgctgtaagctggaggagatgggcttcaaggacaccgaccctgacagcaaacccttcagtttacaggagacatatgaggccaaaaggaacgagttcctaggggaactccagaaaaaagaagaggagatgagacagatgttcgtccagcgagtcaaagagaaagaagcggagctcaaagaggcagagaaagagctgcacgagaagtttgaccgtctgaagaaactgcaccaggacgagaagaagaaactggaggataagaagaaatccctggatgatgaagtgaatgctttcaagcaaagaaagacggcggctgagctgctccagtcccagggctcccaggctggaggctcacagactctgaagagagacaaagagaagaaaaattaactctgctgtttgttgcatgctgcatgagacccagggtcctgtttgggcttcctgtagacacccttttcctgcgcaacagagctgggcctccctttctctaatttcccccttaacatgcctggggggcatacaatccaacccgcgccctctcctctcttcctgccaaggtttatagaaacctgagaatctgaggggtgatgtctggccgctggtcaagaagccaacagtcatgtgggctcgcagatgcatcctgnnnnnnnnnnnnnnnnnnnnnnnnnnnnnnnnnnnnnnnnnnnnnnnnnnacatctttgccagaggtgtgacatggtcagggggcccatctgctactctttcccaccagctcccctgttccagttctggttgctgttagtttccctgaggtattttgcaaccaccatggctgggtaaccaccgatcagcacagctgtccccttggtctcctgtatccca

SEQ ID NO: 246817 - DNA, 485 bp, Homo Sapiens
ttaagctctcaaccagttttatttttcctcacaatgaacggaagaaaaaggcagaaataaatggtagggtcatttgctagtagaaaagaaagctgggattccccatttactttggaaactgaggagaaagaactgctttccccactcgtgtctggggaaagggtgtgcccagatgttggcaaaggaaccagacaaaatcaacagccagcagttttctgttccaaacagttagctcctctacagtccagagggaagctattcctgagttcattcaaggtgacagcagaagtgtttctctctttctgcttggcccaactgtgcctgagggctgatggatccagaccttgtaaacattcagctaggtgtaacataaccagaaaggctgaaggaaggctcttggccttcccagcttgagaagtaggggcctcatgtgtatctggtggcctgcagagcccaaagcagagagctatgatgaataaaatatt

SEQ ID NO: 246818 - DNA, 922 bp, Homo Sapiens
  misc_feature (231)..(277): n is a, c, g, or t
  misc_feature (724)..(748): n is a, c, g, or t
gaaaccataccaaaattatcctcctttccatgacagatcatttagagaaaataaacttaaaggtagacaaagcagaatcccagggctttatggaggggaacaaatgtttattcatcccattgctctcacttagaatttctatttgtataccagtatgtgttactaattgaaggcaaatgtagttaagattccgtaggccgagtgcggtggctcaccagcactttcggaggnnnnnnnnnnnnnnnnnnnnnnnnnnnnnnnnnnnnnnnnnnnnnnnaccctctttagacacatctcttcttatcatgtgatgacatataacactttatctggttagagaatatagttctcattagggctcaccactaatcaaaatcactgtttaacttcaagattcaaattttcatgtctgtcttctagcaccacatcaaaaattaataatcactgcatatttcttttatagctttgtatttccagataagcatttgaccattccataatactatgaaaatacttattaatgtgtttacatttttgaaagatcagtataaaaataaataatgtaacacccaagaatctctaattttttccaacctacctgattgcatttctcttcttgtcttagaacactcgattctgggagatttcacaatttcagaggtgcctgagtctaatgtcctttgtttttcttcgagagaagagtctgtagtatgttgaacaatgnnnnnnnnnnnnnnnnnnnnnnnnngtgtaaattctttgctatccttcttcggacttatgtttgaatctatcttatatttacatgaggttttcatttttttaattcactatagaattatctaaatcagtctttattttcagaacccttgtgattagccttcatggctgtctgtctttttctctactagggattctgaag

SEQ ID NO: 246819 - DNA, 479 bp, Homo Sapiens
  misc_feature (377)..(377): n is a, c, g, or t
  misc_feature (432)..(432): n is a, c, g, or t
  misc_feature (459)..(459): n is a, c, g, or t
gccacagttaataaagtggctgaaaataatagtagctctggcttggtgcttgacctggttaaatactgtcttaaagctcatacaaaacaaataggcttttccataagtggcctttaagaaaacatggaagacaattcatgtttgacaaatgctgacagggtgaagaaagcccagtgtaaaaatgaatcgcgttttaagtgattcggttaaagagtttgggctcccgtaggcaaactaatactagataataaggaaatgggggtgaaatatttttttattgttgaatcattttgtgaatgtccccctcaaaaaaagctaatggaatatttggcataaagggcatttggtggttttatttttgtttgagggggtttgtncagaaaatcccttttgctgctctttacgcctaactgactaggggaacaattgttngatatgcatagcattgggatacttgtncattatatactcttacatat

SEQ ID NO: 246820 - DNA, 388 bp, Homo Sapiens
ctttttacaccaatgttagacagttccctcagttgcctttactggacatcaaggagttcacatttttgacaatctttcagtcctgaactgtccaaggggtggaggtagctccatacaggaagctgcctgctgcgtgtggatcagtaatatcagacttgcccaacagctcactggagacatcaaaaccaatgcatgggggatgcatgacgtcacccaaatatttaccacacgcttttgctgccagagaccccagatcacttttcctgcctcctgctaaacaaatgggagcagtagcttctcatcagcctccacatttcattactcatgaattgtggccttcctaatgtctcatggccctaagcacttattacaatgtctcaacagcctt

SEQ ID NO: 246821 - DNA, 423 bp, Homo Sapiens
  misc_feature (376)..(376): n is a, c, g, or t
  misc_feature (403)..(403): n is a, c, g, or t
  misc_feature (408)..(408): n is a, c, g, or t
gctttttacaccaatgttagacagttccctcagttgcctttactggacatcaaggagttcacatttttgacaatctttcagtcctgaactgtccaaggggtggaggtagctccatacaggaagctgcctgctgcgtgtggatcagtaatatcagacttgcccaacagctcactggagacatcaaaaccaatgcatgggggatgcatgacgtcacccaaatatttaccacacgcttttgctgccagagaccccagatcacttttcctgcctcctgctaaacaaatggggaggcagtagcttcttcattcaggcctccacattttcattactcataattgtggggctttccttaatgtcttcatggcccctaaggganttatttaacaatggtcttcaacaggcnttctnttcagggcttttcaa

SEQ ID NO: 246822 - DNA, 200 bp, Homo Sapiens
  misc_feature (12)..(12): n is a, c, g, or t
  misc_feature (37)..(37): n is a, c, g, or t
  misc_feature (44)..(44): n is a, c, g, or t
tttccttttgcnctagccctccttcattttcaccagntcatggnccgcaacttccagtgctcgtaaaaacagatgggatgaaacccccaaaacagagagagatactcctgggcatggaagttgatgggcttagactcctggaacagatcgaggttgagattctatttgtgaaacaccgactccagggagcactaagcgag

SEQ ID NO: 246823 - DNA, 954 bp, Homo Sapiens
ttggtgtgaatgcagagatacatgactgggttattgagcctgttgtgggaaacagactgactcaccagatacaagagttaactcttgacacaccatactacttcaaaatccaggcacggaactcaaagggcatgggacccatgtctgaagctgtccaattcagaacacctaaagcctcagggtctggagggaaaggaagccggctgccagacctaggatccgactacaaacctccaatgagcggcagtaacagccctcatgggagccccacctctcctctggacagtaatatgctgctggtcataattgtttctgttggcgtcatcaccatcgtggtggttgtgattatcgctgtcttttgtacccgtcgtaccacctctcaccagaaaaagaaacgagctgcctgcaaatcagtgaatggctctcataagtacaaagggaattccaaagatgtgaaacctccagatctctggatccatcatgagagactggagctgaaacccattgataagtctccagacccaaaccccatcatgactgatactccaattcctcgcaactctcaagatatcacaccagttgacaactccatggacagcaatatccatcaaaggcgaaattcatacagagggcatgagtcagaggacagcatgtctacactggctggaaggcgaggaatgagaccaaaaatgatgatgccctttgactcccagccaccccagcctgtgattagtgcccatcccatccattccctcgataaccctcaccatcatttccactccagcagcctcgcttctccagctcgcagtcatctctaccacccgggcagcccatggcccattggcacatccatgtccctttcagacagggccaattccacagaatccgttcgaaatacccccagcactgacaccatgccagcctcttcgtctcaaacatgctgcactgatcacc

SEQ ID NO: 246824 - DNA, 981 bp, Homo Sapiens
ggagcaaaaataagtctattttaacaaatagctttgtttttgcatgctaatgtcagaaaggcatacgatgcacattatgctctgttttaaaggttttaccacccttgtaaaaactataatcttaaatggtttttatttgctgttacacaaacaacactacataaaacattttttcctaaatggtacaaatttataaactatcatttttcacttacggtatttgtaaatactacactacaaaaatcagctttctgagaaagaaataatcatttatttatgatattgaaaatttctacagtaaacactcaaaaccaagcaaaaaacatttgtaagatacacggtatctatttggagcaacggtttttgtaactaatgtgtttcattttttaaataaagacaactaaaaataatctctttctgcaatgatttttatagcagaaattgacttatctggagtgttctagcaatttttaggtcatttagcagaacagtaagcttccagaggaaacctacacttctatcctttgggcctggcctgttctgtttctgggttctttccgcagtcaagtacaccgagtaacaggttaaagaatggcagtttcacctggcctttacagggacacttacttctttcagaagtcattaagtcggcttttattattcctaaacaaaagagctttattttctcatgagtaggttttagagttttaattgttgacaatttttcagttactaatagaaccccagtcatttcattttatttttccaaggacaagagtctattaagggaaccattaactattcagtacagtgaattactttcagattactaaggaaaaggaaagtgagcagttataagatgccaaacacctatctatctgcctgaaatatgcacctttcaggttggacctaataacattcacctccccttgctgaaaagccttccaacacccacgaggctatctcagtttccatgctacc

SEQ ID NO: 246825 - DNA, 728 bp, Homo Sapiens
ttgggacatcgtgaaggttgaagtctgggatgtagtagacaaaggaaaatgcaaaaagcgaggcgacggcttaaagatggagaacgacccccaggaggcggagtctgaaatggccctggatgctgagttcctggacgtgtacaagaactgcaacggggtggtcatgatgttcgacattaccaagcagtggaccttcaattacattctccgggagcttccaaaagtgcccacccacgtgccagtgtgcgtgctggggaactaccgggacatgggcgagcaccgagtcatcctgccggacgacgtgcgtgacttcatcgacaacctggacagacctccaggttcctcctacttccgctatgctgagtcttccatgaagaacagcttcggcctaaagtaccttcataagttcttcaatatcccatttttgcagcttcagagggagacgctgttgcggcagctggagacgaaccagctggacatggacgccacgctggaggagctgtcggtgcagcaggagacggaggaccagaactacggcatcttcctggagatgatggaggctcgcagccgtggccatgcgtccccactggcggccaacgggcagagcccatccccgggctcccagtcaccagtggtgcctgcaggcgctgtgtccacggggagctccagccccggcacaccccagcccggccgaaggctggccctcgatgctgcgcgcatcgtgtgtg

SEQ ID NO: 246826 - DNA, 1114 bp, Homo Sapiens
cctataaaagccaactttgtacaaaaaagttggctgaggtgtttcctacccaacatgtggtccgtgctctccaaattatctttgagctgaacgtccaggcctttgcaggaggggccatgggggctgtgaatgggatgcagccccatggtgtccctgataaatccagtgtgcagtctgatgaagtctgggtgggtgtggtctacgggctggcagctaccatgatccaagaggtaatgcactccttttcccatctctccaccatctgtatcctggcccagaaaacttcctcaaccaccaaatttcttcaaggcataacccaatgccatcttgtccgtctataaagcctcccatttttccctggtatgcattccagctcctgccttcaggcttctgtctgtgggtcatagttatctcctccacttgctgggagctccttgaaggcaaagactctactgcctccatctatccagtggaagtggctcttcagagggtgccaagttagtatgtatgactgtcatctctcccaacagggcctgacttgggagggcttccagacagctgaaggctgctaccgtaccgtgtgggagcgcctgggtctggccttccagaccccagaggcatactgccagcagcgagtgttccgctcactggcctacatggggccactgagcatatgggccatgcagctagccctgcaacagcagcagcacaaaaaggcctcctggccaaaagtcaaacagggcacaggactaaggacagggcctatgtttggaccaaaggaagccatggcaaacctgagccccagagtgagccgtctgaactgtgggagggaagtgctaacagcccagcctccagccctggcctttcctccttcccctctgaacctcctgcaaccctgagccatcaggacaatcataccccttcccttctctccacccaattgtgccagtaaatgggggttgagggtgacctaggcagcattagaatcacttatttatttctttcctcacctgttccctgactgcgtgaaatgttcagggaggtcagttgatttccccaggtacattcatggtgtgacagacacatgggtacaaataaaaagacccagaaagcc

SEQ ID NO: 246827 - DNA, 1125 bp, Homo Sapiens
tggtgagtaggtgagtttattgggacttacacacaggtcaatcctgggcggcgacaggacagctctagagatctgtgcttcctcccaatgctaaactgctttcatgctaattttctgactgtttacttaccgggtaagagcgatgggactgttttcattggttggttctcacatactctctgggaagtttgggttctcagggacacctgctcctcagctggggaccatggccatggcccaccacctgcccttcagggttcaagcaggggacatgcaccctttagtaacctggaggggacccatcacatgacaaccaccccaacgaccatcatcaggaagccactggctgactgtgatacacccccagaaggacaagggagagtggatgctggaaagacagagcgagagaccatcaccagggaaagactttattcttggaaggacatcaaacctgggggtgggtcggtagtggagctgctgtttcttctcctgtatccaacagttctaactctggttttctccattttcagctctttcttttcctggccttctcattgctggttcctgcaagctccccctctattcttcgcccaatatattctttagtctaaagtaaatttcttcttcctattccccacactctccagtcctctctcctcccttattgcaggctccagtgttcctgccttctccttggtgcacttgccatctgcattaacccctcccttgctgtgctcagctacacaaatgccaaagtcactaacactcagttccataagctttaccttgccctccttatccccctaataaaatgtctgcattttggccaggcgcggtggctcacgcctgtaatcccactgcacccggagggcattgtagttttaaatcaaataaagtagcagatttttttattcacttggttaaaatgtactaaattgttattagttttttaaaaatatcattattttaagaatttcaaaatatatgttcacaatcccttatcagaacatgtgaaattccaaagctccaaaaacttaaaaattttttcacagttcatttggtggcaacctaacctgaactgatataatgctatttatagtccttatttatcccacttagtgccaa

SEQ ID NO: 246828 - DNA, 802 bp, Homo Sapiens
ggatagtccatctcaatctccgccttctttcggaagaatcctggaggtcctgcaacagttgcacccgaagctcacactgctggtccaggcatttcatctgctctgtgagctgagcacggatctctttgacctgagtatcgtactctgctatgatctccgttatcctttttgaatttgggctggagacgtcatgttttccttctttcttccaaattcgaattgtgaattgatagatccacggaaaaaatccaaccacctaaatcgatacctccaagaccgcttctctcgagggcagaaggggccccccaacggtggtctccagcgctctgtggagcgcgggctgcagggctgggcagacggctacggcgggcacatgcagacggtgggcgctgaggccgggtgcggcggcggctggtgcctgtgctagagccggagccgcagcctcagcattagccgggagaactgcagcgcccggaggctggcctggggtctgacatcaacgacacaggcggggagtggaagtccttccgcacaacatggtgtggggctgcgggggtgtggacgcgcccagctgtgtccccgggagggagtgggtgcttttcggggtgccgggggagggctgggcgtgcttcgcggttttttgtcgtagaggctcaaagatgctgcaaatcaaatcccaaacgggagccgcaacagcgcagactggatcggaagtcgtttgctccggttcacttgcctggctctgacgcgaccgggtcccaggcccccggctccgcttcccactcagagctctcctcccccg

SEQ ID NO: 246829 - DNA, 858 bp, Homo Sapiens
  misc_feature (666)..(679): n is a, c, g, or t
acaaaatccttattattctctggttaagaaggttttagcaggagcctcccaatgagcactgtttgtagagaaaagggaagggagcaggaggaggaacagatttgcacagaatttttttcttaaaaaccacaaaggggtgactttttttcttctaaagcaagcaagcctgagaggcattacatgggctggctcctaatatcaaaacaaaatatttctttgccacaaaggaacttgactatgtagcaacacatttacaaaactactgcaaaacactcccagagggcagtgacctactctgctccccagaggctccaagaagcaaggcctcaagtgcctcatgttccatggggctgtgcagtgcaatgcagaaggcggaaatcctgctgtgacgccaccctcgagaccttctgcagcctgagagggggtgatactcccacaccctttgatccttccagatggctcagcctagatctagcagtgagagagccctctccatgcagggcagatggagtggtggacacttgtgaaaacaaaacactaactgttccatcctgttatatttgctgtgaggaaaattaagattcctgttgtatgggctgcactgtttctggaagactacagaaaatctaacatggttgacacttcctggtagcccttctgtacatnnnnnnnnnnnnnnccagagagaagacagagagaaaatcctggtccaaaagatcacatgaccttactagtgtttccccaatgactgtaatttataaactaaaaatttttacaaatccactgctatcttcttctgtcctgagtttggtagactttaatggatgctcgcagcaataaccagccaacttttttgta

SEQ ID NO: 246830 - DNA, 809 bp, Homo Sapiens
  misc_feature (720)..(720): n is a, c, g, or t
  misc_feature (754)..(754): n is a, c, g, or t
gatgttttgttttcaggttgcttacactgtctttcagtatttaaaaatgctgcagaagctaggcccagaaaaaaggtaataaacacttcctggaatgaggccaggagccagtcctggtatatttgaggcttcaggctgccggtagacatgctttagtcttgccttgatggtttttcaggcattttctgctctatttcctttattgactccatatccttatccctctacatgtgattgtatactaaggctttacacatatgtgggcagtccctttattttcacgcttctcttttattgttgatgcttctattgagaattttttaaacttttattctaggttccggggtatatgtgcaggtttgttatgtaggtaaacttgtgtcatggtggtttgttgtagagattattttgtcacccaggtattaagcctactacccgttagttactttttctgatcctctccctcctcccgcccttctccctcaagtaggcagaaattttaatgtatcttctaattatagttttctccttcacagaatttttgaagagattcggaaaattgaggataatgaatttcattaccaagaacagacagatccagttgagtatgtggaaaacatgtgtgagaacatgcagctgtacccattgcaggacattctcactggagatcagcttctttttgaatacaagccagaagtcattggtgaagccttgaatcanctagttcctcaaaaagcaaatcttggtttactgnctggtgctaatgaagggaaaatgtgacctcaaggagaaatgggttggaactcaat

SEQ ID NO: 246831 - DNA, 1026 bp, Homo Sapiens
tcagacagaatctgatcaggtaaatgggtgtaacacaggcattatagtattacttaagatagtattatcatgtgcaatgttttgaatatttaatattttgaaattttctcagttaaatttcctcaccttcactattgatctgtaatttttattttaaaaacagcttactgtaaagtagatcatacttttatgttcctttctgtttctactgtagatgaatttgtaattgaaagacatattatacaaatacctgccttgtgtctgagttctatttagttagcatcttgaaatttgtattcattttccagatggctagtttattaatgatttcccaaaagccataccttaaagataactttttaaattctgaagagacatgccaatgtcaaactaaacatgttctgtttttaaaccaacaaacatgttactattcattggacagatatcattttatgtataaatactgttcacatcactgggaaaatgtaaactttaaacataatgccacaaggtcactaatttctagcaggtaaaattataaggatataaattccaataataaaccaaatgtatttagagtatttattagtaaatgcaaggtgatgttagttatgatcagttatactctaaatatttaatttgttttataaaggtagtgaaaaaatgaaaatttgctatttattaaaaaacattaaatttcattccaaatgagataagtgatattactataacatctaagcatcatctgatttgatattccctaaaaaacatttggaatatatgctatctatagattcagtatctactacccatatttactttaccaaatatatttctcctcactgcataaggactactcttctcatattttcttctttgatgaagatatttttcaccaaagtttattttgtgatgccctcttggttttgatactttaaaatctgtggcacccgttctacatgaattatcaatatttggtaaattcaatctgtatttgttttgttaaagtcaaaaatctcattttcc

SEQ ID NO: 246832 - DNA, 1137 bp, Homo Sapiens
  misc_feature (913)..(990): n is a, c, g, or t
gagtagctggcagttctctcttaaagcttaaaggcaagatactgcccccaacatactcattatatagtgatataaaaaggagcgggaaaactgcaatgaaaactctcatgttgaaaggggagaagcaaaacacacaacagccactggctcacaccacttatctacatgctgccgaacaggtatagagaggactccctattccatgttgtaaaacctttattttgcactctgggaaaatcttccttatatattgtggcccttggctatttccaggttcattgcctatcagggagccatggattttctcacaggctagaatgtgctcaggctgttgcaaccaggcttgtggtttcttcagcaatacagttcctttaaaaattcagtgggcacgaggcctaatttcttctggttaagtttatgtctttataacctaaccacagatcttgtctccatatagtctttcaactcaagattttggtctcttacctgctgtctgtgtgctctgcccttctccctatcccttagcttaacagccactgccttgaggcaattcagacatgactcataatgtgacctgcaccaattgactcatctctgtaggctagagagaactcttaacagaaggtgccagacaagcccaggagacaccaatcttgctaccactgaagctgttgttatttggagtacaaaagctcttagctttttcagccgtgcaatattccaaattataggactctcagtcaatttagatggccacccacaggcaaaggagacagaacttctgttaacaaacctttattttctttttttctatttatgtttgcattccaaccagttctgaataaatctcttgcttgtaggacttggttgagtgcagcaagaaggcatctacacatgcagtttcttactgggnnnnnnnnnnnnnnnnnnnnnnnnnnnnnnnnnnnnnnnnnnnnnnnnnnnnnnnnnnnnnnnnnnnnnnnnnnnnnntgtaaataaaaaaccatagagttcttgcccttacaatttataatctcacgagttcacctgttgcccattctttatcttctctcttttttcctctacgatgtccccttggtgatgcacctgttcccatgcctcacctccataatatag

SEQ ID NO: 246833 - DNA, 926 bp, Homo Sapiens
  misc_feature (88)..(98): n is a, c, g, or t
ctaaaaaacaactttgtacaaaaaagttgggttttatatttaccctacaattaatcttttttctttggtgatatttatttctttgccnnnnnnnnnnnaacaactttcaatcttcagatgtttcgttgaatctatttagagcttcaccatggcaatatgtatttcccttaaaacactgcaaacaaatatactaggagtgtgcccttttaatctttactagttattgtgagattgctgtgtaagctaataaacacatttgtaaatacattgtttgcaggacgaaaacttctgagttacagctcaggaaaagcctgctgaatttatgttgtaagcattacttaacacagtataaagatgaaaagacaacaaaaatatcttcatacttcctcatcccctcattggaacaaaaccttaaactgggagaaccttagtcccctctctttcctcttcctcctccacttcccacttattgtcaccttgtaatattcagagagcacttggattatggatctgaatagagaaatgcttacagatactccattagcccacataccagtaacttaacagatgggatggagttgtaaacgtgcttctataatacaatataacttggtcaaaggcaagggttgactcttggtttcattttgacatggcatgtcctgaactaaatatgggaattccacatagtggggaacacacaacaaacaaaacgacacgagagcgcccagcaccacagacacgaaaaacaagaaggcaaccccgcgggcgcgggcaggagcagacacacaccccacccacaaagacggcagacccagaacgagcgagcggagaacacggacaaaaggggacgggagcgaacacgggggcacggcccgtgggcgcgagccgcgagcggaaggcccgccggcgacgcgaccgcaggagcg

SEQ ID NO: 246834 - DNA, 855 bp, Homo Sapiens
tcctgtaaattctgctctcggatcttgttcctcatctcctggacctcttttgggttagtgttcaatggaacaaacaggttagggacagcagaggtggaagttctatgtccatcctctttagtccactgtaatatcaagaacagttgaaaagtcagaattatgacaacaataagtgacatagcatccaatctattcagtttatctcacatctggtcatgcactgaacatcacagagaggactgaaccaatgaccacatctaatctgggtcactcagcagagtcgccatgggagcaggatgcagccacataaagaccagttaatgctggaagtcaaagtcatgactgatggaaaaccaccatctggaaagcccagctgaatctgggtcataaggtaggctgacgacagagctgagccccataaccctgggaccagcaggggaggcccctcagagaccattggttcactgctctgaaaatcatccaacaccaaagccaactggaagcatgagatgacagggtcatgaaaagcaatgtgatgctgctacccagggttagggaggagcctgcaccgtgaggcaagagtgggcatcaccaaagttttgcattaaagtaaatgacagcatcagaatgcactgtctgggtaactttcaacccaagaacattactgtatggacacttacacggtagctacctggaagaagagtttggtgatgtcgaatattttatataacttaatatttttgagtgctacaaaaatatcccaaacaaacttgaagcgcttcatgagtccttaatatttaaaggctgttttagtatcagtgcatctcgtcagcatgctgagccttccacccataa

SEQ ID NO: 246835 - DNA, 494 bp, Homo Sapiens
tactactaaattcgcggccgcgtcgaccattatccacacgtcacgccacctctcttcatgtcaccagcccttcctcagcatccacaggtcacgccacctctcttcctgtcaccgacacttcctcagtatccacaggtcatgccacccctcttcatgtcaccaacacttcctcagcatccacaggtcacgccacccctcttcctgtcaccagcctttcctcagcatccacaggtgacaccacccctcttcctgtcaccgacgcttcgtcagtatccacaggtgacaccacccgtcttcctgtcaccagcccttcctcagcatccacaggtcacaccacccctctacctgtcaccgacactccctcagcatccacaggtgacaccacccctcttcctgtcaccaatgcttcctcattatccacacgtcacgccacctctcttcatgtcaccagcccttcgtcgatgcggccgcgaatttagtagtagtagtagacc

SEQ ID NO: 246836 - DNA, 927 bp, Homo Sapiens
gagggggcagcacctggggaaggtggccatcccttaagcttgggcttagagcagtcaagggtctgtgatcagggccgaaaccacatcccccaggagcaccagctcctcagccttatacctgggccttcaggaacttcctggctgggcggtgcatccagggcacattcagtcagcacgctcagcacgggagctacactctccttcagcctgtgtgtcttgtagaggattctctgtcactggggctatgcccctgcctaacttgtgactggcacagagttacacctccccaccaccccttcccaccaacatacacaacagctggtcctggcggcagaggtttgggaagaggcccctctgcagttagtcagcggaaggccaagagtgggtggtgggtgtctgtgtcacttttgaaaaggacagggatagagcgtaactcagaggtactcgtaagctttgtgacttgggagaaataactgctttaagtctaattacttcaactataaaccagagctgggaagaaaacacaaagcaattaaagctttagactcgcacacacattgccctcagatgttggtggcaaaaagaaacgagaaccgaatccccgctctgtgtactttgtggacagagcagggagttcttgaccctcctagcataatgtgcctggaccccagcaccagcagtggcagcgacgggcacagacaaccccctagctgtgtgtccagtgccagctccctatcctgactggctcgcaggcaccttgtgtgtcccttgcttaggcaggtagattcccaggaggtctactaaatctcggtttattgtactccagcctgctttctgcaagctcctggaagatggttagagccccagctgtccagatgccctgtagtgcagtcacagcaatcagaaggaagctttgatctgagccaa

SEQ ID NO: 246837 - DNA, 920 bp, Homo Sapiens
  misc_feature (664)..(704): n is a, c, g, or t
gaagtgcccgaggggccgcgatggagctgggggagccgggcgctcggtagcgcggcgggcaaggcaggcgccatgaccctgattgaaggggtgggtgatgaggtgaccgtccttttctcggtgcttgcctgccttctggtgctggcccttgcctgggtctcaacgcacaccgctgagggcggggacccactgccccagccgtcagggaccccaacgccatcccagcccagcgcagccatggcagctaccgacagcatgagaggggaggccccaggggcagagacccccagcctgagacacagaggtcaagctgcacagccagagcccagcacggggttcacagcaacaccgccagccccggactccccgcaggagcccctcgtgctacggctgaaattcctcaatgattcagagcaggtggccagggcctggccccacgacaccattggctccttgaaaaggacccagtttcccggccgggaacagcaggtgcgactcatctaccaagggcagctgctaggcgacgacacccagaccctgggcagccttcacctccctcccaactgcgttctccactgccacgtgtccacgagagtcggtcccccaaatcccccctgcccgccggggtccgagcccggcccctccgggctggaaatcggcagcnnnnnnnnnnnnnnnnnnnnnnnnnnnnnnnnnnnnnnnnngtactgccagattcaagtaccggtccttttttttcccctggaacgccattcttggcctggggcgggcttcaaccctgctccctcaagcctccctgggccttttgcccatgttacccgccccttaaatggccctccccccgggggactttggttctgccgtccatatctgagctccctctccgaaaactcttggctttacccacggtggaccctgtt

SEQ ID NO: 246838 - DNA, 916 bp, Homo Sapiens
cctgggtagtgctgtggatatcctggccacagatgatcccaactttagccaggaagatcagcaggacacccagatttatgagaagcatgacaaccttctacatgggaccaagaagaaaaaggagaagatggtgagtgcagcattcatgaagaagtacatccatgtggccaaaatcatcaagcctgtcctgacacaggagtcggccacctacattgcagaagagtattcacgcctgcgcagccaggatagcatgagctcagacaccgccaggacatctccagttacagcccgaacactggaaactctgattcgactggccacagcccatgcgaaggcccgcatgagcaagactgtggacctgcaggatgcagaggaagctgtggagttggtccagtatgcttactttaagaaggttctggagaaggagaagaaacgtaagaagcgaagtgaggatgaatcagagacagaagatgaagaggagaaaagccaagaggaccaggagcagaagaggaagagaaggaagactcgccagccagatgccaaagatggggattcatacgacccctatgacttcagtgacacagaggaggaaatgcctcaagtacacactccaaagacggcagactcacaggagaccaaggaatcccagaaagtggagttgagtgaatccaggttgaaggcattcaaggtggccctcttggatgtgttccgggaagctcatgcgcagtcaatcggcatgaatcgcctcacagaatccatcaaccgggacagcgaagagcccttctcttcagttgagatccaggctgctctgagcaagatgcaggatgacaatcaggtcatggtgtctgagggcatcatcttcctcatctgaggaggcctcgtctctgaacttgggttgtgccgagtccgctgcatt

SEQ ID NO: 246839 - DNA, 893 bp, Homo Sapiens
  misc_feature (514)..(514): n is a, c, g, or t
  misc_feature (860)..(860): n is a, c, g, or t
ttggcccctccccctcggtgggggtgccgtcccgccggcccgtcgtgctgccctctcggggggtttgcgcgagcgtcggctccgcctgggcccttgcggtgctcctggagcgctccgggttgtccctcaggtgcccgaggccgaacggtggtgtgtcgttcccgcccccggcgccccctcctccggtcgccgccgcggtgtccgcgcgtgggtcctgagggagctcgtcggtgtggggttcgaggcggtttgagtgagacgagacgagacgcgcccctcccacgcggggaagggcgcccgcctgctcttggtgagcgcacgtcccgtgctcccctctggcgggtgcgcgcgggccgtgtgagcgatcgcggtgggttcgggccggtgtgacgcgtgcgccggccggccgccgaggggctgccgttctgcctccgaccggtcgtgtgtgggttgacttcggaggcgctctgcctcggaaggaaggaggtgggtggacgggggggccttgctggantggtgcacgcgcgcaccgtgtcggcccccgccctgaacgcgaacgctcgaggtggccgcgcgcaggtgtttcctcgtaccgcagggccccctcccttccccaggcgtccctcggcgctctgcgggcccgaggaggagcggctggcgggtggggggagtgtgacccaccctcggtgagaaaagccttctctagcgatctgagaggcgtgccttgggggtaccggatcccccggccgccgcctctgtctctgcctccgttatggtagcgctgccgtagcgacccgctcgcagaggaccctcctccacttcgcctcgacggggttgggggggagaagcgagggtttccngaccaccgcggtggtgccgagtgcggctcgtca

SEQ ID NO: 246840 - DNA, 1020 bp, Homo Sapiens
ttttctttaaaacagctcagaaaaccaaatataacatctctcctgttgtactttcaatcatttccccactgaattgaaaatccatcctaagcagagatgctatcattttggagagctgtgtggagcgtggacaagaactctgctccatattccccgtgctcccaaacaaaacaaaatatgaaaccaaccaggaaacaccactcctaatattgcaggaacgaaaggcctcttacctggacttctgcaaaagagatagcagaggtactgaggctgcgggggccggaagccgcaaggaagaggtagtgtgggcgacagcagcacggggctgctgggaataggagccgtgtggtcagcggtttcccaagccattgcgagggccctgcgacgctgtggacctgagcgtgtaaaaggatgatggagcccctttaccgggagcagaagtcctcgcgtgggtgcaaacgggattcattatgctaactccccaagaagcaggcagctcggccactacaggggaggacattgctatcaccgcgcgcagaccgctagcccgaaggcatgcagcgggtggtgcctgcagagcgaagctcgaacctgggttccccgcatctcagttatcgcagacccacatcggagggccctgagaacgaggccgaggtgctctcgccaggagccaagccaattccagaagctgacaccgggctgctgggcccatagtgtcggggactaaccctagcgcgtcctcacatgacccgaggtcatgacattcaggtcccggtgagcaggtcagcgtctgctgatacccctagcacgagctgtcctggggcctggttcactgggtcagggcagcatcccggtgctctgccccggggcatccttacccgacgcccggactgtagcaagcgcagaagctcccggcgtccgcacattagtcccatcgccattttgcccggaagaggacttgcttttgcgcctgcgcagtaagaaaccacaacccctcgagaggaagccacttttgggagg

SEQ ID NO: 246841 - DNA, 1276 bp, Homo Sapiens
ccgccggcgcgagggacgcggacgcaggggacgaggacgaggagtcggaggagccgcgggcggcgcggcctagctcgttccagaatgacagggtccagaaactggcgagccacgagggacatgtgtaggtatcggcacaactatccggatctggtggaacgagactgcaatggggacacgccaaacctgagtttctacagaaatgagatccgcttcctgcccaacggctgtttcattgaggacattcttcagaactggacggacaactatgacctccttgaggacaatcactcctacatccagtggctgtttcctctgcgagaaccaggagtgaactggcatgccaagcccctcacgctcagggaggtcgaggtgtttaaaagctcccaggagatccaggagcggcttgtccgggcctacgagctcatgctgggcttctacgggatccggctggaggaccgaggcacgggcacggtgggccgagcacagaactaccagaagcgcttccagaacctgaactggcgcagccacaacaacctccgcatcacacgcatcctcaagtcgctgggtgagctaggcctcgagcacttccaggcgccactggtccgcttcttcctggaggagacgctggtgcggcgggagctgccgggggtgcggcagagtgccctggactacttcatgttcgccgtgcgctgccgacaccagcggcgccaggctggtgcacttcggcctgggagcaacttccggcccccgctgcaaggttcgtctgggggccccaagacaagctgcggaggttcaagcccagctctctgccgcatccgctcgagggctccaggaaggtggaggaggaaggaagccccggggaccccgaccacgaggccagcacccagggtcggacctgtgggccagagcatagcaagggtgggggcagggtggacgaggggccccagccacggagcgtggagccccaggatgcgggacccctggaaaggagccagggggatgaggcagggggccacggggaagataggccggagcccttaaccccaaagagagcaagaagaggaagctggagctgaaccggcgggagcacccgcccacaaagccaggccctcaaagggcctcaaaaggggggaaaagatccgctctggaatttggagggggtgtggcccttcacccaggggaagcctcaggaacggggaacccagaaagtgggggggtcaggaaccccgggggaaggcaagggcaagcccctgcccgccaaacccctggggag

SEQ ID NO: 246842 - DNA, 468 bp, Homo Sapiens
  misc_feature (20)..(20): n is a, c, g, or t
cgaagacctgtaactcggangaggaaagatgaatctgcaatgggggctgaacaagatcccagatgaacgtggacccagggaacaaataacatgaactgaaaccctgggacccccagccatgcccctgaacaatttccgggagctggtgcacattaagccggaccaatccaatgtgcggcgcatgcacactgctgtgaagctcaatgaagtcattgtcacgcgctcccacgacgcccgcctggttctcctaaacatgcctggcccacccaggaacagtgagggcgacgagaactacatggagttcctcgaggtgctgaccgagggccttgagcgggtgctgttggtgcgcggtggtggccgtgaagtcatcaccatctactcctgagcccagtgtcatcttgtggcctggagtcgaggtcttggccaggacataacaagctgtggtctggggtaacagcctcttcccag

SEQ ID NO: 246843 - DNA, 1030 bp, Homo Sapiens
  misc_feature (476)..(511): n is a, c, g, or t
gaaagtatagagaggaagaaaagctggggctgggggcactggctttgagggcagcagtacctttggctatagaaagcagcaagtatgcactcaggtaagggtggaaatggccatttacagacatttgtaaactggatgcttaggagtagggaactaataatagggaacaatacctacctgacctctaatcattaggaatgcttaactcctgaggtgttttgattcacaacaaaatctgagagaaatcccaggagtttctttagcttctttcatgattttggtcatttcataaagggaaatataaataaaatacacaatttacattcagtattccctgtagtatttcttaacatagggtccacacataagcttcatagggatttgtgaaccccttaaaaatggcatggaacattctccagtaagtatagctttcatgagatgttcaaaggggtgtctgatattcccacccccaactnnnnnnnnnnnnnnnnnnnnnnnnnnnnnnnnnnnnttaagaacaactcctgtatgggagtggaaatacagattaaatcctgtaagctcccagggacaactggtccagaccacacagagctccaaagggcaggagccagaaacattgggtgaatggacagtcacagttgtttatggatgcattttctaaaacaacctctttaccttctttttcttggtccaagtacttctttatgttttccgctctgtccatgtatttggaaattttttctctgagattacatctcttagtattatctttggtacctttcagaacctgcaggagcagatcaatcccctcttggtaacacaccagagcctgcggataccgcgactccgaatctagttctactgcccgctttagcacagtggctgcagctgtgctctgcgggtcctgcctcagcccggacttcgccataattctgggaagttctcctccgcctcaacccgggatgaagttgaggcggggtctgcctggcgctttccggggaagtgggtcatgtggatacccaggggg

SEQ ID NO: 246844 - DNA, 709 bp, Homo Sapiens
  misc_feature (572)..(572): n is a, c, g, or t
  misc_feature (622)..(622): n is a, c, g, or t
  misc_feature (634)..(634): n is a, c, g, or t
  misc_feature (644)..(644): n is a, c, g, or t
  misc_feature (647)..(647): n is a, c, g, or t
  misc_feature (654)..(655): n is a, c, g, or t
  misc_feature (683)..(683): n is a, c, g, or t
gaatcagcattgagacagtttattggtttgctgttcgcatatcacccattttatgtaaatagattgtacagagactcggtgtttccttcttccacacaggaggtaatcagtctttctctttcatgcacacaaacacactcacattccacgcggcgaacaactttacacctcgctgagacattcacgtcttaaaatagggggaggacaatataattgcttttaaaatgcccttaatacaatatataacgtacaaaaatatctctatatttgaagttacaaaaaaaatcttgacagcaacaaacttaaatattgatagttacctctgtatgtacaacacgcattgcacttttcctctttaggttttggaaagttcaagtaatagtgaggcttgcgccctggtggggtgacacgccgtgagaaatcagtttgtgggcgagcacggctgtggctcagacccctgctccgggggtctcagcattcatttctcagtttctcctctccttaagcctggcaaacactcggattcttctgcaccccgcccccttgggcacttgcacctgagcaaggctaangaagcgaagcccccaaaagggagggcccttgcaaagccagagctcgcccncgccgggacgcntccgactcanggncttccgnnggcgtgacggagcccgtccgagcacagntctggaagtactcgtcgcggaaggca

SEQ ID NO: 246845 - DNA, 911 bp, Homo Sapiens
  misc_feature (678)..(678): n is a, c, g, or t
  misc_feature (710)..(710): n is a, c, g, or t
tgtccatgtgggaagacctttgtcaaccttaccaagttcctttatcaccggcgtactcatggggtagggggtgtccctctgcccacaacaccagtcccaccagaggaacctgtcattggtttccctgagccagccccagcagagactggagagccagaggcccctgagccccctgtgtctgaggagacctcagcagggcccgctgccccaggcacctaccgctgcctcctgtgcagccgtgaatttggaaaggccttgcagctgacccggcaccaacgttttgtgcatcggctggagcggcgccataaatgcagcatttgtggcaagatgttcaagaagaagtctcacgtgcgtaaccacctgcgcacacacacaggggagcggcccttcccctgccctgactgctccaagcccttcaactcacctgccaacctggcccgccaccggctcacacacacaggagagcggccctaccggtgtggggactgtggcaaggctttcacgcaaagctccacactgaggcagcaccgcttggtgcatgcccagcacttcccctaccgctgccaggaatgtggggtgcgttttcaccgtccttaccgcctgctcatgcaccgctaccatcacacaggtgaatacccctacaagtgtcgcgagtgcccccgctccttcttgctgcgntcgggctgctggaggtgcacccagctcgtggntccatgccggggcgccagccccaccgctgccccattcctgtggggggctgcctttcccctcctcactggcggctccggggagcacccgctggtgcagcccgctggctggcccaaggcccccacgggggccttttggagtgttggcaccctggtgggcaaagaaaagtgggggctccaacctggcttcgaactgccagggca

SEQ ID NO: 246846 - DNA, 1249 bp, Homo Sapiens
ttggggtttgaagaaggtgaagaaacaattacagcctttgtagaaccttttgtaattttactcatattagtagccaatgcaattgtgggtgtatggcaggaaagaaatgctgaaaatgccatcgaagcccttaaggaatatgagcctgaaatgggcaaagtgtatcgacaggacagaaagagtgtgcagcggattaaagctaaagacatagttcctggtgatattgtagaaattgctgttggtgacaaagttcctgctgatataaggttaacttccatcaaatctaccacactaagagttgaccagtcaattctcacaggtgaatctgtctctgtcatcaagcacactgatcccgtccctgacccacgagctgtcaaccaagataaaaagaacatgctgttttctggtacaaacattgctgctgggaaagctatgggagtggtggtagcaactggagttaacaccgaaattggcaagatccgggatgaaatggtggcaacagaacaggagagaacaccccttcagcaaaaactagatgaatttggggaacagctttccaaagtcatctcccttatttgcattgcagtctggatcataaatattgggcacttcaatgacccggttcatggagggtcctggatcagaggtgctatttactactttaaaattgcagtggccctggctgtagcagccattcctgaaggtctgcctgcagtcatcaccacctgcctggctcttggaactcgcagaatggcaaagaaaaatgccattgttcgaagcctcccgtctgtggaaacccttggttgtacttctgttatctgctcagacaagactggtacacttacaacaaaccagatgtcagtctgcaggatgttcattctggacagagtggaaggtgatacttgttcccttaatgagttaccataactggatcaacttatgcacctatgggagaagtgcataaagatgataaaccagtgaatagtcaccagtatgatggtctggtagaattagcaacaatttgtgctctttgtaatgactctgctttggattacaatgaggcaaagggtgtgtatgacaaagtcggagaagctacaagagactgctctcactcgcctagtagacaagatgaatgtatttgataccgaatcgccgggtctctctaacatagaacgtgcaactgcccgccactcagtcattcaacagctgatgacacacgactcccactctaccagtttcacgtgaccga

SEQ ID NO: 246847 - DNA, 300 bp, Homo Sapiens
tttgtacaaaaaagttggcttagtactgcccctaaaaagggatgactcatcaccgcctctcagcagggatgactcagcagggatgactcagcaccgcccctcaacaggcatgactctgcagagatgactcatcactgtcccttagcagggatggctcagcagggatgactcagccttgcccctcagccgggatgactcagcagactcagcagggatgactcagcactgcccctcaacagacatgactcagcagggatgactcagcaccacccctcagcaaggatgacttatccctgcagt

SEQ ID NO: 246848 - DNA, 773 bp, Homo Sapiens
  misc_feature (94)..(94): n is a, c, g, or t
  misc_feature (211)..(211): n is a, c, g, or t
  misc_feature (522)..(546): n is a, c, g, or t
  misc_feature (650)..(669): n is a, c, g, or t
agtatggtgatgctgctgctgtctgcttttccgcatctgggctggtccttcttcggtgccggtcagaaggggacaagtcatttcattcttgggnaagtgcccccaattcctccggtgtcaggagaaattttgacgtgaaataagtatctcggtaagatggtacgaaaatttagaaagatcccaacaacctttgagaatggacgctgcatcnggggccaactactcactaatggaaaacggaaagatcaaagtgttaaaccaggagttgagagctgatggaactgtgaatcaaatcgaaggtgaagccaccccagttaacctcacagagcctgccaagctggaagtttaagttttcctggtttatggccatcggcaccgtactggatcctggccaccgactatgagaactatgccctcgtgtattcctatacctgcatcatccaactctttcacgtggattttgcttggatcttggcaagaaaccctaatctccctccagaaacagtggactctctaaaaaannnnnnnnnnnnnnnnnnnnnnnnngtcaagaaaatgacggtcacagaccaggtgaactgccccaagctctcgtaaccaggttctacagggaggctgcacccactccatgttacttctgcttcgctttnnnnnnnnnnnnnnnnnnnnataaagacaaaccaatcaaccacgacaaaggaagttgacctgaacatgtaaccatgccctacctgttaccttgctagctgcaaaataaacttgttgctgacctg

SEQ ID NO: 246849 - DNA, 801 bp, Homo Sapiens
  misc_feature (699)..(719): n is a, c, g, or t
ctgattctgcatctggaaactgccttcatcttgaaagaaaagctccaggtcccttctccagccacccagccccaagatggtgatgctgctgctgctgctttccgcactggctggcctcttcggtgcggcagagggacaagcatttcatcttgggaagtgccccaatcctccggtgcaggagaattttgacgtgaataagtatctcggaagatggtacgaaattgagaagatcccaacaacctttgagaatggacgctgcatccaggccaactactcactaatggaaaacggaaagatcaaagtgttaaaccaggagttgagagctgatggaactgtgaatcaaatcgaaggtgaagccaccccagttaacctcacagagcctgccaagctggaagttaagttttcctggtttatgccatcggaaccgtactggatcctggccaccgactatgagaactatgccctcgtgtattcctgtacctgcatcatccaactttttcacgtggattttgcttggatcttggcaagaaaccctaatctccctccagaaacagtggactctctaaaaaatatcctgacttctaataacattgatgtcaagaaaatgacggtcacagaccaggtgaactgccccaagctctcgtaaccaggttctacagggaggctgcacccactccatgttacttctgcttcgctttnnnnnnnnnnnnnnnnnnnnnataaagacaaaccaatcaaccacgacaaaggaagttgacctgaacatgtaaccatgccctataggccctatagtgagtcgta

SEQ ID NO: 246850 - DNA, 1770 bp, Homo Sapiens
  misc_feature (898)..(907): n is a, c, g, or t
  misc_feature (977)..(993): n is a, c, g, or t
tacaaaaaagttgggatgattttacgtttggtttaatcttcaccagcttatatccaacttgcatggcgttgtaaagctgaaatcagaatggatacagctggcgatgtaactacattacttagtaggcagttttttccggtttctttccattatgtttattgatctgttgtgggttggttggttttgaccaaccagaattgatctattattgttaactagcgcctgtagttacacccgggctctggcgtgtgcggtgcctcctggggctgtggcgagtgtgcgatgccctgcctgtgcccctcacgccgccccctgcagagcagccctgccaccctgagcgctgtagctcgttctgtctgtccctgtcggggtgagctccatgcagtgtgtttacagaggcttggcgtttgggcctctaactggaagccatctttgttccctgcaggccatgaagtacttgtcatacctgctgtaccctctctgtgtcgggggtgctgtctattcactcctgaatatcaaatataagagctggtactcctggttaatcaacagcttcgtcaacggggtctatgcctttggtttcctcttcatgctgccccagctctttgtgaactacaaggtaaggcggtgtgtgctgcccgcggcccggcccccgtctcctgtgctgcccacagctgacctgggcctgtctctcctgtttcagttgaagtcagtggcacatctgccctggaaggccttcacctacaaggtgagtgtgacagccggtgaggaatcccttctcactgagcagagcgtgagcaagggcgtcttccagccaacagcattactggggccatctctgcccagagtgcatctgcacctgtccctttcattgaagaatattgaggaggctcctttnnnnnnnnnngcgaagagctatagagtaacttcagaccctgaaagactggggtggttctctcacttgtcacagatttggnnnnnnnnnnnnnnnnnagtgtttatgtttcttcttagcacatgtgtcaagacacagaccccctgtggctcagtaaccggtgcctggggacaacggattcaggcctcccaggcaggaatggaagcccccatgggccgtggccattccccgctggcagagctgtggaggcccccttggctccgtgtgggattagaagtgcctcggcattgcaggcggagctgagttaatgggacatgatttgcacttttctgaagtcaattacaagctcccagaggaaagggcaatgctcaggtggctctgcccttggctctccccttggctgtggtctcgggcggctctaaccttggctctggtctcaggtggctctgcccttggctctgtctcgggcggctccagccttggctctggtttcaggccattctctttgggttccccgatgtgggagcctgggcaagacccgcagtgtgtcgggtgccagcagctgtggggagcccatgagggaacagagctccgtatctccacttgccggctttctgctctttttgttgttgctgtgaggagttccagttagttccaagcatctgccaaaagccgttggcttggttaggttaccaaaaacagtaagattccagccccagcaactggggttcaccctcctcccgtctggccctgcagctttcaacaccttcattgatgacgtctttgccttcatcatcaccatgcccacgtctcaccggctggcctgcttccgggacgacgtggtgtttctggtctacctgtaccagcggtggtga

SEQ ID NO: 246851 - DNA, 1698 bp, Homo Sapiens
  misc_feature (287)..(336): n is a, c, g, or t
  misc_feature (389)..(398): n is a, c, g, or t
  misc_feature (854)..(965): n is a, c, g, or t
cctgcatttctcatttttatttgacagaaaaagttgctcttgctgtacagattttaaaaaaccaaaatgcctttaagaaacatgaaaagttggggggaggggttcacaacctcatgggggacagtagggaccaactaattccaactcctgccccttccttccaagaacaccttatacaacctccagtcccaaccaccatcacaatcacccctgggaacttctggatacaagtggggccatgcctccctggccctgactccaggctggggtatcctgaactgtatccnnnnnnnnnnnnnnnnnnnnnnnnnnnnnnnnnnnnnnnnnnnnnnnnnnaacacatgaaccaggaagaactcacggagattaacatttcacaggaacaaagnnnnnnnnnnggggagggaaagggagccctccatccaagggctgccaaggttcaaaggagagcagacaaggaccctcccacggctctgctggggtaagaagggacactccttgtggctccagagcattgggtgtggtggaatcccccaaagacaatttatggagacctggaggagcggtgtctcatgggccgagggctaggtgtctccctcctgcgcttgtggctgggggagcggctgtccccacgctggcctctccgggaaccccgctcactgctgctgctctgctggtcccgtggtgagggctggggcgagggacggcgacgctccacaggcgagtagctgagggaccgagagtccctgagggagtctattggcttccgggggctgcgggacctccgctcgccagggggtggcttcttggggcttgcaggtttgggcaaggcctgagggccaggcttagcaggnnnnnnnnnnnnnnnnnnnnnnnnnnnnnnnnnnnnnnnnnnnnnnnnnnnnnnnnnnnnnnnnnnnnnnnnnnnnnnnnnnnnnnnnnnnnnnnnnnnnnnnnnnnnnnnnctggaactggaactgctagagcgcctcttccgtttggctggggttggctccggaggacgtccctctcgaacagcctcctttggggctggggtggggctggggaccctgtgggaggagaggagtgtcacaaggagacaagctgccccagccccaaccctaccttccttggcctggaggaacggcagtggggggaggggtgcctgagaaaggcgctgggagctctccgagccacgtgagccagcaattctctggagagcagtggtgcgagctgacccaacctctgctaacagaagcaacaggctggggcccgcagcataagggatcaaggttaaacctcaagaatgtccctgatggaggaataaggcctctgggctcaggtgtggaagctgaagctgggtcgtctccttcctcggagagccgcagcttggggaggcccctgtgagtgcaggttggctggggaaggggccgtcctgcctggaggcagggagagggatgggatgacctctgaagatccttccagcccagggagttcctcttgaggtctaactgccatccctcctgctgtaaaattaagtccatttcctctagttctgtcctctgtagagacggaaaacttatcattatcctctagagaatgaaccttcggagacttttatctgtcccattcctcctccctccgccccctgccccagcattctcttctacccccagcttgagggtcaaggtcccccaa

SEQ ID NO: 246852 - DNA, 1750 bp, Homo Sapiens
cctttccttcattgggccccaaaattggaaactccttatttggggcattggcccctcgtagtgtgagggccaatgtggacttaaaatcctgagacgtgtgtcgggctacatgaaagcctggcaagctccttgttctctttctgtaggaaaagcccctctcagttttgcccctctcaaagtgacaggcctgggtcagaggcccgggtgacttgagctggcctgagagggaatgggcagtgtcaccaaagtcagccctgccctaatagtctgcctcagcccctgaggtctggaaggctgcctggttcccagggcaggggctgggcccatggggctcttcattctttgaaggtgggaggaacatgaggcgaggggatgcaggaggccagggtagtgctaaggggaaggggcatccgcctgggctggtaaggttcacatgcagcggtgcatttcccctcccgccctgaccggactgcacagcccccagccgggggagccctaaagccaaggacttgtgtctccactttcctccagaaaacataagccgcatgaggacagggatgtggtctgtgttcttccctgatgtagtctaagtgcttaggacactgccccgcacagattggtatgccatacgtattttttaggagaagaattcctctgggttctgatgacaacaaaggaggcccctgaaacctatgcccaggacagtccagggatccaggctcccacgtgggtccctgagagggagaggtgagccaggagtgggcctcccagtgtgaacagaagcaagggagggtatgacagacccacagcaccacagcacagctggctaacagccggggacacctctcggaggacagcgtcctcacatgtctggcttcccccatctcagttgtcatactgagtccacatcagtgttttccagcctgaatgctggggcaagaggtgggtttggactcgggggtggtgcagaagaggaagacttgggaggaggctgagaaggggtgaggaggaggagcatcttatattcttctagagaagggcacagaccaggaagttaattcctctctaacaccagcaatgctagcatggaggtagaagctggaaggaggaaggcttgggagcgctgggctctgctctgtcttagtgtacaccaagggatgtccacacaggttttctcataaggccctcgggagccctcctgctgctgctggtctgaagtgcacagagtctgggggctcgacgtggctgatacccctaatagccctgtttatcacatcccctgtgggtttcacagagtggagacaagacagctggggtcaggggaagtggggcatggcccctggctgagatgtgagcttgccggtaccggtaccctgatatggcactttcctttcctagtctacccaaactccccccgtccaagtctcctgggaccccaaacactccctcaattgactcacagcaggcttggtggaaacatcttcctggttaatttctataccccaactccatcccactagaagccggaataggtatatgcccagccccacttgttcccctctccactgggaatatgaagaccagccattcccagaacagctcttgggaaagagctgcaataaaatagcttttcttaaaaaaatcattttttaccttctttctcctgcaacaagtagattacaagacctctgaatgcagggcctttgcaggctgagcctgctctgatgggcacacagcccaagagggccaa

SEQ ID NO: 246853 - DNA, 897 bp, Homo Sapiens
tctagaggaccccgttcattttctacaccaagtagatgggcactccagtaaaaatgacatccacacactgttgaaggatcttaattcatatcttgaagataaagtctaccttacagggtataactttacattagcagatatactattgtactatggacttcatcgctttatagtgagtatttgtatagttaagcctttgaattatgaagaaaagcaacagatgatcttgcaaattggtgtagttaatgaagctccattttccagagaggctagtccaagatcagccatgagcacagcaacagttactgttaatgtagaaggatcaggatgagggccctgagtgtaaccctccaatacagactgttcgcatgaaagaaaatgcagaagtgggaacaacaagcaatggatataaagcatatgacccagaaacaagaagtagcagtggcataaggtataagaaattaactgatccaacagggtgggtcaccattgatgaaaatacaggatcaatcaaagttttcagaagcctggatagagaggcagataccatctaaaatggcatatataatattacagtccttgcatcagaccaaggagggagatcatgtacggggacactgggcattatacttcaagacgtgaatgataacagcccattcatacctaataaagacagtgatcatctgcaaacccaccatgtcatctgcggagattgttgcggttgatcctgatgagcctatccatggcccaccctttgactttagtctggagagttctacttcagaagtacagagtatgtggagactgaaagctattaatgatacagcagcacgtctttccctatcgagaatgatcctccaatttggctcatatgtagtacctataacagtgaagaga

SEQ ID NO: 246854 - DNA, 672 bp, Homo Sapiens
  misc_feature (457)..(483): n is a, c, g, or t
cattcctgaaaaagcaacgtgttcaggagagattacagataaagcaaagaagctctacctataatatagctaatgatatagagattgcaagattctcaggtaaatcttttctctaatccaacagaaaaacacagattaaatcaatgattaataaacagaagaaaaacaatgattttaaaaggaatattgctttattgctttaagaatccataagcctcaaaaggtaactaattcaaggaatccaaataaaacttccctaaatattaacataatcccaagcttctttaaaactaagataacactttgatagttgccatctttcactaggtttcaaatttgtattctccattttgtaaacaaaaaggacaggggcattcacacagaaatatcactataaactgaagaaaatacttaagcattcatacctttagtatgcattaacctactggttagttgnnnnnnnnnnnnnnnnnnnnnnnnnnngagaaattttcagttgcactggacaaatgaaagtgattcatttggccaagcagggtactctacagctagatgatactacagacaaactctggttctgtacaatatcacaatgttaaacaagatatcatagcaataagttatttaaggaagtttttaaaaacatttacttttctgttttatttcaatctc

SEQ ID NO: 246855 - DNA, 480 bp, Homo Sapiens
ttggcactttgccttacttgagtcgtcttctcttcgagtggccacctggtagcctagaacagctaagaccacagggttcagcaggttccccaaaaggctgcccagccttacagcagatgctgaaggcagagcagctgagggaggggcgctggccacatgtcactgatggtcagattccaaagtcctttctttatactgttgtggacaatctcagctgggtcaataagggcaggtggttcagcgagccacggcagccccctgtatctggattgtaatgtgaatctttagggtaattcctccagtgacctgtcaaggcttatgctaacaggagacttgcaggagaccgtgtgatttgtgtagtgagcctttgaaaatggttagtaccgggttcagtttagttcttggtatcttttcaatcaagctgtgtgcttaatttactctgttgtaaagggataaagtggaaatcatttttttccgtgg

SEQ ID NO: 246856 - DNA, 1349 bp, Homo Sapiens
  misc_feature (1072)..(1080): n is a, c, g, or t
ggcggtacggtccggaatcccgggatatcgtcgacccacgcgtccgggaatggtcagcccctgaagctagcttatttgaagaggcactggaaaaatatggcaaagacttcaatgacatacggcaagattttcttccttggaaatcattgactagcatcattgaatattattacatgtggaaaactactgacagatatgtgcaacagaaacgtctaaaagcagcagaagctgagagtaaactgaaacaagtatatatcccaacctacagcaaaccaaatcccaaccaaatatccactagtaatgggaagcctggtgctgtgaatggagctgtggggaccacgttccagcctcagaatcctctcttagggagagcctgtgagagctgctatgctacacagtctcaccagtggtattcttggggcccacctaatatgcagtgtagattatgtgcaatttgttggctttattggaaaaaatatggaggcttgaaaatgcccacccagtcagaagaagagaagttatctcctagcccaactacagaggtacagtagtctttttagtgttgaaaaatggcatgtttttaaatgggttgattattccttggaaacagaagtacagtataggataattaaaaaatgaagaaagctacctttatagctaaacgtagcactacaatattcagggtaggtgtggagagaagcagagagaaattaaattttatcaggtattcagaataatggtctcagacaaaaaaacaatgagtgtgggagatgttagcataagtagagagcttacaaattaaatgtttaattgcttttgaaaacagttcgtaacctttacattctgttgaaggcgtgtcttactacataaagtcataaatgcaaattaagcattttttctccccgtggctgttttggagggacaagaagtatggacttaatcttgaggtgaacaacagtttaaatgtgattttggtaaaatcctcataggctgaagatgccaaacgcctgtgtttaccagtgggcgactaccctttttcagtgctgacgggctttcaggactccttaatttnnnnnnnnngtgtagttaacccccttggcagtttcataccacttactgtgaatgtgattttggattcctgtatagcagtacagtattctccacagttcccttctctactccccacctctttcccaaaagtgcacactttaattctctcttttagaggtagtgcaccaagtgacgttatagatgcttcatgaaagatttaaaagttgcacttttcttttgagcatgatgcaaacagtaacgtgtttgggcaagttcacttccttgagtgtttgttgttt

SEQ ID NO: 246857 - DNA, 517 bp, Homo Sapiens
attcacaggactactttatattaaagtttattacatttggaaaatctactgtacagggaaaaacccattggattaagtagagttttgccaaaagcaaaagactatcactctttggaaaatattcctgattccagcccagggcccagggtggggccacaggagctaacggagaacctggccttggatggaggcgctcagagccagctctgcccaagacacccctcgtcaatttccaggaggaagcagcccctggagacggcgccacaggcagtgacgggcgtggtctgcaggaggatctccaggcccctgccgccctccctacagtcctctctgtctgaaggctgagtcccagcattcacttctcacacggggttctccaacgtggcagcggcccaggcttcagcatggccctgagcgcatggacacaggcacgactgcttgtaagaggcaggcggcccacggaagcctggactgggcagctggcacagacaacagaaaggggcacaaaaagatagtc

SEQ ID NO: 246858 - DNA, 2239 bp, Homo Sapiens
gtacaaaaaagttggcctgcttcacttccatgatgcacataagcaacataaccaagaaaatggttgcagaggagacagtgataccttgggagcgctacatgatctagccaacagccctgcctctttcttgtcgcagtcagtttcatcatcagatagaaacagtgttacagtacttgaaaaggacacaaagatgggaactcccaaagaaaaaaatgaagcaatttctaagaaaataccagaatttgaagtggaaaattctccattgtcagatgttgcaaagaatacagagagtagtgcatttggagggtctttgccagctaaaaaaagtgatccatttcaaaaagagcaagatcatctggtagaagaggttgccagagcagttttatctgattcaccacagctctctgaaggaaaagaaataaaattagaggaactaattgactctctgggttctaaccccttcttaacaaggaatcagattccccgtactccagaaaacttgataactgaaattaggagctcatggagaaaagctattgaaatggaagaaaacagaactaaagaaccaattcaaatggatgctgaacatagagaagtattgccagaatcattacctgtgttgcacaatcaaagagaatttagcatggctgattttctcttagaaaccactgtatcagattttggccagtctcatttgactgaagagaaagttatttcagattgcgagtgtgtgcctcagaaacatgtgctgaccagtcagatagatgaaccaccaacacaaaatcagtctgatttgttaaataagaaagtaatttgcaagcaagatttgggatgtttagccttcaccaagctttcagaaactagccgaatggagacattctcccctgctgtcggcaataggatagatgtgatgggtggcagtgaagaggagtttatgaaaatattggaccacttagaagtttcttgtaacaaaccttccacaaataaaactatgttgtggaattcttttcagatatcaagtggaattagttctaagagttttaaagataatgattttggcatattacacgaaactcttccggaagaagttggtcatctaagttttaatagttccagtagttcagaggccaattttaaactggagccaaatagtcctatgcatggtggcactcttctagaagatgttgtgggagggagacagactactccagaatcagactttaatttacaggctcttcgcagtagatacgaggctctgaagaaatctctttccaagaaaagggaagaatcttacctctcgaattcccaaacacccgaaagacacaaaccagaattgagccctactccccaaaatgtacaaacagatgatacgcttaactttttggacacctgtgatttgcatactgagcatataagagccatctttacgcacgtccatcggtgaaagaaaacggtctctttcaccactaattaagttttctccagtggaacaaagattgagaaccacaatagcatgtagtcttggagaactacctaatttaaaggaagaagacattttgaataagagccttgatgcaaaagaaccaccgtctgacttgacaagatgaagacgtacccatttaatataactatgatgcacttaacattgaagctatgccacaggatagaaacatgaattacaacttaaatacatgttggaagtgtaacactgtttttcaagggtttaaaaaaacttcctaatgccttttagccttctttaatatttttaggtaaggaaagtatgtttggattttttcctctttgtaggtatatgagattgaaatgtgaagtatttggacaacaaacgtcaagcaatgggaagccattttgatttcttgagtaatcttgtaagcattaagtgaatgacaaagtagtagtgtaacttatttcttatgttataacttcagtcaattaatataaggatagtttctgtgtatgttcactaaatggttaatataatagccattgaatatactaatctttcatcttagagaactatacaacttttattgtttcttaatggaacattctggctaaccagaaaaagtgagaaaagtagtaccttgggattgtgtagtcaagatgacaacattttaagactgggaaaagctctaaacaggcttattgattcttcagggtagaatgatcctgagaagtgatgttgaatggaataagtgctgtgatgattagtgaagactgg

SEQ ID NO: 246859 - DNA, 553 bp, Homo Sapiens
gcgaaggtggccaccaatagacacaaaggacagaattcctttcccagttgttaccctagcaaggctagggagggcatgaacacaaacataagaactggtcttctacactttctctgaatcatttaggtttaagatgtaagtgaacaattctttctttctgccaagaaacaaagttttggatgagcttttatatatggaacttactccaacaggactgagggaccaaggaaacatgatgggggaggcagagagggcaagagtaaaactgtagcatagcttttgtcacggtcactagctgatccctcaggtctgctgtttactcagcatggaggacacatatgactctttggtgttggtctttttgtctgcagtgaatgttcaacagtttgcccaggaactgggggatcttatatgtcttagtggactggggtctgaagtacactggaatttactgagaaacttgtttgtaaaaactatagttaataattattgcattttcttacaaaaatatattttggaaaattgtatactgtcaattaaagtgtttttgtgt

SEQ ID NO: 246860 - DNA, 1217 bp, Homo Sapiens
ttggggaacctactggtgtcatgtatataatgatcgagacagtcaagatagcaagaaggtagaaatcatcataggaagaacagatgaggcagtggagtgcactgaagatgaattaaataatcttggtcatcctgataataaagagcaaacaactgaccagcctttggcgaaggacaaggttgcccttttgataggaaatatgaattaccgggagcaccccaagctcaaagctcctttggtggatgtgtacgaattgactaacttactgagacagctggacttcaaagtggtttcactgttggatcttactgaatatgagatgcgtaatgctgtggatgagtttttactccttttagacaagggagtatatgggttattatattatgcaggacatggttatgaaaattttgggaacagcttcatggtccccgttgatgctccaaatccatataggtctgaaaattgtctgtgtgtacaaaatatactgaaattgatgcaagaaaaagaaactggacttaatgtgttcttattggatatgtgtaggaaaagaaatgactacgatgataccattccaatcttggatgcactaaaagtcaccgccaatattgtgtttggatatgccacgtgtcaaggagcagaagcttttgaaatccagcattctggattggcaaatggaatctttatgaaatttttaaaagacagattattagaagataagaaaatcactgtgttactggatgaagttgcagaagatatgggtaagtgtcaccttaccaaaggcaaacatgctctagagattcgaagtagtttatctgagaagagagcacttactgatccaatacagggaacagaatattctgctgaatctcttgtgcggaatctacagtgggccaaggctcatgaacttccagaaagtatgtgtcttaagtttgactgtggtgttcagattcaattaggatttgcagctgagttttccaatgtcatgatcatctatacaagtatagtttacaaagccaccggagataataatgtgtgatgcctacgttactgattttccacttgatctagatatggatccaaaagatgcagataaaggcacacctgaagaaactggcagctacttggtatcaaaggatcttcccaagcatgcctctataccagactcagttcactgcaaaaattacagtaacatctagtcttcacagtatggttatcag

SEQ ID NO: 246861 - DNA, 552 bp, Homo Sapiens
tatgtttaaaattctgatgtcatttattggcacaaaaattattctgatacaacatggtgtctagacatggctacactttatactttgtgcatttagttgagtatttgttctgctcataatttccaatatgtaccagaccttccctgtgttcagcacctccatgacagtatttctgttttctgagcccttgctctaaacagagtattttgaccactgaaaacatcccagaaccctgctgcagaaggccagtgagggtggtcccactgcacagtgatcccctctgtgcatctgctcagccgaggctgccagcgatctgaataaacctccctactagcggtcaggtcttgaattgaagcgtgtgagtcgcagcatcactgggtctgatggaagacagaccttttgtactcattttggcctatcttgcaaacatttctgctgctgtccacagaccagtgaggtcttgggataggtggcaggggtgaggtcagcatcttctgtgtctttacagtctaggatcctaatccatgttctccacgacctgaggcttcttgg

SEQ ID NO: 246862 - DNA, 1074 bp, Homo Sapiens
ttagagctattgtgtctttattttcttaaattttgcccaaggtaacgttatatatcccaccacttcattgctggtttgggtacataggattttgaaagtggtatattaaagtctttccttccaagtattttgtaatacttgaaaattcttagatgtatactgctaacaaaagttagaacttaaacatttttgtttttatcatttatagcctagattagggacatatttgcatcagccaaatcatcatttagatttgaaaataggcagatgaatgaacaaatatggtcattgctctttccttttactttcagagtctaagtatattccttaaggttagataaccagtctttattaaaaatataaaatttttcttcatgtctaatcccattgcatccacaatgctgtgatttatagtacatgatcaacacttaaaagtactttacatatgtgtgtaactgaagcaagttttcatgacctctgttagattctcaaaagaattcagaacttcaatttaagaatcaccattttaagaatacatgtgtacatatacacattaagcagtataaagcagctaaaattggcattggttttacactggtgcagtgtgcttaggtaaagtaacttcttccatgtttcaaggtcaggttcagagttgaatgaagtgtagatttaaatttaggattaggctttggaatatatcttgttgattgtctcacatttctgatattgactacttatcccatattctgtttcaaattctttatcatatttcaagttctattctcataacttcttggatcttggggcttaactaaggcaggtttagtatcccaaaattaagttggatctggaaccccaggatagagagttttgcactggacagagacctcttaggtttggttccacgaatcgaaaagtccatccctaagagaactcagggaggaaggaagaggccaaaagaaggcctatagtcgcggcacttcaacgctaacaggggagggagaggccagaactagcgggagaacagaatacgaaacaagcgagatgaagaacgaggcacaaagcaaaggaaaa

SEQ ID NO: 246863 - DNA, 882 bp, Homo Sapiens
tttaataattaaattataatttttacataaaagtgatcagagtgacattcacatgttccattcccatcaaaattctggcccataatagtatttcctaacagttttcatctctccaccctaagaaatactcttttagtgtattagtgtacaaaaccacatcccaggccctccattactctcctttccctaaagattccctactcttctacgtttttaacattcatatgtgacatttcatgtagacacaaaaccgtattttatataaaagatcatacataacatccctaaaacttcctgatgagcctagaattgtactaatcttttgagttattatgatttcagtgaatctatcagattcctttcctcaattgtgagtttgaagcatgacaactttcaggaccagcatcattttttttcctctggcaaaatatcacatctgactgcccatgtgtgacaatccctactttcttacataatccccctaattctcccattcagaaagtcactaactctgtcctaatatacaatttaaaacattgtccccaactgcataggcaacctgataaatcccatctcaattttccacttctgaatttgaaatgttcactgcacattataaagccttgtcaggatgctgtcccaatacacctcacaaaaccagagcataaataaaagtattaaattgaatcataacagctggtatttttttgagaacaaataatgtaccaaaaactatactaagcagtaagagtaaattatttccttcttattctcatcacaactctatggattagaggtaatctctcccattcttggtaggaaaatgaggcttggcaatactatgtcacttgtgcaatgttacacaatcagaaataaatccaa

SEQ ID NO: 246864 - DNA, 999 bp, Homo Sapiens
ctttgtacaaaaaagttgggtttgtggtactgctcaccagagtgatcctttcctacaaattggattttctcattccactgtcaaaggttgatgagaacatgaaggtagcacagaaaagagatgctgtcttgcagggaatgttttatttcaggaaagatatttgcaaaggtggcaatgcagtggtggatggttgtggcaaggcccagaacagcacggagctcgctgcagaggagtacaccctcatgagcatagacaccatcatcaatgggaaggaaggtgtgtttcctggactgatcccaattctgaactcttaccttgaaaacctggaagtggatttggccaccagatgtgttattctgaactaccctaaggctaattaggaagagagcatctggagtactaatgacagttgccagatggatgagggagtttatcgcaaaccatcctgactacaagcaagacagtgtcataactgatgaaatgaattatagccttattttgaagtgtaaccaaattgcaaatgaattatgtgaatgcccagagttacttggatcagcatttaggaaagtaaaatatagtggaagtaaaactgactcatccaactagacattctacagaaagaaaaatgcattattgacgaactggctacagtaccatgcctctcagccagcccgtgtgtataatatgaagaccaaatgatagaactgtactgttttctgggccagtgagccagaaattgattaaggctttctttggtaggtaaatctagagtttatacagtgtacatgtacatagtaaagtatttttgattaacaatgtattttaataacatatctaaagtcatcatgaactggcttgtacatttttaaattcttactctggagcaacctactgtctaagcagttttgtaaatgtactggtaattgtacaatacttgcattccagagttaaaatgtttactgtaaatttttgttcttttaaagactacctgggacctga

SEQ ID NO: 246865 - DNA, 756 bp, Homo Sapiens
ttggcgtcgtctcccggcagtgcagctgccgctaccgccgccctctgcccgccggcccgtctgtctacccccagcatgagcggcttgcgcgtctacagcacgtcggtcaccggctcccgcgaaatcaagtcccagcagagcggggtgacccgaatcctggatgggaagcgcatccaataccagctagtggacatctcccaggacaacgccctgagggatgagatgcgagccttggcaggcaaccccaaggccaccccaccccagattgtcaacggggaccagtactgtggggactatgagctcttcgtggaggctgtggaacaaaacacgctgcaggagttcctgaagctggcttgagtcaagcctgtccagagttcccctgctggactccatcaccacactccccccagccttcacctggccatgaaggaccttttgaccaactccctgtcattcctaacctaaccttagagtccctcccccaatgcaggccacttctcctccctcctctctaaatgtagtcccctctcctccatctaaaggcaacattccttacccattagtctcagaaattgtcttaagcaacagccccaaatgctggctgcccccagccaagcattggggccgccatcctgcctggcactggctgatgggcacctctgttggttccatcagccagagctctgccaaaggccccgcagtccctctcccaggaggaccctagaggcaattaaatgatgtcctgttccattggca

SEQ ID NO: 246866 - DNA, 859 bp, Homo Sapiens
ttggagcagatctcttggagtgaaggctgttagtcgccgcgtagaacccttgaagaagaggaagaggaaggcaagaggagtcagggatggctcttcctcagggacagttgacattcagggatgtggctatagaattctctcaggaggagtggacatgcctggaccctgctcagaggactttgtacagggacgtgatgttggagaattataggaacctggtctccctgggtatctcttgtaaatgtgtaaacacggatttgccaccaaaggggaagaacaatatgggagaagcgttctacacggtgaagttggagagacttgaaagctgtgacactgtaggcttgtccttccaggaagttcagaaaaatacatacgactttgagtgtcagtggaaagatgatgaaggaaattataaaacagtacttatgttgcaaaaagaaaatctccctggtagaagagctcaacgtgatagaagggctgcaggaaacaggcatattgaaaatcagcttggagtaagctttcagtcacatctccctgaactgcagcaatttcaacgtgaagggaaaatttatgaatacaatcaagttgagaagtctcctaataatcgaggaaaacattataaatgtgatgaatgtggcaaggtcttcagtcaaaactcacggctaacaagtcataagagaattcatactggagagaagccttaccagtgtaataagtgtggcaaagcctttactgttcgttcaaacctaacaatccatcacgtcatccatactggagaaaaaccttacaaatgtaatgaatgtggaaaggtcttcagtcaaccttcaaaccttgcaggtcatcagagaattcatactgg

SEQ ID NO: 246867 - DNA, 1316 bp, Homo Sapiens
  misc_feature (86)..(97): n is a, c, g, or t
ttggctcccatgttttttggagaagtgtaggagctacccacaaagtgcttgagggccatagtattgttcataatgtgaaaacttcnnnnnnnnnnnnaatttcagttagaaaatgtgtttcattaaccccttattaataaccaataatcaaattaaccagtcaatgaatcttctttagttaggcctgtaattagattgttagctcttcgtggctcttcaatgtcttttgaacatgtgggagatacttaataaaaagcatagctctaggacactataaaaattgctaattactccccttggaataaagacataagaacatttgcttaagatttaatatgttatatataggcttgggcatacagcagtgaggggtggggagattttgaaaagttctggtttgtcatttatgtagctggtagttttgttttgaacctgttatgagcaaccaccggaataatctgttccccatagaaactgaacctaaacttcaaagtttttattatctaatctataataataggcggagtcgatctggaacatacagctcgagatcaagaagcaggtcccgcagtcacagtgaaagccctcgaagacatcataatcatggttctcctcaccttaaggccaagcataccagagatgatttaaaaagttcaaacagacatggtcataaaaggaaaaaatctcgttctcgatctcagagcaagtctcgggatcactcagatgcagccaagaaacacaggcatgaaaggggacatcatagggacaggcgtgaacgatctcgctcctttgagaggtcccataaaagcaagcaccatggtggcagtcgctcaggacatggcaggcacaggcgctgactttctcttcctttgagcctgcatcagttcttggttttgcctatctacagtgtgatgtatggactcaatcaaaaacattaaacgcaaactgattaggatttgatttcttgaaaccctctaggtctctagaacactgaggacagtttcttttgaaaagaactatgttaatttttttgcacattaaaatgccctagcagtatctaattaaaaaccatggtcaggttcaattgtactttattatagttgtgtattgtttattgctataagaactggagcgtgaattctgtaaaaatgtatcttatttttatacagataaaattgcagacactgttctatttaagtggttatttgtttaaatgatggtgaatactttcttaacactggtttgtctgcatgtgtaaagatttttacaaggaaataaaatacaaatcttgttttttctaaactgcttcaaatacc

SEQ ID NO: 246868 - DNA, 995 bp, Homo Sapiens
ttggctcttccagcgtcaatgtactgggacagcaaacactcacatttgaagttccttctggccaccagcttgcagacagctgttcagatgaggagccagcagaaattcttgagtttccccctgatgatagccaagaggcaaccacaccactggcagatgaaggcagggctccaaaagacaaaccagaaagtaaaaaatctggtctgctctggttttggcttccaaacattgggttttcctcttctgttgatgagacaggtgttgattccaaaaatgacgtccagagatctgctcccattcaaacacagcctgaggcacgaccagaggcagaactgcctaaaaaacaggagaaggcaggctggttccgatttcccaaattagggttctcctcatctcctaccaagaaaagcaaaagcaccgaagatggggcagagctggaagaacaaaaacttcaagaagaaacaatcacgttttttgatgcccgagaaagtttctcccctgaagagaaggaagagggtgaactgatcgggcctgtgggcactgggctggactccagagtgatggtgacatccgcggcaagaacagagttaatcctgcccgagcaggacagaaaagctgacgatgaaagcaaagggtcaggcctgggaccaaatgaaggctgagaggtatggctcatcagtacaagagagatgcaaaaaactaagttggaaagtaaaggctacacacacatatggagcaccccatcccacagcacattacatccacctcacttcacagaacggagaacagagcagaaatgaccagaacacctttgtcaccatcacacagccctcctaaaatggaaccaaagcttcccagctccctcaaagctttggatgcaaagaaggcaccctgacttccacaagacaccagaattcacacggtactcagaggcactgctggggaagtttgttggtctttattagataaatttccagagacctgtccataatacc

SEQ ID NO: 246869 - DNA, 514 bp, Homo Sapiens
  misc_feature (370)..(370): n is a, c, g, or t
  misc_feature (394)..(394): n is a, c, g, or t
  misc_feature (442)..(442): n is a, c, g, or t
  misc_feature (488)..(488): n is a, c, g, or t
tcagtgttcattcaggttggatatatttgaaattgtagatttctatctgtacaacatctcctagttaatagaatttttttccttcccctcccttctctctcctcctccttttctaaccaaagggcattttatcaacaatcatgctgaattcaattaatatctcaagctaaaaaactatgtaattgaggttgtatctggagaagatgggaaaacattgtataatttaagcccttaattgtctgttgagcttttaggggctgagtaattgcctttcatacaaataaaagctttaactcttttctccaggagtgtaccaccgtccttagaatcaggtgttttaaatccagtttcttttaattaaatgggactntagtgatccctaccctgtagaganatcaacagaactagagaagctaagggcttgatcaggtttcccctagancctgtgttgcctgcctgctgtatcttcccatgtctttcttattcancttctagaagtaggagaaggttgggg

SEQ ID NO: 246870 - DNA, 475 bp, Homo Sapiens
gcttttcagtagctaactttataattacagaaaagatattaaagaattttgattcaagtatttaaactgtttagttatgcatgcggcttattaaccgataattattataccatttagtttagtgatcagtatgagaagcaatacctaatcctatgttgctattgtattttttcctagttggtgtgcctgctcagtaaaaacatatactgtatgtgtatacatatcctgtgtttatgtgataggtcaatttatatatttttctataggagaatggtgtaacaagttccctatctcccatatttatttgtccatagtataagtgggcacattgatgattatttctagaactagtttctgagattgtcagccctttgtctaataataatggcagtattaatgattgacttctgtcactgccatagttacctggattgtcagccttgtgtagccttagtctaaagtccttaagagttcc

SEQ ID NO: 246871 - DNA, 1688 bp, Homo Sapiens
  misc_feature (1460)..(1483): n is a, c, g, or t
  misc_feature (1645)..(1645): n is a, c, g, or t
ccaactttgtacaaaaaagttggatctgaatgaggacatcagttccctgtccactgaagagcttcgtcagcgtgtagatgcagcagtggctcagatcgtcaacccagcccgagtcaaagaacagttggttgagcaactgaaaactcagatccgagaccttgagatgtttatcaacttcatccaagatgaagtgggaagccccttgcagacaggtggtggacactgtgagtgcaaggccggtgggaagacaggaaatggctgcagcagaacaggcagcagcagaacgcctccaggaaacagcaaaacaaaggcagaggatgtgaagaaagtccgggagacggggctgcacctgatgcggcgagcgctggccgtgctccagatctttgctgttagccagtttggttgtgccacaggccagatccctccaaccctgtggcagagggtccaggctgacagagactactctcccttgctgaagaggctggaggtgtcagtggacagagtgaagcagctagccttgaggcagcagccacatgaccatgtcatcacctctgccaacctccaggacctctctctgggaggcaaggatgagctgactatggctgtgcggaaggagctaacggtggctgtgagggacctgctggcccatggactgtatgcctcctccccagggatgagccttgttatggctcctattgcttgtttgctgccagccttctcctcggccccagaggccatgcacccgtgggagctctttgtaaagtactaccatgctaagaacggccgtgcttatgtggaatccccagcccggaagctctcccagtccttcgcccttcctgttacgggaggcactgttgtcacccccaaacagagcctactgacagccatccacatggtgctgacagagcatgacccttttaagcgcagtgcagactcagaattgaaggccttggtgtgcatggcactgaatgagcagcgtctggtgtcctgggtgaacctcatctgcaagtccgggtcactcatcgagcctcactaccagccctggagctacatggcacacacaggctttgagagtgccctcaacctgctcagtcgcctcagcagcctcaagtttagcctccctgtagatctggctgtgcgccagctcaaaaacatcaaagatgccttttgatgagagtgccctaaccccagacaagctccttgttcagtagggatagatgtgctagtcttctagcataggagcaaggaatcagaggtggggttaaaggcatttttcccagaccctgctcaggcagtcggccaaatgagtgcaaagtctgttttccccaccaacttagctctcggaaagatgtgctggaaggaccctcttggtaaaaaaggttatggccaagccccggcgccgttgggtatacccctggtaaccctcaaccacttttgggaaggagaaggaccgcccgaannnnnnnnnnnnnnnnnnnnnnnntattaaatattttatttcaccgcattgccagtgtatacaccctaatttagaaccccatattgttataccgccatatttacgcattcattccctcttcaaatttcacgcatacgtacgatgttacgatccacttgaaaatagcacgaaacaaaagttagaganttctcaaaacactagacattagcacacgtgaccttcgctagta

SEQ ID NO: 246872 - DNA, 1170 bp, Homo Sapiens
  misc_feature (103)..(103): n is a, c, g, or t
  misc_feature (993)..(993): n is a, c, g, or t
ttaagatccagtgtccatggaaacattcccacatgccgtgactctggactatatcagtttttggaaagcagggttcctctgcctgctaacaaggtatagacanggctgagcagggttcctgtggcccaggatggaggccaccggctgccctgccatcccgtctgcctgccatgggacggctcctctgagtgttccctggccccacgtgtgtggtgtttgtgtgtctgtgcctggccaagggaggtgccaacactgggcttgccacagccccaggagaggaatttggggcctaggaaccgagggcacacgggactctagcctcatccccaggacccccttggctcagagtgtggtgctagaaactggtccccagcccagccccagtactgccacctttacacctacccctgctagtccccatgagggcttgcccactgatagaagctgccaagcagggagaacctgtgccaacgtgtggagtggggaggttgggcctgggccctcaaccccttgcaaccttccctagccccctcaatagatgagcaggtcaggctgtggcccttacctcccccgcagttctcggccagtgctgcaggcgggtcacctctcttcggttcttggacatccctggccctgtgtgtgctgcttgctcctgttctgttcgcttggtcccgttccgttcgggttttgctttgcgttagggtgaagaccctagcgtccagctcccctcaacgctatatttttgacactaaaaaagaaggtttctaaattgtaggagcaggattggaaatactttgcttgcccttgtccatcttttaggattgggccccaggagactgaggtcttcctgggccctcattgctgcttatcgtaccccccatcacctgcacatgggacagaccgggctggagggtgaccttgggtgtgtacgtcccagcaaaagagctctggcccgcatctcgctgtgcctgaagggggatgaatgcgatgccncgccgaggctttgggctgctgcactgcatgctgggactgctcctactctctgtcccacccgtcacccagctgtggtccggctttgggagagtggtgaattgcgctgcccgaactcggagcggagcagggtagggaccgtgtacagcttgataacccttaataaaaagggagtttgaa

SEQ ID NO: 246873 - DNA, 908 bp, Homo Sapiens
  misc_feature (620)..(620): n is a, c, g, or t
atcagagcttttttgtgcagctccatcatcatcagtactctgtttcccaaattctagctgccttgaaagacttgtgtttcctcaactcagtgaaactagtaagtaggctctgttaacctccccttcccccagctacttctaggcctcaagctttggcagccacaggactcacttgatttgtttcccttttgttaggtatacagttctgtgctaccttgtgtgtagagtttgaaaaccattgtttttttgtgtgtgtgtctaattttctagttgttaaaggtgggtgggaggtttaaatctaatttctgttagttgggagtggaagttacctctgctttaatctaaatagttccctagtttttgtttgtcttttatgacttgacattttgaataccactttggagagcatccctcaattcgtgtttgtttgatagttcctcaagattagattgaggtaatgcatttttggcatgaatacctcataagcggtgttgtgtccctcttcgtgcacatcaggaagcacatgatgtctatgttttccattattgtgtgttaacttgtttaaggggatgtctgtcaggtttctccagggtaaagttgcctatttttcccctctgtantctgtttaagttaagcaaacttttcacccactatttttagcatctgttgtcaattagaaaaaaatccttaaattacaaagttagaataagtctgctaaaagaaaaattgtaaattaaacagtaatagagaaaagtaaaacatgatggtatatacatttttaaaccgttttttctctgcacagacaaatcttgcaatatgaagagatgatttccaggttttattgaataaatgaattgtaatttttacttgaaattatcttatttagtataataaatattacaatatta

SEQ ID NO: 246874 - DNA, 849 bp, Homo Sapiens
  misc_feature (51)..(64): n is a, c, g, or t
  misc_feature (552)..(560): n is a, c, g, or t
ccttttaaaagccaactttgtacaaaaaagttgggcaagaaagactgtttnnnnnnnnnnnnnngactcatgttaccttgagaagaattctggatgcccaggctggtgaagaagggattgacaatggaccatcttcctaggaactcccaagtaaactatttcaggacatgtatctgctgaaatgtattttattttcaaggtggaggggaaaatcgtctgtttcctaaatcctgtttaggatctgatagtctatgcctttgtctccgagtactgcagaactgacattttgacggtctaccagcgtggcggctggtgttggtcagatgcacctgtgtgcactgggggagggatggtttgggcaggtgcagatccaagggctgtggtaaacgggagagcttgtgtttttgaagtggaaaaaaacccaagagtttgtacagacatcctgtcttcccagagaaggtggacactcttgggctcattgtaaagtgcctgctgcatcaataaagctcttggcttattagtctatacattgcggtgtgtttcgtgtatgtnnnnnnnnntggtaatgaatgggatggtaatgaatgagagttcagttgttgttccggaaacccgatgtggaaggagtagacctgtgtccctgttgagccacccctgggagcgagcatggcaatccacaggccctctgccacaggacgccagcctcggcctcagagctgccggctgctgcagagaggtgtttgctgaataaactatttattgtttcttattcctttgatttgtatgtaattaattttggagcttatttaattaatttaataaagtgccaaacatttaataattgaaaaa

SEQ ID NO: 246875 - DNA, 1138 bp, Homo Sapiens
ccggaatctgaggtgtgagtagagcctgggggagagtggatccaggtgaagggggcagaggactgggagttttcgtcctcttgaataagaactcgacaacagagtgggaactttctgtcttgtgatccattgcctgcacagaggacactcgatcgtgcggcgcgcagggcggggggccgccgctgcctccccgcgggatggctggcactgtgctcggagtcggtgcgggcgtgttcatcttagccctgctctgggtggcagtgctgctgctgtgtgtgctgctgtccagagcctccggggcggcgaggttctctgtcatttttttattcttcggtgctgtgatcatcacatcagttctgttgcttttcccgcgagctggtgaattcccagccccagaagtggaagttaagattgtggatgactttttcattggccgctatgtcctgctggctttccttagtgccatcttccttggaggcctcttcttggttttaatccattatgttctggagccgatctatgccaaaccactgcactcctactgaccactcttcaggaatacgaaaacctgttctctccttcattgtgatgacattgatgagcaggaaggcactattcagagccttgttttgacagccctcatgccttaaggttagaggagtatctgtccatcactaagacaaatctctggagtcctggcttccagaaacaggattgccaaattgtccctgtggggctagattcttaccagcttaagaaggatattgctatcttcttagtacccgtaccttaggatttccaactgttttgaaagggaaatagtaacagtgatctgcttagagtggattttcactcaagtccttagtaagtggattttggggaaaaaagcacctggggcttctggttctttttgataatatataaaattattcattatgaggttgcagttgtttgctaaggaagaggcactcaaatttgaaaggttattttaatgtgataaatttggaagacttactcagatgttgtcattgaacactctgtgcatatatttctgcagagctctgtgaaggcaatgagtgtcacttccctctgctctaataaagcaataaataatagctaaagggctgactttcacttc

SEQ ID NO: 246876 - DNA, 204 bp, Homo Sapiens
cagctggacacaggatgggcctggtgttggtgcatgtgctttggactagcatttatgcttgcaggtgttattctaggaggagcatacttgtacaaatattttgcacttcaaccagatgacgtgtactactgtggaataaagtacatcaaagatgatgtcatcttaaatgagccctctgcagatgccccagctgctctctcccat

SEQ ID NO: 246877 - DNA, 668 bp, Homo Sapiens
  misc_feature (39)..(39): n is a, c, g, or t
  misc_feature (55)..(55): n is a, c, g, or t
  misc_feature (74)..(74): n is a, c, g, or t
  misc_feature (613)..(613): n is a, c, g, or t
  misc_feature (641)..(641): n is a, c, g, or t
  misc_feature (647)..(647): n is a, c, g, or t
cacagacataaccccaccctttacattttgtgacagtgnattattttttaaagtncttctttcatgtaagtagncaaacagggctttactatctttcatctcattaattcaattaaaaccattaccttaaaatttttttctttcgaagtgtggtgtcttttatatttgaattagtaactgtatgaagtcatagataatagtacatgtcaccttaggtagtaggaagaattacaatttctttaaatcatttatctggatttttatgttttattaggcattttcaagaagacggattatctagagaataatcatatatatgcatacgtaaaaatggaccacagtgacttatttgtagttgttagttgccctgctacctagtttgttagtgcatttgagcacacattttaattttcctctaattaaaatgtgcagtattttcagtgtcaaatatatttaactatttagagaatgatttccacctttatgttttaatatcctaggcatctgctgtaataatattttagaaaatgtttggaatttaagaaataacttgtgttactaatttgtataacccatatctgtgcaatggggaataaagccggaattctgcagntatccatcacactgggcgggccgttcgngcctgnctctagagggggccccattcg

SEQ ID NO: 246878 - DNA, 1077 bp, Homo Sapiens
  misc_feature (574)..(589): n is a, c, g, or t
  misc_feature (702)..(711): n is a, c, g, or t
gaattctacctgctggacagaaacctggaaagttctttggaattcgctgaattacagtttagtatgtcctgattacagagtgacaatatttatcaagcctttgttatattggattatcttctctcttaaaatacaactgtattataattgaaatgacagcccaaaattggatggtttaccaaaaccaatgaaagggatttcacacatcaatttttatttctgttttgaagagcacatgctatataataattgctagtagcaactgcagtaaaacaggtgataagttattttctctgaaaagatccagtcctagagcaggattcttcgatcattcatggcagagtgaaaaaggtttgtatggttcttgtccaaataactcagttcttaaaattcttaaaatgatcgtaaaccattatcctttaaaggtttatttgaagatgctgttaaagtacagaattttgtgtacaggtagatttttccgtccctcattaatagtgccttcttaattaatacagactggtgttagctataacaaaactccagtaaggccaaagaatcccaagttctttgtggnnnnnnnnnnnnnnnntcttttagggtcagattttcccttctaatatcattgaagatgatgttgcattgatttattcataaagtattttaactataggaactctagaagataatggttaggcaagtgannnnnnnnnnaaatatggttggcgtaagttgtattttgaaattcacttattttaaaatcgaagaggattgtaatcatggaaatagaatgtttgtatctacctgcccacattttcttaaaaagatatttcatatacagataatgaagaccaagctagtggctgcactgtaggtctgctgcttatttgtatttgttttgcttctgtttatgttgtagaagctgaaattctagccacatgcttcaattctgttattttgatacttatgaaaatgtattaaggttttactatattgtgcttttgaaagccataactcttaagaaactttgtttttggatattgtttgctaattctttactttaataaacctcaaaacctg

SEQ ID NO: 246879 - DNA, 1372 bp, Homo Sapiens
  misc_feature (645)..(687): n is a, c, g, or t
tctgtacatgaaaagggcatgatcagctcaagcaaaactgatgatctcacctgccagcaagaggaaacttttcttctggctaaagaagaaagacagcttggtgaagtgactgagcagacagaagggacagcagcctgcatcccacagaaggcaaaaaatgttgccagtgagagggagctctacatcccatctgtggatcttctgactgcccaggacctgctgtcctttgagctgttggatataaacattgttcaagagttggagagagtgccccacaacacccctgtggatgtgactccctgcatgtctcctccgccacatgacagtcctttaatagagaagccaggcttggggcagatagaggaagagaatgaaggggcaggatttaaagcacttcctgattctatggtgtcagtaaagaggaaggctgagaacgttgcttctgtggaggaagcagaagaagacctgagtgggacccagtttgtgtgtgagacagtaatccgatcccttaccttggatgctgccccagaccacaaccctccttgcagacagaagtccttgcagatgacatttgccttgcctgaaggaccacttggaaatgagaaggaggagattatccatatcgctgaggaagaagctgtcatnnnnnnnnnnnnnnnnnnnnnnnnnnnnnnnnnnnnnnnnnnnctcaaagatgaagttcaaagtcagtcctctgcttcctcagaggattacatcatcatcctgcctgagtgctttgataccagccgccccctgggggattctatgtacagctctgcgctctcacagccaggcctggagcgaggtgctgaaggcaagcctggggttgaggctgggcaggaaccagctgaggctggggaaagactccctggaggggagaaccagccacaggagcacagcataagtgacatcctcacgacctcacagactctggaaacagtgcccctaatcccagaggtagtggagcttccaccgtcactgcccaggagctctccttgtgtacatcatcatggttccccagggagtggatttaccagttacccataccagaagtttcttcagtccctgatcagatcagaggagagcccagaggctcatcatgacttgtaaacagcagacagaagagctatgaccactcaaggcaccatcatgggagcagcattgctggaggactggtgaagggggctttgtctgttgctgcctctgcatacaaggccctgtttgctgggccaccagtcactgcacagccaataatttctgaagatcagacagcagccctgatggcccatctctttgaaatgggattctgtgacaggcagctgaacctacggctgctgaagaaacttctggt

SEQ ID NO: 246880 - DNA, 1003 bp, Homo Sapiens
tgcagtaaaaagttttaatcaggattataaaccaagatctattttgtgtgtatgtctgtatctatgttcacatcttaatctgagacttctaaacattttcccacaggataatctttgtgttctgcggactttcacttacctttgtgatgagtttcacctgacttttcctggctttttccctaggctgacatgacatgtagaggctttcgagaatatcatgaaaggcttcagacctttttgatgtggtttattgaaactgctagctttattgacgtggatgatgaaagatggcactactttctagtgtaagtacagttctaaagcaacagtagaccttattacctccacaaagccagcattttaattgtggcagcccaattattgggacagtataatgatatttttcccaggaaagaaaaactattgtttatgaggcttgagttttccttcattatgctttgggagaccttgagaatagagctgaattaaatgctgttgtccgttagggccctgaatgtaggcttaaacagtaaaatgagctttgcctgtgttttcttttacttgccacctattcatctttataataggcaagtgcactgaagtgatgtaaagaggtctgatttatccaagttgctgcacaccaattaagtgaattgtacattcagaacatagcaggtgtacccattgggccctcacagagtagcttgctgacactgaaaattcagtcagagaatggaaaagaaaatggacactgcatgggagcgcgactgtaattgacctgcttggctttctgttttatctgcagatttgagaagtataataaggatggagctacgctctttgcgaccgtaggctacatgacagtctataattactatgtgtacccagacaaaacccggccacgtgtaaagtaattggcagtataacacgtgccttgtcttttatttcagaagaaggaactgctgaagtttccaatacttgttataatagtgttgatttgttt

SEQ ID NO: 246881 - DNA, 436 bp, Homo Sapiens
tctcattttcctacaacactggtgataacacaacatttcctgatgctgaagataaaggaattcttactgttgatgaacttttggccatcagaattccattgaatgacctttttagatgcaatagtttatcaactttggaaaagaatgatgttgtccaacactactgggatgttcttgtacaagcttttgtccaaaatggcacagtgagcacaaatgagttcctgtgtgataaagacaaaacttcaacagtggcacccaccatacacaccactgtgccatctcctactacaacacctactccaaaggaaaaaccagaagctggaacctattcagttaataatggcaatgatacttgtctgctggctaccatggggctgcagctgaacatcactcaggataaggttgcttcagttattaacatcaaccaaccacacct

SEQ ID NO: 246882 - DNA, 1006 bp, Homo Sapiens
  misc_feature (162)..(238): n is a, c, g, or t
ttgggtatatttattaaaatagattgcatgttgcaatacggttttctgaaaggggtctcattgactattaaataaatgactactactaaacttgtctgtagtcattaatcttaaaattacctgaaaatctgatgacagctgccttccctaactttaatgtannnnnnnnnnnnnnnnnnnnnnnnnnnnnnnnnnnnnnnnnnnnnnnnnnnnnnnnnnnnnnnnnnnnnnnnnnnnntacacctttcatattatgtattatcttgcttaatgggttttatcttgattatccagttacttccatcctcttcccaatgttaatttgcaatagttttaaaatgggaacaaatgaatcaatcatcagatagttaaaatgaaattaaatcagctgcctaataatttatggaattcattggaatgtgcttaaaatgctaaagtgtatgtcattgaacatgaaatcttttttcaggcacatacattgttggtattgatgactttttaaaacctgtgggataaacttgcactgcacacggaagttttattcttgtatatttagatttgtatgcttgtgagtaaaaatgtgcatttgtaaatactgtgtttttaggttgaatcaattaagtcttaaaactgtaaatttattaagcttgttgccagtaggtttaagaaaatcatgatctcacatgcctcactttgacatttatcatgccttttattaaaaatatcccttaggaacagtaagtttgccttaactctctgcatggtttaaaaagccattggttttgtgtgtgtttacagtaattatgcagatgactaaatgagttgacacagtaaaattacttccatatggtacagtaacaacctaactcccttctacctgatgtaaccattttacaaattaatagttattgtaccagtctttccacattttcaggttaatctgaccctatgcagaatttctagtgtgattttattgtgaaatgctaaatgaaacattgtcgaaatt

SEQ ID NO: 246883 - DNA, 1241 bp, Homo Sapiens
  misc_feature (12)..(12): n is a, c, g, or t
  misc_feature (84)..(84): n is a, c, g, or t
  misc_feature (583)..(591): n is a, c, g, or t
aagctctaaatngagagatgtccctactgtgcggcaggcggaggagacctatgtccagggtgctgcagaaggacgcggacaggnagtcacagatgagagcggagatccaggacatgaagcaggagctctccacagtcaacatgatggacgagtttgccagatatgccaggctggaaagaaagatcaacaagatgacggataagctcaaaacccatgtgaaagctcggacagctcaattagccaagataaaatgggtgataagtgtcgctttctacgtattgcaggctgccctgatgatctcactcatttggaagtattattctgtccctgtggctgtcgtgccgagtaaatggataacccctctagaccgcctggtagcctttcctactagagtagcaggtggtgttggaattacctgttggattttagtctgtaacaaagttgtcgctattgtgcttcatccgttcagctgaacaggaggatggatacagccgcgaggctaaaaaacggatttcctcttcctagcttaaaatctgatttacactgttttgttttttaagaaacaaaagtgcatagtttagannnnnnnnnggttgaatatgttgtgttcttggactttatgagatagtcttataagaatcacgattttctacacctgtcattgagccaagaaagtccagtttatgacacgtatgtactagtgaacaccgtcctcgatctgtacgaaatgtgaaatgtttagggacatctccatgctgtcacttgtgatttgccctcttatgtattttggtcatattgccaactggaaagtcaaaattttctaacaactttaagtaagttctttgaagacttagtgctgtttttaatccagtttagaaagtaacttaattttaataccgctactaaaaattcgaaaatttcttctttaatcacattcaatatggttaaaaagaacaacactaattgacattgcgtgggctttttctccctttgtttaaaaatgtcatttgttgagcaagagttgtatagtattatctacttacttgaggctgttaatttttcattacagtgttttgtaaatgtatccacgagaccatgatgcattgttttgtgctcaacttgtgttttgtatttacagcattttgaatgaagtgtattttataagcatttaatatttatgctctttagaatggaacacagaaaacaacccttataagtcctgattaaattaatctgaaccc

SEQ ID NO: 246884 - DNA, 396 bp, Homo Sapiens
tgggttgggttttttcatgggtttttgttttgtttatttcgaatactgaaaaagtcctttgggctctgtggggttccccacgctcacggctcctttttcccacactcactgcccttcttcccacagcaaatctatttcaaggacagtactttttaaaatgattaatgttgagttctcaactagctctgcagaactagaggagctgtttgcatctgtctgtgcggatggagtttcttttatctgacaccaggtctccaaccacactgaaacaaggcatttatctacagagctcaactagaaccccttttcattaggctactccacttccttcccctcatacctaccccacatcagccacgtggttaagaaggatagtcaggaatgtttttaccaact

SEQ ID NO: 246885 - DNA, 2077 bp, Homo Sapiens
  misc_feature (820)..(852): n is a, c, g, or t
cttcaatcaacagactttggggttcttcatgaaagatgcgatcaagaaatttgttgtgactcagtgtattgttgcctgtgtcttcacttctactttacattattaaaattgggggtgactatttttttatttatgcctggctgttcacattagttgtgtctctggttcttgtcacaatctatgctgattatattgcccctttatttgacaaattcacacctctgcctgagggaaagcttaaagaagaaattgaagtaatggccaagagtattgactttcctttgacgaaggtgtatgttgtggaaggatctaaacgctcttcccacagcaatgcttatttttatggcttcttcaagaacaagcgaatagtttatgctgcataaactattcaatattattatgtccagaagtgtatatatgctgagtttcattctagctaagaatagaaagtagaataaaaggagactaggtttttatttgacctttgaacaaagacagtagatccctgatactgagtgactctttaagagtggccactcatcaacacctatgggctgattcagagaaacaggaaggtagaaattaagaagagattctttacctgaaatcttgccagagatggcagtcccgctactgttctgtgccttctgctgaaaagggcatggaaagattgctgccactcttactctatagtcattacaggaaagccatcctttctaccagagagatgactttttctatttgagtttcaccttgggagttgcacattatttgcaaggaagtatttcaaatcttatcttgttctaatgtataaacaggnnnnnnnnnnnnnnnnnnnnnnnnnnnnnnnnncaggaggaggatgagcagaatgatggcggtggtatttatcaaacttggccctgaaggatgccgctagcgtctcccatccagcaccatgaagtcaccaggggtgtggctccctccatggctctcagagatggcgtatgcagaatcccactttctgccgagtttacagctcagtgcactgattcccaggctcctcaaatgaagagagctcccagatgctgctgtcttgcagtagtggctcaatgtcctcatcactgccccgttctggggtgttggtcaggctgccgctgctgctgttactgtgtttttgaactccactggctttactgtattcaggaatgaataaggcaaccagaaaagacataaggactatacatgccccaaataaaaacggcgggcctgggatgacagctccctgcaggggaacgttgttagaattcaatttcgggcccaactcagtcagttccacatggaacatgtagaatatgaagccatacagtgctggccccaggccattgcatagtcctcttattccagttatgatcccctgggcaactcctggcctgtgatccaaaaccgtaccaggctaactggagcatctggaagcccaagccaaggaggacagtattcttatttcctaatgatctcatcaagatgctaagaaaggccgtctgcaaagtaaaggagacaactctgaaaaaccacatcaacacacagaattaaaatacaagctctgtgtgtgaagacccttccctgatgaccagagacctctaagggcacactgcctgacctgcaacctcagagtctggacagtactgatgaccttctacaggggtggagtgttgggggctcccagcctgacctggggctcaatgctttcagcctcctccctaagaagcctgtctacctggtgctctgctggcacttcctgaaaggatatcacaactgttcaccagttaccatgactgagagggacagcctcagtctctggagaaatactaatcacttaaatatctgtgaatagcaaactcctgctgaacatttacagaatatgagagcttctgctggaagtttacaaagttggaattgggatgtaagtttgattttaacaaatatatactctgctaaatataactagttgagaaagtctaaaaaggggttggatgaaagatgactgggctggccgggtgtggtggctcatgcctgtaatcccagcacttttcaccaa

SEQ ID NO: 246886 - DNA, 1190 bp, Homo Sapiens
  misc_feature (1073)..(1081): n is a, c, g, or t
ttggcgcagtgtcccactgccggagggaagatggcggcgccctggtggcgagccgcgctgtgcgagtgtcggagatggcggggcttcagcacctcggccgtcctgggccgccggacacccccgctggggccgatgcccaacagtgacatcgacttgagcaacctggagcggctggagaagtaccggagcttcgaccgctaccggcgccgagcagagcaggaggcgcaggccccgcactggtggcggacctaccgagagtatttcggggagaagacagatcccaaagagaagattgatattgggctgcctccacccaaagtctcccggacccaacagctactggaacggaaacaggccatccaggagcttcgggccaatgtggaagaggagcgggctgcccgcctccgcacagccagtgtcccgctggatgccgtgcgggccgagtgggagaggacctgtggcccctaccacaagcagcgtctggctgagtattacggcctctaccgagacctgttccacggtgccacctttgtgccccgagtccccctgcacgtggcctacgctgtgggtgaggatgacctgatgcctgtgtactgtggcaatgaggtgactccaaccgaggctgcccaagcgccagaggtgacctatgaggcagaagagggctccttgtggacgttgctactcactagcttggatgggcacctgctggagccagatgctgagtacctccactggctgctaaccaacatcccgggtaaccgggtggctgaaggacaggtgacgtgtccctacctcccccccttccctgcccgaggctccggcatccaccgtcttgccttcctgctcttcaagcaggaccagccgattgacttctctgaggacgcacgcccctcaccctgctatcagctggcccagcggaccttccgcacttttgatttctacaagaaacaccaagaaaccatgactccagccggcttgtccttctttcagtgccgcttggatgactccgtcacctacatcttccaccagccttctggacatgccgggagcccggtgtttgagtttcgtggggnnnnnnnnntttaccaccccccaagcagaaaagccgcttccccccaaccgggaaagaccccctggcgctttaccttggaacccgggtaccagggggaccagagtctttgagaccccct

SEQ ID NO: 246887 - DNA, 895 bp, Homo Sapiens
  misc_feature (664)..(682): n is a, c, g, or t
ttttgattaacatttggggcctgataggggaaatggtgaagcaatggaaaagaacagacaactaatgatttgcttctatgtccagaatattttacctttaaaaaaatgtcattggcaccataaataaggactgtgagagactgtttaaaagctgtgaaagtctgaaacctataagccaaggtgttccctgcctaaacttattgctgttcccacaaaggactaagcctgttcataagttaccaaagttgccattttggagatggaaattgacgaggagggaaggtcttttattggagagtatacagtacaagcagatcattctgccttagaggtgctaattcccgaaattagaagaccctttcttttccagtaatgaagttataaatatcagcttgttcatccaagccactggctgaggtgttaggaagaggaagagggtggtagaggaggtaagacagtagggaaagacaagggcccatgctcttagtggggaaaactcttggagccgtttactttgagctttgaacactgaaaccattgttggcagggttcagtcactgacagcacaagtttcactgaattgatccaagagtttagtgatttcaaaagccttggtctcaggagaagattaaactttcatattgggcagtggttcactttaaannnnnnnnnnnnnnnnnnnaaacaattttttaagaaatcctaataagtaacatacccaaaatgctctgtcttgagtcatgagaaccatcagttcttgatattgtctagacttgcatctagagctacgttgtaaaattcttttaggcatgtgttagatttctgtgtaaactttgtttaaatgtaaacttcatactacattgtcagtttttgtcttaataaaactatagattta

SEQ ID NO: 246888 - DNA, 296 bp, Homo Sapiens
caagaattcggcacgaggcctttcttcatctgttgttatttagaactcacctctcacactctgttctttagtgtccttacctttatcttaccacacacatgggtgtttctattatccttggaagcacagacctcgggcatccccttattgcctgatgggccaacaccaacagttacggagtgcttgagaaggggcaagtttcacagaaatggccagatagggccttcctacagagcagcaagagtaggcctagcagaaagactgctgatgtaacacggacccccagccctgtcagg

SEQ ID NO: 246889 - DNA, 1081 bp, Homo Sapiens
  misc_feature (302)..(464): n is a, c, g, or t
ttggctctttacagaaaatattttcttggcccctgttccagagcattcatcaagtcagataaagggtttaaaccagtcagagaaactaggtggaatggaaaagtactgagagataattggggacagaaaaataaaagagatgggaaatgctgcatcaaaatactcctacctctaggatgttactatatattgttaggagaattcaagttattgaaacttgccaaattcttgagtgaagaggaattcatttgagagccaaaatttgactaaggaaagaagaccaacatgggctttccaaagtnnnnnnnnnnnnnnnnnnnnnnnnnnnnnnnnnnnnnnnnnnnnnnnnnnnnnnnnnnnnnnnnnnnnnnnnnnnnnnnnnnnnnnnnnnnnnnnnnnnnnnnnnnnnnnnnnnnnnnnnnnnnnnnnnnnnnnnnnnnnnnnnnnnnnnnnnnnnnnnnnnnagaactggcagacaataaatatagagtcccccactcctgcttggtgctctctttctctctccttctctacatagagaagtgccagagcatccgtcagtagaagttacttaaggttggctgtgtcttccacatcttttgtttacccatgaagaactgtgaccatcttgttctgtgtcttgtcataaagatgggacgtgacttctttctgctcttgcttccatctggtgctgttttctgcacagcctccttgagaccttccagaaccttcttttttcctacttcgtatcacttaaccagtagctatctgggatggttccagaggctgaagtttgcagttgaataaccattttaaatagtgttaagcgacttgggatctctgggccctttgcgtttcagtatttgtcctttttatgccctgaatgtttaacctgccacctgtttgtactgcaacatgaatcttgggaaattttattgttatgcatttcaaatgttttttggttatccgtaaaactaatgggccccttattgggctcatttgtccataaaagaagcctcgcataaggattggcccacccacgctacacacaaccttccaggcatttaatgtccgggtgcgg

SEQ ID NO: 246890 - DNA, 770 bp, Homo Sapiens
gacacattgcttttctcccatcccggttgcaatctcactcggagatcacagtaccacccaggtgtggcagtagacaacaacccagaaattgagacagggatctcttaccttgggaaaataggggttaggcatgaaggtggttgtgatctaagaatgatggtcgtgttattaaatagcattaagactggaagtggacaagagtgttgagcatcccttgtctaacctgctctttctctttggtgccccttatctcaccccttccttggaatttaataagtctcagtcatttcccattgtagcctaaaacccactcttggcatctcctctagtattttccatgtatcaggccagaggtgtcttatgtagggagggggcaagtatgaagtaaggtaattatatactactctcattcaggattcttgctcccatgctgctgtcccttcaggctcacatgcacaggaatgctacatgatggccagctgcttccctccttggttatcatccactgcaggtgctagttagaaaggtttggagggatgacttttagtaaagtcatggggattttattgatttattttcacttttgggattttgtggggtgggagtggggagcaggaattgcactcagacatgacatttcaattcatctctgctaatgaaaagggttctttctcttgggggaaatgtgtgtgtcagttctgtcagctgcaagttcttgtataatgaagtcaatgccatcaggccaaggaaataaaataattgcttacctt

SEQ ID NO: 246891 - DNA, 878 bp, Homo Sapiens
ttcaggagggatggggtctgtggctccagactgacctaggttggggcttgttgaggaggagctggcagcctcctcaatgggcttgtgggctcccgagcttcctgtggggaccactggggactttccattctgggaggccccagtgtgatccctgtctataggcttgggaccattgggcccaggctcctagggtctctggacgggaaaggatcctcttccccactctctcctgctcctttaggggccacactctggctcacttctgggtgaggtgccaagctcagctcctgtgcaccctggctgttctcaggcccttcctcggtgtcgtcctctgaggagtccacctcacgaatggcttcttgcttctgcagcgactcccgtcgttcggctcggtcctgccggagggtgcctagggcccgtgagggagcaggctgcagcacccccttccctggcagggcccccttgccagacagcacactcctggctccaactacctccagagggctcacttccctgggcggcagttccttctttagttcagagtggggcaggtcaaggctgtgcttgcgagaagtggctagcttcttctcagaggcggcaagtgctgctgccagtttctcagccgactgcaccctcttgagtagtggtgaacggggtggctccgcactcttgggccgtgagagttgcctgcccaggggaggtgacaagtgaagctttgtgggaaaggcctgggctacatggccagacaggggcgatggggaccgctgaggtgaagctgttcggacgcgtgggtcgacgatatcccgggattccgggagcccgggtacccaggcactgcattaaataaaaaagcccaacccttgttctactaagttaca

SEQ ID NO: 246892 - DNA, 1128 bp, Homo Sapiens
  misc_feature (951)..(951): n is a, c, g, or t
  misc_feature (1101)..(1101): n is a, c, g, or t
ttggatcctggcggattttcaggcatgtactggcattgaaaacattgacgaagctattacattgcttgaacaaaataattgggacttagtggcagctatcaatggtgtaataccacaggaaaatggcattctacaaagtgaatatggaggtgagaccataccaggacctgcatttaatccagcaagtcatccagcttcagctcctacttcctcttcttcttcagcgtttcgacctgtaatgccatccaggcagattgtagaaaggcaacctcggatgctggacttcagggttgaatacagagacagaaatgttgatgtggtacttgaagacacctgtactgttggagagattaaacagattctagaaaatgaacttcagatacctgtgtccaaaatgctgttaaaaggctggaagacgggagatgtggaagacagtacggtcctaaaatctctacacttgccaaaaaacaacagtctttatgtccttacaccagatttgccaccaccttcatcatctagtcatgctggtgccctgcaggagtcattaaatcaaaacttcatgctgatcatcacccaccgagaagtccagcgggagtacaacctgaacttctcaggaagcagtactattcaagaggtaaagagaaatgtgtatgaccttacaagtatccccgttcgccaccaattatgggagggctggccaacttctgctacagacgactcaatgtgtcttgctgaatcaggctctcttatccctgccatcgacttacagtgggaagaagatcttcacctgcacagacccgggaacagtcggaagaacaaatcaccgatgttcatatggttagtgatagcgatggagatgactttgaagatgctacagaatttggggtggatgatggagaagtattgggcatggcgtcatctgcctttgagaaatcttccatgatgccaganaacgcagaaaatgaaagagatgcctttatacaatttacagcagagtttttctttcagatatggtggattgccatccctgtaatttttattgggctcatttaaaagctggttttttcagaagggtttctatgttgaaggccccaagatagnaaagctttcctgcctatcttacctccc

SEQ ID NO: 246893 - DNA, 1357 bp, Homo Sapiens
  misc_feature (552)..(586): n is a, c, g, or t
  misc_feature (998)..(1113): n is a, c, g, or t
attttaacaggaacaccacttcaaaataacctaattgagtatcattgtatggttaattttatcaaggaaaatttacttggatccattaaggagttcaggaatagatttataaatccaattcaaaatggtcagtgtgcagattctaccatggtagatgtcagagtgatgaaaaaacgtgctcacattctctatgagatgttagctggatgtgttcagaggaaagattatacagcattaacaaaattcttgcctccaaaacacgaatatgtgttagctgtgagaatgacttctattcagtgcaagctctatcagtactacttagatcacttaacaggtgtgggcaataatagtgaaggtggaagaggaaaggcaggtgcaaagcttttccaagattttcagatgttaagtagaatatggactcatccttggtgtttgcagctagactacattagcaaagaaaataagggttattttgatgaagacagtatggatgaatttatagcctcagattctgatgaaacctccatgagtttaagctccgatgattatacnnnnnnnnnnnnnnnnnnnnnnnnnnnnnnnnnnngatagtagctcaagtggaagtggcagtgacaatgatgttgaagtgattaaggtctggaattcaagatctcggggaggtggtgaaggaaatgtggatgaaacaggaaacaatccttctgtttctttaaaactggaagaaagtaaagctacttcttcttctaatccaagcagcccagctccagactggtacaaagattttgttacagatgctgatgctgaggttttagagcattctgggaaaatggtacttctctttgaaattcttcgaatggcagaggaaattggggataaagtccttgttttcagccagtccctcatatctctggacttgattgaagattttcttgaattagctagtagggagaagacagaagataaagataaaccccttatttataaagagacagggtctnnnnnnnnnnnnnnnnnnnnnnnnnnnnnnnnnnnnnnnnnnnnnnnnnnnnnnnnnnnnnnnnnnnnnnnnnnnnnnnnnnnnnnnnnnnnnnnnnnnnnnnnnnnnnnnnnnnnaggggaagtggcttcgaaacattgactattaccgtttagatggttccactactgcacagtcaaggaagaagtgggctgaagaatttaatgatgaaactaatgtgagaggacgattatttatcatttctactaaagcacgatctctcgaattaatctggtagctgctaatcgagtaattatattcgacgcttcttggaatccatcttatgacatccagagtatattcagagtttatcgctttgga

SEQ ID NO: 246894 - DNA, 780 bp, Homo Sapiens
  misc_feature (609)..(609): n is a, c, g, or t
  misc_feature (612)..(612): n is a, c, g, or t
  misc_feature (756)..(756): n is a, c, g, or t
ttcgcggccgcgtcgaccccaagcgggagcttcgggaacgggaaggtcccagcctaggacctccacctgtagcctccgctctctcaagggctgatcgggagaaggccaaggtggaagaaaccaagcggaaggaatcagaactcctcaagggtctccgagcagagctcaagaaggcccaggagagccagaaggagatgaaactgctgctggatatgtacaagtcagcgcccaaggagcagcgggataaggtgcagctcatggcagcggaacgcaaggctaaggccgaggttgatgagctgcggagccgcatccgggaattggaggagagggatcgaagggagagcaagaagatcgcggatgaggatgccctgcggcgcattcggcaggcagaggagcagatagaacacctgcagcgcaagctgggtgccaccaagcaggaggaggaggctctgctctcagagatgggtgtgacaggtcaggcttttgaggacatgcaggaacagaacgggcggcttgctacagcagttgcgggaaaaggatgatgccaactttaagctaatgtcagagcggatcaaggccaaccagattcacaagctgctgcgggagganaanaatgagttgggcgagcaggtccttggcctcaagtcccaggtggatgcccagctgctgactgtgcagaagctggaggagaaggagcgagccttgcagggcagcctcgggggtgtggagaaggagctgacgctgctggaaatgctnacggggtcctctagagtcgaccgg

SEQ ID NO: 246895 - DNA, 1681 bp, Homo Sapiens
  misc_feature (857)..(868): n is a, c, g, or t
  misc_feature (1395)..(1396): n is a, c, g, or t
ttgggccgcatccgggaattggaggagagggatcgaagggagagcaagaagatcgcggatgaggatgccctgcggcgcattcggcaggcagaggagcagatagaacacctgcagcgcaagctgggtgccaccaagcaggaggaggaggctctgctctcagagatggatgtgacaggtcaggcttttgaggacatgcaggaacagaacgggcggctgctacagcagttgcgggaaaaggatgatgccaactttaagctaatgtcagagcggatcaaggccaaccagattcacaagctgctgcgggaggagaaggatgagttgggcgagcaggtccttggcctcaagtcccaggtggatgcccagctgctgactgtgcagaagctggaggagaaggagcgagccttgcagggcagcctcgggggtgtggagaaggagctgacgctgcgcagccaagccctggagctcaacaagcggaaggctgtagaagccgcccagctggccgaggacctgaaggtgcagctggagcacgtgcagactcggctgcgggagatccagccctgcctggcagagagccgggctgctcgtgagaaagagagcttcaacctcaagagggctcaggaggacatctcacggctgcggcgcaagctggaaaagcagaggaaggtggaggtctacgcagatgccgacgaaatcctccaggaggagatcaaggagtacaaggcgcggttgacctgcccctgctgtaacaccccgcaagaaggatgcagtccttaccaagtgcttccacgttttctgcttcgagtgcgtgcggggccgctatgaggcccgccagaggaagtgccccaagtgcaacggcnnnnnnnnnnnncccacgacttccatcgtatctacatcagctgaacctgaaactcaggggactctggaacaccatggaccctgggggctgtgcccccatctcctcccccaccccagtctagggggccccaccctccattccggagcccctgggccccgcccctgcccatccaactggtctgggggatcctggggggtgcccgggggcccacccgcatccgcccgaagccttcgatcccacgcttgtccgtgagaggggccaagactgggaccccccggggggggcgcccggcccccctccacgcaccacgggcctctgcccccgaaaaacagcccctccgcataaggccgcccagcggggcgatcacccccggcctggtgaacagcgccgccccgggcgccgcctaatgccaggagcgccccccttagaccccctcggcggcgcggcccgcggcccccgggagatgcgagccggccctgccgccctcataccgccccgtgggagagggcaggcaagggaccgccccccgggcgccaagnngcgcccgagttcctcgggaaacagtataaagcaagacgccgtgcgggccctcccgcgcggcggtgaaactaagaacgcccgtcgccgcccccgccctggaccgcggcgcgcgcaagcagtggacgcaggcagataggactagctgggagcgccgcaagcggcctttcaccgcaggaggccgatcgggggcgcgccggattccgggcacacgcccgcggctgcggccgggcgcgacgaagcaccccgccgcccgcgggacggcgcgtcagtgcgcctccaccgcag

SEQ ID NO: 246896 - DNA, 994 bp, Homo Sapiens
  misc_feature (719)..(719): n is a, c, g, or t
  misc_feature (840)..(840): n is a, c, g, or t
  misc_feature (913)..(913): n is a, c, g, or t
aaactgcagaatgacccccagctggaggcagagtaccagcagctgcaggaggaccaccagcgccaggaccagctcagggagaagcaggaggaggagctgagcttcctccaggacaagctcaagaggctagagaaggagcgggccatggccgagggcaagatcaccgtcaaggaggtgctcaaggtggagaaggacgcggccaccgagagggaggtcagcgatctcacccgccaatatgaggacgaggctgccaaggctcgcgctagccagagggagaagacggagctgctccgaaagatatgggccttggaggaggagaacgccaaagtggtggtgcaggagaaggtgcgggagatcgtgcggccagaccccaaggcggaaagtgaagtggcgaacctccgcctggagcttgtggagcaggagcgaaagtaccggggtgccgaggagcagctccggagctaccagagtgagctggaggccctcaggaggcgaggcccccaggtggaagtcaaagaggtgactaaggaagtcattaagtacaagactgaccctgagatggagaaggagcttcagcggctcagggaggagatcgtggacaagaccagactgatcgaaaggtgtgatttagagatctaccagctgaaaaagggaatccaggcccctgaaagacaccaaacccccaggtccagacccaaagaaggtgggtcccaggagatccntccaattccaagaagacccctcaaacccagggaggagggtggcgtctcctgaaggcaaagctctcccgaggagcagaaagaaaaccagtggatctggaagagggaaaagagctttcccagnaagaacagatcgccccggaaaagaggaaggagctctctcccgggttgaaggaaaaggggtgtggccaccaggnaagtgggtctcgggtatggaagggaggggagcccggggccttccggggcccaaggcccgaaggggcctttttggcccaaac

SEQ ID NO: 246897 - DNA, 1451 bp, Homo Sapiens
ctccgccagcccaacctggctgtgatgattagaaaggtgagcagctattcctggagccagagctggtcatcccccaccgccagcaccgactcttcacggcccccacattcactgggagcttcctgtcaccctgtgccaccatgcggtcactagatgcctccttcaaggtgaagagccacgtctacagcctggagggccaggactgcaagtacaccccgatgtttgggcccgaggcccgcaccctggtcctgcgcctcgctcagctcatcacacaggccaaacacacagccaagtccatctccgaccagtgtgcggagagcccggctggccactccttcctctcatggctgggctttagctccatggacaccaatggctcctacacagccaacgacctggacgagatggggcaagacagtgtccggaagacagatgaatacctggagaaggccctggagtacctgcgccagatattccggctcagcgaagcgcagctcaggcagttcacactcgccttgggcaccacccaggatgagaatggaaaaaagcaactccccgactgcatcgtgggtgaggacggactcatccttacgcccctggggcggtaccagatcatcaatgggctgcgaaggtttgaaattgagtaccagggggacccggagctgcagcccatccggagctatgagatcgccagcttggtccgcacactctttaggctgtcgtctgccatcaaccacagatttgcaggacagatggcggctctgtgttcccgggatgacttcctcggcagcttctgtcgctaccacctcacagaacctgggctggccagcaggcacctgctgagccctgtggggcggaggcaggtggccggccacacccgcggccccaggctcagcctgcgcttcctgggcagttaccggacgctggtctcgctgctgctggccttcttcgtggcctctctgttctgcgtcgggcccctcccatgcacgctgctgctcaccctgggctatgtcctctacgcctctgccatgacactgctgaccgagcgggggaagctgcaccagccctgaaggtgtcagctgccttcagagcaggctggagggatttgccacacagcccccacccttgggctgagaggacctgggcacgcccctccaggaagggaacacggccatcctccgggcttctgggagcggggctccctgcagcccgcacgaggcatctgggagggaaacgccaaccaataaaagggaagggcagggtggggccccccaatcaaagaggaagtaacctgggccaggggccttcaaacagctttaaccgctcctgtggaaaaggcggcaaaagactttcaacgggccggggcctcttttacctttcccctcccggccagagggacacctccacggggccacaaagcccaggatttccttggggggggcgctcttttt

SEQ ID NO: 246898 - DNA, 464 bp, Homo Sapiens
agtcctccgtggggaccagcattagcagtacagggcccagccatgtttacagagccagcaaatgataccagtggaagtcgacagagaattccagccttttggacagtatcttttggatggcagctcccaaaaatagacgcaccattgaagttaaccggtgtaggagaagaaatccgcagaagcttattaaagttaagaacaacatagacgtttgtcctgaatgtggtcacctgaaacagaaacatgtcctttgtgcctactgctatgaaaaggtgtgcaaggagactgcagaaatcagacgacagatagggaagcaagaagggggcccttttaaggctcccaccatagagactgtggtgctgtacacaggagagacaccgtctgaacaagatcagggcaagaggatcattgaacgagacagaaagcgaccatcctggttcacccagaattgacaccaaagacgg

SEQ ID NO: 246899 - DNA, 1254 bp, Homo Sapiens
  misc_feature (507)..(523): n is a, c, g, or t
  misc_feature (845)..(904): n is a, c, g, or t
accaggatggtcgctttctgtctcgttcaatgatcctcttgcccgtgatcttgttcagacggtgtctctcctgtgtacagcaccacagtctctatggtgggagccttaaaagggcccccttcttgcttccctatctgtcgtgtgatttctgcagtctccttgcacaccttttcatagcagtaggcacaaaggacatgtttctgtttcaggtgaccacattcaggacaaacgtctatgttgttctttaaaacaataaacaaaaacgtattttaacatgaggcaatataacgaacaaataaccactgacaggagcaatgcttacattttaactttcttaggatgttcaggctacatgaggtcatcatacaccatccagttccacctcactttaacagggagattgaaggcaagcaacactgagtttgaattagagaaaaactagaactagaattcagcccaacctgaatctgggtatctttacttaaacacagcagttgtagttatgtnnnnnnnnnnnnnnnnntactcatttcccctaactccaaatactaaatatcaaataaggaatttgtcaacataatgaagtgacccaaacaatcagcatcttaaataagacaccaaggaaaagtgaattccctttgtctttcaatctatcttagggaaaacaagataagaacattacaagttgacttccttggcttcctctttttatcacagtgtaattcaaattcctgtacagaatacaggtttcgtatatggtataatttttctttttaaaaatgaacactgattattccttaatgtaaaattattttctatgttacattcttagggtattttaatgnnnnnnnnnnnnnnnnnnnnnnnnnnnnnnnnnnnnnnnnnnnnnnnnnnnnnnnnnnnnctccaactttaaatataaaatagaaacattataacctctaaaagatttatcaacttattctagatataggtttgaaagaaaatacaaagaaaaatactaaacaggatcattaaagaagctttaaacagttgataagattaatatactaacatttgtgaggcagataacaaaagaatttccttttctgaaaggaagaaagaggcttgtatattacttgcctaaccatattctcattttgctccactactggaaactggattgcatgcacaactgaaggtatgaagacacccacagtcagctggtcttcctttcgtgatcaaagtacccaacataacacactatatacccaa

SEQ ID NO: 246900 - DNA, 826 bp, Homo Sapiens
atttcattttctaaacgaatcctaatctttcctgtgactgaatcggttcagaggatatcttttcaataaggaaggaagccctcccctgctcactggggacgtcgcaggatttttaagacctaaagatttactcttttgtgcacagacgctggaagcatttggactcacttttccccttcgtctttctctccctttctgtctttctgtgtctcctccaagaatgaaatatgactgaggactctcagagaaactttcgttcagtatattatgagaaagtggggtttcgtggagttgaagaaaagaaatcattagaaattctcctaaaagatgaccgtctggatactgagaaactttgtacttttagtcagaggttccctctcccgtccatgtaccgtgcattggtatggaaggtgcttctaggaatcttgcctccacaccacgagtcccatgccaaggtgatgatgtatcgtaaggagcagtacttggatgtccttcatgccctgaaagtcgttcgctttgttagtgatgccacacctcaggctgaagtctatctccgcatgtatcagctggagtctgggaagttacctcgaagtccctcttttccactggagccagatgatgaagtgtttcttgccatagctaaagccatggaggaaatggtggaagatagtgtcgactgttactggatcacccgacgctttgtgaaccaattaaataccaagtaccgggattccttgccccagttgccaaaagcgtttgaacaatacttgaatctggaagatggcagactgctgactcatctgaggatgtgttccgcgggcccaaa

SEQ ID NO: 246901 - DNA, 2030 bp, Homo Sapiens
  misc_feature (1780)..(1789): n is a, c, g, or t
  misc_feature (1822)..(1835): n is a, c, g, or t
  misc_feature (1887)..(1887): n is a, c, g, or t
  misc_feature (1893)..(1893): n is a, c, g, or t
  misc_feature (1937)..(1937): n is a, c, g, or t
  misc_feature (1965)..(1965): n is a, c, g, or t
  misc_feature (1996)..(1996): n is a, c, g, or t
  misc_feature (2016)..(2016): n is a, c, g, or t
ttggcagctcaatgagaaggaggccgcggagaagggcaccagtaagctgcccaagagcctgtcatccagccccgtgaagaaggccaatgacggggagggcggcgatgaggaggcgggcacggaggaggcagtgccccgtcggaatggggccgcgggtccacattcccctgaccccctcctcgatgagcaggcctttggggatctgacagatctgcctgtcgtgcccaaggccacgtacgggctgaagcatgcggagtccatcatgtccttccacatcgacctggggccctccatgctgggtgacgtcctcagcatcatggacaaggaggagtgggaccccgaggagggggagggtggttaccatggcgatgagggcgccgctggcaccatcacccaggctcccccgtacgccgtggcggcccctcccctggcaaggcaggaaggcaaggctggcccagacttgccctccctcccctcccatgctctggaggatgaggggtgggcagcagcggcccccagccccggctcagcccgcagcatgggcagccacaccacacgggacagcagctccctctccagctgcacctcaggcatcctggaggagcgcagccctgccttccgggggccggacagggcccgggctgctgtctcaagacagccagacaaggagttctccttcatggatgaggaggaggaggatgaaatccgtgtgtgaggcggacagtgggtggccaccgggagctcttggctgcatcttctccctgcccccaccccactatgacctttgaccctacggcgcaggggcagccaggacccttgattcagaccatggaccctggaccttgtagatgagggacactggcctggccctcgggtcttcggaggacgtagggggctggcatgggtgccgactggctgcctgacttcatcatgctccctgcacttaggctgcgtgggacaagggctgtgttgtcacagcaggaataggttttcctctgttggcctccctttcctccccctggcctcaaatggatgccagatgccaaccccagttctggccacgtacagccagcgggtcagcccagaggcagcctcagctccagggctaaggactctccggctcccattttctctgctgggggtttctgctgtgcccagcagtggctgctggggaagcagctgcagcaggagggagacggtcttgcctctcagcccctccctgccccaccccagctcctgccctggaaatctggagccccttggagctgagctggacggggggccagctgcgagcatgtgcactaaacgcagccctttccaggggaagagaacaggatggagaatggaaggaaagccccccaggcttcgtgaattgcaagaagggacccttccaggatgacactaggaacagggctagggcactcgctcagtccctaggggcttgtttgttctttattattgtgtttaaatccttatagagcaatatcaggatggtgttaataggtctgcctcagaatgagaatcaatccttttagaaaacctttatactaagcctcctcttcaaaattcacagtggcgattagcggactggagtctggtggcgattagcggactggagtctggggacatccgtggcaaagacaccagctcaactttagtgcttcccaactttatttagaatgacatggggtgggtgtctggtgtgtgtgttttccctacgcacctcccatagctattaacaactgaggaaggccagtgcagaatatttttggagaacgannnnnnnnnnaaataatatatcattcctatggggggaaagccnnnnnnnnnnnnnngggctgagttattccctccctcccctcaataccctcagtacttgactacttncccttntcttttctcagggcctccccccaccgattttgagggcagggttngccagatttaggcaaaacccaaaacagngtgctgagtttaaacggcaattttcaggggnaaacaaagggtatttttttnggctttaatttggc

SEQ ID NO: 246902 - DNA, 930 bp, Homo Sapiens
  misc_feature (99)..(111): n is a, c, g, or t
attttttatttttattgctattaaaatatccactagatgccacctagagctccagttctttataacaaaacagggatctgtttgaacacttactgttgnnnnnnnnnnnnnacatgtttccatcatttctgtctttaagaactaattcgtacataataagtttcataggtaacacattatttgaagttacagctacagtagtcaggtgtagaaaatcttgagttgctttggtctgcttgtcttcataaatttattctcttatgatacttgaggtaccagttgtatttaattttattcattatccctagatagctattaagatacttagattagacctaacccaccatagtcaatccaagactagactactcaatattaaagggtctggaaaatagaagagtgtgttgggcaggtagtttgtaccatttatgaaggtttgttcctttgttaaatttagcagcctgtactagcttttgaaatccagaagttttaacttccagtggctggtttctgagagagtgccatgattgctagccagcattccatattgggaatatgtagaggagaacctggatgtacttaagagtggcatataattttcacttctgtctgttgaggcatcaaaaaaacaagtttagaaagctggcaacatgaagaatgcattcaaaatataacaggtgcttctttgttgtacgcagaggaattttttcttttgattttgtttactgaaatttgttatacttcaaaagccataacttgaaaaatactggtgggcgtcgatgggtgagtgatttttatcccacgtgggcctttttgctcagttcccatggcaaattttggaaaattggaccctaacccggaaaaataaatcccgtattttcccgggatccccccgggggaaaagaaacaaacccaaacctttaaaaagtc

SEQ ID NO: 246903 - DNA, 1431 bp, Homo Sapiens
  misc_feature (28)..(28): n is a, c, g, or t
  misc_feature (34)..(34): n is a, c, g, or t
  misc_feature (706)..(715): n is a, c, g, or t
  misc_feature (796)..(824): n is a, c, g, or t
  misc_feature (1131)..(1141): n is a, c, g, or t
  misc_feature (1171)..(1181): n is a, c, g, or t
acaaaataaaacccaaaacacaaaacangtcaantgcaaaagacttcaaatccaaaagtaacctttggggctaaatatattaaaactttcccagtccattaatcctatacttcctatcctttcctgaaagtaaaggccttgcccattacttctctcattattaaatagtaggacacaataaacctggatattgactgaagtttatattttacatttcaaacgtgaaaattcagaactgcccatttccaattttacagtgggatcctgacaggttttaaaagtgacagtgctgaggcatgatattcattaacactggttttctgttgagaacatatacaccaaaaccaaattgctctgagatgtctcctattttctttctaggaaatttctaggcttttaagtttaaaaaataaatgattatgatggtaattattactttcccagagtgttttgcaataacttcaacctgttaagagatacaaagaactatattaaactggggaactacaataacgtacacagaaccctcttcaaagaaattaaatatattagatgttaaaatgtggtagaaagatgcagctttcccaaagtagtaaagtactgcacatatgggttttgtggcagtccttggaaatatcctaggtagaacttaatgtagaaataaaaaggctaccacatattttcaatccaagtcatttttacaagnnnnnnnnnngtgacacaaaataatgcactttaagttggtagcatacacaaggttattttttagcctaacatagacaggccaaatcattgnnnnnnnnnnnnnnnnnnnnnnnnnnnnngcccattaacttctgaattttgggaaagaaacaagaaagagcccaaagttttcagataggcacacataatttagattagaaatgaaaatgggctttaagccctataaatattgttttccaagaaaataagttttgaaagtgcaaaatgacaactcaaaaaggtcccctttccacctcatgcaggcaaaggacatttaaaagcacatccaactaaatcaaaaaagggaggattagaaatcacactagttcatccttcattatcagggctggcttcaaacctgaatgtttctgagtgggatatgttgcnnnnnnnnnnnttaaactagatccaagttacatttcctctnnnnnnnnnnntgtcaaaggacagctgccaagatttgtttttaaaagacacctctcaggtaagaggtagtgtatgctagctaggactacaggctgccaactcaacattgcttgagaacattaagtcctttgaagcatgttccctggagtctattaaacattctttctctgtgttcaaatgtcaagcaatatccaatagcatcttctgtttcttgaattcgtttctggaacctgcatccatcccttgcaaattcttccccaa

SEQ ID NO: 246904 - DNA, 1390 bp, Homo Sapiens
cggtcgctgttgctgccgccatacgcgctctccctgtttagggtctggctttcgtgacttcctgctcaagccagagttgctccgggccattgtcgactgtggctttgagcatccgtcagaagtccagcatgagtgcatccctcaggccattctgggaatggatgtcctgtgccaggccaagtcgggcatgggaaagacagcagtgtttgtcttggccacactgcaacagctggagccagttactgggcaggtgtctgtgctggtgatgtgtcacactcgggagttggcttttcagatcagcaaggaatatgagcgcttctctaaatacatgcccaatgtcaaggttgctgttttttttggtggtctgtctatcaagaaggatgaagaggtgctgaagaagaactgcccgcatatcgtcgtggggactccaggccgtatcctagccctggctcgaaataagagcctcaacctcaaacacattaaacactttattttggatgaatgtgataagatgcttgaacagctcgacatgcgtcgggatgtccaggaaatttttcgcatgaccccccacgagaagcaggtcatgatgttcagtgctaccttgagcaaagagatccgtccagtctgccgcaagttcatgcaagatccaatggagatcttcgtggatgatgagacgaagttgacgctgcatgggttgcagcagtactacgtgaaactgaaggacaacgagaagaaccggaagctctttgaccttctggatgtccttgagttcaaccaggtggtgatctttgtgaagtctgtgcagcggtgcattgccttggcccagctactagtggagcagaacttcccagccattgccatccaccgtgggatgccccaggaggagaggctttctcggtatcagcagtttaaagattttcaacgacgaattcttgtggctaccaacctatttggccgaggcatggacatcgagcgggtgaacattgcttttaattatgacatgcctgaggattctgacacctacctgcatcgggtggccagagcaggccggtttggcaccaagggcttggctatcacatttgtgtccgatgagaatgatgccaagatcctcaatgatgtgcaggatcgctttgaggtcaatattagtgagctgcctgatgagatagacatctcctcctacattgaacagacacggtagaagactcgcccattttggaatgtgaccgtctgtccttcaggagaggacaccagggtgggggtgaaggagacactactgcccccatccctgacagcccccaccccatggcttccatcttttgcatcaccatcactcctgaacccccatttctgatttgtcagaattttttgtaacaaaactaaagatgacacg

SEQ ID NO: 246905 - DNA, 450 bp, Homo Sapiens
  misc_feature (391)..(391): n is a, c, g, or t
  misc_feature (419)..(419): n is a, c, g, or t
atcagcagtttaaagattttcaacgacgaattcttgtggctaccaacctatttggccgaggcatggacatcgagcgggtgaacattgcttttaattatgacatgcctgaggattctgacacctacctgcatcgggtggccagagcaggccggtttggcaccaagggcttggctatcacatttgtgtccgatgagaatgatgccaagatcctcaatgatgtgcaggatcgctttgaggtcaatattagtgagctgcctgatgagataggacatctcctcctacattggaacaggacacggtaggaaggactcgcccattttgggaatgttgaccgtctgttcctttcagggaggagggacaccaggggttgggggggttgaagggaggttantactttgccccccacccttggaacaggncccccacccctgggttttccttttttttggc

SEQ ID NO: 246906 - DNA, 428 bp, Homo Sapiens
accctaattgcccgaggccaggaaatcgaacgggtgaaacattgccttttaaattatgaacatgccctgaggattcctgaaaccctacctgccatcgggtggccagagcaggccggtttggcacccaagggcttggctatcacatttttgtccgatgagaatgatgcccaagatcctcaatgatgtgcaggatcgctttgaggtcaatattagtgagctgcctgatgagatagacatctcctcctacattgaacagacacggtagaagactcgcccattttggaatgtgaccgtctgtccttcaggagaggaccccagggtgggggtgaaggagacactactgcccccacccctgacagcccccaccccatggcttccatcttttgcatcaccaccactcctgaacccccatttctgatttgtcagaa

SEQ ID NO: 246907 - DNA, 967 bp, Homo Sapiens
cttttagaaattaactggacaggactgacgaatcttctggatgtccctggattgaatggtttatcagatactatcattttggatataatatcaaactatctggtgcttcccaatcgaatcaccgttccacttgtcagtgaagttcaaatagctcagttgcggtttcctgtaccaaagggtgttctaaggatacattttattgaagctcaggatcttcaggggaaagacacttaccttaagggacttgtcaagggaaagtcagacccctatggaatcattagagttggcaaccaaatcttccaaagcagagtcatcaaggagaacctcagtccaaagtggaatgaagtctatgaggctttagtgtatgaacatcctggacaagaattagagattgagctctttgatgaagacccagacaaggatgactttttagggaagtcttatgattgacctcattgaagttgaaaaggagcgccttttagatgaatggttcactctggacgaggttccccaaggggaagctacacttgagactggagtggctcacgttaatggcaaatgcgtcaaacctcgacaaggtgctaatggacctccgaagctgaccaagacccaagcccaaccgatgggcctttccctctgggattggctgatccttggcactctggatgtcggcaagggaacctttccggagtcaccccatgtacgaatttaccccgcccatgctcttccacgaataaccggcctgggtccggaaaagctcttaagagtgcggtggaaaggagcataagggggggagccctgaactccctggggtgcctacgaaaggcgtaggtcgcgggtacggagcgtccccaggtggggaacctccaatctccttcacgcacaatcttagcgcgacggctgtgccttgctttcaaggaaaccaccttttccttttgttctctttctttccccctcccctactatg

SEQ ID NO: 246908 - DNA, 738 bp, Homo Sapiens
aaacatataaaaagacaactttgtacaaaaaagttggcccagcactcccattgaaccccgcctccgagcgcgcagctccacgcagcctctccacactctccccagcgcctgcagcacccccagtgcgcacagctctgccagtcgcttccccgcgtgccgcccctgcaccacttcgggccataaccttgctggcgactaagtctgaagaacttcccgtgatttaattcttttcttcgagtttagtcttatctttgacattttaaccaaaaggttacacgttaatttatggtatgaggtcaccacttctcctgttgtccttctcagtttctccccaacctccccttttccctagtttataagacaggagaaaagggagaaagcaaaaagttggaaagaaacagaagtaagataaatagctagatgaccttggcaccaccacctggccctggtggctaaaataataataatattattaacccctgaccaaaactattggtgttatctgtaaattccagacactgtatgagaaaatactgtaaaactttttgttctgttagctgatgtatgtagcccccagtcatgtttctcacgcttacttgatctattatgactttttcatgtagaccccttagagttgtaagcccttaaaagggctaagaatttctttttcggggagctcggctcttaagacacgagtctgccaatgctcccggccgaataaaaaacctcttccttctt

SEQ ID NO: 246909 - DNA, 1472 bp, Homo Sapiens
ttggctttttttccagaccaagggctgtgaacccgcctggggatgaggcctggtcttgtggaactgaacttagctcgacggggctgaccgctctggcccagggtggtatgtaattttcgctcggcctgggacggggcccaggccgggcccagcctggtggagcgtccaggtctgggtgcgaagccaggcccctgggcggaggtgaggggtggtctgaggagtgatgtggagttaaggcgccatcctcaccggtgactggtgcggcacctagcatgtttgacaggcggggactgcgaggcacgctgctcgggtgttggggacaacattgaccaacgctttattttccaggtggcagtgctccttttggacttttctctaggtttggcgctaaactcttcttgtgagctcactccaccccttcttcctccctttaacttatccattcacttaaaacattatctggtcatctggtaagcccgggacagtaagccgagtggctgttggagtcggtattgttggtaatggtggaggaagagaggccttcccgctgaggctggggtggggcggatcggtgttgcttgcctgcagagagggtggggagtgaatgtgcacccttgggtgggcctgcagccatccagctgaaagttacaaaaatgcttcatggaccgtggtttgttactatagtgttcctcatggcgagcagatggaaccgggagacatggagtccctggccagtgtgagtcctagcattgcaggaggggagaccctggaggagagagcccgcctcaattgatgcctgcagattgaatttccagaggcttaggaggaggaagttctccaatgttctgtttccaggccttgctcaggaagccctgtattcaggaggctaccatttaaagtttgcagatgagcttatggggggcaatcttaaaaagtccacagcagatgcatccggctcgaggggccatcagctttgaataaatgcttgttccagagcccatgaatgccagcaggcacccctcctttcctggggataaaggttttcagatgctgcatcttctaaaattgagcctccggtcatactagttttgtgcattggaaccttgcttcaagaagatccctaagctgtagaacattttaacgttgatgccacaacgcagattgatgccttgtagatggagcttgcagatggagccccgtgacctctcacctacccacctgtttgcctgccttcttgtgcgtttctcggagaagttcttagcctgatgaaataacttggggcgttgaagagctgtttaattttaaatgccttagactggggatatattaggggaagcagattgtcaaattaagggtgtcattgtgttgtgctaaacgctgggagggtacaagttggtcattcctaaatctgtgtgtgagaaatggcaggtctagtttgggcattgtgattgcattgcagatccgctatccgt

SEQ ID NO: 246910 - DNA, 290 bp, Homo Sapiens
cgtcgacgcggcaggtgaagtctagcagaggacgcggccaggcgattcggtgaagcgattcctgcaggcgttggttcccctctttgaacctggtaaatgcaggcttttatgcgagaggtaatggtgggggtaaacttgctgcaaacgaaggccaggggcgtcggtggcgcaaggtgaatcgaaagtgggaggatggaaggctgtggagattgggaattgggaagggggcagggactgcttcagtttctgtcgacgcggccgcgaatttagtagtagtagtaggcggccgc

SEQ ID NO: 246911 - DNA, 400 bp, Homo Sapiens
caggtcagccccagcttcccacacccgctctacaatatgagcctcctgaagaatcgattcctcaggccaggtgatgactccagccacgacctcatgctgctccgcctgtcagagcctgccgagctcacggatgctgtgaaggtcatggacctgcccacccaggagccagcactggggaccacctgctacgcctcaggctggggcagcattgaaccagaggagttcttgaccccaaagaaacttcagtgtgtggacctccatgttatttccaatgacgtgtgtgcgcaagttcaccctcagaaggtgaccaagttcatgctgtgtgctggacgctggacagggggcagggactgcttcagtttcgtcgacgcggccgcgaatttagtagtagtagtcgacc

SEQ ID NO: 246912 - DNA, 1035 bp, Homo Sapiens
ggacgcgtgggtcgacccacgcgtccggagtgctcagctcctcagccacgagcctggtgaccctccttgcttgcggcggctgaacttcgtgcggctcctcatgctgtacacccggaagtttgagtccacggacccaagggaggccctccagtacttctatttcctcagggatgagaaagatagtcaaggagaaaacatgtttctgcgctgtgtgagtgagcttgtgattgaaagccgagagttcgatatgattctgtgggaaactagagaatgacggaagtagaaagcctggagtcatagataagtttactagtgacacaaagcctattatcaacaaagttgcttctgtggcagaaaataaaggactggtttgaagaggcagcaaagctgtatgaccttgccaagaatgctgacaaggtactggagctgatgaacaaactgctgagccctgtcgtcccccagatcagtgccccgcaatccaacaaggagaggctgaagaacatggcactctccattgccgaacggtatagggctcaaggaataagcgcaaataaatttgtggactccacgttctatcttcttttggacttgatcacctttttgacgagtatcatagtggtcatattgatagagcttttgatatcattgagcgcttgaagctggtgcccctgaatcaggaaagtgtggaagagagagtggctgccttcagaaatttcagtgatgaaatcaggcacaacctctcagaagtgcttcttgccaccatgaacatcttgttcacacagtttaagaggctcaaggggacaagtccatcctcgtcatccaggccccagcgagtcatcgaggaccgcgactctcaactccgaagtcaagcccgcactctgattacctttgctggaatgataccataccgaacgtctggggacaccaatgcgaggctggtgcagatggaggtcctcatgaattaagtgccatgctttgtgggagtctgggtcggcacactgtcagtacatcaggcacatgggcccactacgctgg

SEQ ID NO: 246913 - DNA, 1100 bp, Homo Sapiens
aaatggtacaccagaaaaggactggcagtctacttctagcatagttaaacttcaccctctttaatttcacaacatattctttggaagcaggaagaaatgctcataaagaggatcagaccttctttcccgtgaaaccagtatttggcgccatatataagcctggttaaattggtcatctaaagctgtcaaataagacattctgtgaaaggtaaacatcgaaactggttataagtaaaaccatcaagccaacaacagggtcttgagataacctttgaagcttattgtactggcctgcaccagaagatgtctgcattactcattgctaaaaatgtgtagcacagaactgcactaggattaatttgtttacaagaagaaatttaaactctacgtttggttttcacatacagcagctctattgaataacatgcatctgaattttaagttgcaaaggtatctgaataatttttcatgtgcatcttttgtcgaatgttttggttcaagaaagaatgtttaaagctttttaaaagacttcagttcttaatgtaactgtacccttctgcatggaaaatcataaccaacatggctgcagtagacttcttagtggtatccagcgccacttgcagagggctgctttatcatattgtacttgggtgtaggactctagtgttcttgggtgtattgcatgggctgcattatctacagcattgtacaataacaactagaaaaggcagtatacttcactgatgcttgtctggtaataatcacttctgtgttataatggaaggttttttgtgatgtatgaaacttgtgttttttatatataaatgagtatagttagtgttgtggtaatgcctgttttcatctgtaaatagttaagtatgtacacgaggcactacttctgatttattgcaatgttcagtcctagtttttacttttattcttaaagcattcagttttgcttttaattttatgtaccttagttctgagttagacctgcagatgtgtacagatagttcatatttatgtattgcacataatcatgctattcagcattgatgctatattgtattatgtaaataataaaagccatgtacagaggg

SEQ ID NO: 246914 - DNA, 925 bp, Homo Sapiens
  misc_feature (357)..(365): n is a, c, g, or t
aaagaggacaaaaccatcatcttcaggctgctactctactaatctcagatgagcaattcagagggacttaaaaaccttcgggtaggagcagagcgcaaggaaacagccaactttcccccaagagcacatcccaaactgctgccccaagggctcatctaacggtggaatcacacatatgcccctccatggaactcattcacataacagaaagacacctgcggcctgcaagtcaaaagacaactgcaggctacaagtccaatactgctcagaacctaaactgggggagagaggggttgacaggtgtgggtagagctcttaactggctgaccctgggggtctataattccttttccttcnnnnnnnnncctcccttttcattacccacagtataatgctttttaactatctatccacttgacagcccaggattgccgcagtccatcagtccatctctcatgtaaggtcttgttcagggttggaagcacagacaggatgcctcgggaagactctctcacctcagaacactcaatccaaagaatgcccaatataccaccaggcacagtaaactcatacaacagaagcaccgaagttcaactcagatatcattcttgcctatcattgataagacactaagtggaatggcctggggcttatatttggatggcaaaacagactctgaaagaatgtactggaaatatgcttgaagttcagcttcatgaaacgattcccctcaagtcaggtaccctgagagcctgtttctctcagctctaccatgctgccagtgggaaccaatgggctggacagtggtgcttccagggtaaacagaggcttcctatgtctgtttacaagccccgaatgcccttgagaggagccaggctaagaaaggtgtgatgagtcagtggacttcagagcaccaaggtgccaa

SEQ ID NO: 246915 - DNA, 1108 bp, Homo Sapiens
aagaatctgggattcccaaagtggctgatccttggggaggttcttacatgatggaatgtctcacaaatgatgtttatgatgctgctttaaagctcattaatgaaattgaagaaatgggtggaatggccaaagctgtagctgagggaatacctaaacttcgaattgaagaatgtgctgcccgaagacaagctagaatagattctggttctgaagtaattgttggagtaaataagtaccagttggaaaaagaagacgctgtagaagttctggcaattgataatacttcagtgcgaaacaggcagattgaaaaacttaagaagatcaaatccagcagggatcaagctttggctgaacgttgtcttgctgcactaaccgaatgtgctgctagcggagatggaaatatcctggctcttgcagtggatgcatctcgggcaagatgtacagtgggagaaatcacagatgccctgaaaaaggtatttggtgaacataaagcgaatgatcgaatggtgagtggagcatatcgccaggaatttggagaaagtaaagagataacatctgctatcaagagggttcataaattcatggaacgtgaaggtcgcagacctcgtcttcttgtagcaaaaatgggacaagatggccatgacagaggagcaaaagttattgctacaggatttgctgatcttggtttttgatgtggacataggcccctcttttccagactcctcgtgaagtggccccagcaggctgtggatgcggatgtgcatgctgtgggcgtaagcaccctcgctgctggtcataaaaccctagttcctgaactcatcaaagaacttaactcccttggacggccagatattcttgtcatgtgtggaggggtgataccacctcaggattatgaatttctgtttgaagttggtgtttccaatgtatttggtcctgggactcgaattccaaaggctgccgttcaggtgcttgatgatattgagaagtgttggaaaagaagcagcaatctgtataatatcctctttttgttttagctttgtctaaaatattattttagttatgatcaaagaagagagtaaagctatgtcttcaatttaatttcaatacc

SEQ ID NO: 246916 - DNA, 563 bp, Homo Sapiens
  misc_feature (51)..(51): n is a, c, g, or t
  misc_feature (422)..(423): n is a, c, g, or t
tttttaaagatcataatgctctcatttattgaagaaagaaagcaaaaaaanactaacaattgtgatgggggaggagagacagcttggcaacattccttttaaagttaagttagcataaagaaaacaatatttagtaaatgaaatagattttcaaggtaggaaaagtagtactcaaggaatgtatttttggatacaaaaattcagttacacaatcagtagcattcaaaattagttatgagtatttatacaattacaaaaatggattcatgttttaacaacgtattttaaaagctcaaacattttaaaacaggcacaatattctaaaggcatatgcattcaccatgggcttttgaatgtcctcactcccaacttcgcaatcaaaatctacagaagcggcaaaagatcagagttcagagggctannttttttttccctttccttacttaaggttgcaaacacatttgacagaggcaaaataaacacgtttcatagcagaaagaccaaaaaattggatgtaagcgtagctctcccttggagattcacaatacaggttcatcggtctt

SEQ ID NO: 246917 - DNA, 1544 bp, Homo Sapiens
  misc_feature (1436)..(1436): n is a, c, g, or t
  misc_feature (1467)..(1467): n is a, c, g, or t
  misc_feature (1474)..(1474): n is a, c, g, or t
ccacgcgtacgtcgacccacgcgtccgcccacgcgtccggaagcagtatgtggagagcatagacgtttcctcctacacggaggagttcaacgtgtcctgcctgacagacagcaagtgccgatacctactgggagagcgatgggtcccagtgccaacactgggtacggcttactatgaagaagggcaccattgtcaagaagctgctactcacagtggataccacagatgacaactttatgccaaagcgggtgggggcctatgggggtgaaggggacaacctgaagaagctgagtgacgtgagcattgacgagaccctcatcggggatgtctgtgtcctggaggacatgaccgtccacctcccgatcatcgagatccgcatcgtggagtgccgagatgatgggatggatgttcgtctccgaggggtcaagatcaagtcatctagacagcgggaactagggttgaatgcagacctgttccagccctctagtctggtgcgatatccacgcctagaaggcaccgaccctgaagtactgtaccgcagagctgtcctcctgcagagattcatcaagatcctcgatagtgtcctgcaccacctggtacctgcctgggaccacacactgggcaccttcagtgagattaaagcaagtgaagcagttcctactgctgtcccgccagcggccaggcctggtggctcagtgcctgcgtgactctgagagcagcaagcccagcttcatgccacgcctatacatcaaccgccgtcttgccatggaacaccgtgcctgcccctctcgagaccctgcctgcaagaatgcagtcttcacccaggtatatgaaggcctcaagccctctgacaaatatgaaaagcccctggactacaggtggcccatgcgctatgaccagtggtgggagtgtaaatttattgcagaaggcatcattgaccaagggggtggtttccgggacagcctggcagatatgtcagaagagctgtgccctagctcagcggatacccccgtgcccctgcccttctttgtacgcacagccaaccagggcaatggcactggtgaggctcgggacatgtatgtacccaacccctcctgccgagactttgccaagtatgaatggatcggacagctgatgggggctgcccttcggggtaaggagttcctggtcctggccctgcctggttttgtgtggaaagcagctttctggtgaggaggtgagctggagcaaggacttcccagctgtggactctgtgctggtgaagctcctggaagtgatggaaggaatggacaaggagacgtttgagttcaagtttgggaaggaacctaccattcaccactgtactgagtgaccaacaggtggtgggagctgatccctgggggtgcaggcatcgcgtgggatatggggaccgttctcgttccatccaactggtccanaaaggcacggctagaggagaacaaggagcangtggcanctatgcaggcaggtctgcttgaaagtggtaccacaagctgtgcttggaactttgcttgaccctggcaaga

SEQ ID NO: 246918 - DNA, 1052 bp, Homo Sapiens
ttggcgcttggcaacggctcggcgtcgcgctttggccaaccgctgcgtcgtccctgggcccgaataactgtcgcccgcttccctcagcgtgaggtacaaatgatgcaaaatgtgcacctggctccagagacagatgaagatgatctttattccggctataatgactacaatccaatctatgatatcgaggaattggagaatgatgcagcttttcagcaagctgtgaggactagtcatggcagaagacctccaataactgctaaaatatcaagcacggcagttactagacctatagctactggatatgggtccaagacatctctggcatcatcaataggaagaccaatgacaggggctattcaggatggagttactagacccatgacagcagtgagagcagctggttttaccaaagcagctttgagaggctctgcatttgacccccttagtcagtcaaggggccctgcttcccctttggaagccaagaaaaaagatagcccagaggaaaaaataaagcaattagagaaggaagtaaatgagttggtagaagaaagctgtattgccaatagttgtggagacttaaaattggccttagaaaaggcaaaagatgcaggaagaaaagagagagtcctggtgagacagcgagaacaagttacaactccagaaaatatcaatttggatttaacttactcagttcttttcaatttggccagtcagtattcagttactgaaatgtatgccgaagcacttaacacttatcaagattatagtcaaaaataagatgtttagcaatgcaggaatattgaaaatgaatatgggaaatatctatttaaggcaaagaaattattccaaagccattaaattctaccgaatggcattagaccaagttccaagtgtcgataagcaaatgaggattaaaacaatgcagaatattggagttacatttattcaggctggtcagtattcagatgctattaattcatatgagcacttaatgagcatggcaccaaatctgaaggcaggctacaacctaactatctgttattttgcta

SEQ ID NO: 246919 - DNA, 1454 bp, Homo Sapiens
ttgggtcgcagcgccatgaagtccctgtctctgctcctcgctgtggctttgggcctggcgaccgccgtctcagcaggacccgcggtgatcgagtgttggttcgtggaggatgcgagcggaaagggcctggccaagagacccggtgcactgctgttgcgccagggaccgggggaaccgccgccccggccggacctcgaccctgagctctatctcagtgtacacgaccccgcgggcgccctccaggctgccttcaggcggtatccccggggcgcccccgcaccacactgcgagatgagccgcttcgtgcctctccccgcctctgcgaaatgggccagcggcctgacccccgcgcagaactgcccgcgggccctggatggggcttggctgatggtcagcatatccagcccagtcctcagcctctccagcctcttgcgaccacagccagagcctcagcaggagcctgttctcatcaccatggcaacagtggtactgactgtcctcacccacacccctgcccctcgagtgagactgggacaagatgctctgctggacttgagctttgcctacatgccccccacctccgaggccgcctcatctctggctccgggtccccctccctttgggctagagtggcgacgccagcacctgggtaagggacatctgctcctggctgcaactcctgggctgaatggccagatgccagcagcccaagaaggggccgtggcatttgctgcttgggatgatgatgagccatggggcccatggaccggaaatgggaccttctggctgcctagagttcaaccctttcaggagggcacctatctggccaccatacacctgccatacctgcaaggacaggtcaccctggagcttgctgtgtacaaaccccccaaagtgtccctgatgccagcaacccttgcacgggccgccccaggggaggcacccccggaattgctctgccttgtgtcccacttctacccttctgggggcctggaggtggagtgggaactccggggtggcccagggggccgctctcagaaggccgaggggcagaggtggctctcggccctgcgccaccattccgatggctctgtcagcctctctgggcacttgcagccgcccccagtcaccactgagcagcatggggcacgctatgcctgtcgaattcaccatcccagcctgcctgcctcggggcgcagcgctgaggtcaccctggaggtagcaggtctttcagggccctcccttgaggacagcgtaagccttttcctgtctgcctttcttctgcttgggctcttcaaggcactgggctgggctgctgtctacctgtccacctgcaaggattcaaagaagaaagcagagtgagggcactcactgccatcctgtggaagccaccatcatctctggcccaagcttctgtagtagctccctaaaataataccctatcatctgctcct

SEQ ID NO: 246920 - DNA, 353 bp, Homo Sapiens
gaggtaataaacttcgccttaattttaataatcaacaccctcctagccttactactaataattattacattttgactaccacaactcaacggctacatagaaaaatcccccccttacgagtgcggcttcgaccctatatcccccgcccgggtccctttctccataaaattcttcttagtagctattaccttcttattatttgatctagaaattgccctccttttacccctaccatgagccctacaaacaactaacctgccactaatagttatgtcatccctcttattaatcatcatcctagccctaagtctggcctatgagtgactacaaaaaggattaggctgacccgaata

SEQ ID NO: 246921 - DNA, 1038 bp, Homo Sapiens
ggaagcaataaaagcacagatttattgaagcaaaagtatattccacagagggggagcaggctaaagcaagctgctcaagagccccagttgcaaaatctggggtttaagtaccctttaggggtttcctattggttacaccctatgcgccaccaatcggaggccgaagtgaaggctcccagtctccagactcttattctcctagctcaaaagaaatgcactgatttcctctgtagcatcttcagggttccatcttgacaaacttcctctaaatccccaggggaagagttgtttagagactcctggatgccctgagggagcggctccagagcttgccttccctcctctgttttcacaacggtccagcgataggcactgttctctgacaatccttcttggcactgtttatcgactggtggaggccctgggctatgttccactttggggaaaacagtagcagagagaggagatagttcctggggctctaatttgggttctaggccctgaaaggcattttccccatcagccacagcacaagcaatgtccacattcatgtgggccttatcttcaggggtggatggtataggaagattcacagaattgccagaaacaattaagggtgagacagaggaggccacaaggggctggttcaatggacaggggaaggaagtagggttaaccaagagggtggcgatgggaatagtctggggactctgggccacagccgcattgacaggctggatcatgttacagccaccgccaaggctcacaatcttcacagtggtagcaggaacagtgaagataacagatgcagggtggataacaggggcaggtttgatacagcgaaaggccctggctccccttctttttgagggtctccgtctcacatatggctttcgaaacatggaagaggcaggggagggcatcattaccttgggcacaggggcagaagagagcaaagtctgggactcagacagagggaagcttgtcctggcctcagggggcatagcaggcagtgctgcaggagactcaaaactctcc

SEQ ID NO: 246922 - DNA, 1187 bp, Homo Sapiens
  misc_feature (151)..(159): n is a, c, g, or t
caagatatagaatatttatggcactcttgatgctgcatttgaaagctgaaggaattactttagatagataggaattgctacctttattctggaaaggttttgtttctgcctcaaagcattttgaagtgttttaaccattaaagggtctaannnnnnnnncttaatgaaatcaagcattttaattcactgtgggaggcatcctgaccacggacatccataacagcaaagcacaaatcgttttcgtctgtagtcatatcctgaaacataggtggacaaacttttaactgagagacaaaaatcacatagttgaattgagcagaacacttaagtgcttactgcatctatttaggagtctatttcttaccaataaacttgacaacgcatttggaaaactagtgaacaccttacagctttcattttgctttaatgtttcaattcaagccggtgtaaaaataatttccaaggcatttctgtttattctttagtaatctcactactggctatgtcagccatatctttttcaatctggttccttttgtgtatgatgtcactgtgacctctttgacatatagtgatggcttttacctactttgaaaagaattttcacatagagtcagaaaaaaaaggaaatatcaaatcacttgcctttccacttggagagcacgacagttgccaacaacaaggggtcaagggccgcacaggagatgtgtgggggcctggccacctcccacctgctgcccagaggcttgtttgcattttcattttttctccacttgtaacaaccatagtttcagctcctaaattcttatcatggatttacttagtcatcttaactgacctgcagttacttgcctgttttcagtgaagagagagaagcagctctggtgccacatgccagtgccatggagggaaatgaattctctgcaatctgttgtttcgctgattcatgaagaaagtaacaactgttgagtttcagccttgatggctgtcggcagttttctggtgtccacccaaacggagagacagtcactcctgcttaccctaatgtgtgactgagaagcagcctgggtgtgtaaagagatagtcattccccctgcctgtctcactgtaggggtagcattatccactgtaaaaccatactactttcattttccctttgggactacaggtgccaggtaaccatttta

SEQ ID NO: 246923 - DNA, 1152 bp, Homo Sapiens
cattaaaaagggaactttgtacaaaaaagttggtggcattatgccccccagtgagaaaggaagtaaagaggaggtgctactgtttggggaaagagtagctgaggagaaagagggagatcagtagttacagtattagaagcattaattgtgtctttaagggttaaacagaggctctctgatttctgaatgttaccttatgtttttataacagtttaattcccgtaaaccaattacacctgagcattctacttttatcacctctccatctctgaaggacaggattcactgtgtggcttatgtcttagacatcaactctattgacaatctctactctaaaatgttggcaaaagtgaagcaagttcacaaagaagtattaaactgtggtatagcatatgtggccttgcttactaaagtggatgattgcagtgaggttcttcaagacaactttttaaacatgagtagatctatgacttctcaaagccgggtcatgaatgtccataaaatgctaggcattcctatttccaatattttgatggttggaaattatgcttcagatttggaactggaccccatgaaggatattctcatcctctctgcactgaggcagatgctgcgggctgcagatgattttttagaagatttgcctcttgaggaaactggtgcaattgagagagcgttacagccctgcatttgagataagttgccttgattctgacatttggcccagcctgtactggtgtgccgcaatgagagtcaatctctattgacagcctgcttcagattttgcttttgttcgttttgccttctgtccttggaacagtcatatctcaagttcaaaggccaaaacctgagaagcggtgggctaagataggtcctactgcaaaccacccctccatatttccgtaccatttacaattcagtttctgtgacatctttttaaaccactggaggaaaaatgagatattctctaatttattcttctataacactctatatagagctatgtgagtactaatcacattgaataatagttataaaattattgtatagacatctgcttcttaaacagattgtgagttctttgagaaacagcgtggaattttactttatctgggtaattcacagaagctttagcacaggtgccttgggtaa

SEQ ID NO: 246924 - DNA, 1306 bp, Homo Sapiens
  misc_feature (469)..(487): n is a, c, g, or t
acccgctgcggcgatcaaatgcatctcactgagtcttttctgagcaagtgcccgttcactcattgctgtagagatgtccacaggctctgagggcaaatgctgctgaaaacattatcatcatctttgttttcttcaccatttttctccacaggaacccattctccataaacactatccgcttcttttttccgatgttgagctctatgctagtcacgtcattctaaaggaagtcgaaggtggatttttacctgggtttcagaagttcttgaaaatatttttttgattgtgaagctcatctcatttgaacatttttggttaacctagaaaagtatagtaaagaatagaatcatcacttgtaatcatacttctcagagactctctgtttacattttgaaatacttcaaatgtaatgtaaggaaatactttccttctgtctcttctccccctgtatttatcacagagacctgannnnnnnnnnnnnnnnnnnaaaactaaaaaccatactcttgtagcctccttgattcccttgcaatgtattataactattattccatatcggtaaatgtctttcgttctgggtgattcttgtagtcagacaagttttggatacactggcctggcctagatttcaggagggctggagagataaagggagcagtggggaaagaaagtttttgaaaatgtatgagtgaaaggtgagtacagtaatgcactcagcacgattctcactgtgtttgcacttcccagatgtgttggactggcacttttagggtggtctttagaagacaggcatttgggactagtaggcaagactcttgactgtcttgatgaatacttttggttaagataaacctgtttgccagtgatacctggctccttgaaggtcttctctgcctagcagactattcctcagagttacgacgttgcctggttagttgggaaagagtctgctgaggaatgtgagccggcagtgtcctttttagaattctatcatacactcaattatattatctccgtctgctggcagggaggaactattgccatgactggtatagaagaccttcagggaaaactcttcaggcctctcccagtatgtgtcctgtgcagtctgtacctacaacagtttttaaagagatactgcttggctgtactgcagcaactccacctagtaaggacccaagacagcaaagtactccccagggctgccactctccacctaaccttggagcaaaaattcctcaaggatgtcataaacaaaagtttaccagaggaaattttcttccctgtctaaataccaaagtctgaa

SEQ ID NO: 246925 - DNA, 304 bp, Homo Sapiens
gaatgtggtgagatgcactcttttgttgtaccaaatagggctccccaccccacccctgcgacaagtgctcttctagaacaggttcctaccagcagcactggtgtgaatgaaagagagacccagccgcgtctcacacaggtggaattgcacttcttaacaaaaaggaactttataaaagtttgggattttttttcctaatcataaaaatagccccagaaagagcctaagctatgttcagatagaagcctcgaaattcctgtgaattgtttactttatgatgtttacatacacgttttcactttgg

SEQ ID NO: 246926 - DNA, 602 bp, Homo Sapiens
  misc_feature (29)..(29): n is a, c, g, or t
  misc_feature (53)..(53): n is a, c, g, or t
  misc_feature (58)..(58): n is a, c, g, or t
  misc_feature (62)..(62): n is a, c, g, or t
  misc_feature (75)..(75): n is a, c, g, or t
  misc_feature (535)..(535): n is a, c, g, or t
  misc_feature (557)..(557): n is a, c, g, or t
  misc_feature (574)..(574): n is a, c, g, or t
  misc_feature (588)..(588): n is a, c, g, or t
cacactgactgctttgaccacctcagtgnctcaagtaacaatttgtgtccctncgggncagncaacatcatcagncaacctgcttcaaggaggactgccaccagtaagtatcgatgacctcttctccgggaagtctgtacctcatcggcattgctgtccatcgtggttcgtctgtgtatcatgtatcttcgtagatgtatcctgagtcatggtgctgtgctgtggcatccggtaacagctccgtgtactgaggccccgcagctctggccacagggacctctgcagtgccccctaagtgacccggacacttccgagggggccatcaccgtctgtgtatataacgtttccggtattactctgctacacgtagcctttttacttttggggttttgtttttgttctgaacttttcttgttaccttttcagggttgacgtcacatttaggtggcgtgtatgagtggagacgggcctgggtcttggggacttggagggcaggggtcctttcttgccctgggggtcccagggtggctcttgnctggcttcagccaggtcttctnctggggagccacttttnccagagacttaagnttgtgccaactttg

SEQ ID NO: 246927 - DNA, 1178 bp, Homo Sapiens
ttggcatttaaataacaacctgttacgagttctaccttttgagctgggaaaactgtttcagttgcagactttaggcctgaaaggaaatccccttacccaggatatattgaacctttatcaggaaccagatggaacaagacggctgctgaactatttgcttgataatttgtcaggtactgcaaaaagaattacaacagaacaaccacctccaaggtcttggattatgttacaagaaccagataggacaaggccaactgccttgttttctgtcatgtgctataatgttctttgtgataaatatgcgacccggcagttatacggctactgtccatcatgggcgctaaactgggactacaggaaaaaggccattattcaagaaatcttgagctgcaatgctgatatcgtaagtcttcaggaggttgaaacggaacagtattacagtttttttctggtagagctgaaagaacgtggctataatggattcttcagtcctaagtctagagctaggacaatgtcagaacaagaaaggaaacatgttgatggctgtgcaatattcttcaagacagaaaaatttactttggttcagaaacacactgttgaatttaatcagctagccatggcaaattctgaggggtctgaagctatgctgaacagagtcatgaccaaagataacattggggttgcagtactgctagaacttcggaaggaatcgattgaaatgccgtctggatagccacatcttggaacagaaaaacaacttattcttgtggctaacgcccacatgcattgggaccctgaatactctgatgtgaagttggtacaaactatgatgttcctctcagaagtgaagaacattattgataaagcctctcgcaacctcaaatccagtgttttgggagaatttggaactattccacttgtgttatgtgcagatcttaattctttgccagactctggtaagaaaataatgtgattttatgtagaatattttttgacataagatgatttagtaatgttttgtttctgatcattccaaattaagtccaaataaaaattcagtttgtaatggcagctatgagcaggttttaaacatcatgttggggtggaggggccattttgaagatgaaacgatattatggaaacttgaggagaaggatgttaatcatcttgaagacact

SEQ ID NO: 246928 - DNA, 897 bp, Homo Sapiens
  misc_feature (34)..(34): n is a, c, g, or t
  misc_feature (49)..(49): n is a, c, g, or t
  misc_feature (118)..(118): n is a, c, g, or t
  misc_feature (140)..(140): n is a, c, g, or t
  misc_feature (178)..(178): n is a, c, g, or t
tgttttggcctttaaaaatattgcctctatagtnaaattatttattggnaagatgacttttttaaagctgaccgtttgaccttggcttggtttcatacactgatttatttttctatgnccaggcagtagagtctctctgncctctgtaggtagcaggtctacccgcatcccactcagncccctccctacccctcaagtatttgatgaaaattccaaccatgaggatgggtgcatcggggaagggtgagaaggagagcctgcctgctcagggatccaggctcgtagagtcactccctgcccgtctcccagagatgcttcaccagcacctgcctctgagacctcgctctctgttccagcaaccctggttggggggtcagacttgatacactttcaggttgggagtggacccaccccagggcctgctgaggacagagcagccaggccgtcctgggtcactttgcagttggcactgggttggggaggaagagagctgatgagtgtggcttccctgagctggggtttccctgcttgtccagttgtgagctgtcctcggtgttaccgaggctgtgcctagagagtggagatttttgatgaaaggtgtgctcgctctctgcgttctatcttctctctcctccttgttcctgcaaaccacaagataaaggtagtggtgtgtctcgaccccatcagcctctcacccactcccagacacacacaagtcctcaaaagtttcagctccgtgtgtgagatgtgcaggttttttctagggggtagggggagactaaaatcgaatataacttaaaatgaaagtatactttttataatttttctttttaaaacttggtgaaattatttcagatacatattttagtgtcaaggcagattagttatttagccacc

SEQ ID NO: 246929 - DNA, 522 bp, Homo Sapiens
  misc_feature (35)..(35): n is a, c, g, or t
  misc_feature (40)..(40): n is a, c, g, or t
aggtgatcccgaatcccttagtgcagtaggacctntgtgnaaaagccggaactgaactccccatcatggatttcacccctacctactgtttgccaagatcccctagtgggtgtaagtctgaaaatttttaacaacccaagaatttgcctcagttattggcacagtctgtgaacccatggatttgagacagtctatgagcttacaaaaatgtgtactatacgtatgagctttgtgaagggctggggagcagaataccaccgccaggatgttactagcaccccctgctggattgagatacatctgcacggccccctccagtggctggataaagttcttactcaaatgggttcacctcataatcctatttcatctgtatcttaaatggccccaggcatctgcctctggaaaactattgagccttgcatgtacttgaaggatggatgagtcagacacgattgagaactgacaaaggagccttgataatacttgacctctgtgaccaactgttggattcagaaattt

SEQ ID NO: 246930 - DNA, 1568 bp, Homo Sapiens
ccaagatggcagcaatgaggaaggcgcttcgcgcgagtggtgggcttggggtccctccgggctgtcagcacctcatctatgggcactttaccaaagcgggtgaaaattgtggaagttggtccccgagatggactacaaaatgaaaagaatatcgtatctactccagtgaaaatcaagctgatagacatgctttctgaagcaggactctctgttatagaaaccaccagctttgtgtctcctaagtgggttccccagatgggtgaccacactgaagtcttgaagggcattcagaagtttcctggcatcaactacccagtcctgaccccaaatttgaaaggcttcgaggcagcggttgctgctggagccaaggaagtagtcatctttggagctgcctcagagctcttcaccaagaagaacatcaattgttccatagaggagagttttcagaggtttgacgcaatcctgaaggcagcgcagtcagccaatatttctgtgcgggggtacgtctcctgtgctcttggctgcccttatgaagggaagatctccccagctaaagtagctgaggtcaccaagaagttctactcaatgggctgctacgagatctccctgggggacaccattggtgtgggcaccccagggatcatgaaagacatgctgtctgctgtcatgcaggaagtgcctctggctgccctggctgtccactgccatgacacctatggtcaagccctggccaacaccttgatggccctgcagatgggagtgagtgtcgtggactcttctgtggcaggacttggaggctgtccctacgcacagggggcatcaggaaacttggccacagaagacctggtctacatgctagagggcttgggcattcacacgggtgtgaatctccagaagcttctggaagctggaaactttatctgtcaagccctgaacagaaaaactagctccaaagtggctcaggctacctgtaaactctgagccccttgcccacctgaagccctggggatgatgtggaaataggggcacacacagattgattcatggatggggacatgggaaatgagaataggttaaatggtgcaggtacctcatagccagctctacacagaggtctctcctggcagaaagcaggcgaagggcaggaggagctgcttggcagaaggacctcctgcccagacctgaggagtgagaggctttgagggctgaagtctccctttgttacggaccctggcccaggagttgaatgcctgaggacgtgtgggaaccccgttccctacttagcatgatccttgagtctcctctctggatggaatccgcgagctggccacctggccaccctctacacggctccaccctgccatggccgtggggcccttgctctctgacttctcaggacacaggtcatggaggttcttcccaagctggcagaggccatttgtggaaagtggagagctacgtggtggccatctgccaactccagcatttttggaaaatctccacgctgaatgtgatttttgaaaacagcttatgtaattaaaggttgaatggcacatcataattccagc

SEQ ID NO: 246931 - DNA, 1169 bp, Homo Sapiens
ttgtacaaaaaagttggcttatttcccgaaaattgcagtaaaacgattaaatgagggaacatatgcagaggtgcttttaaaaagcatatgccaccttttttattaattattatataaaatgaagcatttaattatagtaataatttgaagtagtttgaagtaccacactgaggtgaggacttaaaaatgataagacgagttccctattttataagaaaaataagccaaaattaaatattcttttggatataaatttcaacagtgagatagctgcctagtggaaatgaataatatcccagccactagtgtacagggtgttttgtggcacaggattatgtaatatggaactgctcaagcaaataactagtcatcacaacagcagttctttgtaataactgaaaaagaatattgtttctcggagaaggatgtcaaaagatcggcccagctcagggagcagtttgccctactagctcctcggacagctgtaaagaagagtctctggctctttagaatactgatcccattgaagataccacgctgcatgtgtccttagtagtcatgtctccttaggctcctcttggacattctgagcatgtgagacctgaggactgcaaacagctataagaggctccaaattaatcatatctttccctttgagaatctggcccaagctccagctaatctacttggatgggttgccagctatcttggagaaaaaggtggagatgggggcatgagattcctccagggggacaagctcactaccactggggcaacacccctaggtcaggaggttctgtcaaggatacttttctggtcccagatagggagataaagtctcaaaaacaaccactacacgtcaggctcttcattgttcctatctgccaaatcattatacttcctacaagcagtgcagagagctgagtcttcagcaggtccaagaaatttgaacacactgaaggaagtcagccttcccacctgaagatcaacatgcctggcactctagcacttgaggatagctgaatgaatgtgtcttacccatttccatgtttctcttgctaatttctttcgtgtgtgcctttgccacattttctcttttggttcacaagagtggtctgtgtcttgtcttagacatatctctcatttttcatctcgtctcttctcttgta

SEQ ID NO: 246932 - DNA, 1148 bp, Homo Sapiens
tcaagaagaaatccaaagagggatcaatgcttcgccggcctcgaacctccagccaacatgcctctcggggcgggcagagtgatgatgatgaggacgaaggcgtgcctgccagctaccatacggtgtctttacagttgctagacctgatgcacaccctgcacacgcgggcagcctctatctacagctcatgggcggaggagcaacgccacctggagacaggtggccagaagattgaagctgattctcgcaccctctgggcccactgctggtgccctttactgcagggtattgcctgcctgtgctgcgatgcccggcgccaggtacggatgcaggcactgacctatctgcagcgagcactacttgtacatgatctgcaaaagctagatgccctggaatgggagtcctgttttaacaaggtgctgtttcctctacttaccaagctcttggagaacatcagccctgcagatgtgggtgggatggaggagacccggatgagggcttccacattgctctctaaggtcttcctgcagcacctgtctccactgctgtcactctctacctttgcggccctctggctcaccatcttggacttcatggacaagtacatgcacgcaggctccagcgacttactgtcagaggcgatccctgagtctctgaagaacatgcttctggtgatggacacagcggagattttccacagtgcagatgcacggggaggcggcccctcggccctctgggagatcacctgggaacgcattgactgttttctccctcacctacgagatgaactcttcaagcagaccgtcatccaggaccccatgcccatggagcctcaaggccaaaagcctctcgcctcagcccacctgacttccgctgctggcgacactaggaccacctggccatccaccgcccccagagattccatctgagctgggggcctgtgactttgagaagcccgagagcccccgagccgccagcagcagctccccaggatcaccagtggcctcaagccccagcaggctgagccccacccccgacgggcctccacccttggctcagcccccactgatccagcatcccttggcctccccactgcaggtgggcgtgccacctatgactctgcccatatacctcaacgtgcgctatca

SEQ ID NO: 246933 - DNA, 782 bp, Homo Sapiens
  misc_feature (437)..(454): n is a, c, g, or t
  misc_feature (606)..(606): n is a, c, g, or t
  misc_feature (770)..(770): n is a, c, g, or t
aaaagtaaccacaaatatgtgaggacttactattttaaatggaatggaatgagctccatagattagttttgaatataaagtatataaaagtgcatcagtggtttatataggctttaaaaacatgttatcttacagtcctttaaagcagccatagagtttgtatcatttttcaagccaatttcagtcagggatttgaattgtttgattatggatgataaatgtgtcatatcttattaatatgtctcatgtctcgttccttcttaatatgatttatttgtatttcattttcttttcgtttcatgtttaatttcatacaacgtttaacaattggcatatatacttggcattcctgtccaccaaggattgtaatccgagcctgggaaaatcttaaatttctttttacttaaatctggaaatttgtctccattctgccaacnnnnnnnnnnnnnnnnnnatagtggaggggaggaaaggggggtgataccttgcagtaagtaagtcgaaatagcatgcctgaaaatttgaaacagaccattctaacacccaaggcttgtttataaaatacttgagaattacattaatgtggaatcaacagatgcagaagantataacataacttttaaaagctttcataaataccagcagcaattgtaagcaaatctacaaaggttcttgaacctttctattatatacaaaactgaaaagtcattaaggggttcaactaatccgggttttaaatgggtctttattttcatggcggtatggttttngggtttttcttg

SEQ ID NO: 246934 - DNA, 1708 bp, Homo Sapiens
  misc_feature (162)..(170): n is a, c, g, or t
ttggctggaatccccggcggcagtggggctgttgctgttgctgtggctgtcgctgcccgtcaggctgccttcttttgtcgtttcccagcgctgcgcaggacttctcctggcggcgctgcggatccagggggtcggctgccaggtacaggtttcctaaagacnnnnnnnnntggaggaatctgtaaaccaaatgcagccactgaatgagaagcagatagccaattctcaggatggatatgtatggcaagtcactgacatgaatcgactacaccggttcttatgtttcggttctgaaggtgggacttattatatcaaagaacagaagttgggccttgaaaatgctgaagctttaattagattgattgaagatggcagaggatgtgaagtgatacaagaaataaagtcatttagtcaagaaggcagaaccacaaagcaagagcctatgctctttgcacttgccatttgttcccagtgctccgacataagcacaaaacaagcagcatttaaagctgtttctgaagtttgtcgcattcctacccatctctttacttttatccagtttaagaaagatctgaaggaaagcatgaaatgtggcatgtggggtcgtgccctccggaaggctatagcggactggtacaatgagaaaggtggcatggcccttgctctggcagttacaaaatataaacagagaaatggctggtctcacaaagatctattaagattgtcacatcttaaaccttccagtgaagggacttgcaattgtgaccaaatatattacaaaggggctggaaagaagttcatgaattgtataaagaaaaagcactctctgtggagactgaaaaattattaaagtatctggaggctgtagagaaagtgaagcgcacaagagatgagctagaagtcattcatctaatagaagaacatagattagttagagaacatcttttaacaaatcacttaaagtctaaagaggtatggaaggctttgttacaagaaatgccgcttactgcattactaaggaatctaggaaagatgactgctaattcagtacttgaaccaggaaattcagaagtatctttagtatgtgaaaaactgtgtaatgaaaaactattaaaaaaggctcgtatacatccatttcatattttgatcgcattagaaacttacaagacaggtcatggtctcagagggaaactgaagtggcgccctgatgaagaaattttgaaagcactggatgctgctttttataaaacatttaagacagttgaaccaactggaaaacgtttcttactagctgttgatgtcagtgcttctatgaaccaaagagtctgggtagtatactcaacgctagtacagttgctgcagcaatgtgcatggttgtcacacgaacagaacaaagattcttatgtagttgctttttccgatgaaatggtaccatgtccagtgactacagatatgaccttacaacaggttttaatggctatgagtcagatcccagcaggtggaactgattgctctcttccaatgatctgggctcagaagacaaacacacctgctgatgtcttccatgtattcactgataatgagaccctttgctggaggtgtccatcctgctattgctctgacggaataatcgaaagaacatggcctattccaggttaactcgatgcttggcggactgacctccaaaatggttcaccattgcaagacc

SEQ ID NO: 246935 - DNA, 1240 bp, Homo Sapiens
ttggacctgagtgaacagaagaaaagagcattttaccgatggtatcaacttgagaagacaaaccctggcgctacactaagtatgagaccagcccccattccaatagaggaccctgaatggagacaaacgcctcccccagtctctgccacatctggtactttccgactgcgacgagggagtcgatttacctggagaaaggagtgcctggctgttatggaaagttacttcaatgagaatcaatacccagatgaagcaaagagggaagaaattgcaaacgcttgcaatgcagttatacagaagccaggcaaaaagctgtcagatctggaaagagttacctccctgaaagtatataattggtttgctaacagaaggaaggagatcaagaggagagccaatattgaagcagcaatcctggagagtcatgggatagatgtgcagagtccaggaggccactcaaacagtgatgatgtcgacgggaatgactactctgagcaggatacttggcaagtacgcaatggggaggaggaggagggaagaagttcagagggaggcagagaagcagagaaggtagaagaagagaggaggatctgatccaaacaagatgacagtacgagccatagtgaccaccaagaccccatctcattagctgtggaaatggcagcagtcaaccacactatcttggcattggcccgacaaggagccaacgaaatcaagacagaggccctggatgatgactgatcagggaggttaaacatgacaagttaacttagtttagacgtagcaccttagcagactttcctcggtccttaacatgtgttcttacagtataaacttgcagtttcttgtatgtcaggtagctgttagggtcttgttctgtgaagatggcatggtgccctcagcctttgcatatactctctcagtattaactcccagtaaataataaccaaccaaccaaccaaacttccctctcccagcccccgaggctagaaaatcttgctgctccgtcttagcattccaagaaagtgcttccaggtatttagatagccctcagttctcaaatattagactacgtgtaaaatcttgggtacctttagattcttgtaacactagtctgtactcccttttccttccccaagactgataggatgcaagctgaggtcgtggcacaggaatgacagacaccatttggggagtatccacagaagtcaaaggaacactagaatccccgactcagcgtgag

SEQ ID NO: 246936 - DNA, 595 bp, Homo Sapiens
ttattgcgattcctttattgttcctttctatgcggccagccggccatggcccaggtgaagctgcagcagtaaggaactgaagtggtaaagcctggggcttcagtgaagttgtcctgcaaggtttctggctacatcttcacaagttatgatatagactgggtgaggcagacgcctgaacagggacttgagtggattggatggatttttcctggagaggggagtactgaatacaatgagaagttcaagggcagggccacactgagtgtagacaagtcctccagcacagcctatatggagctcactaggctgacatctgaggactctgctgtctatttctgtgctagaggggactactataggcgctactttgacttgtggggccaagggaccacgggtccccgttcctcctcatgtggaggcggttcaggcggaggtggctctggcggtggcggatctgacattgagctcacccagtctccagcaatcatgtctgcatctccaggggagagggtcaccatgacctgcagtgccagctcaagtatacgttacatatattggtaccacagaaggctgatctccccagactcctggttat

SEQ ID NO: 246937 - DNA, 1870 bp, Homo Sapiens
  misc_feature (495)..(520): n is a, c, g, or t
  misc_feature (677)..(677): n is a, c, g, or t
  misc_feature (1851)..(1851): n is a, c, g, or t
acagccctaacaaagcaccccacccacccctgacatacctactgtcaccctgccccagtcctaccccttcctctccatgcaagtgtggccagggccctgggtatcatgtccacatgcccagcaagagccttgcctcccctgcctcccctcctttttcctgtccacctatatgaccaatccctaattgctgtcctgatgatgagtcattccaatttactggatttaaaacaaaaagttgttacggtttcatggggtggcccctctctctctcaccctctgggtttcgggaggtcgagtggggtattctctttgtttggcagtggttgctgtcctcttggcatctgagtcctttccctatccccacaagcccttctactccctgtttgcctttcctttgccaccctctccctgttttacatggaaattgcacgggcctctctgtgtttgcgtgcatgtgtgcgcctgtatatacatgtatagagagatatatttgtnnnnnnnnnnnnnnnnnnnnnnnnnngtggagtgaagctcagggcttgcagccaggacactgcccactggagcctgtcatctgccccttccgtgttggtgagattaagggaagaaggtgggagggcattagtcaagctggactgccccagtctttgactggttaccctcctctctgcaggtangtttttctggatgataggacagatgatggattctccaccaccattttccttgtactcttctctccacccttcttagggctggaggatggcatttatctctagatgactgttcccaaggagatgccactctgctctgccttactgttgggaaggagagaggaacccactcactcttatcagcttagagtgttcaactgatccttccccaccatcttcagatctgttcctctggagcttgactggggggtggggatggcaagtccatggtgtgtgttagggacccagggcattgggggaagggaggcgaaggcctgaggttttccatcttcattctcttttgttattaggagaaggtgaggcatgggccaatcccattcctgccttccagtgccccaccacccttctgatcttaggggttggatgggtcatctgtccttggtcagaattttctcaccctagtactcctactggcctgaccagggctgactgggtattctaatgaggagctgggaagtggggtgacatagctgaccttagtatcaacccccctcttctccaactcttgttttctagtccaggatatgctaaaggacgaagattttctattgtttccaggccctcagaccatccttgctgtcccttcaccctccatgcccctgccatcctcactcacttctcataaatggatctgggggttagagtggaggaaataaaatcctgaagtggttgtcagtgcttgtgggatgcagtggtcttcaggattctccccgcattattatgtagttgttcagaagctgttgctactgcgtctctctgtctgcggggggcacttgttcctgaggtcctcgcctgggtcctgacttctgtagtttctgtgaagacgtggctgtcctgtgggctcctgtgtgtgctggctgcgccctgagctccgagacagctgcccataacctgctaaggtcagggcccagggccccccacagcatggctgaaggaccccttcccagtaagggctgtcccaagccccactccatggggggccaggttttcctggcccacttttgtttgaatagcagaatgggattcaaatatttagtaaccccccatcaaagaattgaactgggggggaaagagaagggtttcccaagggggtaatcctccccttcaggtggccagnttaaaccttttaagggggt

SEQ ID NO: 246938 - DNA, 1051 bp, Homo Sapiens
ttggttcgaattggttttgggggtagattcgagttacaaaatggccgcccggagtgtgttcggcgcggttcccccagctgtctctggctgaaccggcgctctcgcctccctgccgaacacagcgtgaggagcccccccagggacatggtgtttgagtctctgggcttgccgagcactaagtcctctgagttccgcagcgcagcaccggaagcggccgagcgcgctcagcccggcgacccctgcgggctccagacccctgcgccgctgcgccccgggtttcgccgcaaccaagacccagcgagtgcagcggcggccgccgaggaggttcgaaaacatggccaaaagaaatgccgagaaggaactgacagataggaattgggatcaagaagatgaagctgaagaggtgggaacattctccatggccagtgaggaagtcttgaagaatagagccataaagaaagcaaagcgcagaaatgttggatttgaatctgacactggaggagcctttaaaggttttaaaggtttggtggtaccttctggaggaggacgcttttctggatttggtagtggcgctggagggaagcctttggaaggactgtcgaatggaaacaacataaccagtgcccctcccttcgccagtgcaaaggcagcggcagatcccaaggtagcctttggttctcttgctgcaaatggccctaccaccttggttgataaagtttcaaatcccaaaactaatggggacagtcagcagccctcctcctctggccttgcttccagtaaagcttgtgtcggaaatgcctatcacaagcagttggccgccttgaactgctccgtgcgggattggatagtgaagcacgtgaatacaaaccccctctgtgatctgacacctatctttaaagactatgagaaatatttagcaaacattgaacagcaacacgggaacagtggcacgaattctgaaagtgaatctaacaaagtggcagctgaaacacagtctccttccctttttggctcaacaaaattacagcaagagtcaacgtttttgtttcat

SEQ ID NO: 246939 - DNA, 1836 bp, Homo Sapiens
  misc_feature (1250)..(1283): n is a, c, g, or t
  misc_feature (1761)..(1775): n is a, c, g, or t
ttggctggactgttctcaggcaagccggggagtaacttttagttttgctcctgcgattattcaactgacgggctttcatttccatttcacacaccctagcaacacttataccttgcggaattgtattggtagcgtgaaaaaagcacactgagagggcaccatgccggtggaaaggatgcgcatgcgcccgtggctggaggagcagataaactccaacacgatcccggggctcaagtggcttaacaaggaaaagaagatttttcagatcccctggatgtatgcggctagacatgggtgggatgtggaaaaagatgcaccactctttagaaactgggcaatccatacaggaaagcatcaaccaggagtagataaacctgatcccaaaacatggaaggcgaatttcagatgcgccatgaattccttgcctgatattgaagaagtcaaggataaaagcataaagaaaggaaataatgccttcagggtctaccgaatgctgcccctatcagaacggccttctaagaaaggaaagaaaccaaagacagaaaaagaagacaaagttaagcacatcaagcaagaaccagttgagtcatctctggggcttagtaatggagtaagtgatctttctcctgagtatgcggtcctgacttcaactataaaaaatgaagtggatagtacggtgaacatcatagttgtaggacagtcccatctggacagcaacattgagaatcaagagattgtcaccaatccgccagacatttgccaagttgtagaggtgaccactgagagcgacgagcagccggtcagcatgagcgagctctaccctctgcagatctcccccgtgtcttcctatgcagaaagcgaaacgactgatagtgtgcccagcgatgaagagagtgccgaggggcggccacactggcggaagaggaatattgaaggcaaacagtacctcagcaacatggggactcgaggctcctacctgctgcccggcatggcgtccttcgtcacttccaacaaaccggacctccaggtcaccatcaaagaggagagcaatccggtgccttacaacagctcctggcccccttttcaagacctccccctttcttcctccatgaccccagcatccagcagcagtcggccagaccgggagacccgggccagcgtcatcaagaaaacatcggatatcacccaggcccgcgtcaagagctgttaagcctctgactctccgcggtggttgttggggcttcttggcnnnnnnnnnnnnnnnnnnnnnnnnnnnnnnnnnnctctctgacacctattttagacaaatctaagggaaaaagccttgacaatagaacattgattgctgtgtccaactccagtactggagcttctctttaactcaggactccagcccattggtagacgtgtgtttctagagcctgctggatctcccagggctactcactcaagttcaaggaccaacaaagggcagtggaggtgctgcatttgcctgcggtccaaggcccaccaaggggggagtgggatgcctccaaaacgggacgagaaaaatgtggaacctagcctgggaattttttttattcctcgtgaaataatggaccattaggccagccacctaactagaccattggccaattctggccttcctggcaccctttatttcttaaaaagccacctttacaggaataaggggcccttcctttgggggaaaactttggcctctcttatttctctcaacggggcgaacaactcttctcgggnnnnnnnnnnnnnnntttttccttcctgtggaccccccactttttttcccccgaccaggaaagcccctttttcttc

SEQ ID NO: 246940 - DNA, 970 bp, Homo Sapiens
  misc_feature (547)..(577): n is a, c, g, or t
  misc_feature (753)..(834): n is a, c, g, or t
  misc_feature (844)..(858): n is a, c, g, or t
  misc_feature (883)..(892): n is a, c, g, or t
ttggctttcttgtacaaagttgtgcggcatctaaggatgagtatgagaaatctcgaagcaggtctcggtcccgatcccccaaagaaaatggaaagggtgatataaagtcaaaatccagatcaaggagccagtcccgttccaattcgccgctacctgttccaccctcaaaggcccgttctgtgtcccctccaccaaaaagagctacttcaagatcccgttctagatctcgctcaaagtcaagatcaaggtccaggtcgagttccagagattaactcagaactccttgtttgcacattattatggaacactttcctacttaggcagttactcttccatgtttatacttggcctcttctgcaagaggaatctcttcaaaacaggggcacacagaaatttgatttgtggccaaattggatgaaaaagatgaggctctaaggaaatggtggcatgaagaccctctcccttctttgtagaattaagataactttgattttatagcttttgagctaacgtaacttttgtaaagattaagctcatttagtgttgnnnnnnnnnnnnnnnnnnnnnnnnnnnnnnnagaatttcagcaggatctgctggcagggtttttttgttttatttggttgcttatttttaaattaactggtttgagctttgaatacttaaggctttagagggagaacccaattttcaattatgttggctttttataaagcttgagttatgtaagatttaaataaaagtttgctaccnnnnnnnnnnnnnnnnnnnnnnnnnnnnnnnnnnnnnnnnnnnnnnnnnnnnnnnnnnnnnnnnnnnnnnnnnnnnnnnnnntcttgggggnnnnnnnnnnnnnnnaaaaatttttcaaaacctttttttnnnnnnnnnnccccaaaggggaaggaaaaaggggaataattgttttccaagaaaacccgggccaaaaaaaggggttgggtcccccccc

SEQ ID NO: 246941 - DNA, 427 bp, Homo Sapiens
  misc_feature (60)..(60): n is a, c, g, or t
  misc_feature (96)..(96): n is a, c, g, or t
  misc_feature (147)..(147): n is a, c, g, or t
  misc_feature (214)..(214): n is a, c, g, or t
  misc_feature (250)..(250): n is a, c, g, or t
ggtgaccagagggagaaaagtgggcccctgcctgggcccctggctgggtgcctccccggntccctggcttggtttccccgagggtggctccctggntccctccaagggccccaccgtgggtgaccaaagggtgaaaccagggtgaancgtggagcctgctggccatcaaagggacatcgaggattcccctggtaatcccaggtgccccaggttnctcccaggccctgctggtcagcagggtgcaatcggncagtccaggacctgcaggccccagaggacctgttggacccaagtggacctcctggcaaagatggaaccagtggacatcccaggtcccattggaccacccagggcctcgaggtaacagaggtgaaagaggatctgagggctccccaggccacccagggagggggatcctcaagcgacc

SEQ ID NO: 246942 - DNA, 976 bp, Homo Sapiens
tgggtgaaaatggacgatattgggaaagaaagatatagagacaacgactatgtccaattttcatgctcaggtaaaaagaacgtattctcatggtacttacagagctggcccaatgagacaaataagcttggtgggagcagttgatgaagaagtaggagattatttccctgagttccttgacatgttggaagagtcaccatttttaaaatgtacactgccatgggggacgctatctagtctaaaattacagagtcgaaaagatagtgatgatggtcccatcatgtgggttcgtccaggagaacaaatgatccctgtggctgatatgccaaagtcacctttcaaaaggaaaagaactaccaatgaaataaaaaatcttcagtacctacctcgaacaagtgagccccgtgagatgctctttgaagacaggacaagagctcatgcagatcatataggacaaggttttgaacgacagactacagctgctgttggagtgctgaaggctgtgcactgtggagagtggcctgatcaaccccgtataaccaaagatgtaatttgttttcatgctgaagatttcttagaagtagttcaacgaatgcagttagatttacatgaacctccactgtcccagtgtgtccaatgggttgatgatgcaaaactgaatcaactgaggagggaaggcattcgctatgccaggattcagctgtatgataatgacatttattttattccaaggaatgttgttcatcagttcaagacagtctcagctgtatgcagtttagcatggcatattcggctcaaattatatcactcagaggaggacacttctcagaatacggctactcatgaaacaggcacatcatcagattccacatcatctgttcttggacctcacactgacaacatgatttgtgctgtaagcaaagcctccttggattctgttttttcagataaacttcactctaaatggggatcctct

SEQ ID NO: 246943 - DNA, 438 bp, Homo Sapiens
  misc_feature (360)..(360): n is a, c, g, or t
  misc_feature (395)..(395): n is a, c, g, or t
  misc_feature (404)..(404): n is a, c, g, or t
  misc_feature (425)..(425): n is a, c, g, or t
aggaggcagcgtctcaggacgtcaccaccatggcctgggctctgctcctcctcaccctcctcactcagggcacaggttcctgggcccgttctgccctgactcagcctccctccgcttccgggtctcctggacagtcagtcaccatttcgtgtactggaaccagccgtgacgttggtggttataattttgtctcctggtaccaacaatatccaggcaaggcccccaaactcatgatttatgaggtctgtcggcggccctcgggggtccctgatcgcttctttggttccaagtttggcaacacggcctccctgaccgtttttgggctccagggttgaggatgaggctgattattattgctgnttcatatggcagggcttaacattacatgggagttncttcggggngaggggaccaaggttgaaccnttcctggggtcag

SEQ ID NO: 246944 - DNA, 1314 bp, Homo Sapiens
ttgggttggagttggaaccgtggagatgcggaaggaaaccccaccccccctagtgcccccggcggcccgggagtggaatcttcccccaaatgcgcccgcctgcatggaacggcagttggaggctgcgcggtaccggtccgatggggcgcttctcctcggggcctccagcctgagtgggcgctgctgggccggctccctctggctttttaaggacccctgtgccgcccccaacgaaggcttctgctccgccggagtccaaacggaggctggagtggctgacctcacttgggttggggagagaggtattctagtggcctccgattcaggtgctgttgaattgtgggaactagatgagaatgagacacttattgtcagcaagttctgcaagtatgagcatgatgacattgtgtctacagtcagtgtcttgagctctggcacacaagctgtcagtggtagcaaagacatctgcatcaaggtttgggaccttgctcagcaggtggtactgagttcataccgagctcatgctgctcaggtcacttgtgttgctgcctctcctcacaaggactctgtgtttctttcatgcagcgaggacaatagaattttactctgggatacccgctgtcccaagccagcatcacagattggctgcagtgcgcctggctaccttcctacctcgctggcttggcatcctcagcaaagtgaagtctttgtctttggtgatgagaatgggacagtctcccttgtggacaccaagagtacaagctgtgtcctgagctcagctgtacactcccagtgtgtcactgggctggtgttctccccacacagtgttcccttcctggcctctctcagtgaagactgctcacttgctgtgctggactcaagcctttctgagttgtttagaagccaagcccacagagactttgtgagagatgcgacttggtccccgctcaatcactccctgcttaccacagtgggctgggaccatcaggtcgtccaccacgttgtgcccacagaacctctcccagcccctggacctgcaagtgttactgagtagattggatttaagacaaaaagcaagtcccccatgagtgtccacttctttgccctgccctctcagcttgtgagacaacacaggagccttctatagtatgttgatatgctagatctgtgccgttaataggcatcgtctctcagcctgagggaggctggattctgggttcctgtagtcacagggaggaaaagctttcttaaaaatggacatgtatgtgcgtgtgagtgtgtgtgtagatttatagtttcggtagtggcaggaat

SEQ ID NO: 246945 - DNA, 862 bp, Homo Sapiens
  misc_feature (600)..(616): n is a, c, g, or t
ttgggttgtcaaccagcttgcacccgtggatatatggcattgacccgcttgctttgatacgaaacaaaaaagcagacgactccttcatcccatctgctcctaccgtgactgtggagtgacgcctcctgtgcagtgcagatttgccctccctgcctcctccctgtcctgccgcgcagccagggcgccttctcagcagtgcttccggcccagccgcccatccctaggcacagtgatttggcagcagggtcattttactttgaggctttttgttttaaaatgtagccaaggtttttacaaaggggaaaggaaaagaaaacaaaaacgcaagctccatgtgtatagctgaacttttatatgtttcttgccagcccctccgctcccttccatctctagcctctgtcctgtttagtttgatacgtcactgcagtaccttaagaggtgactcttaagaatgcatcccctcctgattcctcagctggttcacccttgaggttatttgcaaaaagaaaaggaggttcttgagggcaccgattgcgagcattctggtgcctggctccccgcctgggaagcgatggggtgctcagagcagcaggcaggttnnnnnnnnnnnnnnnnntcatagttgggttccagctcctggcttgatgagcccagggcgcttacaggcagcccatgaagttgatgaccgttttagcatgagaatcacacattcatctccacctggacacttgagccgcatggccagacccctcccacctgatgcggtggtgcgtgtgatttgtcaaaagaaagccttctggatgctgttaagatgtacccttcaggtgaacctggtatcagacccacagtacttgctgtttga

SEQ ID NO: 246946 - DNA, 1259 bp, Homo Sapiens
ttgggtggagcggctgccggcgtttcggggcgcgcctcggctgcctgcccggcggtctccgggtcctcgtccagaccggccaccggagcttgacctcctgcatcgacccttccatgggacttaatgaagagcagaaagaatttcaaaaagtggcctttgactttgctgcccgagagatggctccaaatatggcagagtgggaccagaagcatgtgtgcctggatgattgatagcttcggaaatgaggaacagaggcacaaattttgcccaccgctctgtaccatggagaagtttgcttcctactgcctcactgaaccaggaagtgggagtgatgctgcctgtcttctgacctccgctaagaaacagggagatcattacatcctcaatggctccaaggccttcatcagtggtgctggtgagtcagacatctatgtggtcatgtgccgaacaggaggaccaggccccaagggcatctcatgcatagttgttgagaaggggacccctggcctcagctttggcaagaaggagaaaaaggtggggtggaactcccagccaacacgagctgtgatcttcgaagactgtgctgtccctgtggccaacagaattgggagcgaggggcagggcttcctcattgccgtgagaggactgaacggagggaggatcaatattgcttcctgctccctgggggctgcccacgcctctgtcatcctcacccgagaccacctcaatgtccggaagcagtttggagagcctctgggccagtaaccagtacttgcaattcacactggctgatatggcaacaaggctggtggccgcgcggctgatggtccgcaatgcagcagtggctctgcaggaggagaggaaggatgcagtggccttgtgctccatggccaagctctttgctacagatgaatgctttgccatctgcaaccaggccttgcagatgcacgggggctacggctacctgaaggattacgctgttcagcagtacgtgcgggactccaggttccaccagattctagaaggtagcaatgaagtgatgaggatactgatctctagaagcctgcttcaggagtagaacccacacttgttctggcctggtgttcagtgcgactgcagtcagtgttgagtggtgccatgtgggccgctctattccaaaggaatcatggattagacccaagggctgagctcctctagggcaggacctgcaccctgtgtgttggcaccagcatcgggtcttggacttggggcagaatccc

SEQ ID NO: 246947 - DNA, 828 bp, Homo Sapiens
  misc_feature (51)..(51): n is a, c, g, or t
  misc_feature (716)..(757): n is a, c, g, or t
gccggcccgggcgcgggcggcggacacgggtgtaggctatatgttatatgnggcaccagaaattgcccaaagtctatatttttccgtgtttaccagtaggaaaaggggccacccaattaatggtccaaaatgggggaagtaaacaccaacagagccagacaaaccatccccgggggagcccatgcagccaaacaggaaatgagaacatttcagcaagatttcaagcaagcaagagatgatgggtcattgttcaggtgactgtaaaaaggcagagaatggccaccaagcagcaatggagcctcagggaaggacaataggcagaactatgaaaatgtttaattggtatagatcccaaaatatttcacaggaactgaaatcaccagactaatgcataaattcaatacctatttggaaagcagcacggcacaaacccacgagaagaacatgaagtcatcattccatgggttcatttgtaaccacacttggaagtagctcttatacacgacaacataactgcaaattcagcaatacttagtcttacttttttatgtatagaccataatcattcatcagaagcaaatactagaagaaatctgaggccacaacaccattaccaaatgagaaatgtgggaatttcttcaatattaagagggagaaaaaggccaattttggttgtgccaatccttgcctgtgtaccaacgccaggtactgagcannnnnnnnnnnnnnnnnnnnnnnnnnnnnnnnnnnnnnnnnnctcagaccccgaggttacatgcttgagggccagagagcacgtggggtcaaattaccaaaagactcggttcc

SEQ ID NO: 246948 - DNA, 576 bp, Homo Sapiens
ggggagtctgatccatcccattcacccagtgacttctttttgcccaggccgggactttttgcatcagtcacgttaaccagatgactttgcctgttaccaaacctcatgcatccacgtttgcgtctggggaggaataaaaagacatcgttcccgcttctgcgttttgttattcctactgccgccataggaattatttcgttggctgaacgttaccagcaccccgagaacacattttgatagaatcagagtagaggacatggctgtcttctaaaaagccacgacatgaaaatgacaatccctttcgtctccttcctccgctgcttccacctaacgcagcctcctgcctccgcctttgtttcatagtgaggattttattttgcacggcgccctccctctaaatacctaccctagatgatttcatcctgcccctcacttcttaacatattcctgtgtctttgtaatggccaaatttctccttccactcgtccgcacggtacgtcttcatgggagtcattttattccttacagcttccttgtaaccacagccctaaatccatgataaagctactcttgtac

SEQ ID NO: 246949 - DNA, 342 bp, Homo Sapiens
  misc_feature (325)..(325): n is a, c, g, or t
agccccaggtgagattgcagctggtgatttattgagaaacttccaggttgagtaggcttcattcagggcatgtctctcccccaggccccatcttcatacacttccgctaagatgcccacaattcatcccccttcatgtgcagcttgaaaaaccctgacattgttgctccctgccgggcatacctgccattgccactgcccatctctgtgatgaggaattcaacaccagatctctggcagctcttgagggattggccagtggcatttctcagggggtgctgtctagttttcccagagccccgccaaggtcctgggccaccgtggcnagagcgtggggaggttt

SEQ ID NO: 246950 - DNA, 969 bp, Homo Sapiens
ttggctcgcatttcttcaaggcggagcaggtctctctcttcaccacggtccaaagcaaaatctcgcttgtctttgaggcgcagcctttcagggtcttccccatgccctaagcaaaagtcacagacaccacccaggcgcagtcgctctggatcctcccaacctaaagctaaatctagaacgccacccagacgcagtcgctccagttcttctccgccacctaaacagaaatctaagacaccatcaagacaaagtcattccagttcatctcctcatcctaaagtgaaatctggaacaccaccgaggcaagggtccataacaagtccccaggccaatgagcaatctgtaacgccacagagacggagctgttttgaatcatcacctgaccctgagttgaaatctaggaccccttctagacatagctgctcagggtcctctcctcctagagtgaaatctagcacacctcccagacagagcccatctaggtcatcatctccacaacccaaagtgaaggcaataatatcaccaagacaaagaagccattctggctcctcttctccaagtcctagtagggtgacgtcgagaacaactccacggcgaagcagatcagtatctccctgctccaatgtggaatccagattgttgccaagatacagtcattctgggtcctcctcaccagataccaaagtgaaacctgaaacaccgccaagacaaagtcactcaaggtctatttcaccataccccaaagtaaaggcccaaactccaccggggccaagtctttctggatcaaagtcaccatgtccccaagagaagtctaaagactcactagttcaaagttgccctggatccctctctctctgtgcaggagtaaaatctagcacaccaccaggcgagagctattttggtgtctcatctctgcaactgaaaggacaatctcaaacttcaccagaccacagatctgatacttcaagt

SEQ ID NO: 246951 - DNA, 502 bp, Homo Sapiens
  misc_feature (372)..(372): n is a, c, g, or t
  misc_feature (446)..(446): n is a, c, g, or t
  misc_feature (460)..(460): n is a, c, g, or t
  misc_feature (477)..(477): n is a, c, g, or t
  misc_feature (488)..(488): n is a, c, g, or t
gagactttaagaacctgaagaaccttcacgcattgattcttgtcaacaataaaattagcaaagttagtcctggagcatttacacctttggtgaagttggaacgactttatctgtccaagaatcagctgaaggaattgccagaaaaaatgcccaaaactcttcaggagctgcgtgcccatgagaatgagatcaccaaagtgcgaaaagttactttcaatggactgaaccagatgattgtcatagaactgggcaccaatccgctgaagagctcaggaattgaaaatgggggctttccaggggaatgaaggaagctctcctacatccgcattgctggataccaatattcaccagcattcctcaaggtctttcctncttcccttacgggatttacatctttgatgggccacaaattcagcagagtttgatggcagttggcttgaagggantgattattttgggntaggttggggttttagntttcaacagcnttttggtcgtttga

SEQ ID NO: 246952 - DNA, 1377 bp, Homo Sapiens
cctagttttagaagtttcaatagcaggaaagggacccccacagtcacctgtgtttgaaggcgtctacaacaattccagaatgctgcatttccttacagctgttgtgggctccacttgtgatgtaaaggtgaaaaatggtaccacttatgagggtatcttcaagacgctaagctcaaagtttgaactagccgtggatgactgtgcaccggtaagcatctgagccagcaggtggccctcgtcgggaggacattgtggacaccatggtgtttaagccaagtgatgtcatgcttgttcacttccgaaatgttgacttcaactatgctactaaagacaagttcaccgattcagccattgccatgaactcgaaagtgaatggggaacacaaagagaaggtgcttcagcgctgggaggggggtgacagcaacagcgacgactatgacctcgagtctgacatgtccaatggatgggaccccaatgaaatgttcaagttcaatgaggagaactacggtgtgaagactacctatgatagcagtctttcttcttatacggtgcccttgagaaaaggacaactcagaagagtttcgtcagcgagagctgcgtgcggcccagttggctcgagagattgaatcaagcccccagtaccgcctacggatcgccatggagaacgacgatgggcgcactgaagaggagaagcacagtgcagtccagcgggcagggctcagggcgggagagccccagcttggcatccagggaggggaagtatatccctctgcctcaacgagtccgggaaggtccccggggaggagttcgatgcagcagctctcggggcggtcggcctggccttagctctttgccacctcgtggccctcaccatctggacaacagcagccctggcccaggttctgaggcccgtggtatcaatggaggcccttccccgcatgtccccaaaggcacagcggccttctgagaaggtgccaagactctgtcttcgcccagtaataggccttctggagaaacttctgttccacctcctcctgcagctcccccttttcttccagtgggccggatgtatcccccgcgtctcccaagtctgctgcccctgccccaatctcagcttcctgtccagagcctcccatcggctcggcagtgccaacctcttcagcctccatccctgtgacctcatcagtctcagatcctggagttgggctccatttctccagcttctccaaagatctccctggccccaaagatgtcaaagaactctctaccaaggaacctgggagaactcttggagcccaggagctggctcggatagctgggaaagtccctggtcttcagaatgaacagaaaacgattccacttggaagaactgagata

SEQ ID NO: 246953 - DNA, 774 bp, Homo Sapiens
  misc_feature (45)..(316): n is a, c, g, or t
acaaattgatgagcaatgcttttttcctaatagaacaactttgtnnnnnnnnnnnnnnnnnnnnnnnnnnnnnnnnnnnnnnnnnnnnnnnnnnnnnnnnnnnnnnnnnnnnnnnnnnnnnnnnnnnnnnnnnnnnnnnnnnnnnnnnnnnnnnnnnnnnnnnnnnnnnnnnnnnnnnnnnnnnnnnnnnnnnnnnnnnnnnnnnnnnnnnnnnnnnnnnnnnnnnnnnnnnnnnnnnnnnnnnnnnnnnnnnnnnnnnnnnnnnnnnnnnnnnnnnnnnnnnnnnnnnnnnnnnnnnnnnnnnnnnnnnnnnnnntaaagttttggctgggattacacgcgtgagccaccacacccagcctccatctttaaacttttaaatgtgaaatttctatcatgtaccgttagcctaacaagattttctttcctatttctgactggtgcctttcccctttttaggagcaacgaaagctactctcttagttatgttcttgtgatgtgacaaaatgtcaagaagataggagaagagaatattttatttcgttgatgcttttgttcccaagtgtgaccctaaacttaagctttgtaggagttggcattctttcatgtcccttccctttactcatgccgaaactatcaactgggacattttgtgcttttggtttaaaagttaattgatattatactttggttttatctaaaaagtaaatgtatttgcctttgacaaaagactgacacaagagcaaataagctttaaaatcgggtgttatgtgc

SEQ ID NO: 246954 - DNA, 1853 bp, Homo Sapiens
ttgggttttccatcacacttcagcagctgcacgagttcattcatgaggaagggaaccatagcaagttcatcctcctcaggtggaatgaaggtagttgtgacaggagtcttgatcatgtcgggcaagagtagcaaaacagttgtggaaaatcctcgactttagaagactgctcttgattattcaaggtctgattatcacatttatggattgtatgggacctttgttttttcctgttgccttggttgaggctgattagcacctccaccaaaggcgaaatgagaaaagagaagaaatacatattttcttttgccctttaagttcctcccctacacctccattttttaaggtttttaagtttgagtctctattaagaattagtgggaaagaacacaaaactaattgtcaaactaaggcatgaagattgtggttatagtccaagctaaggtagccagcccctcattaatggaaataaaaattaatagtcgtcagttttctctatcctcgtatattaaaactttgattttgttttcagttataggtaaaagctatgactatggtatagatatgtggtctgtaggttgcaccttatacgaactctatactggaaaaattttattccctggcaaaaccaataaccatatgctgaagcttgcaatggatctcaaaggaaagatgccaaataagatgattcgaaaaggtgtgttcaaagatcagcattttgatcaaaatctcaacttcatgtacatagaagttgataaagtaacagagagggagaaagttactgttatgagcaccattaatccaactaaggacctgttggctgacttgattgggtgccagagacttcctgaagaccaacgtaagaaagtacaccagctaaaggacttgttggaccagattctgatgttggacccagctaaacgaattagcatcaaccaggccctacagcacgccttcatccaggaaaaaatttaaacaagatgaagaaactccaagggtttgagtaaatacaaagactgaagaaatttcacagcagtttattaatgtgtgtgtgtgcaggccacagcagcatgcccttggtgtagtcagtgccgaaaggggtctgttccttcttgagcctgcctgcagggatggtctccttttaaagcaggttgtgtgcagcattcagtacactgaaggcataaaccttccactcttgaacaaagcagctgctttttaaaagcggtaattgcttctttaccttttatttcttttgtaaatgaagcttttctttaagaatgtgactttaaagtgttgtctattgcataaaacagttgacactcacttattgtaaagtgaagattgttctactgcatgtgaagtggaccatgcagatttctgtatgttctcagtatgcatcactagataataaagtcttttgtgaacaaggcatttgtagccatttttaaaagtttttgtcttcagtgctggtaagtcaggtaaaccataaatagttaaaagcaacccttttgtttttttcctgaaagtttttaattgaaagtattattagttaaagatgtaaacctagccaaaattaccagtttattaataattaggatcctaattatttcaaaaaatcctacaaatattgtcagctttcagtgtagtgagattattcctgtaggttatggggtataattcaggatttaactaatgtttctgctattttctcacttttccttttgatggtgcggaaagagaaaaaggaaaacggggcacaggccattcgacgcctttctccaaggggtctgatttgctgaaacaccagcttcaccttcttaaagggcacctaattacaaaagcatgcacatttt

SEQ ID NO: 246955 - DNA, 359 bp, Homo Sapiens
tttccaaaagaaaattcttccatttatgcatagaaccttgaactctagtctttaaaaatctaggctttagtttcagctcttttttagctgtgtggtcctggacaggcccttttacatctagacttggagatttaaagaaaatcataaagaattaaatgagatgatttctaagactcatttcattttaaaactctgatctttcagagacgcacaaatccattccctcttgctgtggaggagaaaatacatgaaaatctgaatccatatgcatttgtcagggttctccagagacataaaaccaataggatgtatgtgtttatatagagagatttgtaataaggaactggctcaccaatata

SEQ ID NO: 246956 - DNA, 1240 bp, Homo Sapiens
ttggggagagggtgattttaaaggctagtccaccatttcgttggctatagcttcctctgtatcctgtaatctcagtttttccaggagcaacgagtacaaataaaaggaccaggactaatatgcataagaagcccagcaaagcacgatgggctttcagtccagtgcacacacaggggctccatcaagattctgagattatataaagaagggacagagggaaggggaataccagatggttcacaggtggggaaagctgtggctgtgcgtccagcattgtcagactttttttgcactttcattctctgctgttgatttaatggaggagggaccatgagcaaggaactctggcaggggcagaaaataaaagcagagaccacgatggcaaaatcccgacagatgccgcttccagccccactgcactcaaatttgaatttgtaaagacaggccacaattactgtcagcagccaggacatttaaggtcattttaatgctactggtggcaaagcggcagcagttttttctagactggctttttttaggctcctttatccccacccagcttggctcgtcatccactctgcaacattttcacttcttcccaggatgtgagtgtcaccagcagacaagcagacaggctccagtgtcctctccagcctttctgcaccatcctgcagagttggtggagttgcagagtctggagggggcctgagatgagcgttctcaggaatgattcagactgaataatttggcctcctcttctctctgccaaagggacaggggcaggacatgagagggatgggtgcacttttgggtcagggttcagctttctggtgtgacagcctttctcccttaggaggctgctaagtcggtgagacctgggcactgcagccgactgcctgggttgaatggttgaatctcggctccagctcttgaccagctatgtggccttatgggggagtccgtcacctttctgggcattagttaccttattggtgtgatgtgtggtaatgttagtgcttgtgtatgaggtgagaattgaatctcacaacacaagagctgttgaacattgtgagatgtgtggaatattgagaacagtgcctagccatagaaatcactcaataaagattagctgtctggaccctgcttctgtcccttcttttcctatcatagctggcaccgtgttcatgcctgtggtattccctgtatccctattcctgggaagcagcccaggagggggatt

SEQ ID NO: 246957 - DNA, 993 bp, Homo Sapiens
  misc_feature (851)..(851): n is a, c, g, or t
  misc_feature (925)..(925): n is a, c, g, or t
  misc_feature (936)..(936): n is a, c, g, or t
  misc_feature (946)..(949): n is a, c, g, or t
  misc_feature (980)..(980): n is a, c, g, or t
ttggcacttataaacaaagggaattcaacctgattttccagtatagactcattttcaccaaaatcattttacttttattgctaccaaaaatgttttcaaggcaatgtatgctgtaatagcatatgaggcccagagagagatctcatttttagttcttgcttctgtcaccaatttattttgctgaggttcagcagtttccccagctatgaaatagataatacagtggttggaaaactacacttgatttctaagggaaaaaaaggtccactgtgagtcaagagaattcagaaaggattctcataaacacaagactagattgcaggaagatgtgaaagcatttggctaattctgacatttggctaataacatcctcacagtatgtcccaagtatcttctgcccttcccaccacggtgagcagtcatgacagtgagggtggcataggtgggatgtgtggctggcagaagccagtgggcaagagttgtccacagaatagtccatgagctttttagagcccggccattcccccagtgaatttgtgctttctcccctcagacgagctccgagacagtgacagtgtctgcgacagcggcgtggagacatccttccgcaaactcagctttaccgagtctctgaccagtggtgcctcactgctaactctcaacaaaatgccccatgattatgggcaggaaggacctctagaaggcaaaatttagcctgctgacaatttcccacaccgtgtaaaccaaagccctaaaattccactgcgttgtccacaagacagaagctgaagtgcatccaaaggtgctcagagagccggcccgcctgaatcattctcgatttaactcgagancttttcaacttggcttcctttcttggttcataaatgaattttagtttggttcacttacagatagtatctagcantcacaacactngctgagcggnnnnatctggggatgaggttgcttactaagctttnccagctgctgctg

SEQ ID NO: 246958 - DNA, 550 bp, Homo Sapiens
  misc_feature (56)..(75): n is a, c, g, or t
  misc_feature (475)..(475): n is a, c, g, or t
  misc_feature (486)..(486): n is a, c, g, or t
  misc_feature (491)..(491): n is a, c, g, or t
  misc_feature (497)..(497): n is a, c, g, or t
  misc_feature (501)..(501): n is a, c, g, or t
ctgcatcagtaattttaatagagactcttagtggttatcaacaactggtcagttgnnnnnnnnnnnnnnnnnnnnccacactgctctctggattcgaacctagtgaattctgggctcagtcctcctcctccatctctttcttgatccagtccacgtagttgagcactttggtgtagaagccatagcccctgctgcacccgatgccccaggacacgatgcccgtggccacccagcgatcagtgttcgggtcccttactgcaaaaacgcccccactatccccctggcaggcgtcctgctttagagatgggtgtccagcacagaacatgttttgagagaacacatccatcctattctttccccggagccagttctcacaggcctgtggattagctacgggcagacggacaaacctgaggtcatgagcaatcttctccttcatgaccccgaagccactggcatagcccatcaagcccangtcgtaaaagnatcgntggcanggangcaaatgggaagaggttggaccaggggacctttttcaagttcaggaggg

SEQ ID NO: 246959 - DNA, 1367 bp, Homo Sapiens
aagcaggcggtaccggtccggaattcccgggatatgtcgacccacgcgtcggcttcactctgcgccagcaggctgcagacaacccgccaaggagctgtcacacgctctgtaccagcacgatgccgcctgccgtgtcattgcccgtctcaccaaggaagtcacgtgctgcccgagaagctctggctaccctgaaaccacaggctggcctcattgtgccccaggctgtgccaagttcccaaccaagtgttgtgggtgcgggtgagccaatggattggggtgagctggtgggaatgaccccagagattattcagaagcttcaagacaaagccactgtgctaaccacggagcgcaagaagagagggaagactgtgcctgaggagctggtgaagccagaagagctcagcaaataccggcaggtggcatcccacgtgggggttgcacagtgccagcattcctgggatcctggccctggacctctgcccgtccgaggacaacaagatcctcactggtggggcggataaaaatgtcgtagtagtttgacaaaagttctgaacaaatcctggctaccctcaaaggccataccaagaaggtcaccagcgtggtgtttcacccttcccaggacctggtgtatactgcttcccccgatgccactatcaggattgggtcggtccccaatgcctcttgtgtacaggtggttcgggcccatgagagtgctgtgacaggcctcagccttcattgccactggcgactatctcctgagctcctccgatgatcagtactgggctttctctgacatccagacagggcgtgtgctcaccaaggtgacagatgagacctccggctgctctctcacctgtgcacagttccaccctgacggactcatctttggaacaggaaccatggactctcagatcaagatctgggacttgaaggaacgtactaatgtggccaacttccctggccactcgggccccatcactagcatcgccttctctgagaatggttactacctggctacagcggctgatgactcctctgtcaagctctgggatctgcgcaagcttaagaactttaagactttgcagctggataacaactttgaggtaaagtcactgatctttgaccagagtggtacctacctggctcttgggggcacggatgtccagatctacatctgcaaacaatggacggagattcttcactttacagagcatagcggcctgaccacaggggtggccttcgggcatcacgccaagttcatcgcttcaacaggcatggacagaagcctcaagttctacagcctgtaggccctggcccttctgatggaagctgggcctcatctcagtagaggggtagaattagggttt

SEQ ID NO: 246960 - DNA, 590 bp, Homo Sapiens
atcaattagagcagttgtttttttaatacaaacaagggagaaaccacaccatcttttaaaatacaggcgcgaattccacatcacgcagaagacaacgcatttcgctaagggccacagcattcactggttaataaagccacagctacaaagtaatgagatgtcccacatgaatactttttaaccacttacattcacgtcaacatataaataatggaattaagtaaaaacttcattataatgctattttgttagaaaagtatttgtaaagtggcatttttcccccaagagctgtttcacttaagctttatttcctcggcctggcaaggggagggcttttcagtattgttatttggtacacacttacctgaagaaataagtaagtaacttaaacataaaaaacatagtcgacacacatcttgccctgcattctgacatttgctggaatggtctacagcaggctacaatgctcccttctgaatggcaaatgtctgaaaatgtcaaagtttattaactgttcacaaaggcaggcatttgaccttgaaggtgttaaagttgaatgggtttatttttgagacccaacttttttgtac

SEQ ID NO: 246961 - DNA, 877 bp, Homo Sapiens
  misc_feature (779)..(779): n is a, c, g, or t
gaataaccaaatgcagcggaaggacagggagatgcagatgaatgaagcaaaaattgcagaatgtttgcagactatctctgacctggagacggagtgcctagacctgcgcactaagctttgtgaccttgaaagagccaaccagaccctgaaggatgaatatgatgccctgcagatcacttttactgccttggagggaaaactgaggaaaactacggaagagaaccaggagctggtcaccagatggatggctgagaaagcccaggaagccaatcggcttaatgcagagaatgaaaaagactccaggaggcggcaagcccggctgcagaaagagcttgcagaagcagcaaaggaacctctaccagtcgaacaggatgatgacattgaggtcattgtggatgaaacttctgatcacaccgaagagacctctcctgtgcgagccatcagcagagcagccacgagacgctctgtctcttccttcccagtcccccaggacaatgtggatactcatcctggttctggtaaagaagtgagggtaccagctactgccttgtgtgtcttcgatgcacatgatggggaagtcaacgctgtgcagttcagtccaggttcccggttactggccactggaggcatggaccgcagggttaagctttgggaagtatttggagaaaaatgtgagttcaagggttccctatctggcagtaatgcaggaattacaagcattgaatttgatagtgctggatcttacctcttagcagcttcaaatgattttttgcaggcgngaatctggactgtgggatgatttatccgattacgggcacacactcacggggacccagttgggaaaagtgctggtctggctaagttccctggctggaaa

SEQ ID NO: 246962 - DNA, 1787 bp, Homo Sapiens
  misc_feature (83)..(83): n is a, c, g, or t
acgccatgaagatcaaagatgccaagaaaccctctttcccatggtttggcatggacattgggggaactctagtaaagctctcngtactttgaacctattgatatcacagcagaggaagagcaagaagaagttgagagtttaaaaagtattcggaaatatttgacttctaacgtggcatatggatccaccggcattcgggatgtacaccttgaactgaaagatttaacactttttggccgaagagggaacttgcactttatcaggtttccaacccaggacctgcctacttttatccaaatgggaagagataaaaacttcgtcaacattgcagacggtgctatgtgctacaggaggtggtgcttacaagtttgaaaaagattttcgcacaattggaaacctccacctgcacaaactggatgaacttgactgccttgtaaagggcttgctgtatatagactctgtcagtttcaatggacaagccgagtgctattattttgctaatgcctcagaacctgagcgatgccaaaagatgccttttaacctggatgatccctatccactgcttgtagtgaacattggctcaggagtcagtattttagcagtccattccaaagacaactataaacgagtgactgggacaagccttggagggggtacctttctgggtttatgcagtttattgactggctgtgaaagttttgaagaggctcttgaaatggcatccaaaggtgatagcacacaagctgacaagctggtccgtgatatttatggaggagattatgaaagatttggtttgccaggttgggctgtagcatctagttttgggaatatgatttataaggagaagcgagaatctgttagtaacgaagatctggcaagagctactttagttactatcaccaataacattggttctgtggcacgaatgtgtgctgttaatgagaaaataaacagagttgtctttgttggaaactttttacgtgtcaataccctctcaatgaaacttttggcatatgcactggattactggtcaaaaggtcaactaaaagcattgtttctagaacatgagggttactttggagcagttggtgcacttcttgggctgccaaatttcagctaaagcatcaggtctctctctctgctaataaatgtcatccaagaggaactaaaaccagaggcattattactgcattgtttgtcactgggaaccaaaggataaaagagtagcataagctgctgaatgttgccatattaaaggagagaacttggtaacgtgaagtatttctcattgaaatgctttcccttttgtatatagccagtgttaaatccttaaatgcaatacagcctctgattattgagcttcctcttaaaaagatttttttattttatgtagccaacattgcagtactgtatgctcaaacacaaatcttaaagtatcggaactgtttagcttatgaaaataatcgactctgaatatttgttacaagtctgttttatgtgttttgattactagtgagcagaaaataacataccctgtattcaaaattactgaaatggcaatcaaagatgatcatttttatgtgattttagaaatgttaaggcaatactactaattattgtacgtttttttaacgtatcacccaaagcatgtatgtgatctttccccattagtatctttttctcaaatgccataattaactgaaatactattattaaattttcatgagaattctaaaatgaaatcctgggaaatgcacgtttgggtgatgttgcactttctgtatttt

SEQ ID NO: 246963 - DNA, 501 bp, Homo Sapiens
caagtgtcaatcacatgagcgccttgccttctcttaggctttgaagcatttttgtctgtgctccctgatcttcaggtcaccaccatgaagttcttagcagtcctggtactcttgggagtttccatctttctggtctctgcccagaatccgacaacagctgctccagctgacacgtatccagctactggtcctgctgatgatgaagcccctgatgctgaaaccactgctgctgcaaccactgcgaccactgctgctcctaccactgcaaccaccgctgcttctaccactgctcgtaaagacattccagttttacccaaatgggttggggatctcccgaatggtagagtgtgtccctgagatggaatcagcttgagtcttctgcaattggtcacaactattcatgcttcctgtgatttcatccaactacttaccttgcctacgatatcccctttatctctaatcagtttattttctttcaaataaaaaataactatgagcaac

SEQ ID NO: 246964 - DNA, 1244 bp, Homo Sapiens
  misc_feature (137)..(145): n is a, c, g, or t
  misc_feature (183)..(226): n is a, c, g, or t
  misc_feature (290)..(333): n is a, c, g, or t
  misc_feature (379)..(462): n is a, c, g, or t
  misc_feature (484)..(492): n is a, c, g, or t
  misc_feature (1148)..(1148): n is a, c, g, or t
  misc_feature (1196)..(1196): n is a, c, g, or t
ttggctccgttcctccggatttcgatccccctttttctatctgtcaatcagcgccgcctttgaactgaaaagctctcagtctaacttcaactcactcaaatccgagcggcacgagcacctcctgtatcttcggcttnnnnnnnnntttgctctttatatctgacttcttgttgttgttggtgnnnnnnnnnnnnnnnnnnnnnnnnnnnnnnnnnnnnnnnnnnnngcacattgatcggatccttgggaacgagagaaaaaagaaacccaaactcacgcgtgcagaagannnnnnnnnnnnnnnnnnnnnnnnnnnnnnnnnnnnnnnnnnnnaggagaaaaagacccccaagcagaaaaaagttcaccttggactcgnnnnnnnnnnnnnnnnnnnnnnnnnnnnnnnnnnnnnnnnnnnnnnnnnnnnnnnnnnnnnnnnnnnnnnnnnnnnnnnnnnnncaaaattgctgctggtgggtgnnnnnnnnntgccgcagctgaacggcggtggaggggatgacctaggcgccaacgacgaactgatttccttcaaagacgagggcgaacaggaggagaagagctccgaaaactcctcggcagagagggatttagctgatgtcaaatcgtctctagtcaatgaatcagaaacgaatcaaaacagctcctccgattccgaggcggaaagacggcctccgcctcgctccgaaagtttccgagacaaatcccgggaaagtttggaagaagcggccaagaggcaagatggagggctctttaaggggccaccgtatcccggctaccccttcatcatgatccccgacctgacgagcccctacctccccaacggatcgctctcgcccaccgcccgaaccctccattttcagtccggcagcacacattactctgcgtacaaaacgattgaacaccagattgcagttcagtatctccagatgaaatggccactgcttgatgtccaggcagggagcctccagagtagacaagccctcaaggatgcccggtccccatcaccggcacacattgtctctaacaaagtgccagtggtgcagcaccctcaccatgtccaccccctcacgcctcttctcacgtacagcaatgaacacttcacgccgggaaacccacctccacanttaccagccgacgtaggaccccaaaacagggattcccacggctttcgnacctttcagatatattccccgtatttacccattttggctgggggacct

SEQ ID NO: 246965 - DNA, 1338 bp, Homo Sapiens
ggagggaaagcttttcatctcgcaaagctggggcagaaagtctctttggaatgtgtcatctgcacttcagctcagggatcctcttggctgaagtccagagtgtcctttctgattcctgaagtagatgaacagccccggccccaaggaagagcaggcccagcacaaagcccccgactccactcagcatcttgctctgtgcagattcagaccgtgctctccattccactgtgagagggcttgtcacgcttgggtgctccacttggcaggtgtaaacctctccactccgaggaactgtttccagcatcaccagggtctggaaggtccagtctccattgtggatcaggcctgtggacaccaccccagtcttctcttcctggccattccggaaccacctgacttcaatgctgcctggatagaaaccactcacagaacagaccaggaggttgtggtgctgcaggggctgggtctttgaaggatacacagtcaccttaggatggactaggagaaaaaaggtagagggaatgagtcatgaagacagagtaagtctccttgtttggttttttgtctgcttctctgtaaacgtaggctctggccttgagcaggcctccagcacagctggccatgtggccttacagtgtcatcagcctggaatttaatctttatagtggggacctattagatttgagagatattgtgaaaaattgtgtttgtttcttcatagcttgaaattgtcatgcattgtcaaagtgtttacaaatctttgaacgtacagagtgtagtaattaaaactgatttctgagccaggttgcctggttcaaatccaaggtctgccttttactggttgatcctggaagagtatttgattcttttgtgtctcaactttctcaccagtaatggaggataattatattaatttacctcttgaggttatatgaggattaatgcgagtaaaatatataaaaaaaagactgaagatagccttcaatttatgaggttagaaagcttctcactccattccactgtgagagggctcatcacacttgtgtgcaccacttggcacctatttatcatccttgtacaccttgagggaaaaatatgatttaaagcaatgtggatagagaaagggacggagtagggcacatgaggaaactgagtatgaatttttaggaatactactgccatgcactcacaccttagaacaccacagaaatggttatgctcctgggaaggtgggacagacagaaatgattctccaaatctttaagttcctaaaaaagcatgagtcctaaagcagagagaaggattaaggaacgtcattttagttttgaaagttcccaa

SEQ ID NO: 246966 - DNA, 1137 bp, Homo Sapiens
ttggatgaactataaggcaagggcagaagactgtgaagagctgttacggatagaagaggatgtgcactggcaaactgagggcataataagttcatccaaagatcaggacatggatatagcaatgatcgagcagctgagagaagcagtagatttgctgcaagatcccaatggattaagcacagatattacagagagaagtgttttaaacctatatcctatgggatcagcagaagccttagaattacaagattctgcactgaatggtcaaatacagctggagacatctccggtgtgtgaggtgcaaagtgatctaacattacagagtaacgggagccagtattctccaaatgagattagagagaactcccctgcagtctctcctaccacaaacagcacagctccatttggcctgaagcctcgatcagtgtttctaagacctcagagaaatttggaatctatagacccgcagtttacaatccggaggaaaatggagcagatgagagaagagaaagagctggtggaacaacttcgtgagagcattgagatgagattgaaggtcagtctacacgaagacctgggggcagccctcatggatggtgtcgtcctctgccatctggtcaaccacatccgcccacggtcggttgcaagcatccatgtcccatcaccagcggttcccaaacttagcatggccaaatgcagaagaaatgtggaaaactttttggaagcgtgccgaaaattaggagtaccagaggaaaagctatgtcttctccaccacatccttgaagaaaaaggcctggtcaaagtgggcattaccattcaagcattactagacatcaccgtaacgaaggctctgttcacatgaaactacctcttctccattgggggctcagactctgctctcatccaggatcctgaactctgctccaggcacctgttcaaccctctctcccacccactgcctgtcacttcactgactccagttacattgaaacaattttcagtctaagggaggatttctacctttcagagctgacctccgactttaagacttgacaggtatttatcttgaaaccagagagggagctggaggacaaacaaaaactgagcaagcacatcaaggacttttccaacctcctg

SEQ ID NO: 246967 - DNA, 1313 bp, Homo Sapiens
  misc_feature (1223)..(1223): n is a, c, g, or t
ttggcaaatcaggaagtgtgctgcaccactggaatgaaatctattactttgtggaacagttggctcacaaattcatcagcccacagttgagaatgtcctttattgttttctccacccgaggaacaaccttaatgaaactgacagaagacagagaacaaatccgtcaaggcctagaagaactccagaaagttctgccaggaggagacacttacatgcatgaaggatttgaaagggccagtgagcagatttattatgaaaacagacaagggtacaggacagccagcgtcatcattgctttgactgatggagaactccatgaagatctctttttctattcagagagggaggctaataggtctcgagatcttggtgcaattgtttactgtgttggtgtgaaagatttcaatgagacacagctggcccggattgcggacagtaaggatcatgtgtttcccgtgaatgacggctttcaggctctgcaaggcatcatccactcaattttgaagaagtcctgcatcgaaattctagcagctgaaccatccaccatatgtgcaggagagtcatttcaaagttgtcgtgagaggaaacggctttccgacatgcccgcaacgtggacagggtccttctgcagcttcaagatcaatgactcggtcacactcaatgagaagcccttttctgtggaagatacttatttacttgtgtccagcgcctatcttaaaagaagttggcatgaaagctgcactccaggtcagcatgaacgatggcctctcttttatctccagttctgtcatcatcaccaccacacactgttctgacggttccatcctggccatcgccctgctgatcctgttcctgctcctagccctggctctcctctggtggttctggcccctcttgccgccgttccaacggcggcaagagggccaaagtgctgagggccagcagccccgttaccactgctcgggccagtagagctgcccaactgcccagcgagcagaggtggacgaaggtctccataacaaaggccttgtagacactgaggaacatcagcaggaggacagctggccggaaggtgtggtacagatcatagcgtgttatcatccagacctgagcagacgcgacgatgtaatggaccagactgatgttggagtctatgctcatctggatgtacttccagtcaaactcaatgccccgggctccgacccataggggaatgcagcggnacataataagctcagcagtggcccagcccagggcagcaaccatgatcttgtactctcctccttgccgccgttcctcctcttgccgccgtt

SEQ ID NO: 246968 - DNA, 1295 bp, Homo Sapiens
  misc_feature (482)..(483): n is a, c, g, or t
ttggcaagctttcttgtctttgctggaaagaaaatgactacttactaatatattttgggaaaaatatttgtaagaatattaataagcttgttttccaggacctatttaagaaaaataccacgttttaatgcagattctggctattccatccattctgattcagaaagtcaggtaagattgaatagatacaatacacactattttaattagttttcaaatagtagctaaaaagtaggaataaaatgcaaagtattaattgctctaaggaagtatgaagtctgttgctttaaaacatcttttctaccaataatagtttgtaaataaacaaattttaaaactacataatttatattttttcctacactaacagtcatatacaaatgtattctaaatgactttatttcttacaggctgaaactgtacacgggcttgatggttgtgcttctttgctgagggacattttgagaaatgaagattcaggnnctattccatcaattctttgctgatcaccttatctcaagtcattattttgatgtaacaaatttttgttttattaataggttcagaaacagcatatttagaaaacagatctaattctagacctttagaaagcaaaagatacggatcaaaaaagaaaagacatgaaaaacatactattcctttggtagtccagaaagaaacatcatcttcagataataagaaacagatacctaatgaagcttctgctagaagtgaaagagacacatcagacctagagcaaaactggtcattgcaagatcattatagaatgtattcacccataatataccaagccctctgtgagcacgtgcagactcagatgtcactgatgaatgacttgacttcaaagaacatccctaatggaattcctgctgtaccatgccatgctccctctcattctgaatctcaggcaactcctcattctagttatggcttatgtacctccaccccagtctggtcacttcagcggccaccctgccctccaaaggttcattctgaagttcaaactgatggcaacagtcagtttgcatcacaaggtaaaacagtttctgcaacctgtactgatgttctacggaattcatttaataccagtcctggagttccatgtagcctgcccaaaactgacatatcagctattccaacattgcagcaactgggccttgttaatggaattctgccacacaaggaactcataaggaaacagacctactaaaatgtattcaaacatatttgtctctttttcgatctcatggaaaggaacgcatctggacgtcaac

SEQ ID NO: 246969 - DNA, 1014 bp, Homo Sapiens
  misc_feature (348)..(367): n is a, c, g, or t
ttggattggacattattttcagagaaaataactttttatcttaacatctcatcccatagagtaaaatttcaacaagtagtctgacttttaataataagagtttatgatgatgaaaattcattgggcaatacattcacccccaaaaatttgtctggaaacttgtgttccaaaatagaatctgtggtttagattttaaaatagatttaatatacattcctgaaaaagagattaccttaaccacaataaaaagaagacaacacatattattttcattcttaactctaggggaaaaaatgtaaacattagttgcaaaaagctattttagtgtatggaaggatgttcttgggnnnnnnnnnnnnnnnnnnnngggagagaggaaataaagaaaccacggttttgtgaggtagtactttcaaagggatctatgtatctcagaagctagtcaacaggttttaagtatgtggaattgtagggttttatataaaaatggaagatacagtctctactcttaaggagattaaaacacaaacatctcctcaattgacaaggtctctttccatgctttctatctgggctaagagacttatccttgaaaaatgtttgtgggtaaacattttttactctctgcttcccattgtcctatcctcttctccatgcctgccatccttaagaggactgaagcaggttatagaggaatcgcagctgtgcactcccactaccctcatctcttcagtcaccatgtcattaacagcatctctctctgctatattctccctcctttcaatagcccagccttctttgtgtttcaaagcaggcaagaagcctgtctagctagctgtttaaattggaattcttctagagtttgattcttcattttcttctttctccactaaaattgatttcacatgtgtttgactcaagggtgaacctcgtgtggttggtgctgtgggccctgctggtccatctggtcctagtgggctcccaggagacaggggtgctgctggcatacctggt

SEQ ID NO: 246970 - DNA, 476 bp, Homo Sapiens
acaaaaatagagcatcagcaaccctttccaggtagaaattccagcgggagttcaggttcccaagcaatttcacgtacatggctggtaagtgactgatctttccccccgcttggtagcctcacagatgagtcttggatgcattcacagtcatttctggtctgtgcaccaaaggatgcattcagtgacctatgaaaaaccctactgataggtccagagaccctggtgctcaccttagcctttgtctttgagcaaataacttaccttcttccctcttatgcctgggttttctcacacttaaatctgtactactgtttgccaatgtctgatgtgtgtatccctggttcacaagaagattttagatggtattcaaattaatattttctatttagttatatatttaatgtataatataaaaatatgattagcatattgacctgtagtttgatagatgttctgtctaggataaagctaactgt

SEQ ID NO: 246971 - DNA, 395 bp, Homo Sapiens
  misc_feature (340)..(340): n is a, c, g, or t
  misc_feature (384)..(384): n is a, c, g, or t
gcctgatttagcaggtggtcctgcgggcgtccaggtcagcaccttcctgtagggcactggggctagggtcacagcccctaactcataaagcaatcaaagaaccattagaaagggctcattaagccttttggacacaggaccccagagaggaaaaagtgacttgcccaaggtcgtaagcaagctactggcatggcaagagcccagcttcctgacggagcgcaacatttctccactgcactgtgctagcagctcagcagggcctctaacctgtgatgtcacactcaagaggccttggcagctcctagccatagagcttcctttccagaacccttccacttgnccaatgtgggagacagggggttagttggggctttctatgggagnccatctgcttt

SEQ ID NO: 246972 - DNA, 1336 bp, Homo Sapiens
  misc_feature (686)..(698): n is a, c, g, or t
  misc_feature (1076)..(1097): n is a, c, g, or t
ctttgtacaaaaaagttggctttgcctttcaaatgaaatgttttctgtatgcttatgtgtattatatttgtgacttttaagaaaaatagtgatttaatttaaatttttcaataactgtattaatattttcctacccaagagccatagaaaagaaactaagaaagttattggccagcttctacttcatactgtaaagcatggagaaaagggaattgatgttgatgctgaaaattgtgcagtgtgtattgaaaatttcaaagtaaaggatattattagaattctgccatgcaagcatatttttcatagaatatgcattgacccatggcttttggatcaccgaacatgtccaatgtgtaaacttgatgtcatcaaagccctaggatattggggagagcctggggatgtacaggagatgcctgctccagaatctcctcctggaagggatccagctgcaaatttgagtctagctttaccagatgatgacggaagtgatgagagcagtccaccatcagcctcccctgctgaatctgagccacagtgtgatcccagctttaaaggagatgcaggagaaaatacggcattgctagaagccggcaggagtgactctcggcatggaggacccatctcctagcacacgtgcccactgaagtggcaccaacagaagtttggcttgaactaaaggacannnnnnnnnnnnnactttagcacataatttgtatatttgaaaataatgtatattattttacctattagattctgatttgatatacaaaggactaagatattttcttcttgaagagacttttcgattagtcctcatatatttatctactaaaatagagtgtttaccatgaacagtgtgttgcttcagactattacaaagacaactggggcaggtactctaatataaaggacaggtggtgtttctaaataattggctgctatggttctgtaaaaaccagttaattctatttttcaaggtttttggcaaagcacatcaatgttagactagttgaagtggaattgtataattcaattcgataattgatctcatgggctttccctggaggaaaggnnnnnnnnnnnnnnnnnnnnnnaagaacttgaaacttgtaaactgagatgtctgtagctttttttgcccatctgtagtgtatgtgaagatttcaaaacctgagagcactttttctttgtttagaattatgagaaaggcactagatgactttaggatttgcatttttccctttattgcctcatttcttgtgacgccttgttggggagggaaatctgtttattttttcctacaaataaaaagctaagattctatatcgcaaaa

SEQ ID NO: 246973 - DNA, 1536 bp, Homo Sapiens
caccatcagaagagggcctgctggcattggccggacaggccgagggatgggcggactcttcagtgtcggagaaaccactgccaaggtcttaaaggatgaaattgatgtgaagttcaaagatgtggctggctgtgaggaggccaagctagagatcatggaatttgtgaatttcttgaaaaacccaaagcagtatcaagacctaggagcaaaaatcccaaagggtgccattctcactggtcctccaggcactgggaagacgctgctagctaaggccacagccggagaagccaatgtccccttcatcaccgttagtggatctgagtttttggagatgttcgttggtgtgggccctgctagagtccgagacttatttgcccttgctcggaagaatgccccttgcatcctcttcatcgatgaaatcgatgcggtgggaaggaagagaggaagaggcaactttggagggcagagtgagcaggagaacacactcaaccagctgctggtggagatggatggttttaatacaacaacaaatgtcgtcattttggccggcaccaatcgaccagatatcctggaccccgcgctacttaggccggggcgtttcgacaggcagatctttattggaccaccagacataaaaggaagagcttctattttcaaagttcatctccgaccgctaaaactggacagtaccctggagaaggatacattggcaagaaaactggcatctttaactccagggttttcaggtgctgatgttgcctaatgtctgtaatgaagctgcgttgattgctgcaaggcatctgtcagattccataaatcagaaacactttgaacaggcaattgagcgagtgattggtggcttagagaagaaaacgcaggttctgcagcctgaggagaagaagactgtggcataccacgaagcaggccatgcggttgccggctggtatctggagcacgcagacccgcttttaaaggtgaagcagggtagctgcactaggcagccagtgcatgggtgagcagatgctcgctgcagtcactcaagaagcaagctacactcctgcaaaggagaaagaaacaaggctttagccaaaacttctggtaacttctggtaaccatagttgcacaaaccgtcccatagataaatataaaatttggacagaaaattatttaaagggaccacagagtgtccaaaagcaggcgagagctggagagtttgctcctataaagcagcagctgcagtgggtttgaactgggagcctgtggctttcttgccaaagggtttttcataatctccacactacagtggtatgagacatagtctttattatcctgaggtggtagaggagatagtccaggacttaacgaatactggaaatttaacaggaaaatcccagaagcaagaaaactaccaagtggtgaggccgaatctgagcaggaactgcccaaatctcaggccgacaactaaactacacatgcacagtggcaatcccagagaacctggcaaaagggtaagcagagaccaacgagaaatctacc

SEQ ID NO: 246974 - DNA, 1346 bp, Homo Sapiens
  misc_feature (265)..(273): n is a, c, g, or t
  misc_feature (442)..(450): n is a, c, g, or t
ttggcgacgttatgtttgggtaatgtggggatgaactgcatgaggctctgattaaggatgtggggaagtgggctgcggtcactgtcggccttgcaaggccacctggaggcctgtctgttagccagtagtggaggagcaaggcttcaggaagggccagccacatgccatcttccctgcgatcaggcaaaaaagtggaattaaaaagtcaaacctttatatgcatgtgttatgtccattttgcaggatgaactgagtttaaaagaannnnnnnnnctcttcaagttgctttgtcttttccatcctcatcacaagcccttgtttgagtgtcttatccctgagcaatctttcgatggatggagatgatcattaggtacttttgtttcaacctttattcctgtaaatatttctgtgaaaactaggagaacagagatgagatttgacnnnnnnnnnttgaattaaaaataacacagtctttttaaaactaacataggaaagcctttcctattatttctcttcttagcttctccattgtctaaatcaggaaaacaggaaaacacagctttctagcagctgcaaaatggtttaatgccccctacatatttccatcaccttgaacaatagctttagcttgggaatctgagatatgatcccagaaaacatctgtctctacttcggctgcaaaacccatggtttaaatctatatggtttgtgcattttctcaactaaaaatagagatgataatccgaattctccatatattcactaatcaaagacactattttcatactagattcctgagacaaatactcactgaagggcttgtttaaaaataaattgtgttttggtctgttcttgtagataatgcccttctattttaggtagaagctctggaatccctttattgtgctgttgctcttatctgcaaggtggcaagcagttcttttcagcagattttgcccactattcctctgagctgaagttctttgcatagatttggcttaagcttgaattagatccctgcaaaggcttgctctgtgatgtcagatgtaattgtaaatgtcagtaatcacttcatgaacgctaaatgggaatgtaagtatttttaaaatgtgtgtatttccaatttgtttgactaattctggaatttccagatttctatgccggatttaccctcaacccgggcctgtttccccaaacttgaagagggaaagctccgaaaatcgggcttcccctcggggtcctaccaaaatgggccttggggggtcaccctttgggaaggtgcagctttgttgtcccttgagccttctgttatgtgcctatcctaataaactcttaaacacaaaaaa

SEQ ID NO: 246975 - DNA, 1540 bp, Homo Sapiens
ttggctttgaactctcatcacaactttgcaattcctaaactccaggacaaattgaaggacataatagctacatgtatatattgacataagtgattctgacgtgtttccttaacaatatgccatagcattctcccattagcttagtcatttattctgttttggtggggtgtggcatgacttggtcatcttattaaatacaacttctttcctaatacggccgctttctcttactgatagtaggatatttctgctttagttattgtcaccttaaatatattttcaatgttgaaatcctcacagcatgtttgatgaaatctagttttcaaattttcttaggtatatttctgtcacgttggcatgataacaaatgcaataacccaaaagaccccaaaagctagtgtaatcccttttgcaatccaagcatgaggattcatcttcatgttgacagtgcgtgaatgttcggtaggctttgtcaagcttgcatacaataaattatatatgtcccttttcttttagggtctcctgttaaagatggtcttctgaaggctaactgcggaatgaaagtttctattccaactaaagccttagaattgatggacatgcaaactttcaaagcagagcctcccgagaagccatctgccttcgagcctgccattgaaatgcaaaagtctgttccaaataaagccttggaattgaagaatgaacaaacattgagagcagatgagatactcccatcagaatccaaacaaaaggactatgaagaaagttcttgggattctgagagtctctgtgagactgtttcacagaaggatgtgtgtttacccaaggctgcgcatcaaaaagaaatagataaaataaatggaaaattagaagggtctcctgttaaagatggtcttctgaaggctaactgcggaatgaaagtttctattccaactaaagccttagaattgatggacatgcaaactttcaaagcagagcctcccgagaagccatctgccttcgagcctgccattgaaatgcaaaagtctgttccaaataaagccttggaatttgaagaatgaacaaacattgagagcagatgagatactcccatcaggaatccaaacaaaaggactatgaagaaagttcttgggattctgagagtctcctgataatgatggttttctgaaggctccctgcagaatgaaagtttctattccaactaaagccttagaattgatggacatgcaaactttcaaagcagagcctcccgagaagccatctgccttcgagcctgccattgaaatgcaaaagtctgttccaaataaagccttggaattgaagaatgaacaaacattgagagcagatcagatgttcccttcagaatcaaaacaaaagaagttgaagaaattcttgggattctgagagtctccgtgagactgtttcacagaagatgtgtgtgtacccaaggctacacatcaaaaagaaatggataaaataagtggaaaattagaagattcactagcctatcaaaatcttggatacagttcattcttgtgaa

SEQ ID NO: 246976 - DNA, 472 bp, Homo Sapiens
  misc_feature (24)..(24): n is a, c, g, or t
  misc_feature (123)..(123): n is a, c, g, or t
atctcagtgcaactttcccaaaangaacttttcatgtcatgcaatttagggacttaatctcaaatccccaggctcctcttgaactctgggcaagctttaatcaggttgggcagcctctgctanaacgtggaatgggatggctctcttccctcagccacgccgcttttgaggacagaggtgggggagtgggaagtgggaagtcacccagagaacaggagagggatttgagggcgcgaccccagcgctctccacggaccagccagagggactggagccaggtgtgcatgggttcaaggccctggccctgcccagcctctgtcttgggagctcagccccagggttcggtcgtcagcagtttcccaagaacaagatgtgatggcatctgctgctgaaaccctgatgaggaccaggccccctgcaccgctgtcagcctgaggaattaaagctttggtgctgggaagagcattattca

SEQ ID NO: 246977 - DNA, 820 bp, Homo Sapiens
  misc_feature (484)..(547): n is a, c, g, or t
gatgctagggaacagaaaaggttggtttgccaacaaacacaatctaccctccagaaaacgccatcgtgacctttttattgtcgaaattaaaaaataaaagatacttaaatacaacggtgaacatatagggcaaaacagaatcataaaatttaatgttgagttaagcagtgagctgaatgtctaggtctccaaattggctttgaacccaaaaccacttaaaaacaagtatgttcacagttaacggcaattggcttataggtgagagaatggtcgaagttgttccagttgaacttccagggaaattctctcctcaagaacatcctgaaaaagatgcaaaggccaagttatgtttcaaagtatataaaaatgaagaaatatctaacaacagctctgcttcaagaaaacaatttaaatttgtcaagacaactaagggagagcttattcatattttaaaagtatacttcactttagaaatgtagtttcnnnnnnnnnnnnnnnnnnnnnnnnnnnnnnnnnnnnnnnnnnnnnnnnnnnnnnnnnnnnnnnnattaactttcaaaaaaattaaaaactgacccaaaagttgaactgttattctcggctgagaacagtattttcagacatgaaatagacattaatcaggtaaaatattacacatatacaagtacaggagaagagaaacttgagcaagagttaaaagactcatcttctagagtaaggcatcaataaacaggccaggtttcaatttctatcgcctatactttatttgggtaaatggtttggctaaggttgtctggtagtaaggtggagtgggtttgcc

SEQ ID NO: 246978 - DNA, 1932 bp, Homo Sapiens
ttgggagagcaccaagaaggtggtggtcaacgggcgggtgctggagctgttccgggccgcgcagctgccgaacgacgtggtcctacagatcatggagctttgtggtgcaacaagacttggttattttggaagaagtcagttctacattgctttgaaacttgtagctgttgcccagtctggtttccctttaagagtggaaagtataaatacagtaaaggaccttcctctgccaagatttgttgcttcaaagaatgaacaggaatctcgccatgcagcctcatattcttcagattctgaaaatcaagggtcgtattctggtgtaattcccccaccacctggcagggggcaagtgaaaaagggatccgtaagccatgatacggttcagcctcgtacatctgcagatgcacaggaacctgcatccccagtagtttcaccacagcaatccccaccaacttctccacacacatggaggaagcacagccgtcatcccagcggtgggaatagtgagaggcctctcgcgggacctgggccattttggtctccctttggtgaagcacaatcaggttcttctgctggtgatgcagtgtggtcagggcattccccacctccacctcaagaaaactgggtcagttttgcagatactccaccaaccagtactcttttaaccatgcatcctgcttctgtccaggaccagacaacagtacgaactgtagcatcagctacaactgccattgaaattcgtaggcaatccagtagttatgatgatccctgggaaaataacagatgaacaaagacagtattatgtaaatcagtttaaaaccattcagcctgatctaaacggatttattccagggatctgcagctaaagagttttttacaaaatcaaaacttcctattcttgaactttctcatatttggggaactctcaggattttgataaaggtgggtgcattgacactggatgagttttgtgctgcttttcatctggtggttgctaggaagaatggctatgatttaccagaaaaacttcctgaaagcttaatgcccaaactgattgatttggaagattcagcagatgttggggatcagccaggtgaggtaggttattcaggctctcctgctgaagctcctccaagcaagtcaccatcgatgccatcactaaaccagacatggcctgagctgaatcagagcagtgaggatactgctattgttcatccagttcccattcgtatgactccaagcaaaatccacatgcaggaaatggaacttaaaagaactggcagcgatcatacaaatcccactagcccattacttgtgaaaccatctgaccttttagaagaaaataagataaattcatcggtgaaattcgcttctggtaatactgtagcagatggttacagtagttcagactcttttacttctgacccagaacagatcgggagcaatgtaactcgtcaaaggtctcattcaggaacgtcgcctgataacactgcaccaccacctccccctccaaggccacagccctctcattctagatcatcatctttagatatgaatcggacctttacagtcaccacaggacaacaacaggctggagttgttgcccatcctcctgcagtgcctccaagaccacagccctcacaggctcctggtcctgctgtgcatcgcccagtggatgccgatggcctcataactcacactagtacctcacctcagcagataccagagcaaccaaattttgcagatttcagtcagtttgaagtatttgctgcatcaaatgtaaacgacgaacaagatgatgaagccgagaaacatccagaagtcctgccggctgaaaaagcttctgatcctgcaagttctcttcgagttgccaaaacagatagtaaaactgaagaaaagacagctgctagtgctcctgccaatgtgagcaaa

SEQ ID NO: 246979 - DNA, 255 bp, Homo Sapiens
atttttagaaaaacagagcaaagtttattgaaatttcaagctacatttggaaaatcaaaatccaaatcctggaaccatacatcaggataaggtgtcaaaaagtggaaagtgttcactctcacaaaacccgctacagacaagctttctgggcacacctcccaggctccattggatcaaagccatccccttgttcatccctcatccacagtaggacaccatccttctgttcacttgaaagttttccacaataattac

SEQ ID NO: 246980 - DNA, 389 bp, Homo Sapiens
gagtcagaacacccttaagaagaaggtttagcagatctcccatccgtcgtaaaagatccaggtcttctgaacgaggcagatcacccaaacgtctgacagatttggataaggctcaattacttgaaatagccaaagctaatgcagctgccatgtgtgctaaggctggtgtccctttaccaccaaacctaaagcctgcacctccacctactatagaagagaaagttgctaaaaagtcaggaggagctactatagaagaactaactgagttttagaagccaaactgactgaggagtgggacggttcgtttgaatggaggaggtgttgagtgagcaacacgcagaagctcgcctacagtttcgtttccattcacgtcgcgttcattagtcgcc

SEQ ID NO: 246981 - DNA, 664 bp, Homo Sapiens
  misc_feature (132)..(132): n is a, c, g, or t
  misc_feature (555)..(563): n is a, c, g, or t
ccgcctcttttgtttgtttctcatttatggttttttccttgtttcacaacccaagaatatactgtttattaaaacacaagcaagggaaacaaaaggcttcaaaatcctttccatgtaacatagctttagtcnaaaaaaaacaaatacatgaatgcaggaatgtgtacaggtagaaaaagtacgcactcaccacagcgaagcgcagcattaattgaagtgagaagtaaagaaacgctttgtagccgctcggatttccttaggggacggcaagtcaatgcttatcagcggtcctcagaagagacaattttgattaatatcagacccatctgactcagtctattaaagcctgaaggaaggatactcttcagatatagaagatatgcctttgattaatcattctaccctattgccattccaagcattaccaactatgtagcacctctagaaagagagagccttcgaattctaggaagacacacttactaaatccccaggtgctcatgaccgcttctcagctcgccccgctgagaagaacccaagttgtgagcggggatnnnnnnnnntggtcaccactggagaagcaaaacctagttacataatttacttcatggtctgcagttaggcggacgcgtgggtccgaacgcgtgggtcgacccacgcgtcc

SEQ ID NO: 246982 - DNA, 1062 bp, Homo Sapiens
  misc_feature (958)..(958): n is a, c, g, or t
  misc_feature (970)..(970): n is a, c, g, or t
  misc_feature (982)..(982): n is a, c, g, or t
  misc_feature (1000)..(1000): n is a, c, g, or t
  misc_feature (1015)..(1015): n is a, c, g, or t
  misc_feature (1033)..(1033): n is a, c, g, or t
ttggctaaagtcagtgcagtcgtttctcacataaaaatattctatactgatataatgcttttggcttgtctctcttcactcctctgttaatattagagtagtacattcaggtttgtacttgtttgggatcagtaatgggatcagtaaccaggattgtaaggggacttgtgaaatatgagcactaggaaaggggtgttaagcaggcatcacgagaagattaggttagatcttctttaacatttattgcaaaacttggtgattacctgagataattttctgtcctgaggatcctgtgatagctagctaccgtgtagtctgtgttttagaatgaatgttgtcattctgatgacacaagtattttacgtttatgtacaaaggagtccaatgccatcattcagctggtcagccttaacattcataaaggatctgtttgatactcaatccataccgggaaaggctaacaaatacttttaaaaatgttattaagcaaaaatgctggtgtaagatcaacaattctttcaaaattgacacccaactaaatacagttagggagcaaattctttttgagattagggccaatatttagtattaaatgacttcagttattgttgacattgtacttttacctttgtatgtggtcagcaaacaagttccacaagtttagagagaatcaagaatatatgctgcattctctaaataatgtaaaatagctaaattcatgctatcttccacccaaagatgtgaagttttgagcaatttttaaatcccactgggatttaaatatgtgactattgcttgtgcatatctaataatttctagtctctttatttaaaatcaagtagcctcttcctcattggcatcattgtttgtttcaagcagtactgtcctcctatgtttttggatagtctcacctcacccttaacagcaagcagtacgtctgtcaccaccaccagctccnatgaaagcagtncttcatgttagnttcatccagcagcagggngtgagacagggggtnataacccggcagttgganggtaaccttgcctggaccttccttttcat

SEQ ID NO: 246983 - DNA, 758 bp, Homo Sapiens
  misc_feature (695)..(695): n is a, c, g, or t
  misc_feature (728)..(728): n is a, c, g, or t
aattcggaacgaggggcaagcacctatatagtatcacggggacagttgaggcaactcgtagatggagatttgggaaaagacgatgtggcctcctacctttccagtttctgttggcagcccttcacgtagcctcctgcctcgcctctacacctactaccctgtcggcccttttgccatgctgtcctcgtataactcggattctctcctcaggtgtaggtgcagggagtcagggaacccttagactcccctgtgtgcaagagcccaggtgttggtgtgtccctttaatgctactgtgctctctggtgtttctgattttcctgcctttattctgtcttctcttgtcctatctcattccagcccacatcttctcctttcctgattacttttgttgtcctgcctcttcaggtaatggtcacagatttggctgtaggcacgttaccagccctgtggcttcttgactcttggttccctgttaactctgtttctgagaaatgtgggtatggaggtggggtgggaaagctcacttccatgaaggatgtctccatgctaggagctgcctgcaccctgggcagaggtggccagtcacgtgaaggtggggcagggctttaggcatggccacacatgtccccaggggcagattcaaggggccttttcagaaccatgttcccccagccaggtgagggaccatttttcantggggacccagggccaaaaccatgttggggttncacaaagccaggggattgccaattgggaac

SEQ ID NO: 246984 - DNA, 1386 bp, Homo Sapiens
ttggcaagctgccttttagactgaatagcttttcttgttagccctactttaacatttcttttgaagtggttgtctgcttgaagagggaaacacgtcatgaaactgtaatgcatgaacagaactcaggagttgtctggccagcttagtgatgaggaaactgaacttgccccaagtcacatggctgctgccactggtgacatgccaacttaccagatccgagctcctactgctgctttgccacagggagtggtgatggctgcatcgcccggaagtttgcacagtccccagcagctggcagaagaagcaacacgcaaacgagagctgaggctaatgaaaaacagggaagctgcccgggagtgtcgcaggaagaagaaagaatatgtcaaatgtcttgaaaatcgtgtggctgtgcttgaaaaccaaaacaagactctcattgaggaactcaaggccctcaaagatctttattgccataaagtagagtaactgtctttgacttggaccttgtttactctaatcaaggcaggagatgcagcagtcctacttattgccatgtggacttgtgggaaggacacgtgtgacccttaagaatccagtttggattagtgtttgaaattgaattgggaatgttgttccaggatgtggaatgcagccgtgatcacacttaccgagcttactttgatctgtttgtcaatagcatgcaaaaaatgctttgtttgccctttgcttctgctttttttcagggaagctgccaaagaatgtcgacgtcgaaagaaagaatatgtaaaatgtctggagagccgagttgcagtgctggaagtccagaacaagaagcttatagaggaacttgaaaccttgaaagacatttgttctcccaaaacagattactagaaatatttaactatgaactgaaggcagcatgtatagttgcttttgaaggaatacaatatatagctggcaagaatggtggcttcttttctttgtatcattcatcttcttctttaatcacttaacattcctaaaatgcttcactgtacgtagttaagtcgtagctataacttcaaattttttaaaagagacaaacgtaaaaaatgtgtgtattcttaaaatgcaatattgtaaggctgttccaatgccacatacttgcagctcccattctatgtgtcatcaatagtgtcctatgcaataaaattatttgcaggtctttaaatcattttaggaaaggatgatcaaaaataatgcatccagcagtacaataaaagtaaaccacaaaaaaatacctcaggaaagaatagaaagaaagtctatctaatgacatgcctatatgagaagaatagcctagatatgaatatatggcatttgcagatttttatattagtgcttgtt

SEQ ID NO: 246985 - DNA, 394 bp, Homo Sapiens
acataaaagcaaactttgtacaaaaaagttggcttctcaacatcccactaaagcctccacttggccttcgtgtgtctgagtctcttcactgagaggatgtgcatccaggggagtcagttcaacgtcgaggtcggcagaagtgacaagctttccctgcctggctttgagaacctcacagcaggatataacaaatttctcaggcccaattttggtggagaacccgtacagatagcgctgactctggacattgcaagtatctctagcatttcagagagtaacatggactacacagccaccatatacctccgacagcgctggatggaccaacggctggtgtttgaatgtttttttagcttcactctggatgcccgcctcgtggagttcctccgggtgc

SEQ ID NO: 246986 - DNA, 968 bp, Homo Sapiens
cttcaccatggtggccctggtcacggtctgctgtccacttgtcgccttcctcttctgcatcctctggtccctgctcttccacttcaaggagacaacggccacacactgtggggtgcccaattacctgccctcggtgagctcagccatcggcggggaggtgccccagcgctacttgtggcgtttctgcatcggcctgcactcggcgcctcgcttcttggtggccttcgcctactggaaccactacctcagctgcacctccccgtgttcctgctatcgcccgctctgccgcctcaacttcggcctcaatgtcgtggagaacctcgcgttgctagtgctcacttatgtctcctcctccgaggacttcaccatccacgaaaatgctttcattgtgttcattgcctcatccctcgggcacatgctcctcacctgcattctctggcggttgaccaagaagcacacagatcgcaagtcctacagctggaaacagcggctcttcatcatcaacttcatctccttcttctcggcgctggctgtctactttcggcacaacatgtattgtgaggctggagtgtacaccatctttgccatcctggagtacactgttgtcttaaccaacatggcgttccacatgacggcctggtgggacttcgggaacaaaggagctgctcataacctctcagcctgaggaaaagcgattctgaacccttcagtcctgcttgggaggacgcagcccactgcccagaaaccaagaaacacgataccattctggccttccccaccccacatcctctctgtggccttactgaagatgggggaagggtaagaaggaagggtgtaggccaaggctcaccccagtgctgctggcttctcctctccacccctcatatgggcgtggggtcctcaaacatcacctttacctgagaggccccaagaagctgagctggcagagagctccaccatttggtgct

SEQ ID NO: 246987 - DNA, 1048 bp, Homo Sapiens
ttgggcagttaatgctgaagcttcattaaggaggaattctcccagtccttggctacatcagcccacccctgtgacctcagcagatggtattggattacttagtcacattcctgtcagaccttccagtgcagagcctcatcggcctcttaaaattacagcccattccagtccaccattgacaaaaactttagtagatcatcataaggaagaattagaaagaaaagcttttatggaaccattacggtctgttgcatccacatcagccaaaaatgacctggatctaaataggtcacagactggaaaagattgtcacttacataggcattttgtggatccagtattaaatcagttacagaggccaccccaggagactggagagaggttaaacaaatacaaagaggaacaccgtcgaattcttcaagaaagtattgatgttgctccctttacaactaaaatcaagggacttgagggtgagagagagaattattccagagtggcatcatcatcttccagtcctaaaagccatatcatcaaacaagatatggatgtagaacgctcagtatcagatctttataaaatgaagcactcagtgcctcagagtttaccccaaagtaactatttcactacattgtctaatagtgtggtcaatgaaccaccaagatcatacccatccaaagaagtttcaaatatttacggtgataaacagagtaatgcccttgcagcggcagcagctaatcctcaaactctgacttcatttataacatctctttcaaagcctccacctttgattaaacaccaaccagaaagtgaagtaggcaagataccagaacatcttccacatcagattgcatctcactcagtaacaaccttcagaaatgattgtaggagtcctacccatttgacagtttcttctacaaatacactccgcagtatgcctgcattacatagagcaccagtatttcacccaccaatccatcacagcctggaaagaaaggaaggcagctatagtagtctttcccctccaactttaactacggtgatgccagta

SEQ ID NO: 246988 - DNA, 899 bp, Homo Sapiens
ctcttcgatccttaatcaagttctttccatccatttgccatcggatatcatacaacttgtcatcatcatcctgctgagttttggcctatttagacagtctggtgaaatcaaggcctgaagatcagcggtcatcttttcttgagtcccttctgcaaccagagtctttaaggtggatggctgctttggcagtgtcccttgatgctccaccaagcaccagcacaatggatgatgaaggttatcccaggcctcattcacacttgctttcctggggttacagtcagctgatccttcatctaattaaacttcctgcagattttataaccaaagagaaaatgacagacatctgcaggtcttgtggtttctggcctggatatctaattctctgttggagctggagagaagaagagaggccttcaccaatattgtgtatctgaatgatatgagcctgatggaaggggacaatggttggatcccagagaccgtggaggaatggaagcttctccttcatctcatacagagcaagagcacgaggccagccccccaggagtcactaaatgggagcctcagtgatgggccttcccccatcaatgtggagaatgtggcacttctgttagctaaggccatgggcccagatcgggcttggtcactgctacaggaatgtggtctggcccttgagttgtcagagaagtttaccagaacctgcgatatcctgaggattgctgagaaaaggcagagggccttgatacaaagcatgcttgaaaaaatgcgatcggtttctctggtcccagcaggcctagtgggagaagattcagcaggatgtcatgacattttgagaaaaactaaatcatgctcctgaaccttctgaacgcatttgtattggtggtgctggttgtacaata

SEQ ID NO: 246989 - DNA, 505 bp, Homo Sapiens
  misc_feature (467)..(467): n is a, c, g, or t
gaaaactcctgggaaaaaagtagaaacaggtcagatagaaaatggacatcgttaccaagcaaacctagagatcactggccccaaggtggcatctcctgggccacaagggctactagactggaagaccaggaaagtgccatagacataatgtaactggatttcagcaaggcatttaacagagcctcttatgatatccttgtgaaccagatggagagatgtgggcttgaagccttcccattgcctacaggataaaattcaaacttcctagtgtggtgtacaagaccctttacagcccgcctctgtgtacccttcaacaccattctctgaaccaaccatgctcatgtttttaccttcagtgcctttgcacatgctattccctctgcctgggaatgccctgtgccccctctgccctctgccgtgctaaaaatatcacttcatccttaaacttcaaaatcaagtgccatctntttccttgttaactttcagggcagaattagttactctt

SEQ ID NO: 246990 - DNA, 997 bp, Homo Sapiens
ttggtgataacctgtggatttccagcaaactccttagccatgatcttccacactatgtggcattgtgctttggagaagtgcgtatcagaacggacctacagaaagtttctgacctgtctgccccattctcccagagcgctggggtggatcaaaaggaactgtccttcagcccatccttattgaagatcttctgccaactattctccattcatgtagatgctataaacatcatggttctcaaggtggatacctctgagtccttatggcatattcagatcagtagaagcagatttcttttggatagtgatgggaaaaggctaatctgtgaggtgagcttatgtaagatcaacagcaaagttctaaagagtggtcagctggaggacacctgcctagtggagctttcactggccctggacctgtgtctaaaggtgggcattagcagtcggcatctcactgctatcactgtggatgtgtggacactccatgctgaactgcatgagggcctcttccagagccaactgctgtgccagggcccaagcctagcatctaagcctgttccctgttcagaggtgacagaaaacttagttgagccaactctgcctggcctattccttctccagcagctgccagaccaggtcaaggttaagatggagaacacaagcgtggtattgtccatgaatagtcaaaagaggcacctgacttggactctgaagctgctgcagttcctgtaccaccgtgatgaggatcagctgccccttcgaagcttcacagcaaactctgatatggcacagatgagcactgaactgctgctggaagatgggttgttgttgtcccagagtcgccaacgcattgtctgcctcaactccctcaaggctagtgtgcaggtgaccaccattgacctctcagcctccctagttctgaacacttgcatcattcactaccggcacacccgcatccagtctctggtgagcatcctgcgtaccacggtgctataacg

SEQ ID NO: 246991 - DNA, 928 bp, Homo Sapiens
ggcctgggtggcgaattcggcacgaggcagcatccccttgggccaggcagacccctcgctggccccttacattattgacctccccagctggacccagttccgccaggacaccggcaccatgcgagctgtgcggagacacctgttcccccagcactcagcccctggccgaggtgtcgtctgggagtggctgagcgacgatggctcctggactgcctatgaagccagcgtctgtgactatctggagcagcaggtggccaggggcaaccagctcgtggacttggcccccctggggtacaactacactgtcaactacaccacccacacgcagaccaacaagacttccagcttttgccgcagcgtgcggcgccaagcagggccgccttacccggtgaccaccatcatcgctccgccgggccacacaggcgtcgcctgctcttgccaccagtgcctcagtggcagcagaactggccccgtgtcaggccgctaccgccactccatgaccaacctccctgcataccccgtcccccagcaccccccacacaggaccgcttctgtgtttgggacccaccaggcctttgcaccgtacaacaaaccctcactctccggggcccggtctgcgcccaggctgaacaccaccaacgcctggggcgcagctccctccttccctggggagccagcccctctaccgctccagcctctcccacctgggaccgcagcacctgccccccggatcctccacctccggtgcagtccgtgccttccctccccagcgggtccctcaaggcagcccaagggagtgttccctggccactgttgcccatgcaggatggccaaaagccccaggcagaagtccagcaaggcggcctctcgcaaaaagccgacccccccaaagcccaggagcccaggaggccagaaggcaggggtcatt

SEQ ID NO: 246992 - DNA, 392 bp, Homo Sapiens
  misc_feature (24)..(24): n is a, c, g, or t
  misc_feature (29)..(29): n is a, c, g, or t
  misc_feature (35)..(35): n is a, c, g, or t
  misc_feature (56)..(56): n is a, c, g, or t
aaaatgcccgggcccaattgtccnaaagntggctnaaggccgtggtgggcggtggngagtgcaggacgcgctctctcggggcctcatttctctcctccatttctcatcaggtctggcaaaccacggacagacccaggcacatgggaccaagccggaacctcctgctcaacgggaagtcctaccccaccaaagtgcgcctgatccgggggggctccctgcccccagtcaagcggcggcggatgaactggatcgacgccccggatgacgtgttctacatggccacagaggagaccaggaagatccgcaagctgctctcatcctcggaaaccaagcgtgctgcccgccggccctacaagcccattcgccctgcgccaggccaatggtcctgcggt

SEQ ID NO: 246993 - DNA, 602 bp, Homo Sapiens
  misc_feature (58)..(58): n is a, c, g, or t
  misc_feature (60)..(60): n is a, c, g, or t
  misc_feature (96)..(108): n is a, c, g, or t
  misc_feature (221)..(221): n is a, c, g, or t
gcacggcgcggctgcccgaagcctcccagagcccgctggtgctgaagcaggcggtacnangccgctggaagcgtgcttcggtatcttgagacccannnnnnnnnnnnnaagcctgacccggtgaaaagcttgtccagcttgctcagcagcctgacgcccgccaaggtggcctcggtcatcaacaacggctcccccaccatcctgggcaagcgcagttgcgnagcagcacaacggggtggacggcaacatgaagaagcgcctcttgatgcccagtaggggtctggcaaaccacggacagaccaggcacatgggaccaagccggaacctcctgctcaacgggaagtcctaccccaccaaagtgcgcctgatccgggggggctccctgcccccagtcaagcggcggcggatgaactggatcgacgccccggatgacgtgttctacatggccacagaggagaccaggaagatccgcaagctgctctcatcctcggaaaccaagcgtgctgcccgccggccctacaagcccatcgccctgcgccagagccaggccctgccgccgcggccaccgccacctgcgcccgtcaacgacgagcccatcgtca

SEQ ID NO: 246994 - DNA, 1408 bp, Homo Sapiens
  misc_feature (1096)..(1096): n is a, c, g, or t
  misc_feature (1228)..(1228): n is a, c, g, or t
  misc_feature (1233)..(1233): n is a, c, g, or t
  misc_feature (1344)..(1344): n is a, c, g, or t
  misc_feature (1364)..(1364): n is a, c, g, or t
gtggcgaattccgcacgaggctcctggcctgctgggagaactggaggcagaagaagaaaccctgctggtggccattgaccgagcctgcccagaaagcggtcaccctcgagtcctggctgattcttttcctggcagttccccttatgagggttacaactatggctcctttgagaatgtttctggatctaccgatggtctggttgacagcgctggcactggggacctctcttacggttaccagggccgctcctttgaacctgtaggtactcggccccgagtggactccatgagctctgtggaggaggatgactacgacacattgaccgacatcgattccgacaagaatgtcattcgcaccaagcaatacctctatgtggctgacctggcacggaaggacaagcgtgttctgcggaaaaagtaccagatctacttctggaacattgccaccattgctgtcttctatgcccttcctgtggtgcagctggtgatcacctaccagacggtggtgaatgtcacagggaatcaggacatctgctactacaacttcctctgcgcccacccactgggcaatctcagcgccttcaacaacatcctcagcaacctggggtacatcctgctggggctgcttttcctgctcatcatcctgcaacgggagatcaaccacaaccgggccctgctgcgccatgacctctgtgcccctggaatgtgggatccccaaacactttgggcttttctacgccatgggcacagccctgatgatgggggggctgctcagtgcttgctatcatgtgtgccccaactataccaatttccaggtttgacacatcgttcatgtacattgatcgccgggactctgcatgctgaaagctctaccagaagcggcacccgggacatccacgcccagcgcctacagtgcctacgcctgcctggccattgtcatcttcttctctgtgctgggcgtggtctttggcaaagggaacccggcgttctggatcgtcttctccatcattcacattatcgccaccctggttcctcagcacggcagcttttattacaatgggccggtggaaacctggactcggggatcttccgccgncatcctccacgtgctctacacaagactgcatccggcagtgcagcgggccgctctacgtggaccgcatggtgctgctggtcatgggcaacgtcatcaactggtcgctggctgcctatgggcttatcatgcgcnccaanaatttcgcttcctacttgttggccattggatcctgcaacctgctccctttacttcgccttctacatcatcatgaagctccggagtggggagaggatcaagctcatcccccngctctgcatcgtttgggccnccgtggtctggggcatcgcgctgctggaaatgctgacggggggc

SEQ ID NO: 246995 - DNA, 274 bp, Homo Sapiens
gctatattgccaaatccaaaggatactttttggttctcctcttcttgacttctcggtgatatcaaccaactgactgcttcatgagcgagactcttccagctgtctctgacgcatgctgctctactgctgcttcttagcctgcctattatgcaatgttttctattcagcctctcactgttgtttttttgcgagaccttgaccctggccgtcttctcactctgtgttctctgactggactctgccttccccatctgcagcacgacatatacctagg

SEQ ID NO: 246996 - DNA, 429 bp, Homo Sapiens
  misc_feature (284)..(310): n is a, c, g, or t
  misc_feature (350)..(350): n is a, c, g, or t
  misc_feature (375)..(375): n is a, c, g, or t
  misc_feature (397)..(397): n is a, c, g, or t
acgtcggcttcgtgatcaagaaggggaagattgtctctctggtcaaagggagttctgcggcctgcaacgggctcctcaccaaccactacgtgtgtgaggtggacgggcagaatgttatcgggctgaaggacaaaaagatcatggagattctggccacggctgggaacgttgtcaccctgaccatcatccccagtgtgatctacgagcacatggtcaaaaagttgcctccagtcctgctccaccacaccatgggaccactccatcccagatgcctgaagccactnnnnnnnnnnnnnnnnnnnnnnnnnnntttcccgcccttccttgcaggcaaaggggcaaccaccttnggattgatggggtttgcagccggcntgtttgttttaaggttgggggntgccttgagggggggctttttccaggggggtt

SEQ ID NO: 246997 - DNA, 179 bp, Homo Sapiens
caggatcaccacagctgcccaatcatccagaaagaggtgtggagagggaaacaatcatgacgcggaccgccactaggtttctccctgatggacggggaagtcttcatttgtggaagacaccgagccacactaagaagccgccaggcttctcagaggcggggcagacacagcaagagtgt

SEQ ID NO: 246998 - DNA, 371 bp, Homo Sapiens
  misc_feature (355)..(355): n is a, c, g, or t
ttggcagctccacattgaacggaagcgcctggaagaagcccccttggtgaccaaggccttcagggaggcgcagataaaggagaagctggagcgctacccaaaggtggctctgagggtcctgttccccgaccgctacgtcctacagggcttcttccgccccagcgagacagtgggggacttgcgagacttcttgaggagccacctggggaaccccgagctgtcattttacctgttcatcacccctccaaaaacagtcctgggacgaccacccgcggaccctcttttcagggcgaacctctttcccggccgctctggttgcatttggggagccgagggagccggcaggtgttttacntgggagcttgggcttg

SEQ ID NO: 246999 - DNA, 1264 bp, Homo Sapiens
  misc_feature (224)..(259): n is a, c, g, or t
  misc_feature (422)..(431): n is a, c, g, or t
  misc_feature (895)..(895): n is a, c, g, or t
  misc_feature (1182)..(1182): n is a, c, g, or t
  misc_feature (1232)..(1232): n is a, c, g, or t
aatctgtatttattatacagtcttgtttctttaagcccatactctgtctcttcccccgtcttcctctcaggtgacagtatcagtgagtgccatacagaattgtgtattcaccagcatcatgaaacagttgtggtcttttgagttgatcttggcagagtaaagggacgtgtcctggagccattcctgaatctccccttctttgtgacagctcctcccaccccccnnnnnnnnnnnnnnnnnnnnnnnnnnnnnnnnnnnnctaaggcacttcacttagagactgggagtcctgcttataatcatgcatataacctttactttgatggatctggccagaggggtgttggagcccagcccacccacataccattcaagcttcttaggggagcagaagaaaagccggaagaatttaaatgtttaannnnnnnnnnaaattgacttttctagttattaaaagttgcttgtttcagcagtgatattgtataaagaacatcttgtaagatactcctgacatcttgctttagcacatgtacagtacagtttctatgataatgtgtttgctctaacttccctggcttctccttcagcccatccactctcctctagagcagttgggttggaggctcattgaggcaagcagcaacattggagggggagcagggcagtgctgtgtctgctgcctcccatgcccgttctgacctcagccttggaactcctcaagaacctgaagattccagtggtcagtgtcggtggggggtgggaggagagagcggcagagaagctctgagagccccttcccccacaacaaatctagctctagttgttatatttaggcaaaactttgtagtcttctttcccttttatgatggattttgataaaagtacaaaacagggntttttcttttttatcacctttgaatttggaaattttgagcacccaagctcttctgtacctatttaaagtccaccaaggggactgcagctcctagaacatgagaatcaagcctcttaattttaaactgcggaatgtggcctctgcttcctccgtcctcctgcccaaggacgacgaggattgctccagggctgctgggtagtttaccgtcccttctataggcatggagttgggcactgacatcacagctttcataaccccaccaccgccagctttccccttgcctcctnacatccagtctgtttcttgtttcataggtgaggaatcctgtgtttcccantttcagtggacaacttgaattgtttggttgtt

SEQ ID NO: 247000 - DNA, 1760 bp, Homo Sapiens
  misc_feature (1168)..(1194): n is a, c, g, or t
  misc_feature (1271)..(1282): n is a, c, g, or t
  misc_feature (1343)..(1382): n is a, c, g, or t
  misc_feature (1431)..(1532): n is a, c, g, or t
ttggctcggcggccgcgctgccgcctccttagccgcggtgtccggaaccgcggccgccagcctgggctccgcgcagcccaccgatctgggcgcccacaagcggccggcatccgtgtcgagcagcgctgccgtggagcacgagcagcgtgaggcggcagccaaggagaaacaaccgccgccgcctgcgcaccggggcccggccgacagcctgtccaccgcggccggggccgccgagctgagcgcggaaggtgcgggcaagagccgcgggtctggagagcaggactgggtcaacaggcccaagaccgtgcgcgacacgctgctggcgctgcaccagcacggccactcggggcccttcgagagcaagtttaagaaggagccggccctgactgcagttgcaagaacagcaaggaaaaggaagccctctccagaaccagaaggtgaagtcgggccccctaagatcaacggagaggcccagccgtggctgtccacatccacagaggggctcaagatccccatgactcctacatcctcttttgtgtctccgccaccacccactgcctcacctcattccaaccggaccacaccgcctgaagcggcccagaatggccagtcccccatgggcagccctgatcttagtaggcagacaatgcagggggcagtcatgcttcaaaagatgccaaccaggttcactccactaccaggaggaatagcaacagtccgccctctccgtcctctatgaaccaaagaaggctgggtcccagagaggtggggggccagggagcgggcaacacaggaggactggagccagtgcaccctgccagcctccgggactcctctctgggaaccagtgccccgctgtgctgcaccctctgccacgagcggctgggggacacccattttgtgcagtgcccgtccgtcccttcgcacaagttctgcttcccttgctccagacaaagcatcaaacagcagggagctagtggagaggtctattgtcccagtggggaaaaatgccctcttgtgggctccaatgtcccctgggcctttatgcaaggggaaattgcaaccatccttgctggagatgtgaaagtgaaaaaagagagagactcgtgacttttccggtttcagaaaaacccaatgattacccttaattaaaactgcttgaacttgnnnnnnnnnnnnnnnnnnnnnnnnnnncccagaccagggaaacgcagacttcataaacacggctgtataatcccgggtccgactgcacccaccgtgttactatnnnnnnnnnnnnaacccaccccagcgacaaatagatcccaccatactgccaccccccgtcctctctctttctnnnnnnnnnnnnnnnnnnnnnnnnnnnnnnnnnnnnnnnngccaccggagacagcatttacccgcaatatatctccgaccaagcaccannnnnnnnnnnnnnnnnnnnnnnnnnnnnnnnnnnnnnnnnnnnnnnnnnnnnnnnnnnnnnnnnnnnnnnnnnnnnnnnnnnnnnnnnnnnnnnnnnnnnngcttgcgcccttttgtctgcccgccatacacggcacaccatccccttgccacctcgcccactgccaagcccaccccctcgcctcctttatactctgccaccctatcttcaccaccgtccgattatacgcacccactccagaaacgcgagcggtcccctaaaggataggatgggagtgcgataaagacccgcctattggcacttcctatatagcacgcccgttcctgtg

SEQ ID NO: 247001 - DNA, 381 bp, Homo Sapiens
  misc_feature (262)..(262): n is a, c, g, or t
ttacaaaaaggagacccctcaaattgacccaaaagctgcctgcctttccaaaatttggaaaagggtctgtggtcccggcgtgtgcctcacgtgtgtatgcacgtgtgtgtgtccattagacacggctgatgtgtgtgcaaagtatccatgcggagttgatgctttgggaattggctcatgaaggttcttctcaagggtgcgagctcatccccctctctccttccttcttattgactgggagactgtgctctcgacagaatcntcttgtgtcagaagtctagcctcaggtttctaccctcccttcacattggtggccaagggaggagcatttcatttggagtgattatgaatcttttcaagaccaaaccaagctaggacatt

SEQ ID NO: 247002 - DNA, 531 bp, Homo Sapiens
  misc_feature (11)..(11): n is a, c, g, or t
ccatagagaantaattatttgcactgaacaagcccctaagaaaaatggccatcagagacaccaggcatgtaaagacagcagatgggcattatcagcatgagttcagaagctaggaagcagatatttaagtggtaactgatttatcagactaaaggaaacaagggaagctttcaaagggggaaggtctattcctcactaccaccaccaaacaaacaaaaagttgttcaatgcagaaaaccctggaaaaacttatgagtttgagaccttagtacctgtgaaaagtagaagggcaaggtggtgtgtccagaattggtgggttcttggtctcactgacctcaagaataaaccgcggaccctcgcggtgagtgttacagttcttaaaggcggcgtgtctggagtttgttccttctgatgttcggatgtgttcggagtttcttcccttccggtgggttcgtggtctcggtggctcaggagtgaagttgcaaaccttcgcggtgagcgtcacagttcttaaagtgatgcgtctggagt

SEQ ID NO: 247003 - DNA, 784 bp, Homo Sapiens
gattcccccacaaaacccgatctctgtctctagatgaggtctcagatgcgagatcaactctaatacgaaatccatctgcaatctgggccccatttcttttcaatgcttgcgtggcagcactctcctccttaaacacaacataggcattaatatttttctgatcaggatgaattttacgtcgcaaagatctgcagcttcactcctgaagccagcgagaccacgaggccaccgggaggagcgaacaactccagaggtgctgccttaagagctgtaacactcactgcgaaggtctgcagcttcactcctgagccagcgagaccacgaacccaccagaaggaagaaactccaaacacatccgaacatcagaaggaacaaactccggacgcaccaccttaagaactgtaacactcactgcgagggtccgcggcttcattcttgaagtcagtgagaccaagaacccaccaattccggacacattctcttgatggaggagaaggctaagctgctaggggagggatagcaaaccctgtcactccagggcacagagaagacccctacagccggaggaagggaggagtccagctaccgggggagaggtgggaaacatcctctgcataatccccactaaaggtacaaggcatttggcacagcttggctgccccgggaaaaaagccctgatcaggtgcactcctgagacacggaaacactaagacaagacagcagagaccctgctgcgcccactcccaccagactaccaagccaactgacaagcaatagcactttt

SEQ ID NO: 247004 - DNA, 873 bp, Homo Sapiens
tcccaggtttcaggtgctgtaggttttccatggctgtggtggatccaggctgggattccctctaccatcacagtggtgggagtggtcaggacgacagtctggggtcctttcccaccgtggacacaaagaggctacgttcccagttcttgatccacactcgatcacctggggagagagggtgaactggggagaataagctaacagggcatttctcatttacccaggctgagattgtttgtgtaatttttcctaaggcctggtagctgtcgctgtaactcaatttcacctaactctcagggagtgcctggaagtccccgcaatataggagggggcctatgatataatatttcataaggggaatatcctgttcttttagaagtggtatatctaattttaaataataccatagggagagcctgtatccattttaatcctgtttcctgacatactttccctaaactatttttgatagtttgattcatttgctccacctttccggaactctgaggccggtaggcagcatgcagtttccatgtgatccccaatacctttgccatcttctgtaccaagtcagccacaaatgccggcccgttatctgagccgatccataaaggcagtccaaatctaggaataagatctcaaagaagcacacgagttacttcacgagctttctcagttcgtgttggataagcctccacccacccagagtaggtacacacaagaactagtaaatacttgttacctccacactttggcatctctgtgaagtccacctggatccagatcttcaaagggggcttctccataagcttgtatgccaggtggaacagctagaccttgcctcgcattatgctgtcggcaggtaacacccaa

SEQ ID NO: 247005 - DNA, 1009 bp, Homo Sapiens
ttgggtcttttcttgaaatattataaatcagaatgtctgcacagtcagtggaagaagattcaatacttatcatcccaactccagatgaagaggaaaaaattctgagagtgaagttggaggaggatcctgatggcgaagagggatcaagtatcccctggaaccatctcccagacccagagattttccgacagcgattcaggcagtttggataccaggattcacctgggccccgtgaggctgtgagccagctccgagaactttgccgtctgtggctcaggccagagacgcacacaaaagaacaaatcttggagctggtagtgctggagcagtttgttgccatcctacccaaagagctacagacttgggttcgagatcatcatccagagaatggagaggaggcagtgacagtgctggaggatttggagagtgaacttgatgaccctggacaaccggtttctctccgtcgacgaaaacgggaagtactagtagaagacatggtatctcaagaagaagctcagggattaccaagttctgagcttgatgctgtggagaaccagctcaagtgggcatcctgggagctccattccctaaggcactgtgatgatgatggtaggactgaaaatggagcactagctccaaagcaggagcttccttcagcattagaatcccatgaagttcctggcactctcagtatgggtgttcctcaaatttttaaatatggagaaacctgtttccccaagggcaggtttgaaagaaagagaaatccctctcgaaagaaacaacatatatgtgatgaatgtggaaaacacttcagtcagggctcagcccttattcttcatcaaagaattcacagtggggagaaaccttatggatgtgttgagtgtgggaaagcattcagccgaagttccattcttgtgcaacaccagagagtccacactggagaaaaccttacaaatgtcttgaatgtgggaaagcctttagccagaattcggggctattatcatcgaga

SEQ ID NO: 247006 - DNA, 536 bp, Homo Sapiens
ttggcaaagacggtctttccaaacgaggtcccatgctgaggttctgggtggacatgaactcgtggggggttcctcgacccagagcacccacattacgacgacaacaaaatctcactgaagtaacccatgctcctcgcctttctcctgcccgctagcatgcccccggagtccccaagatcctggtggggaaccgcctgcacctggcgttcaagcggcaggtgcccacggagcaggcccaggcctacgccgagcgcctgggcgtgaccttctttgaggtcagccctctgtgcaatttcaacatcacagagtcgttcacggagctggccaggatcgtgctgctgcggcatgggatggaccggctctggcggccgagcaaggtgctgagcttgcaagacctctgctgccgggcggtcgtgtcctgcacgccggtgcacctggtggacaagctcccgctccccattgccttaagaagccacctcaagtccttctcgatggccaacggcctgaatgccaggatgatgcacggcggttcctac

SEQ ID NO: 247007 - DNA, 1615 bp, Homo Sapiens
  misc_feature (368)..(394): n is a, c, g, or t
  misc_feature (1119)..(1119): n is a, c, g, or t
  misc_feature (1243)..(1243): n is a, c, g, or t
  misc_feature (1497)..(1497): n is a, c, g, or t
tgcccagtggaaggagaaacatcatagagggtggagactgccctgtttttcttttgccattggagtcccagtgtgactcaagcaggaggccacctttctctgccagaggacagaaagcttcaagtgactggcccagggtcacacagttctgccgctcagcccagcagcctgagccagcagtcaggatggggtggggacactccgtctctcttgagaccccattcagagaatggggctgacactgtaggagaaatataagcaggactcctgctggctgctcccctcctgcatgaggcatgttagagggactgggaccgccagcccccagctcccatgccgggcctcggcccattctcagctcctgtttnnnnnnnnnnnnnnnnnnnnnnnnnnncagaagttgagtctgggagctggggcagggcacaggctctagggtccagctgtcctcctctcccctcccctgctggccactcctgctgccgtctccacagctctggaatgatgaagtggacaaggccgagcaggagctccgcgtggcccagacagagtttgaccggcaagcagaagtgacccgtctcttgctggagggaatcagtagcactcacgtgaaccacctgcgctgcctccacgagttcgtcaagtctcagacaacctactacgcacagtgctaccgccacatgctggacttgcagaagcagctgggcagatttcccggcaccttcgtgggcaccacagagcccgcctccccacccctgagcagcacctcacccaccactgctgcggccactatgcctgtggtgccctctgtggccagcctggcccctccgggggaggcctcgctctgcctggaagaggtggccccccctgccagtgggacccgcaaagctcgggtgctctatgactacgaggcagccgacagcagtgagctggccctgctggctgatgagctcatcactgtctacagcctgcctggcatggaccctgactggctcattggcgagagaggcaacaagaagggcaaggtttttgtcacctacttggaactgctcagctaggcaggtgcccccatcccccccgcattctggcctaggcaggagaggatgggcgcagccctgnccacttaacttgtttgttggtgacacagttgttcagagtggggagaattcaccccattctgtccctgcccctagtcacctagctgtgagggtgcctgaggctgaatggctccacccctcccccnagccctgcttctgacctgtggctctggagcccctgcccctgcctgcatccccgagcaccccaccctccaggctccactaaggagggaggggctgtctgcagcagctgcactcagcacctaggccagggtggggccgccgcagatgggctcaggaagccccaggtgcactcagcgagagccctgcctttcagttgccaaaagctgcatcaggggaatgcggcaaggcacacagggctctggcagcccctgggganctgcgctgcccctgggaggggagagcctggccagggctggtgttgggcccggagcagcatcttccggtgctatcctcccctcccacccctcacagctcaagccaagtccagcggtcgc

SEQ ID NO: 247008 - DNA, 902 bp, Homo Sapiens
aagacagcaaaggagtcggagaaatacagggaggagcgggacgctgtgtacagcgagtacaagctcatcatgagtgagcgtgaccaggtcatctctgagctggacaagctgcagaccgaagtggagctggccgagtccaagctcaagagcagcacatctgagaagaaggcggccaatgaggagatggaggcgctgcggcagatcaaagacacggtgacaatggatgctgggagagccaacaaggaggttgaaatccttcgaaagcagtgcaaggctctgtgccaggagctgaaggaagccctccaggaggcggatgtggccaagtgccggcgggactgggccttccaggagcgagacaagattgtagcagagcgtgacagcatccggacactgtgtgacaacctgaggcgggagcgggaccgtgcggtgagcgagctggctgaggccctgcgcagcctggatgacacccgcaagcagaagaatgatgtcagccgcgagctgaaggagctcaaggaacagatggaatcccagttggaaaaggaggcccggttccgacagctgatggcccacagctcccacgactcggccattgacacggattccatggagtgggaaacggaagttgtagagttcgagagggagacggaggatattgacttgaaggcactggggtttgatatggcagaaggtgtgaatgagccttgtttcccgggggactgtggcatatttgtcactaaagtggacaaaggaagcattgctgatggccgcttaagggtcaatgactggctgctgagaatcaacgatgtggacctcatcaacaaggacaagaagcaggccatcaaggcgctcctcaatggggagggggccatcaacatgttcggttgagcggagaggggatcctc

SEQ ID NO: 247009 - DNA, 930 bp, Homo Sapiens
ttgggttgttttccgcctgctgctgctgctgctgttgcggctaggggaaccgtcgtggggaaggatggtgtgcgaaaaatgtgaaaagaaacttggtactgttttcactccagatacatggaaagatggtgctaggaataccacagaaagtggtggaagaaagctgaatgaaaataaagctttgacttcaaaaaaagcaagatttgatccatatggaaagaataagttctccacttgtagaatttgtaaaagttctgtgcaccaaccaggttctcattactgccagggctgtgcctacaaaaaaggcatctgtgcgatgtgtggaaaaaaggttttggataccaaaaactacaagcaaacatctgtctagatgtattgatggaatttctggctttctaaatgattttactttctgccttgaattttcaaggcatagatgtcaacttacagaataacatgttttaagataattaagtttaaaccagagaatttgacttgttactcattttgctctcatgttctaaacagcaacagtgtaactagtcttttgttgtaaatggttattttccttataagaattttaagaactaagtggcaaattccatgaaaatatttctcagttctgtatgcacttttatttaacattattcatataattctccccccaccactttatttatagatactgcaaaagtgagaaggagataatagatactttgctctgaatttggcatccagagttaacatttctcccctcactcccttgctggtgtcatagttattagaatcagcagcctcttaactaattgcggtttcataggatatataaatggtttcaagccattaattgctgaatggttctttagttattaacctagaccccaaatcaaagaccagttggaatttatgatatttttttatttgttcttg

SEQ ID NO: 247010 - DNA, 407 bp, Homo Sapiens; identical to SEQ ID NO: 168804
  misc_feature (12)..(12): n is a, c, g, or t

SEQ ID NO: 247011 - DNA, 933 bp, Homo Sapiens
gaggccgccgcgggtcatgtgaccggaagggctcctcacggacgccgtccctcctcggcgcggcctgagcgcccggcccgaccccggccatggggtgctgctacagcagcgagaacgaggactcggaccaggaccgagaggagcggaagctgctgctggaccctagcagcccccctaccaaagctctcaatggagccgagcccaactaccacagcctgccttccgctcgcactgatgagcaggccctgctctcttccatccttgccaagacagccagcaacatcattgatgtgtctgctgcagactcacagggcatggagcagcatgagtacatggaccgtgccaggcagtacagcacccgcttggctgtgctgagcagcagcctgacccattggaagaagctgccaccgctgccgtctcttaccagccagccccaccaagtgctggccagtgagcccatcccgttctctgatttgcagcaggtctccaggatagctgcttatgcctacagtgcactttctcagatccgtgtggacgcaaaagaggagctggttgtacagtttgggatcccatgaagagaggggtccttggacagctcttctcctctcttcatcccatctctaccccacccccttggcccccagcctcactgcggcttatacagtaccctaacctgctactaatcacagagaaaaatgtgaagaaggaggagaagaggaaggctagaagcctgagcaagtgagggtagaaccttttggggactggcctttgaagctctggcccagggatggggtggggggccaaaaggacagagccctggtatggtcttcatagtcattgaaaatgggggagatacccagtttgggggtggggggttgatccccaagggggaccctagggggagattccccttttcccacccctcttctggtt

SEQ ID NO: 247012 - DNA, 920 bp, Homo Sapiens
  misc_feature (361)..(361): n is a, c, g, or t
  misc_feature (604)..(822): n is a, c, g, or t
aatgtatatttaatcattctcttgaacgatcagaactctaaaatcagttttctataacaacatgtaatacagtcaccgtggctccaaggtccaggaaggcagtggttaacacatgaagagtgtgggaagggggctggaaacaaagtattcttttccttcaaagcttcattcctcaaggcctcaattcaagcagtcattgtccttgctttcaaaagtctgtgtgtgcttcatggaaggtatatgtttgttgccttaatttgaattgtggccaggaagggtctggagatctaaattcagagtaagaaaacctgagctagaactcaggcatttctcttacagaacttggcttgcagggtaggantgaagggaaagaaacttaggaaggctcaacaagctggaagataatcccatccagggctttcccctaggccttgtccaactctgttccactgaggagatgttatcctggtgcccgatagagttctggctctctgtgctgaggcagcagccaaagagacagaatgcttatttgccaatgactaatgtgaggaagcagacagatttgttggctcccctctttccaggcccttttctactcaaaacnnnnnnnnnnnnnnnnnnnnnnnnnnnnnnnnnnnnnnnnnnnnnnnnnnnnnnnnnnnnnnnnnnnnnnnnnnnnnnnnnnnnnnnnnnnnnnnnnnnnnnnnnnnnnnnnnnnnnnnnnnnnnnnnnnnnnnnnnnnnnnnnnnnnnnnnnnnnnnnnnnnnnnnnnnnnnnnnnnnnnnnnnnnnnnnnnnnnnnnnnnnnnnnnnnnnnnnnnnngctctagatgctattgaaaactgaggtcttagctgtccacgcaggatggaaaggagaagcctcagagcttgtgatgacataaggccatatagtcccaa

SEQ ID NO: 247013 - DNA, 1287 bp, Homo Sapiens
  misc_feature (347)..(364): n is a, c, g, or t
  misc_feature (421)..(444): n is a, c, g, or t
  misc_feature (998)..(1020): n is a, c, g, or t
ttggcataaactgctcaaggattagttttccaggactctgcggaggaacggcaggaagaacctcagagagggcagaggtgacttcaaagtgctggggactccgtcctgagggtcacttggccctgagcccctgcgtgcccttgcggaagcccagaagcttcttcctgctgcacctcccgtttccgctgctgctgacgtttatgcatttcatgatggggtccaacaagaacacctgacttgggtgaagttgtgcaatattggaggctgactgtagggctgggcagctgggagacaggctcatggctcatggctcatggctcagggcggtgcctgccctgggccgggannnnnnnnnnnnnnnnnnacctaggctttttgggttttgttcaaggaaggtaaagtgagaggtttaggtcagtgnnnnnnnnnnnnnnnnnnnnnnnnaaagcaaatcctgtatatgtatctacatgggagacaggtagacactacttatttgttacattttgtactacacgtttgtgttccaggtttcagcttccctcgctcctgttgttaagaagcgtccctgtcagcacaggtgtgcattgaggaaggggccccagggccttcgctccctcagcactggggtggaggcggcaggaaggggcggcccttacctggcaggtctgggcgcacctttagcaggtggactccgtggggctccaccagccagaagcctttggaaggcaacgaaggcaatgctgctccctgagtccagtccccgcccccaaacccagcccaggtgccttcagctacttcggcttcttaaaccctgcagtgttaaacataggcattgagaaaggggaaaggcgggtatttttaaaagccaaagattgacccagttacttgagggtagggaggcgggcccagtgcaggaggctgcatccctggcctgctggtgcccaccgggggctgtgcctgtgccgggccgcagggaagctggctgcccccattcnnnnnnnnnnnnnnnnnnnnnnnctgtggctgtttcaaagactgggcgaaaggctgtccggagggcagaccaggtgccttgccgcagagaaaacaccaaagtctccggttcgctcataaagaagtttttgggatggggagagaatccagaccatcttggggcagccaggcgccttgcctgcattttttacagaggtagcacaagtggaattccaacacagaaaactcctttccccttttttaaaaagggatttcggggttccaagtggccataagatgcaaaggggccta

SEQ ID NO: 247014 - DNA, 1005 bp, Homo Sapiens
  misc_feature (823)..(873): n is a, c, g, or t
ttgggacatggtagtgagtcgcgaagtcgggaccatcgtcgtgaggatcgtgtgcattacaggagtcctccacttgccactggttatagatatggacacagtaagagtcctcatttcagagagaagagcccagtcagggagccagttgataatctgagtcctgaggagcgtgatgcccgcacagttttctgtatgcagttagctgcccgaattcggcctcgagatctggaggactttttctctgctgtaggcaaggttcgcgatgtacgtatcatttcagatcggaactcacgtcgttctaagggcattgcctacgtggaattctgtgaaatccagtctgtgccactggccattgggctgactgggcagcggttgctgggagtgcctatcattgtacaggcttcacaggcagagaaaaaccgactggcagccatggccaacaacctgcaaaagggcaatggtggaccaatgcgcctctatgtgggttccctgcacttcaatatcactgaagacatgctccggggcatctttgagccctttggtaaaattgataatattgtcctgatgaaggactcagatacaggccgctctaaaggttatggtttcatcacgttctctgattctgagtgtgcccggcgggccctggaacagttgaatgggtttgagcttgctggtcgacctatgagggttggccatgtgactgagcgactggatggtggcacagacatcacttttcctgatggggaccaggagctggatctgggatcagcaggtggacgttttcagctcatggcaaaactggcagaaggcgctggaatccaannnnnnnnnnnnnnnnnnnnnnnnnnnnnnnnnnnnnnnnnnnnnnnnnnnttgcaactgaatggagcagttcccttgggggccctgaatccagcagctctgactggtagtcttggacatgggaaaggaagggaaggtttgggggtctggaaagaagagtgcgcggtgcttgctcactcactc

SEQ ID NO: 247015 - DNA, 730 bp, Homo Sapiens
  misc_feature (70)..(70): n is a, c, g, or t
  misc_feature (84)..(84): n is a, c, g, or t
aggtgtgggtgctgagccgcccgccgcctggagggggagacagcttccaggacacgcaggccgcagcgangggccggggcctgngggatcccaggccatggatgctccccactccaaagcagccctggacagcattaacgagctgcccgagaacatcctgctggagctgttcacgcacgtgcccgcccgccagctgctgctgaactgccgcctggtctgcagcctctggcgggaacctcatcgacctcatgaccctctggaaacgcaagtgcctgcgagagggcttcatcaccaaggactgggaccagcccgtggccgactggaaaatcttctacttcctacggagcctgcataggaacctccctgcgcaacccgtgtgctgaagaggatatgtttgcatggcaaattgatttcaatggtggggaccgctggaaggtggagagcctccctggagcccacgggacagattttcctgaccccaaagtcaagaagtattttgtcacatcctacgaaatgtgcctcaagtcccagctggtggaccttgtagccgagggctactgggaggagctactagacacattccggccggacatcgtggttaaggactggtttgctgccagagccgactgtggctgcacctaccaactcaaagtgcagctggcctcggctgactacttcgtgttggcctccttcgagcccccacctgtgaccatccaacagtggaacaatg

SEQ ID NO: 247016 - DNA, 1938 bp, Homo Sapiens
ttggccagcggatcgtgccgcggcggccgagcgcagctacaggagggtgtccagaagccacaagccatggctgtggggaacatcaacgagctgcccgagaacatcctgctggagctgttcacgcacgtgcccgcccgccagctgctgctgaactgccgcctggtctgcagcctctggcgggacctcatcgacctcgtgaccctctggaaacgcaagtgcctgcgagagggcttcatcactgaggactgggaccagcccgtggccgactggaagatcttctacttcttacggagcctgcacaggaacctcctgcacaacccgtgcgctgaagaggggttcgagttctggagcctggatgtgaatggaggcgatgagtggaaggtggaggatctctctcgagaccagaggaaggaattccccaatgaccaggtcaagaaatacttcgttacttcatattacacctgcctcaagtcccaggtggtggacctcaaggccgaagggtattgggaggagctgatggataccacacggccggacatcgaggtcaaggactggttcgcagccaggccagattgcgggtccaagtaccagctgtgcgttcagctcctgtcgtccgcgcacgcgcctctggggaccttccagccagacccggcgaccatccagcagaagagcgatgccaagtggagggaggtctcccacacattctccaactacccgcccggcgtccgctacatctggtttcatcacggcggggtggacactcattactgggccggctggtacgggcccgagggtcaccaacagcagcatcaccatcgggcccccgctgccctgacaccccctgagcccccatctgctgaaccctgactggttaacaactgctgtcaagaaaagggctgggtttgggaaggggaggtggagccagtgtcccagactctaaccttgccctagcagcctcttctttgtggagcctctcagtgtgggcagccctcgcatgctggggtcgggccagctctccccgaaaggtcttgacctgaatgatggccggggaagcctgcgtgtgcccctttcagagacggagcacctgagatgtgggaggtgcagcatgttcccctgggcccctcagaaagtcgagcttggaggccagcctggatctgtctctcccttcccctcctgggaccattctacctgtgttctttgaccctcggagcagggacaggcaagacaactggcaagcttgcagctgccctgatggtgcaggtgcagggaggtgaccatgtaactctgaccaatctgggaagtggagggtgggctcatgggccgtgctctgcccctgtctgctgctcccagtctctcgctctgcctgcctgctcagaagaggtggctttggcccagaggctcaggccgggactgatattgacagacccagggtggggtggggtccaggtcgggtgtggactgtcctcactgtcggtggagcccccgaagctctatgggtaccccggtggggtctaggctcccagaggactcgaccgaatcctcatacgagacgacccccgggaacatctggcaacaggttcgggcccgcccggttgacaagtggacccctctgcaagccatgctcggtctactgtcggaagaggattactcgacacaatacaggggtacccctagagacggcgctgagagggtggtgacgcactggacgaggatttggctctgggcgcagtaaagctcgcaggcgcgtcaaatgaagggaactacggcaagcagccaacataccagcgccagagccacgcatgcatcgactcacacggggtaggcaacgcggcgtcagcaccgaggcgcggcatcagccgactattcaccgatggcggtcaggggacccgcaaacaggagtgtccagctgacacgcggacggcacacggggggagcgaa

SEQ ID NO: 247017 - DNA, 241 bp, Homo Sapiens
agtgagatcacgaaccagcctttaacgaccagcttttctatttcaagagcagtctggactctgacagcccctggttgaggtgcaaactaacaaattttaagattggcaagcaacagacactccttaagtggttcctaactctccccaggtgcagaacacttaagggtcccaacatctgattgaaacacagcccacaccaaaccacgagatggcacctcatacacgttagggtggggactat

SEQ ID NO: 247018 - DNA, 410 bp, Homo Sapiens
gtggacgaggcttttgagcagctggtgcgggctgtccggaaataccaggaacaagagctcccaccgagccctaccagtgccccccaggaagaagggcgggggctgcccctgcgtcctcctgtagcacaggcaagagagaagcaaccaccacaagctctcgggactagctgccttcgcaccttgctgtgtgacctgaggccctcactgagcctcaatttcctcatctgggtctcccaggacacatcacatacccactcttacttcctggcttcttctgtgctactgccactgtgtgccttctgccaacgcctcctgtccccacctaagcctggtgggggtgaggggctccgggtcactgctgtatataactcccctcccccagaaaaataaatgtcactgccaacgtcaaa

SEQ ID NO: 247019 - DNA, 882 bp, Homo Sapiens
  misc_feature (21)..(21): n is a, c, g, or t
  misc_feature (35)..(35): n is a, c, g, or t
aatatgtgaactctttggaancaccccgactcttnaggatccccccacggtgtccataaagataaaacttctttcacaagtaaattgggttaaataactgatttttcaccctaacacactatcaaaaagagtgagagagaaagcagagagtgaggtatagcttattagctcaaaatggttataaatactgtgactccttaagactccatcagaaagtgcagtattgactgctttactatactatattgtggaaataatagggcatttagtgatcaaaataggccccattctagtcattagatcattactagtctacgctatgaaatgagcacagaaacccatgttcctttccacttacaagtctgtctaaaggctaaaggtctgtctttaggtgaattgaaaggaatagttgctattagaattagtgctattagatcagggatcagcaaactatatataaatggccagatacttgaaattttaggccatatggtctttgtaggccatacagtctctgttgaagctaatcagttctgcccttgtagcgtaagagtgccacagacaacacgtaaatgaatgagcatggcaacgtcccaataaaagtttatttatggacactgaaatctgaatttcatataaatttcatgtcataagttttcttttcctccaaccatttaaaaatgtaaacattagtcttagcttgcaggcagcacaaaagcgggtggtagaccaaatgtggacccagggtgtagtttgccaaacccttttattagatcaccaaagttacttttcttaaaataccttctatttttcacagaaggtataaatggtaaacaacatcttaaagcatcggtagtagtggatacctgggatatcacccaa

SEQ ID NO: 247020 - DNA, 721 bp, Homo Sapiens
tgtacaaaaaagttgggaagacatgttatatagtcctgaacttgcccagcgaggtcatgatgatgatgtttctagcaccagtgaagatgatggctatcctgaggacatggatcaagataagcatgatgaccgtactgatgacagtgacaccgacaaatcagatggagaaagtgacggggatgaatttgtgcaccgtgataatggtgagagagacaacaatgaagaaaagaagtcaggtctgagtgtacggtttgcagatatgcctggaaaatcaaggaagaaaaagaagaacatgaaggaactgactcctcttcaagccatgatgcttcgtatggcaggtcaagaaatccctgaggagggacgggaagtacaggaattttcagaggacgatgatgaagatgattctgatgactctgaagcagaaaagcaatcacaaaagcagcataaagaggaatcccattctgatggcacatccactgcttcttcacagcagcaggctccgccgcagtctgttcctccttctcagacacaagcacctcccatgccaggaccaccacctcttggaccaccacctgctccaccattacggcctcctgggccacctacaggccttcctcctggtccacctccaggagctcctccattcctgagaccacctggaatgccaggactccgagggcccttaccccgacttttaccctccaggaccaccaccaggccg

SEQ ID NO: 247021 - DNA, 807 bp, Homo Sapiens
aaaagctcttttctttgtcccggagcaggctgcggagcccttgcagagccctctctccagtcgccgccggggcccttggccgtcgaaggaggtgcttctcgcggagaccgcgggacccgccgtgccgagccgggagggccgcaggggccctgagatgccgagcggtgcccgggcccgcttacctgcaccgcttgctccgagccgcggggtccgcctgctaggcctgcggaaaacgtcctagcgacactcggcccgcgggccccgaggtgcgcccgggaggcgcgagcccgcgtccggaaggcagccaggcggcgggcgcggggcgggctgttttgcattatgtgcggctcggccctggctttttttaccgctgcatttgtctgcctgcaaaacgaccggcgaggtcccgcctcgttcctctgggcagcctgggtgttttcacttgttcttggactgggccaaggtgaagacaatagatgtgcatcttcaaatgcagcatcctgtgccaggtgccttgcgctgggtccagaatgtggatggtgtgttcaagaggatttcatttcaggtggatcaagaagtgaacgttgtgatattgtgtccaatttactaagcaaaggctgctcagttgattcaatagaatacccatctgtgcatgttataatacccactgaaaatgaacttaatacccaggtgacaccaggagaagtgtctatccagctgcgtccaggagccgaagctaattttatgctgaaagttcatcctctgaagaattatcctgtggatctttattatcttgtagatgtctca

SEQ ID NO: 247022 - DNA, 434 bp, Homo Sapiens
  misc_feature (414)..(414): n is a, c, g, or t
gagcgatgtgaccccactgcggttttctcgaatccatgatggagaggcagacatcatgatcaactttggccgctgggagcatggcaatggatacccctttgacggtaaggacggactcctggctcatgccttcgccccaggcactggtgttgggggagactcccttttcttgaagattaacgtgcgtttgcaactggatagctctattgtaccttcccgtagaatcccagaagtctaacagcctgccttcatttttgtcctgtctctttctctattcagttcaagctggcagcatttctggtgagatggttaattggttccattcagacctatactaatctctttatcacatggttgtccagccacaccctagtgttctttcaagaacatactttcttcattttttggcaatgngggacagggtgaggattttc

SEQ ID NO: 247023 - DNA, 910 bp, Homo Sapiens
ccacgcgtccggaacgcccgcagcagggtcagaagggaggtggtcgccctccgtcgtggtctggcgtgtattccgagccttggtgtctggcggtttccgagcgttggtgtctggcggtttccgagcgttggtgtcttggcggtttccgaccgttggtgtctggcggtttccgaccgttggtgtctggcacgcgccaccctctcttgctttggttgcgccatgccgatgtaccagacaagaagacaagaaaatgatttgaggacagcttcaatcgcggtgtgaagaagaaagcagcaaaacgaccactgaaaacaacgccggtggcaaaatatccaacagaaagggtcccaagcggtacatcgtcatagccggaaacagtcagagccaccagccaatgatcttttcaatgctgcgaaagctgccaaaagtgacatgcagcaccgagaagtccgcgtgaagtgcgtgaaggctctgaaagggctgtacggtaaccgggacctgaccgcacgcctggagctcttcactggccgcttcaaggactggatggtttccatgatcatggacagagagtacagtgtggcagtggaggccgtcagattactgatacttatccttaagaacatggaaggggtgctgatggacgtggactgtgagagcgtctaccccattgtgtaggcctctaattgaggcctggcctctgctgtgggtgaatttctgtactgggaaacttttctaccctgagtgcgagataagaacgatgggtggaagagagcaacgccagagcccaggcgcccagaggactttcttccagcttctgctgtccttctttgtggagagcaaggtgacatacacagagataactctggctgttgtgcataggacctacaagtgggctggggttggtggttca

SEQ ID NO: 247024 - DNA, 281 bp, Homo Sapiens
ggtcgactactactactaaattcgcggccgcgtcgaccagagatgaaagaggggtgggatccacactgagagagtggagagtgacatgtgctggacactgtccatgaagcactgagcagaagctggaggcacaacgcaccagacactcacagcaaggatggagctgaaaacataacccactctgtcctggaggcactgggaagcctagagaaggctgtgagccaaggagggagggtcttcctttggcatgggatggggatgaagtaaggagagggactgga

SEQ ID NO: 247025 - DNA, 1419 bp, Homo Sapiens
  misc_feature (1255)..(1255): n is a, c, g, or t
ttggagatcctgaagaactttttcagtctgctgaagagcttggaagactggagacagaaggcagagtctcaggctctgaaggtataaggagtgtgagttcctgtgagaaacactcatttgattgtgaaaagacttgaattctatgctaagcagggttccaagtagctaaatgaatgatctcagcaagtctctcttgctgctgctgctactcgtttacatttattgattacttacgatgattcaggtactgttgtaagtgctttacatgctgttatacgagactcttgggagaaatcactttaatgaagcttgagacacatggcattgccatgcaatgatttttcccccctcttcacgggatcagagggaactaatagaatgtgacaatgattctttagcagggactgctgaggcttctggttcctttttaagatctgcagtgaaagaagatgagaaacatggatatgcccttcttttggtccccctcttcctttatttgatctctacttccttctataaatatattagggctacattgtccctttgtatttcaaacaaggcaaaaagaggttgtaattacactttactgcaatcctcagtttctccagggaacaggaatgcaaaggctttgaaggcctctctatttgctgacatggtcagctgggtgccatgggccaagtccttctgttgccctcctctgtcaccaagtaagctaggtcctttctgaggctcaggtttgctgtgatgatgatcacttttaggcagaaggttagaggcctcatgagtgctatatggactttattaggctttagatttgatggggaataagggatgtgatttgtcttttgggaactcatctttgattcatcattgtctcttggtatcttggaatttccatgtcattacagtctacagaatgaaagagtaacctgtcccagaggagaggcaggtgaaagactccacagcatgctcattctcattctgtcttctcagtgacaccgaggtttactgagtgcccactatgtgccaagcactgtgctcagggctttctttgtatgcatgatctcagtgaatctcaccaagcctcatctggaaaacggggacaaattaacaacaggatggcaaattgaaaaacacgtaaccatgttctacagatggaaaggggtgcttggttattatgaaggccccctcgcaagcgtgtgggacatgggtgtgttctctgggttgtactgatcagatcaaggacctcccccanccttctcacactctgcccacttccgccctttgcttatcagacccttagccagtgactcattccagaaccagaaccttggtgaaatctcaaccgacaccagagatcggggtcttcagtcctagactgatggaggaaaatccagaatatatactagaagctccacc

SEQ ID NO: 247026 - DNA, 647 bp, Homo Sapiens
ccatgtgatctgtgtccaataagcttattgcaaaacagtcacaagctggatgacaggccatggtttgctgacccctttctagtctgttcatgatgaaagagccctgggttttgaggcaggagcctgactcctcaggtaggagccaccttgagttgctttgtgaccctagttgggtccttgactcagcagtgcttccgtcctctcctatgtaagctgtgttaattgggaggacaagttctaaggatccctccagcttttgatactcagtgaggccctgaattctctgctggatctgactgcatctctgaaacagattccaaatccacctattttcttccctatccacgggtgtaattgtcacatttatcttggcctagctcacagatggcataagtctcataccttgaaccagccaatagcagagatcctgtgtctcttagcaaggcttaggcaaataggtgagttcatgggcctccgctttataaagattgtaaatgccattctcttgcatattgtgtaaaggtcttgaatggtacagaaagtgtcattacagagcctagcacacaggtaaggttgtgtttctcatatgctctccctaaaaacccttgatattgtcaacctcccacactggttaagtaagtagggat

SEQ ID NO: 247027 - DNA, 1145 bp, Homo Sapiens
ggctggtacggtcggaatcccgggatatcgtcgacccacgcgtcgccctgtcccagccgtcctgtcctggctgctcgctctgcttcgctgcgccgccactatgctctccctccgtgtcccgctcgcgcccatcacggacccgcagcagctgcagctctcgccgctgaaggggctcagcttggtcgacaaggagaacacgccgccggccctgagcgggacccgcgtcctggccagcaagaccgcgaggaggatcttccaggagcccacggagccgaaaactaaagcagctgcccccggcgtggaggatgagccgctgctgagagaaaacccccgccgctttgtcatcttccccatcgagtaccatgatatctggcagatgtataagaaggcagaggcttccttttggaccgccgaggaggtggacctctccaaggacattcagcactgggaatccctgaaacccgaggagagatattttatatcccatgttctggctttctttgcagcaagcgatggcatagtaaatgaaaacttggtggagcgatttagccaagaagttcagattacagaagcccgctgtttctatggcttccaaattgccatggaaaacatacattctgaaatgtatagtcttcttattgacacttacataaaagatcccaaagaaagggaatttctcttcaatgccattgaaacgatgccttgtgtcaagaagaaggcagactgggccttgcgctggattggggacaaagaggctacctatggtgaacgtgttgtagcctttgctgcagtggaaggcattttcttttccggttcttttgcgtcgatattctggctcaagaaacgaggactgatgcctggcctcacattttctaatgaacttattagcagagatgagggtttacactgtgattttgcttgcctgatgttcaaacacctggtacacaaaccatcggaggagagagtacagagacaataattatcaatgctgttcggatagaacaggagttcctcactgaggccttgcctgtgcaagctcattgggatgaattgcactctaatgaagcaatacattgagtttgtcggcagacagaccttatgctggacactgggctcccacgcaggctaccagagtagagaaacca

SEQ ID NO: 247028 - DNA, 1417 bp, Homo Sapiens
  misc_feature (1400)..(1400): n is a, c, g, or t
ttgggattccggcctggagctcccagggccgaggtcactttggtggcagttcatggagaatagcttgaggtgacaagacagcagacacgacgtgggtctctgggactgcctgtgccgttgtgggcagcccctccagagccctgagtcacgcagccttcagaggcacccatggctacgagaagcacagtctctgcctgaggctccagagcggccctttttccccagcagcagaccttgggacctgtgagcgctgcatccaattaaccatgggaagggtcagcaccagccaccagccccttaggtgaggactctccctggggctctgctgatggttccgaatcatggagctgcagagagctcctccagcctggagacgttcttggtgaaagctgtggtctaactccaccggctcttcctgcacattgtattcaagaggggtgcctgcccccgctgactcaggagctccggtgctgcagccgccacgaatggggaggtgggccctcgatgtggcctttttgtggaaggcggtgttgaccctggggctggtgcttctctactactgcttctccatcggcatcaccttctacaacaagtggctgacaaagagcttccatttccccctcttcatgacgatgctgcacctggccgtgatcttcctcttctccgccctgtccagggcgctggttcagtgctccagccacagggcccgtgtggtgctgagctgggccgactacctcagaagagtggctcccacagctcttgcgacggcgcttgacgtgggcttgtccaactggagcttcctgtatgtcaccgtctcgctgtacacaatgaccaaaatcctcagctgtcctcttcatcttgatcttctctctgatcttcaagctgggaggagctgcgcgcggcactggtcctggtggtcctcctcatcgccgggggtctcttcatgttcacctacaagtccacacagttcaacgtggagggcttcgctttggtgctgggggcctcgttcatcggtggcattcgctggaccctcacccagatgctcctgcagaaggctgaactcggcctccagaatcccatcgacaccatgttccacctgcagccactcatgttcctggggctcttccctctctttgctgtatttgaaggacacagggctgctcctgcgggtacttgggagcctcttccttggcgggattctcgcctttggtttgggcttctctgagttcctcctggtctccagaacctccagcctcactctctccattgccggcatttttaaggaagtctgcactttgctgttggcagctcatctgctgggcgatcagatcagcctcctgaactgggctgggcttcgcctcttgcctctcgggaatatccctccacgttgccctcaaagncctgcaattccagaagg

SEQ ID NO: 247029 - DNA, 2596 bp, Homo Sapiens
  misc_feature (2502)..(2502): n is a, c, g, or t
  misc_feature (2525)..(2525): n is a, c, g, or t
  misc_feature (2563)..(2563): n is a, c, g, or t
ttggctcagcgaccttggcccgaaggctctagcaaggacccaccgaccccagccgcggcggcggcggcgcggactttgcccggtgtgtggggcggagcggactgcgtgtccgcggacgggcagcgaagatgttagccttcgctgccaggaccgtggaccgatcccagggctgtggtgtaacctcagcggccaggcagtctctgtcctccagccaagttttccctcatcaaaacgatcttcgcagattctgacaggtgaagcctctgggcttcctgaagcccttctccttgatgaaggcttccagccgcttcaaggcacaccaggatgcactgccacggctgcccgtgccccctctccagcagtccctggaccactacctgaatggtcgctgcagcccatcgtgagtgaggaggagtgggcccacaccaagcagctggtggatgagtttcaggcctcaggaggtgtaggggagcgcctgcagaaggggctggagcgtcgggccaggaagacggagaactggctgtctgagtggtggctcaagaccgcctacctccagtaccgccagcctgtggtcatctactcgagcccaggcgtgatgctacccaagcaggacttcgtggacctgcagggtcagctccgatttgctgccaaactcattgagggtgtgttggatttcaaggtcatgattgacaacgagaccctgcccgtggagtacctgggggggaagccactgtgcatgaaccagtactatcagatcttgtcctcctgccgagtgccgggccccaagcaggacacagtcagcaacttcagcaagaccaagaagcctcccacgcacatcaccgtggtacacaactaccagttttttgagctggatgtgtaccacagtgacgggacacccctcactgcggatcagatctttgtgccagctggagaagatctggaactcatccctacagaccaacaaggagcctgtgggcatcctcacctccaaccaccgcaactcctgggccaaggcatacaacaccctcatcaaagacaaggtgaaccgggattccgtgcgctccatccagaagagcatcttcaccgtgtgcctagatgcaaccatgcccagggtctcagaagacgtgtaccgcagccacgtggcaggccagatgctgcatgggggcggcagcaggctcaacagcggcaaccgctggttcgacaagacgctgcagttcatcgtggcagaagatggctcctgtgggcttgtgtacgagcatgctgcagcggaggggccccctattgtcacccttctggactatgtcatcgagtacacgaagaaacccgagcttgtgcggtctcccatggtgcccctgcccatgcccaagaagctgcggttcaacatcacccccgagatcaagagcgacatcgagaaggccaagcagaacctcagcatcatgatccaggacctggatatcaccgtgatggtgttccaccattttggaaaagacttccccaagtcggagaagctaagcccagatgccttcatccagatggctttgcagctggcctactacaggatctacggacaggcatgtgccacctatgaaagtgcctccctgcgcatgtttcacctgggccgcaccgacaccatccgctcggcttccatggactcactcacctttgtcaaggccatggatgactccagcgtcacggagcaccagaaggtggagctgctgcggaaggccgtgcaggcccaccgaggctacaccgaccgggccatccgcggggaggcctttgatcgacaccctgctgggcctgaaagctgcaggccatcgaggacctggtgagcatgcccgacatcttcatggacacctccctacgccatcgccatgcacttccacctctccaccagccaggtccctgccaagacagactgtgtcatgttcttcgggcccgtggtccccgacggctacggtgtctgctataaccccatggaggcccacatcaacttctccctgtcggcctacaacagctgcgcggagaccaacgccgcccgcctggcgcattacctggagaaggcgctcctggacatgcgtgccctgctgcagagccacccccgggccaagctctgagcccctaggactcaggcctgccaatgccacagccaagcccaccctgggatgggccacccaccagggctcagctccttggttccctcttccttggttccctcttccctggtcccccccaaatctactgagccacggaccgcatcctccagggggcctgcaggccctggccagagtgccttccgtgggtcatcccagcacctgccagggcccgacctggggctgagtgcagaggctgagcaggacgttaggcccgggcccctggcacgtcctccaccggtgcctcctctggggaagggaaccagccctccagagcaggagactgggcaagagctctttgtctcaccagctcagccccggccactccctggccaactccattgaccagggncaccattttgtaaccctgctttnccaaatttccaggggacttgggagacaggatttttttngggggccgagggggcagggggtgttgaggtttt

SEQ ID NO: 247030 - DNA, 377 bp, Homo Sapiens
cacgaggccagccagacaccgaaggagccaacaaaagaagatgttaaacttcatagaatcaggatagaaaacatgaatcgggaaaggctgagacaaaagagaattcattctgctgtaaagacaagcaggagggtcgacatggactgaaatcaccctctgcagctgggagggctcttctgggcgtccgggcactgcagctgagaggactttcacaccataaggagatttctgtttttctttttggctgttaatgcttgtctataaccttggagccatcacaagaatgttcatttgtaatgaaggctgcaggcactggttgcagacgtctttataggcagtcaccatgttgtcaaaccttaataatgcacctcatgtat

SEQ ID NO: 247031 - DNA, 1037 bp, Homo Sapiens
acaaaaaagttggctacagagtttgaagctttcaggcttatcctttttggctctgaagactcagttctgccctcaccccttttgtacaaaatggcacatatgggcagtgatggaggggtccttccggttcactatgccaccatcctcttttctctcaggtaccccaagaagctagtgcagacttattcagtgtttccctaccaggacgagatgagcgacgtagtggttcagccctacaattcactcctgacactcaagaggctgacgcagaacgcagattgtgtggtggtgctggacaacacagccctgaaccggattgccacagaccgcctgcacatccagaacccgtccttctcccagatcaaccagctggtgtccaccatcatgtcggccagcaccaccaccctgcgctaccccggctacatgaacaatgacctcatcggcctcatcgcctcgctcattcccaccccacggctccacttcctcatgaccggctacaccccgctcactacagaccagtcagtaagagcagccttcagtgtcccaggccaggctggccctgggcccagcaggccctgccccagcctttctctcttccccactgccccaggagctgccctttgcaggccccaaggcactgcgctcagggactggcacagagcgggcaactttcttgctgactttctctccaccctccctctgcctttggcttctgccaaagagaagccaaagggactgtgccctgagcgctggccgggtccctgtctcactgtcccatcaggtggccagcgtgaggaagaccacggtcctggatgtcatgaggcggctgctgcagcccaagaacgtgatggtgtccacaggccgagaccgccagaccaaccactgctacatcgccatcctcaacatcatccagggagaggtggaccccacccaggtccacaagagcctgcagaggatccgggaacggaagttgggccaacttcatcccgtggggccccgccagcatccaggtgggccctgtcgaggaagtctcccta

SEQ ID NO: 247032 - DNA, 1770 bp, Homo Sapiens
  misc_feature (488)..(488): n is a, c, g, or t
  misc_feature (1129)..(1141): n is a, c, g, or t
ttggggttctccaagtgggagcggcagtgcctggccgaggccgaacaggacgagcagctgccccccgagctgcaggaggaggcggcggccgccgcgcagcccgagcacaagcagcataacctgtggcacctcttccagaactcggccaccgccgtggcccagctctaccaagaccgagtgtgtcaccagccaggactttctctctgggtccccttccaaaacgcagccaccgccgtcaccaatctctacaaagaaagcgtggatacccatcaacgaagttttgatattggaattcagattggctatcagcgacgcaataaggatgtgttggcttgggttaaaaaacgcagaagaactattcgtcgagaagatttgatcagcttcctgtgtggaaaagttcctccaccacgaaactctagagctcccccaagactgactgtagtgtcccctaaccgagctacttcaacggaaactagctcatctgtagnagactgatttgccaaacccttcccgggaagcccatagctctgcatggtccttagtggtgcaatggctagtataagcgtgcgttcgagtaccccaggctctcctacacatgtaagcagtggatcgaatgctagtcgaaggagaaatggactccatgatgtcgatttgaacactttcatatcagaagaaatggcactccacttggacaatggtggaactagaaagcgtacctcagcccagtgtggcgatgtcattacagactcaccaacccataaacgcaacagaatgatctaaactgcaaacattttcacacccaccatgctgcttgaaagccacttgatcctcaacatatactataattgcaaaggaaacatgaggccatcttcccttgttcactgtttaagacaagtgaattctatagtggttgccataaaaggaagttctaggtatttatagtagatgcctcttgtaattatggctttcttaaaactataatcctagcagaggacatcagatattgtgtagtcgttagcaagatcatcataggcaaacatatatccgttccaaggctaaaagtgaccttaactgtatttattctcaaagggaaaggaaatatcagatgtttatttggttatagaatgcnnnnnnnnnnnnngggtccatttcctgctgtgttgagtattttgcttcaacagtattgccaggttcctaaaattgtctaaaaacatgatttgggcttccatttttgcagctgcactgtaccatgcacctgggtttctatatagtaacagtgtgcaattctaattattgggactgtgccctggtttttagttttcaaatcaatttctaattctggtgattgtgtgatgtaaagaggtgctatgatggtcatgcaattaatactaaatattgaatcaatgcccagagctttattggattcactttgtgtgtgttagtgctctaaagtagcagtattattattaaactgtccccagagtaaccctgtaggcctaaagtactcagttttaagacaaacactacttcccatgcggggtactttccttatggtaaatgtaaacatgtagactgcattcgaggtgacctaaagtagagaggtcatgaactttgagaatgggcttcctttttggttcagtattagtgagagggagagggagatggatggtggggtaggttttctagtctatcattttacatttttcatggagtccctgcttagtgcagtttccattggaatgggtggaagatgataaagctcttcttttt

SEQ ID NO: 247033 - DNA, 447 bp, Homo Sapiens
gtgctcaaatattttaatcatttctgccctgttactcccaccccagatccaagcgccacgccagttccggtgggggctcagtcctccggagtccaggagtcagggctcgggggcgctcagggccagttgggcaagattggggcctttcctgtcctcgaagctgcacaaaggtggccccagcccagaacacagggagagggcagagagatgtgctcatcagtctgggcaggcgggccgggagcagtcttccagaaacaggtgggagccagggctcattttcatagccaagggtcccaggagctccccaggagctcggccaatggggtggtccatggtgggtgaggggccagagggtctggccatatgctacaggcagtaaaaactcctgactctcttttttaaggtcccaaaaagcccaacttttttgtacaaaggcgcctttacagg

SEQ ID NO: 247034 - DNA, 1189 bp, Homo Sapiens
  misc_feature (452)..(581): n is a, c, g, or t
ttgagcccatgtttctgtggctgctagttatgtcctgggattttctcttaactgcaccatgtgtgtccatttgcctgatttcaggagcagccctgggccccctgctggctgggctcctctccccgttcggctggagcaatgtgttttacatgctgatgtttgcagatgcctgtgccttactggtaagtcggcctatttttagtccaatacaccttgaatgcagatctctgtggttgtgtcctaacactggtggaactttctcccatgcattcctgaggtatcagagaggtttgggtcttcccatcttttctaaatatgcgtggtctaaagctccttctctctctgattagaataaagtcgagaaacagaacgcaggacagtcttgctctgcagccttgggcgggatagcacaaaggccaggagcgtggagctccgtggctctagatcctgcnnnnnnnnnnnnnnnnnnnnnnnnnnnnnnnnnnnnnnnnnnnnnnnnnnnnnnnnnnnnnnnnnnnnnnnnnnnnnnnnnnnnnnnnnnnnnnnnnnnnnnnnnnnnnnnnnnnnnnnnnnnnnnnnnncagagcctggcctcccagtggtcatcagtgtcctggtgtccctcctgcagccatgctgtcagacggcgggagcggccccaacttctttcacctgaagggatgggagagaataaaggagcaaagaggttgccagtgcagacactgagtcgccttctggcttctgcccccttttctctgggctcctgcttctgtgccctcctgtgttgagaaagtttgaggttttcccctgggtaaggaagaccagtgatgatgtcacagtcacatagatgtgcagctgtgaggggtgcatacacatctttacaagtcacctggccacaaagtccccagacccacagccatgcctctcctctcacttcaccagacaaaaccttaggctgatcccaataaaaatgagttgagaatttcagaaatatcaactcactcaattaaatgaaagtcttatattttaattccaggaaattctaaaactcaacttccccaccacatacaaaatcaaataccaactctcaacctatgaacttactagtttaagtggctgttctttggatcatctgtgggttcttttaatgcctgaatgttctaatgaagcctccagatggatttccact

SEQ ID NO: 247035 - DNA, 1590 bp, Homo Sapiens
  misc_feature (1428)..(1428): n is a, c, g, or t
  misc_feature (1462)..(1462): n is a, c, g, or t
  misc_feature (1497)..(1497): n is a, c, g, or t
  misc_feature (1510)..(1510): n is a, c, g, or t
  misc_feature (1519)..(1519): n is a, c, g, or t
  misc_feature (1533)..(1533): n is a, c, g, or t
  misc_feature (1538)..(1538): n is a, c, g, or t
  misc_feature (1549)..(1549): n is a, c, g, or t
  misc_feature (1567)..(1567): n is a, c, g, or t
agaatgccgcttaagaaactctgaaggggaggccactgagctcatcacagagactttcacaagcaaatctgccatttctaagactgctgaaagcagtggtgggccctccacttcccgagtgacagatccacagggtaaatctgacatccccatggacctgtttgacttctatgagcaaatggacaaggatgaagaagaagaagaagagacacagacagtgtcttttgaagtcaagcaggaaatgattgaggaactccagaaacgttgcatccacctggagtaccctctgttggcagaatatgacttccggaatgattctgtcaaccctgatatcaacattgacctaaagcccacagctgtcctcagaccctatcaggagaagagcttgcgaaagatgtttggaaacgggcgtgcacgttcgggggtcattgttcttccctgcggtgctggaaagtccctggttggtgtgactgctgcatgcactgtcagaaaacgctgtctggtgctgggcaacctcagctgtttctggtggagcagtggaaagcccagttcaagatgtggtccaccattgacgacagccagatctgccggttcacctccgatgccaaggacaagcccatcggctgctccgttgccattatcacctactccatgctgggccacaccaccaaaaggtcctgggaggccgagcgagtcatggagtggctcaagacccaggagtggggcctcatgatcctggatgaagtgcacaccataccagccaagatgttccgaagggtgctcaccatcgtgcaggcccactgtaagctgggtttgactgcgaccctcgtccgcgaagatgacaaaattgtggatttaaattttctgattgggcctaagctctacgaagccaactggatggagctgcagaataatggctacatcgccaaagtccagtgtgctgaggtctggtgccctatgtctcctgaattttaccgggaatatgtggcaatcaaaaccaagaaaacgaatcttgctgtacaccatgaaccccaacaaatttagagcttgccagtttctgatcaagtttcatgaaaggaggaatgacaagattattgtctttgctgacaatgtgtttgccctaaaggaatatgccatttcgactgaacaaacccctatatctacggacctacgtctcagggggaaaggatgccaatttctccagaatttcaagcacaaccccaaaattaacaccatcttcatatccaaggtaggtgacacttcgtttgatctgccggaagcaaatgtcctcattcagatctcatcccatggtggctccaggcgtcaggaagcccaaaggctagggcgggtgcttcgagctaaaaaagggatggttgcagaagagtacaatgcctttttctactcactggtatcccagggcacacaggnaatggcttactcaaccaagcggcagagattcttngtagatcaaggttatagctttaaggtgatcacganacttgctggcatngaggaggangacttggcgttttngacanaaggtgagcancagcagctttttcaggangtcttggagccacttacctgggt

SEQ ID NO: 247036 - DNA, 869 bp, Homo Sapiens
  misc_feature (757)..(757): n is a, c, g, or t
ttggccgtccgccttcgaggagaggtcggcatctttgttccctgcccggccattgttcgtgccgcgcttctagcaacgccgggccggcaagcgcctccaaggtttgtcttgaagcatagctccagctggagggtaccttttaagctgttcaaggtcaagatgaatacaaactcaaaggaggttttatccctgggtgttcaagttcccgaggcatgggaagaacttctgacaatgaaagtggaagcaaaaagtcaccttcaatggcaggaatccagactgaaacgcagtaatccactggcaagggaaatcttccgaaggcactttcgacagctgtgctaccaagagacccctggaccaagggaggctcttactcgactccaggaactttgctaccagtggttgaggccacatgtgagcacaaaggagcagattttggatctgctggtgctggagcagtttctatccattctgcccaaggagctccagggctgggtgagggaacactgtccagagagtggagaagaggctgtgattttgctggaggatctggagagagagctcgatgaaccacaacatgagtcaaatcttgtctttttgtccccagatggtggcccacagacacagacaagaagtcctctgtaaagagatggtgcctctagcagagcagacaccactgacccttcagtcccagcctaaggagccacagctcacatgtgactctgctcagaagtgccattctattggagagacaggtganggacagcatttatttgatgttgaacgaatcccacctggtcaagcaaaaacaaacaataaacccagactgggaaaacaggagacccaaagacttcttaccagatagcagtaat

SEQ ID NO: 247037 - DNA, 567 bp, Homo Sapiens
ttcccgtgaagaagataaatatattttggaagctgcctgtgtcctctggggtgaaaagccagcatagagggccccaaacgcccaccctgccaacccatgccctcctctgacctcgctccctttctccccatagacccgccccacccccttctgtgtcgctgggcttcaggacaaggggcaagagaggcaaccagggagacaaggggaagtgtcttggggacagggggccacagcagttgtggccacatgggtaccccagggccgacgcagggccgacgggcaagaggctgttatctccagcctggcgtttccgggcctttcttgaggccaccatgggaatgtgatgtttgagagaggggctaggagagacagagacacacgcacctggggatcggcggtccggacaggggcagggaaaccacacgccctactttgccctttcctgtccatcccagacctactcagatccctcagtgcctaagaaaacaggacagtgaggactgggggttaggggacgggggttaggggcctgggcagggcccgtgagaggtggagggtgggaaagag

SEQ ID NO: 247038 - DNA, 922 bp, Homo Sapiens
ttggggaggaatctgtgctctacttacctctcaattcctggagatgccaacttcacagacacgtctgcagcagctggacatcacatttcatgtcctgcatggaaccagtggctgtgagtggcatgtccacttgctggattatcagccaggacactatagaacaggaccagctgagactaagaaggaccagcagagccagctcagctctgagccattcacacatcttcaccctcagtttcctcacttgaggagtgggatggggagaacagagagtagctgtgtttgaatccctgtaggaaatggtgaagcatagctctgggtctcctgggggagaccaggcttggctgcgggagagctggctgttgctggactacatgctggccactgctgtgaccacgacactgtctggggcagcttcttccacagtgatgcctactgatgcttcagtgcctctgcacaccgcccattccacttcctccttccccacagggcaggtggggaagcagtttggcccagcccaaggagaccccaccttgagccttatttcctaatgggtccacctctcatctgcatctttcacacctcccagcttctgcccaaccttcagcagtgacaagtccccaagagactcgcctgagcagcttgggctgcttttcatttccacctgtcaggatgcctgtggtcatgctctcagctccacctggcatgagaagggatcctggcctctggcatattcatcaagtatgagttctggggatgagtcactgtaatgatgtgagcagggagccttcctccctgggccacctgcagagagctttcccaccaactttgtaccttgattgccttacaaagttatttgtttacaaacagcgaccatataaaagcctcctgccccaaagcttgtgggcacatgggcacatac

SEQ ID NO: 247039 - DNA, 1305 bp, Homo Sapiens
  misc_feature (946)..(946): n is a, c, g, or t
  misc_feature (951)..(951): n is a, c, g, or t
  misc_feature (964)..(964): n is a, c, g, or t
  misc_feature (973)..(973): n is a, c, g, or t
  misc_feature (975)..(975): n is a, c, g, or t
  misc_feature (990)..(990): n is a, c, g, or t
  misc_feature (995)..(995): n is a, c, g, or t
  misc_feature (1002)..(1002): n is a, c, g, or t
  misc_feature (1016)..(1017): n is a, c, g, or t
  misc_feature (1025)..(1025): n is a, c, g, or t
  misc_feature (1041)..(1041): n is a, c, g, or t
  misc_feature (1048)..(1048): n is a, c, g, or t
  misc_feature (1057)..(1058): n is a, c, g, or t
  misc_feature (1063)..(1063): n is a, c, g, or t
  misc_feature (1071)..(1071): n is a, c, g, or t
  misc_feature (1076)..(1076): n is a, c, g, or t
  misc_feature (1083)..(1083): n is a, c, g, or t
  misc_feature (1092)..(1092): n is a, c, g, or t
  misc_feature (1097)..(1097): n is a, c, g, or t
  misc_feature (1106)..(1106): n is a, c, g, or t
  misc_feature (1114)..(1115): n is a, c, g, or t
  misc_feature (1118)..(1118): n is a, c, g, or t
  misc_feature (1121)..(1121): n is a, c, g, or t
  misc_feature (1129)..(1129): n is a, c, g, or t
  misc_feature (1133)..(1133): n is a, c, g, or t
  misc_feature (1135)..(1136): n is a, c, g, or t
  misc_feature (1141)..(1141): n is a, c, g, or t
  misc_feature (1157)..(1157): n is a, c, g, or t
  misc_feature (1161)..(1161): n is a, c, g, or t
  misc_feature (1164)..(1164): n is a, c, g, or t
  misc_feature (1175)..(1175): n is a, c, g, or t
  misc_feature (1179)..(1179): n is a, c, g, or t
  misc_feature (1206)..(1206): n is a, c, g, or t
  misc_feature (1211)..(1211): n is a, c, g, or t
  misc_feature (1216)..(1216): n is a, c, g, or t
  misc_feature (1225)..(1226): n is a, c, g, or t
  misc_feature (1230)..(1230): n is a, c, g, or t
  misc_feature (1237)..(1238): n is a, c, g, or t
  misc_feature (1242)..(1242): n is a, c, g, or t
ttggccgagatttgggagagacgctctgaactgactgccccgcatcaccggagcgtcccagctgcgaggagtgtaaacaggaacatcgataagtagtgtaaaaacttgcacaatgaaatccgaagccaaggatggagaggaggagagtctacagactgctttcaaaaaattaagagtggatgcatcagggtctgtagcatctctgtctgttggagaaggcacaggtgtcagagcaccagtcagaacagcaacagatgataccaaacctaaaaccacatgtgcatctaaagacagttggcacgggtctacaaggaagtcttcacgaggagcagtgagaactcagcgtcgtcgacgttctaagtctcctgtccttcatcctccaaagtttatacattgcagtacaatagcgtcttcttccagcagtcaactcaagcacaaaagccagactgactcacctgatggcagcagtgggctgggaatttcatcccctaaagagttcagtgcaggagaaagctctacttctctcgatgctaatcacacaggggcagtcgttgagcctttgagaacttctgttccaaggctcccatcagagagtaagaaggaagactcctctgacgctacccaagtcccccaagcaagtctcaaagccagtgatctctctgactttcaatcagtttccaagctaaaccagggcaagccatgcacatgcataggcaaggaatgccagtgtaagagatggcatgatatggaagtgtattcctttttcaggcctgcagagtgtccctcccttggctccagaacgaagatccacacttgaggactactctcagtcgctgcacgccagaactctgtctggctctccccgatcctgttctgagcaagctcgagtctttgtggatgatgtgaccattgaggacctgtcaggctacatggagtattacttgtntattnccaagaaaatgtnccacatggnanaaatgatgtacaccngatancaagaanctcattcatatgcnntaaacccntgaaagcttgtcaaanagaattngttaatggnngaacntgttgggnccttnttgtganaagaacacnctttntgtgactgnggttgtannaanaantctttggngctnanntaatnatcattattttaactnactnctntgaggattacnaccnctctaggggggcagcttatcaaaaaanacccntattntaaaaaatnntggngggggannaaanctccattacttacttgagactggcagcagtgggtatatggtaagaaggctaggagggggtcct

SEQ ID NO: 247040 - DNA, 432 bp, Homo Sapiens
aatgtttcatttgtctatggatttccacctgattactccagaaagtaattacttaagatggggggtgatttcagcatcacccaccctcctatatggccaggcctccgagcatgtacagtaaggcacagtcaccacaccttgggaagggcctccctgcaggtgtgcactgcaggcctcagccctgtgctggttagagttatggagcaacagccgctttcctaagcagaagtgaggcaagctacttccgcacagattgtgaaacagggtttaggtttctcccctcgtggacgagaggccaagggtgtgccccatcagcctgccttcccagcaggtcacagaccatccccactctggctggcctggaagggtttgaccacaccggatcatgcagtgaccagggccagggcggctggcaggggcggcctccgtttc

SEQ ID NO: 247041 - DNA, 690 bp, Homo Sapiens
  misc_feature (107)..(127): n is a, c, g, or t
ctggtcaggctggcttctgatgttcagtcccctgggccgggacagattttttttaacgtcttgaaacttaaactctgtgcttgtaggatactgtaacctttttgtcnnnnnnnnnnnnnnnnnnnnnaaacctccacctccagtggctgtgactggtcccagtgattatacgttattggttgctgtgggtctgggcgggcctgggagccagaaggcgccttattttttctctcctatgccaccccaggtggggagggagggaggtttcagactccagtttctcccttgcccttttattcccaagcctccttggccccagtataaagtgttgggaactctctgccagcttcctgagttctgcctaaagatggccccccagcactggttggggacaagggccaaattggtgaccaccagtcatgcctaggacctggggcccaaaagccgggcaacctctggctacaggggccattgggtgccctcccagttgagaggggccgctgtttcgccttgtccgtcagtgccagtgcctgtgccagaggtggcgaggtgagtcctccagagcttcctggccgggccctcctcctgcctgttctggctcctctgctcccacgctagctgtcccttttctgattctggtggatcctccctcccctaattaaagtctctttttgcccctttggggctgca

SEQ ID NO: 247042 - DNA, 625 bp, Homo Sapiens
cacatctctctgagacccatggtccatccccaacacaacttgcccagatcccagaacaatactgtaagttttgcctaaattccacctttttctggggctactccagttgcaaagtcttatgacagaatattccagaactcagtcatccaggaacgcatgtttcttcttcctccttgaggccagtttaaacacgcacgcgtaagaaaatcctccaagcaaacaatttgttgtcatgtgtcatctctgaacacaccactcattctttttcctcgggtcctgtgattttctttcttctctcttgggcagtgtttctctcatacacggtcctcactccccctgcatgcttcctggccccatccaccgccggcctgcagcttcctgcctgcttcaccctctccggctcactcccactcctctcctcccttctaggcagcagctgctgccttagtcctgatgaatggggcccagcccacacggggctctagctgggaccagataggcaggtgctggccaagctttccattagcccagtattctgaagctcacaccaggaagacaccagcagggacgccagccgctactcttctgctgcagatttacatgtaatacagagtcgacgcggccg

SEQ ID NO: 247043 - DNA, 103 bp, Homo Sapiens
agacattggaaagcgatggcgcgctgggtcggagaggtttggccacccagcaggaagattatcttcccgtgccatccccgcttccagctctgcatccacgccc

SEQ ID NO: 247044 - DNA, 821 bp, Homo Sapiens
  misc_feature (685)..(685): n is a, c, g, or t
  misc_feature (761)..(761): n is a, c, g, or t
  misc_feature (783)..(783): n is a, c, g, or t
  misc_feature (803)..(803): n is a, c, g, or t
ttgggacactggtaacatgtcccactcttggattagcaggggtgggtccaggaagatgatatttgcgtcttttgcccacccccctggcattcagctggacccaactaggccatcatgagtggcttctccctgtcatccccaggggtcataggatatctacaccgcctttctgaccccaccctgcactcccatcctttcctctctccccgttcatgccctgcactacatagcacagccgggatgcttggaacagaggccttggctgctccgcagtggcacagggcttccctctctcggggttggcttcttcccaggccttgcatgggccctgcccacaagcacaccctcaggccgagggtgcagactgatgctcttccctgatggagaccctgagatcttccccacccccaatcatgatgtcttcagtgtgggactggggtcctcttggttctgcctgcagcctgcctggctccgcccctagtgccccctcctcaccacactggccccaggtctcatgaggggtgtcctgggcagggaaggtcagtgtcactgatggtttgctgtttggaagccattggcagggctgccgtgcatgtggctgtgagggctgcacagtcctgccaaggggcttcctccttgttaccccgaaccttgtaatcgtgtgctggcgtggcagccctggctnaagttaatccccaccgctttcagtggtagaaagaattccctgagtggggccagggtgggtgccctcctcctaaccnggggttttctgagtgagctgcntgggagccctcatccctttnccagggttgggttggcct

SEQ ID NO: 247045 - DNA, 2831 bp, Homo Sapiens
  misc_feature (2149)..(2159): n is a, c, g, or t
  misc_feature (2277)..(2277): n is a, c, g, or t
  misc_feature (2518)..(2518): n is a, c, g, or t
  misc_feature (2529)..(2529): n is a, c, g, or t
  misc_feature (2539)..(2539): n is a, c, g, or t
  misc_feature (2555)..(2555): n is a, c, g, or t
  misc_feature (2613)..(2613): n is a, c, g, or t
  misc_feature (2665)..(2665): n is a, c, g, or t
  misc_feature (2717)..(2717): n is a, c, g, or t
ctgtgagagacccagcggtggatcgttctctgcgttctgtgttcgtggggaacattccttatgaggctactgaggagcagttgaaggacattttttctgaggttggttctgttgttagtttccggttggtatacgatagagagacgggaaagcccaagggttatggcttctgtgaataccaagaccaggagaccgcgcttagtgccatgcggaacctgaatgggcgggagttcagtgggagagcgcttcgggtggacaatgctgccagtgaaaagaataaggaggagttgaagagccttgggcctggtgcgcctgttattgagtcaccttatggggatcccatcggtcctgaggatgcccctgagtcgattagcagagcagttgccagtcttcccccggagcagatgtttgagctgatgaagcagatgaagctctgtgtccagaatagtccccaggaggcacggaacatgttacttcagaaccctcaactggcttatgctttgctgcaagcacaggtagtgatgagaatcgtggatccggaaattgccctgaaaattctgcatcgccagacaaatatcccaacgctgattgcaggcaaccctcagccagtccatggtgctgggcctggctcaggatccaatgtgtcaatgaaccagcagaatcctcaggcccctcaggcccagtctttgggtggaatgcctgtcaatggcgcacctcctctgatgcaagcttctatgcagggtggagttccagcaccagggcaaatgccagctgctgtcacaggacctggccctggttccttagctcctggaggaggaatgcaggctcaggttggaatgccaggaagtggaccagtgtccatggaacgggggcaagtgccgatgcaagaccccagagcagctatgcagcggggatccttgcctgcgaatgtcccaacccctcgaggcttgttaggagatgctccgaatgatccacggggaggcactttactttctgtaactggagaggtagagcctagaggttacttgggaccacctcatcagggtccacccatgcaccaatgtccctggccatgagagccgaggaccacccccatatgaactgaggggaggggcattacccgagcccagacctctaatggcaagaaccaagaggacccatgctagatcagaggggtccacccttggatggcagaggtggaagggatccccgaggaatagatgcacgagggatggaggcccgagccatggaggcaagagggttagatgccagaggattagaggcccgtgcaatggaggcccgtgcgatggaagctcgtgcaatggaggcccgagcgatggaggcccgtgcaatggaagtccgagggatggaggccagaggcatggataccagaggcccagtgcctggccccagaggaccctatacctagtggaatgcagggtcccagtccaattaacatgggggcggttgtcccccagggatccagacaggtcccagtcatgcagggaacaggaatgcaaggagcaagtatacagggtggaagccagcctggcggctttagtcccgggcagaaccaagtcactccacaggatcatgagaaggctgctttgattatgcaggttctacaactgactgcagaccagattgccatgttgcctcctgagcaaaggcagagtatcctgattttaaaggaacaaatacagaaatccactggagcaccttgataggttttcaaaaatacctggcaagaaatctggaaattctataattttgttgaaatattgaaaaaagatgacctgcatcctaacccttgaatgactcatatcagtgccaggtggaggactcccatcaaccttctctcagaacaaaatcacttcattttattgtcttagtttgtatattttctgtgacttgaaataaactttgaaccccagggaagcgagggcgcgggcgaggaggaacatggccggcccgcctccggccctcggagaaacctttcctaggaccatttctgtttgcgccgcgccgggccccaccgaaggtagacccgaacactggttccctaatcttgggtccccgaagggagatcccgtgcggccttggaccaaggggccggggcgatctcgtcccccccaccaaaacaaaccgnnnnnnnnnnnggtcatacccacaagcccttgtactgcaacccggagtcccccggaatgcggaacgcttcgttgaaaggggtgcaatttaaccccggcgaacggcgtcttcgcaaacgctccgcgattnttctcccaaagcgccggaacgcactcccgcgactgactgagtgaagaatttgaacgccgcgcacgacgccaggcagcccctctaggcgcggaggtgtctgcaatcgggagacgacggccgacccgccggtgctggcagaacaatgcgtgcacaattcaaagaggcgccctcttctctgtcggccccacgagacacagatgcggtcgacgagggtccacactctccaatctctcgagagcgngtggacgaccntccgctacgncggaaagaagacgcancgactacaactcctgtggcgacacagcgcgcgtgacatgtgcgtcactaacgaagacnacgcgactatcacgtgatccgcaccgcgctccgctctccgcgcgatacgagnctcacgagagcaagttctatatctctcgcgccccgcgctatcggcgatatantaagaaccacacaccctctgcgtgtgcgagccctccgcaaatatatagacaagacgactcttgtcacgtcgacgcgcaccgcgatagttatggccgcgcgcacccgcatgcggt

SEQ ID NO: 247046 - DNA, 1012 bp, Homo Sapiens
ttggcatcaagggccccactcgaaccccctacgaggatggcctctacttgtttgacatccagctccccaacatctacccagccgtgcccccccacttctgctacctctcccaatgcagtggccgcctgaaccccaacctgtatgacaatgggaaggtgtgtgtcagcctcctgggcacctggattggaaaggggacagagaggtggacaagcaagtccagccttctccaggtgctcatctccatccaaggtctgatcctggtaaatgaaccatactacaacgaagccggcttcgacagtgaccgaggcctgcaggaaggctatgaaaacagtcgctgttacaatgagatggcgctgatccgcgtggtgcagtccatgacccagctggtgcggcggccccccgaggtctttgagcaggagatcaggcaacactttagcactggtggctggcggctggtgaaccgtatcgagtcctggctggaaacccatgccctgctggagaaggcccaggcactgcccaatggggtgcccaaggccagcagctcgccagagcccccagctgtagccgagctgtcagactccggccaacaagaacctgaggatggagggccagccccaggagaggcctcccagggctcagactcagagggcggtgcccagggcctggcctcagctagcagggaccacacagaccagacttcggagaccgcaccagacgcatcggtgccacccagtgtgaaaccaaagaagcggagaaagagctaccggagcttcttacctgagaagagtggctaccctgacatcggcttccccctcttcccactttccaagggtttcatcaagagcatccggggtgtcctgacgcagttccgggctgccctgctagaggcaggcatgccggagtgcacagaggacaagtagctgccaggcacagaggaaagagcatcaccgtgggagaggccagccgccgcctgctcaactcccccccggaatcacccctcttcccatgccca

SEQ ID NO: 247047 - DNA, 822 bp, Homo Sapiens
gctggttaccggtcggaagttttgggatatcgtcgacccacgcgtccggcccgggcctagggagaggcgcggcggcggcgggagcgcgaacggctggagctggccttcttcgccttctcctcggctgtggagccctggtggggggtctgcgcccggtcaccatgacgacgccggcgaatgcccagaatgccagcaaaacgtgggaactgagtctgtatgagctgcaccggaccccgcaggaagccataatggatggcacagagattgctgtttcccctcggtcactgcattcagaactcatgtgccctatctgcctggacatgctgaagaatacgatgaccaccaaggagtgcctccacagattctgctctgactgcattgtcacagccctacggagcgggaacaaggagtgtcctacctgccgaaagaagctggtgtccaagcgatccctacggccagaccccaactttgatgccctgatctctaagatctatcctagccgggaggaatacgaggcccatcaagaccgagtgcttatccgcctgagccgcctgcacaaccagcaggcattgagctccagcattgaggagggcgctacgcattgcaggccatgcacagggcccagcgtgtgaggcggccgataccagggtcagatcagaccacaacgatgacgtgcggggggaaggaggagcccggggagggacgaaggggatggagacagatgtgagctcagactccggccctgaactcagcctcaaggacctgatccccaagcgacgcccgtggagggggcgcaacggagggaacacgcgtacgggaaag

SEQ ID NO: 247048 - DNA, 994 bp, Homo Sapiens
  misc_feature (222)..(284): n is a, c, g, or t
  misc_feature (582)..(599): n is a, c, g, or t
  misc_feature (770)..(770): n is a, c, g, or t
  misc_feature (791)..(792): n is a, c, g, or t
  misc_feature (804)..(806): n is a, c, g, or t
  misc_feature (825)..(825): n is a, c, g, or t
  misc_feature (840)..(840): n is a, c, g, or t
  misc_feature (842)..(845): n is a, c, g, or t
  misc_feature (848)..(849): n is a, c, g, or t
  misc_feature (851)..(851): n is a, c, g, or t
  misc_feature (881)..(883): n is a, c, g, or t
  misc_feature (979)..(979): n is a, c, g, or t
ttggcaaacccatgtataggagatggtgggagcagtttgttcaagatgtcccggtcgacgttttggaagacatctgccaccaaatcctggatctttactcacaaggaaaacaacagatgcctcatcacaccccccatcagctgcaacagcccccatctcttcagcctacaccacaagtgccgcaagtacagcagtcacagccgtctcaaagctccgaaccannnnnnnnnnnnnnnnnnnnnnnnnnnnnnnnnnnnnnnnnnnnnnnnnnnnnnnnnnnnnnnaagaaaccctctccgcagcccagttctccccgacaggttaagcgagccgtggttgtttctcccaaagaagagaacaaagcagcagaaccaccaccacctaaaatccccaaaattgagaccactcatccaccgttgcctccagcccacccacctccagaccggaagcctcccctcgctgctgccttaggtgaggctgagccgccgggccctgtggatgccactgacctccccaaagtccagattccccctccggcccacccggcccctgtgcaccagccaccgccgctgccacaccggnnnnnnnnnnnnnnnnnntccagctacatgaccgggatgtccaccaccagctcctacatgtctggagagggctaccagagcctgcagtccatgatgaagaccgagggaccctcctacggtgccctgccccccgcctacggcccacctgcacacctgccctaccacccccatgtctacccgcccaaccgntccccgccacctgtgcctccnnccccagcctccnnncccccacctgccatccaancccctactcctggcnannnncanncnccacccacctacaaccccaacttcctaccnnnacccccacgcctcccgcctacccacgcagtcccccctcatcctcctgcagggttgggcctgccgccagccagctacccacctactgccgtcccccntgggagggacagcct

SEQ ID NO: 247049 - DNA, 1154 bp, Homo Sapiens
tgtattcagttgttcatgttgcttgcgcatgcttcaaagcttaaaccattagtttagggatatgcacagatactgatgacttcacatcacgatttccaaacacaaactgccatagggtcgagctaaaataaaatttgaggccaggcacgggggctcacgcctataatcccggtgtttgggaggccaaggtaagaggatcacttgaggccagcctgtataacatacggagatcttgtctctactgcttgtggtcctagctatccgcgaggctgaggcaaaaggaccgcttcagtccaggaatttgatgctgcggtaactatgatcgtgccactgcactctggcctgggtgacagagtgagcctgtctctctcttaaaaagtaaataaatagtatctgaaagtgccacaaatggggcgttttgcccaggagaggcatcaccagcacctgtgcccatctgcccaacgtgaccactctgaagaggacggtgactgctggacagatgagttttggacatatataacctctcaatgtctattctgtattcacatcttagtgacttttttcaacaatcaaaggtaagatttaaattgagtctgtagcatttgagagagaaaagcaaaattgaagggctgagaaaacaataaacatttgggtatctgcaatacatgctgttatctagggacatttctgcttcctcccagaatcagttttccatacttagtgagtggggtgtgtttgtttctcccactagacggatgttaattctttgcaggcagtaactatattttcttcatgtttacatctccaaatccttgcaagcaagtagcacctattaacagtcaaataactactgtttggtgacctcagagttgtttaagatggtacatttacaatctggaattggtgaggagatgaatatcctcaactgtgtgagaatgttacatgaatgatgaaaagcacctgtctgcattacagtgtacataaggccatatccacagggcttatgtcgactgactttgcccaagttaattgcaacctaaatacttaaaacagtatcaagaatcacatttaagctgggcgtggtggctcagcctgtaatcccgcactttgggagccgagatgggtgatcaccatactccgcgggatcctctaga

SEQ ID NO: 247050 - DNA, 322 bp, Homo Sapiens
tctaccccatctccttgccgggtcagccctgacaaaggtcagctagccccttgaggacatcagctttggcctcagggtcctaatggcagcagaaccactgacagagctagaggagtccattgagaccgtggtcaccaccttcttcacctttgcaaggcaggagggccggaaggatagcctcagcgtcaacgagttcaaagagctggttacccagcagttgccccatctgctcaaggatgtgggctctcttgatgagaagatgcagagcttggatgtgaatcaggtccagatgcaggagttcaatgaactggagcatctggac

SEQ ID NO: 247051 - DNA, 1338 bp, Homo Sapiens
ttggattttaaagcctgaggtgaagttattttttgatccatttaaagtaatcaacctctctgtccttccattagtctggatcgtctaaagattgttttatttttagaggctcatccggtcagatgttagtgatgtgaaatttcaggccaggcgtgacgtcagcgtggcatttgaaacagctccatgttgcccttagtgctgtctgaccgaagcctgtctgtcctcagatataaagatgaagcgcagctgtataaagaagagcacctgaggaatcggcagcaccctcactgctacgttcagtacatgatcgccatcatcaacaactgccagaccttcaaggaatccatagtcagtttaaaaagaaagtatttaaagaatgaagtggaagagggtgtgtctccgagccagcccagcatggacgggattttagacgccatcgcgaaggagggctgcagcggtttgctggaggaggtcttcctggacctggagcaacatctgaatgaattgatgacgaagaagtggctattagggtcaaacgctgtagacattatctgtgtcaccgtggaagactatttcaacgattttgccaaaattaaaaagccgtataagaaggtaagaaggtgggacctagttccctcatcaccttgacgctagggctcacctctcaccctgctcagaattcagcatccagcgagtccctccgtgagtgaacgttcacttgttgtcctatcagcccaggggaggcaataggctctgcggacgccacctccctgggacggggctctggtgagaatggccggggccctgtggcatggccctcgaggtggagggagccatggttcccggagaggcccgcgtgccccgtcttagctccttgccttccactcactccctgagggcccagggacttctttccgcttcagaccctccttcctgcaggacccaggttcctctttcctccaaagtgcctgccgcgttttccagatgctgcggtcgttatcaaaggacagcagcagccactgacacgggcctgtctgtggaccgagtgctcatgcgcggcactgcctcgcccgcgtctgtcctgctgggggccggagctggcctggtgcgggggtccaggtcaccgtcactgttcccccactgagcccccgctcctcctctgcggtgagatgccagagccgtggcggagcgaggaggagtgggctcagagcctccggggagccaccgggagccccagcctgggtttcaatgagggtgctcctggccgccagagccgtggagcctgccgctgaccgcgcgtgtctccccgaggatgacggccgaaggcgcaccggcgcg

SEQ ID NO: 247052 - DNA, 442 bp, Homo Sapiens
  misc_feature (15)..(15): n is a, c, g, or t
  misc_feature (49)..(49): n is a, c, g, or t
agctgcttcccctgnagcccaatttgagtaccagttctgccaagcccanagtgagccccctaatattactttcagattgtctgtgacactcaaagccccctctcatttttatctgtctacctccattctgaagagggaggttttggtgtccctggtcctctgggaatagaagatccatttgtctttgtgtagagcaagcacgttttccacctcactgtctccatcctccacctctgagatggacacttaagagacggggcaaatgtggatccaagaaaccagggccatgaccaggtccactgtggagcagccatctatctacctgactcctgagccaggctgccgtggtgtcatttctgtcatccgtgctctgtttccttttggagtttcttctccacattatctttgttcctggggaataaaaactaccattggacctaga

SEQ ID NO: 247053 - DNA, 487 bp, Homo Sapiens
  misc_feature (17)..(17): n is a, c, g, or t
  misc_feature (84)..(84): n is a, c, g, or t
  misc_feature (175)..(175): n is a, c, g, or t
  misc_feature (440)..(440): n is a, c, g, or t
cctattttccaattgtnaaactttgctatttttgatgctctcagttgtccaaaacttcaatacaacaaaaatctgggtaatggntctgtccgaaaaccgaccgacccggttgtattggtccaccacttgtcctgggactgtctcactctgtctgtaagtcagttccattcccggntacaccgagtcagttcctgggcgctgattggtccagtttatctgtctccacggttgagcagtgtacaagccagaagatacctgaaattcctgcagatgttgtgggtgcccttctgttcctggaggattatgttcggtacacaaagctacccagggagggttgctgaagcacatgtgcctaatttcatttttgatgagttcagaacagtgctgtaactgtttttctacttcttcaatggaaggattgtcttagatcttccaccatnacaaatgaatttgagatgaaagaacttagttgctatcaactgaattt

SEQ ID NO: 247054 - DNA, 989 bp, Homo Sapiens
  misc_feature (806)..(806): n is a, c, g, or t
  misc_feature (892)..(892): n is a, c, g, or t
  misc_feature (945)..(945): n is a, c, g, or t
ttggctgttgcctctcctgcccctccaggccactgagtgttttggccacttggaggacctgggaggagggagtgtgtcctttgagcaagaggaggaactcctggtgcctttctgagcctgcgtgggagaaccccaattctagcactccaggaaactgtgggagagtgtggggcaggctccgtcctccctgggagacccctccagccaccgggtgccacttaatgccaacagcccttaccaaagctgggagccccattgccccggcagctctggcctgtggttccagaagctgagaaaactccactggggcttgcagaatccagggttcacctaagctgcacagttcctgcagctttgccagccccctgaaagtcttgtgtaccccacctctgaagatgctgggggaggcagctgggatgggagccagccccatgcctgtctgtgaccccacagtgggtgagagcccgtcacagtcctgggtgtggctgctctggaagaattatgaggcagccataataagagtcttcagagagatgatgggaggggccagtgaggacaggaacagagagtagatgtcctataataaaggggcttctgggaggtgcctgggcacagatgtctgttcagcaggtgtgtgggcctagaggagagagcagagcccagaaatgtcttttgcaggcccacgttctgacttgaagctttcgtgggcatgttgccattgggttttgcccttgcaaaggcttcctaggtctccagtggcccctcaggacccagggtcccagctgctgctttggggatgtgcactngctggccgccggcccttgcagtctctctaccctgggggaaggacagtgggcttctcagagcctgggggcatacagaaagaaggcangaagttgaatttttggtggtggggggtttggggggttttcttttgtccccccnagggggaacgggtcccggggttcccccctttaaccccctcctgg

SEQ ID NO: 247055 - DNA, 1198 bp, Homo Sapiens
  misc_feature (132)..(175): n is a, c, g, or t
  misc_feature (315)..(359): n is a, c, g, or t
  misc_feature (778)..(795): n is a, c, g, or t
  misc_feature (1070)..(1124): n is a, c, g, or t
ttgggaagtgatgtccttttataaaatgccttctcccccttcccgcctacagtctcttcctctccccttagaggggggaaagtgtataaacctacagggttgtgagtctgaaaagaggatccccctcacgcnnnnnnnnnnnnnnnnnnnnnnnnnnnnnnnnnnnnnnnnnnnnacacagatcctggcacactgtggatatttcttgcagattggagtctcttgtggcccaaacaggttaggtagactatcgcttctggcaggtgccatcttttggtaccaatatgttctgaggtgttaggatttgggttgggnnnnnnnnnnnnnnnnnnnnnnnnnnnnnnnnnnnnnnnnnnnnnctccttttaaagaaaagctaaaggccgctgtgagtcctggtggcaggctctccatggatgtagcatatcgaagataatttttatactgcatttttatggattattttgtaatgtgtgattccgtctgctgaggaggtgggaggggctccagggaaagccacccaccttcagtgaggttgctccccagctgagcgcaccgggcatgggatgtggaggctggcgacacaccctgtgcctctccaaggctgggcgcgtggggcgtccagagtctctctgggtctcagatgtccatctgccacctcttgttaaggctctagccagaagggagggtgagggtagaagaaagttattcccgaagaaaaaaagaatgaaaagtcattgtactgaactgtttttatatttttaaaagttactatttnnnnnnnnnnnnnnnnnncccagggcatgctgcaccatctctgcgatgtactggttgatgaggatgatgccagtgtcatcccggtttagaaattgccggaaagtgtcttcgatctcatttgatggtcgtatccttctccaccccaggaaattgggggtggcagctctttgttaagctccccttatgctgccccaccagaaacccgtccacggggttccttgtctcttgatcactgcggatgaacttcccttttttcccccccattccttgcaagcccgggcagaaagctccannnnnnnnnnnnnnnnnnnnnnnnnnnnnnnnnnnnnnnnnnnnnnnnnnnnnnncgtacacaaacccaacaaaagacactttaacaaaaaattttccccacccggcctgtaattttctcctcccacaa

SEQ ID NO: 247056 - DNA, 270 bp, Homo Sapiens
ttgggagctggcggggtccgtggtgcgggatcgagattgcgggctatggcgccgaaggtttttcgtcagtactgggatatccccgatggcaccgattgccaccgctaagcctacagcaccaccagtattgccagcgtcgctggcttgaaccgccgctgcctacagagtcacactcaatcctccggggcaccttccttgaaggagtggctaaggttggacaatacacgttcactgcagacacttgcagttagcgcccaagatgctcctgct

SEQ ID NO: 247057 - DNA, 446 bp, Homo Sapiens
cataaagagcgcaactttgtacaaaaaagttggatcgagattgccggttgtaaaggcgccgaaggtttttcgtcagtactgggatatccccgatggcaccgattgccaccgcaaagcctaccgcaccaccagtattgccagcgtcgctgttagggactgaaggttggagaagcatattaactgctccagggtcatttgaagcttggctgcaagtccaggtcggctgacctgctcctaggggtctcttaagcaaggaatgttcccatcaggcctgaccgccgctgcctacagagtcacactcaatcctccgggcaccttccttgaaggagtggctaaggttggactatatatctttcactgcagctgctgtcggggccttgtttggcctcaccacctgcatcaacgcccatgtccgcgagaagcccgacgaccccctgaactacttc

SEQ ID NO: 247058 - DNA, 1053 bp, Homo Sapiens
ggactctggcgggtgaaggtgtgtgtcagcttttgcgtcactcgagccctgggcgctgcttgctaaagagccgagcacgcgggtctgtcatcatgtcgcgttacgggcggtacggaggagaaaccaaggtgtatgttggtaacctgggaactggcgctggcaaaggagagttagaaagggctttcagttattatggtcctttaagaactgtatggattgcgagaaatcctccaggatttgcctttgtggaattcgaagatcctagagatgcagaagatgcagtacgaggactggatggaaaggtgatttgtggctcccgagtgagggttgaactatcgacaggcatgcctcggagatcacgttttgatagaccacctgcccgacgtccctttgatccaaatgatagatgctatgagtgtggcgaaaagggacattatgcttatgattgtcatcgttacagccggcgaagaagaagcaggtcacggtctagatcacattctcgatccagaggaaggcgatactctcgctcacgcagcaggagcaggggacgaaggtcaaggtcagcatctcctcgacgatcaagatctatctctcttcgtagatcaagatcagcttcactcagaagatctaggtctggttctataaaaggatcgaggtatttccaatccccgtcgaggtcaagatcaagatccaggtctatttcacgaccaagaagcagccgatcaaagtccagatctccatctccaaaaagaagtcgttccccatcaggaagtcctcgcagaagtgcaagtcctgaaagaatggactgaagctctcaagttcaccctttagggaaaagttattttgtttacattattataagggattttgtgatgtctgtaaagtgtaacctaggaaagataattcaaccatctaatcaaaatggatctggattactatgtaaattcacagcagtaagataatataaattttgttgaatgtattaacatcatatggtctgaaaatgtgggtttttatttggcacatttaaataaaatgtttctaactagaaaa

SEQ ID NO: 247059 - DNA, 1024 bp, Homo Sapiens
ttttatttggcacatttaaataaaatgtttctaactagatttttgatttgtgttcaatattaacacttcttaatttgatatatttgagagtcagacattataattgttaaccttattcatacatacctacattcagaattgaaaggtgttggttaagtcttgaacatcactattctatgcataaaacttggccaggatcttaagggactttgaaaattccatcttacccttgtagctctgggtaagatgacctgagtcccttatgatacagcctgaatgcatcatgacagatccttaagttagctaatccgtttgaagttggtgttagtaggtattggtatgatcagtggtgaagcaagtaggaccactgatgtgtctaaatgagcatgacaggaactaaacgaaactgattaaatgtatgagaaatagaaactgatttctggatgatctttatactaattgcagctttcaggctactaggtggcatagtgttaattaggactccccaagatatggggagttctactctcaatggtcttgtttctttgctttctacattagttaaccagttttataccaaaaaatgcatgtttgaggaattgtctgaacttgggacaaaacaccttcatgtaaaccagctttgcaaaattttccagcccagatactcttcatctattcaaatggattgtcttattctgagcaaagacctgttgttaatcttcaagctaggttttgcagttcccaaccacaacattcttctattttgccaggctggtgcaaagtaattaaagatgtcaatcagaaatgtcaatgagactaaagtggttttgtaaatctcagctatatttagcaacactccatgtagctaatattttttggtagcatctggtagaccttagaatgttacatagccagtaggttctttattcaaattttaagtatcttaagaatagtagggcagtaacagttacttttgagagttttctggtcaagcttttaccaggcattctctagcccttggtac

SEQ ID NO: 247060 - DNA, 444 bp, Homo Sapiens
ttcggaaggccagaggaaacctggagcttaggcctgggggagcccatccaggaacatgcagtcccagcagaccaggctcctgagaagaactttcagccaataaagcttgtgcttcccccaccgaggtcacgctgtctctttgttccaagtgtggttcctatttattgaggaagaaagagctgtctggccaaaggaaatctattttttcccttcatgttttctctctgaaagttggcttgagagttgttgtcagaaaggtgcaggtgctccacaaacgggtggtaaaaaggcctcgagctcttggatgttgtatttcagatcaggggcaggcaccggagttgaggctgtgcgccttggtgggcttcacgtcttcccctggatttgcttagtactcagccagtgccacagtttgaagattctcattaaatgattcatttcatttca

SEQ ID NO: 247061 - DNA, 750 bp, Homo Sapiens
  misc_feature (661)..(661): n is a, c, g, or t
ccttccaacatctcatttcttcaccccctgtgagtgtctagggttgtcctgggtgcctggggctgactgtggcagaaatctggggaaggctggagagaagctgggagacccaggagagtccctgaagacagggggtgaagaggtgaaagaaatgggggagggttgcagtaaggtccgtgagtttgtaggtgattcctgggtgcgggaagctgactccaggtgaaatctggagatggttggagagtagctgagagagacaagaagagtccctgagggctgggggtgagaacatgagggagacgggggagtaagtcagtgaaattcgtgagttcggtggtgtatcgtgggtgcctggaactgactccagctggaatctagagaagttttgagagtagctgaaggagacacaagagtccctgtgggctgaggctaaagacctgagacagaccagggaggacctcagtgaagtctgtgagtctgtaggtgattccggagtgtgggaggctgactcccgctgaaatctgggcgtggtgggggagtagctgggacagacaggagagtcccagggggctgggggtgaagacatgagcgagaccggggagtaactgagtgaaactggtgagtttggtggtgactccggggtgcctggaactgactccancagaaatgtgggcatggttggagagtagctgggacagacaggagagtccctgaggactggtgaagacatgagagagcaccaccaataca

SEQ ID NO: 247062 - DNA, 839 bp, Homo Sapiens
tgagcgttgtttaaaaagcaggctggtacggctccggaattccgggatatcgtcgaccacgcgtcgggcggatggagcccgcgatggagccggagactctggaggcgcgaatcaatagagccacgaaccccctgaacaaggagctcgactgggccagcatcaacggcttctgcgagcagctcaacgaggactttgaggggcctccactcgccacccggctgctggcccacaagatccagtccccacaggagtgggaggcgatccaggccttgacggtgctggaaacatgcatgaagagctgcggcaagcggttccacgacgaagtgggcaagttccgctttctcaacgagctcatcaaggtcgtgtctcccaagtatctgggctctcggacatcggagaaggtgaagaacaagatcttggagctcctctacagctggacagtgggcctgcccgaggaggtgaaaatcgcagaggcctaccagatgctaaagaagcaggggattgtaaagtccggcccccaagcttccaagatgacactacctttccccttcttcctccacggccgaagaatgtgatctttgaagatgaggagaaatccaagatgctggcccgcctgctgaagagctcccatcccgaagacctccgcgcagcccaataaagctcatcacaagagatggtgcaggaggaccagaagcggatggagaagatctcgaagagggtgaatgccatcgaggaggtgaacaacaatgtgaaactgctcacggagatggtgatgagcccacagcagggcgggcgccagttggcagcacgagccttatgaagaactgtccagctgtgag

SEQ ID NO: 247063 - DNA, 1075 bp, Homo Sapiens
ttggctccaagaagggcaaagctcgcctgagccctcgaagtgtgggcgtcatctccccgtaccggaaacaggtcaggtcctcagttaccagcaagggtggggcccctcccccagatggtacctccttaatatccagaccactaggcagaggctccaggagcttaggcctctgctggctccgtatctcagaagagcaccaaggtcagctgccgcctccctttgttccccagctccctggcctcctgccaggctccctcttgcattaggttaatggcacgagagaaaggcacctgtcccctccttccaggtggagaaaatccgttactgcatcaccaaacttgacagggagcttcgaggactggatgacatcaaggacttgaagaacactttgcaggccccagccctcagcaggattcaaccttcatgtttcagcttccacagcctacctcccatcccctttccctgggccgtgtcgcagcactggttcactcactgatctacaattgcccagtgacctctctgtaccctccttggaaggcaagctccctggggtagggcacccctttgacacccctggctggtctcaggccctgcctctttccccactaggtgggttcagtagaagaattccaaggccaagaacgaagcgtcatcctcatctccaccgtgcgaagcagccagagctttgtgcagctggatctggactttaatctgggtttccttaagaaccccaagaggttcaatgtagctgtgacccgggccaaggccctgctcatcatcgtggggaacccccttctcctgggccatgaccctgactggaaagtgtgagcattcccaccccattctccctcttagtggccacagcccctgcctagggcaggtggatcttttttaagcgcttgcttatcgctcagttaatcctcagatgtgtccattttcacagcatcactattgtatttataagttaaatgacatccagaggttgagcaagtacagctcagatgggacaggaccgtggcttagccctccagtctctgctggcactcctctgtaccccacagattcttggagttct

SEQ ID NO: 247064 - DNA, 860 bp, Homo Sapiens
  misc_feature (164)..(194): n is a, c, g, or t
  misc_feature (232)..(285): n is a, c, g, or t
gattctattcccacagaggaaggcctcctccatcccgggttcctccaaaaccactttcagaggataaatcagccactgctttccgaacaggacccctccgtgggacaaaagagccaggtaggagaggatgaagtgagaaatcttgggatgaaaacagggcacannnnnnnnnnnnnnnnnnnnnnnnnnnnnnnggagcccagtgtgatagaaaatgggcatgaaacctaannnnnnnnnnnnnnnnnnnnnnnnnnnnnnnnnnnnnnnnnnnnnnnnnnnnnngagggagtaagatcactcaaaggtgaaggggtcctgggtgctgaaaaagaagtgtccatccatgtggtcctccagggcatccttgtcactctcagcaggaaagcgctccttacagataggacactccttccatgtgggggtggcagggcccccagtgctggtttctgacagggtacccactgtaaagccactaagagagacagaggggaaagggagagggtcggcgtgctctgttcccttcttgacttgcagacttcggagagcaggacccatgtgcctgggttcccaggttatcctgtgcctaatgcagcatcctggcctctcccacagcgtctttctccccacaatcctggaaggcttatttttccagttccccatgtcctctcttctttagtccctgctggtctctgcagtgcagagcccatcccccagcctcctgctctcctccctccatctccgtctgctgcctaatgaggctgaaaatgagtctgacatcgtccttcatcttcctgctccagccgagaaggatgacagcatcaccccctccctgccctgagcccatctcacatccccaa

SEQ ID NO: 247065 - DNA, 705 bp, Homo Sapiens
gtcagcgccaaggaaaagaagcttatccaacgccaaccaaagattcgcatcagccatctcttagtccagcaagtcctcatagccagggttttgaaagagggaaggaagatatttctcaaaataaagatgaatcttcactttctatgtcaaagagcaagtctgaatctaaactttataatggctcagagaaggacagttcaacttcaagcaaactcaccaaaaaagaatctcttaaggtacaaaagaaaaattaccgagaagaaaagaaaagagccacaaaggagctgctcagtacaatcacagatccttctgttattgttatggctgattggttaaagattcgtggtactctaaagagctggaccaagttatggtgtgtgttgaaacctggggtgctactgatctataaaaccccaaaaaatggtcagtgggtaggaacagttcttctgaatgcctgtgaaatcattgaacgtccatcaaaaaaggatggcttttgtttcaaacttttccatcctttggagcaatctatttgggcagtgaagggtccaaaaggtgaagcggttggatccattactcaacccttacctagcagttatttgatcatccgagctacttcagagtcagatggaaggtgctggatggatgctttggagttggctttgaaatgttctagtcttcttaaacgtacaatgatcagtatcccta

SEQ ID NO: 247066 - DNA, 500 bp, Homo Sapiens
cgcggcgaagagatacatgaggctgagctgtttccggttcctgacagtactgtccatctgcctgagcgccgctggccacggccacgggggccgagggcaaaagggaagctgcagatcggggtcaagaagcgggtggaccactgtcccatcaaatcgcgcaaaggggatgtcctgcacatgcactacacggggaagctggaagatgggacagagtttgacagcagcctgccccagaaccagccctttgtcttctcccttggcacaggccaggtcatcaagggctgggaccaggggctgctggggatgtgtgagggggaaaagcgcaagctggtgatcccatccgagctagggtatggagagcggggagctcccccaaagattccaggcggtgcaaccctggtgttcgaggtggagctgctcaaaatagagcgacgaactgagctgtaaccagactggggaggggcagggggagaggcccccatcagggaccagactgttcc

SEQ ID NO: 247067 - DNA, 504 bp, Homo Sapiens
  misc_feature (59)..(59): n is a, c, g, or t
  misc_feature (412)..(412): n is a, c, g, or t
  misc_feature (418)..(418): n is a, c, g, or t
  misc_feature (435)..(435): n is a, c, g, or t
  misc_feature (476)..(476): n is a, c, g, or t
  misc_feature (491)..(491): n is a, c, g, or t
tggatcctgaaggggatgcccagatcgatcccaactgggtggtcctgaaccagggcatngagattgtacagaccatgaacagtgatcctggcctggcagtggggtacacagcttttaatggagttgacttcgaagggaccttccatgtgaatacccagacagatgatgactatgcaggctttatctttggctaccaagatagctccagcttctacgtggtcatgtggaagcagacggagcagacatattggcaagccaccccattccgagcagttgcagaacctggcattcagctcaaggctgtgaagtctaagacaggtccaggggagcatctccggaactccctgtgggcacacggggggacaccagtgaccagggtcaggctgctgtgggaaggactccagggaatgtngggctnggaagggacaaggtgtnctacccgctggttcctacagcacaggccccaggttgggttnacattcagggtacgnttttattgaaggg

SEQ ID NO: 247068 - DNA, 650 bp, Homo Sapiens
gcttttttataatgccaactttgtacaaaaaagttggatcgcgactatgggagctccggggggaaagatcaaccggccccgaacggagctgaagaagaagctgttcaaacgccggcgggtgttgaatcgggagcggcgtctgaggcaccgggtggtcggggctgtgatagaccaagggctgatcacgcggcaccacctcaagaagcgggcgtccagtgcacgtgccaacattacactgtcagggaagaagcgcagaaaactcctccagcagatccggcttgcccagaaagagaagacagccatggaagtggaagccccttcaaagccagccaggactagtgaaccacagctcaaaaggcaaaagaagacaaaagccccccaggatgtagaaatgaaggaccttgaagatgagagctaaacctcttccactagaagattctcaactggagccagccttcagactcagtggttgtttcagaggactttgacaaaagcaaggccccttttcactctccagatttcctcctacctaatggcctactgacctcccctagagggatgtctttgggagggaagaaggtacagaagaaagattggagaagggtctctctagcattcaactccatttgtaataaagccctagcactctg

SEQ ID NO: 247069 - DNA, 1038 bp, Homo Sapiens
cgtaaggccaactttgtacaaaaaagttggggcaccttcctcgttagagaccttgtgatgctggatgcagcctccaaggatgagttggaggtagggttggaaccttcaccccatccccattttcctcgcagaatggatacatcaattttgacaagcggaggaaggagtttgcagtcctttctgagttgcgacggctccagaatgaatgtcgtggctataacctccaacctgaccatgatatccagaggtggctacaggggctccggccactgacagaggctcagagccatcgtgtatcctgtgaggtggagccacctggttccagtgaccctcctgccccacgggtgcttcggccaacattggtcatctcgcagtggacagaggttttgggctctgttggggtccctaccccgcttgtgtcctgtgaccggcccagtactgggggagatgaggcgcctacaactcctgctcctctgctgactcggctggcccagcacatgaagtggccatctgtctcgtcactagactctgccttggaaagcagtccatccctgcacagtccagctgaccccagccacctctccccaccagcctcctcccctaggccttctcgaggtcaccgccgctcagcctcctgtggctccccgctgagtgggggtgcagaagaggcctccggggggactggatatggggggagagggatctgggccagggcctctgattgccgtatcatccgagtccagatggagttgggggaagatggcagtgtctataagagcattttggtgacaagccaggacaaggctccaagtgtcatcagtcgtgtccttaagaaaaacaatcgtgactcctgcagtggcttcagagtatgagcttggtacagcttgctacccggggagcgaagagctgaactatcccaggttcggctaatgtattctacgccatggatggagcttcacacgatttctcctgcggcagcggcgaaggtctctactgtacacctgggtcacagtggcccgtctgctcaggaactctccg

SEQ ID NO: 247070 - DNA, 1926 bp, Homo Sapiens
ttggattacagatgtgagccactacccctggcctattattgctgtattctaacttacccgtctcttatggctaatgatgccaaaggaggaaaaacaaatggacttgaacactggtcgaatgcgtcggaaagccattttcggagatgaagatgaatctggagatagtgatgatgaagaagatgatgaaatgtctgaagatgacgggttggaaaacggctctagtgatgaggaagcagaagaggaggaaaatgctgagatgactgatcagtatatggctgttaagggcatcaaacgacggaaacttgagttggaagaagacagtgaaatggatttgccagcatttgctgacagtgacgatgaccttgagaggagctcagcggaagaaggggaagcggaggaagctgatgaaagcagtgaagaagaggactgcactgcaggagagaagggcatttcaggatcaaaggctgctggagaaggtagtaaagcagggttgtcaccagctaattgcccagagtgaccgtgtgattctggagaagtctttggtgatgaagaaagcagctctccccactttcgattctgggcattgcacagctgaagaggtgtttgcatctgaagatgaatctgaagaaagctcctcactcagtgcagaggaagaagactcagaaaatgaagaggctattagaaaaaagctttcaaagccttctcaagtgagcagtggtcagaaactggggccacagaacttcattgatgagaccagtgatatagaaaatttactcaaagaggaagaagattacaaggaagaaaataatgattccaaagaaacgtcaggtgccctcaagtggaaggaagacctttccagaaaggcagctgaggcctttctgaggcagcagcaagcagctccaaacctccgaaagcttatttatgggacagtgacagaagataatgaagaagaagatgatgatactctagaagagcttggagggttgtttcgtgtcaaccagcctgacagagagtgtaagcacaaggctgactctttggactgctccagatttcttgtggaggccccccatgactgggatttagaggaggttatgaacagtatcagagattgcttcgtgactggaaagtgggaagatgataaagatgcagccaaggtcttagcagaagatgaggagctctacggtgactttgaagacttggaaacaggggacgtgcacaagggaaaatcaggccccaatactcagaatgaagatatagagaaagaagttaaggaagaaattgaccccgacgaagaagaaagtgccaagaaaaagcatttggataagaagagaaaattgaaggagatgtttgatgcagaatatgatgaaggagaaagcacatattttgatgatcttaaaggagaaatgcagaaacaagcacagctgaatcgcgcagaatttgaagatcaagatgatgaagccagagttcagtatgagggttttcgacctgggatgtacgtccgcattgagattgaaaatgttccctgtgaatttgtgcagaactttgacccccattaccccattatcctgggtggcttgggcaacagtgagggaaatgttggctacgtgcagatgcgtctgaagaaacatcgctggtataagaaaatcctcaagtcccgagatccaatcatattttctgtagggtggaggaggtttcagaccatcccactgtattatatcgaagaccacaatggaagacaaaggcttctaaagtataccccacagcacatgcattgcggagcagccttttggggccctatcactccacagggaactggtttcttggcaatacagtctgtcagtggcataatgcctgattttcggatagctgctacaggagttgtccttgatctggataaatccataaaattgtgaagaattaaagcta

SEQ ID NO: 247071 - DNA, 1303 bp, Homo Sapiens
  misc_feature (926)..(926): n is a, c, g, or t
ttggcaggccccggagtagcagcggggaggccgggagcccgcgggccggagccgccccagcctcacacccccacaactggccactccaaatttgcaacagttctttccccaggccactcgccagtccttgctgggacctcctcctgttggggtccccatgaacccttcccagttcaacctttcaggacggaacccccagaaacaggcccggacctcctcctctaccacccccaatcgaaaggattcttcttctcagacaatgcctgtggaagacaagtcagaccccccagaggggtctgaggaagccgcagagccccggatggacacaccagaagaccaagatttaccgccctgcccagaggacatcgccaaggaaaaacgcactccagcacctgagcctgagccttgtgaggcgtccgagctgccagcaaagagattgaggagctcagaagagcccacagagaaggaacctccagggcagttacaggtgaaggcccagccgcaggcccggatgacagtaccgaaacagacacagacaccagacctgctgcctgaggccctggaagcccaagtgctgccacgattccagccacgggtcctgcaggtccaggcccaggtgcagtcacagactcagccgcggataccatccacagacacccaggtgcagccaaagctgcagaagcaggcgcaaacacagacctctccagagcacttagtgctgcaacagaagcaggtgcagccacagctgcagcaggaggcagagccacagaagcaggtgcagccacaggtacagccacaggcacattcacagggcccaaggcaggtgcagctgcagcaggaggcagagccgctgaagcaggtgcagccacaggtgcagccccaggcacattcacagcccccaaggcaggtgcagctgcagctgcagnaagcaggtccagacacagacttttccacaggtccacacatcagggcacagccaagcttccagccacaggagcatcctccagctgcaggtgtcagtacagccacctagagcagacccatgagtcagccttcatagccagccgcaggtgtcgttgctggctccagagcaaacaccagttgtggttcatgtctgcgggctggagatgccacctgatgcagtagaagctggtggaggcatggaaaagaccttgccagagcctgtgggcacccaagtcagcatggaagagattcagaatgagtcggcctgtggcctagatgtgggagaatgtgaaaacagagcgagagagatgccaggggtatggggcgccgggggctccct

SEQ ID NO: 247072 - DNA, 1136 bp, Homo Sapiens
cgattaaaagggagctttgtacaaaaaagttggagaagaagcaccatgtcaagagacggtgggcggggccgtgttggctgagagagggctggggtccttcgtggtgggagtcgcagtgggctgggggtgcctgcctagtgctggagtaggggacaatgggaatcctagaggggatggaagacgcggggagtgagctgggtgggccctgctagcgagagaggtcaaccccggtggccagggaacccacttccaagcgcagggacgccggcctccagctggtgtgtgctaaggctccgtcctgactgccctgtgccctggaaaagcagcaatagcatccgccccttatagccctctggctagaggagccaccagtggaaaggaagaccctccatcctctggtattaacgccttaatgcccctgtcttttactgtaagttacttaagatcatttttggaagcaggcgtggtagagtcctgtaaatgaatgctctgggctagatacagcttggagaacctgctggccttgttagacagcacttgggcctttgccagcagcaagaggtgaagcgaagccactcttacctctcccttcccctcccacctgccccctgcgtaggcacccagacttggagagacccgtctgctgttaatacttccatcctcttccttcccaaagagcagatcccaaggcatttactccttggtctgtctcgctttatctgtcgcccctcccagcgctgagagcctcccctggctgtcagcagcactgtgtccaggctcttgtctgaacaccgcagcccctccttcgctccttccagagctcagcatgtcacggcaaggactgccgcattggtgatggagggccagctgaggggaagttgctggtgagtttccttttctccatttctagcatatggacacctggcctctgcttgagcacttaggtgacaggaacttccgcacctcctgaggccctggatgattctaattgttagaaattctaattgttagaaatccttccttataaatgaatgaattctggctttcctataatttctacctattggggccttgttctgttctctgggaactaaacagaacaaccatttaacccctcctttttcaaactagagaat

SEQ ID NO: 247073 - DNA, 448 bp, Homo Sapiens
cattggataagcggatgaggatggatgggtcctaacaccctgattttgatgggatgtgttcatgtcctatctcctctcctggacacattaaggggttgggacaagaagagactcctgtgagatcagcagacctcgtgtttaaggagagaatgcctgcctgcaacactcatggagagggacacttcctggccccacctgctaaatacctccaaactctgggcagcgcctgcattctcaacacaggacttcccttaacagtttccggatcagtgaccaccaccacgttcaggtttctgaatgcagacccaccacgagggatggattccacccgcccgccctgctgcagatacatgcggcacagcaggcacgtgcctggagagaacagctcctgagcacagcacccttgagcccttcatccgcttatccaatgggggatcctctagagtga

SEQ ID NO: 247074 - DNA, 285 bp, Homo Sapiens
tatacggctgcgagaagacgacagaaggggaggatgaggcaccattccaggagaaagattccggcagcgatgaagatttcctaatggaagatgatgacgatagtgactatggcagttcgaaaaagaaatacaaaaagatggttaagaagtcgtggtctttggcttgtcgactcggtcctgtttcgacagcgaacatgtcgcggcctgtcagaaataggaaggttgttgataactcacagtttcaggaatctgatgatgcagatgaagattatggaagagattcgg

SEQ ID NO: 247075 - DNA, 331 bp, Homo Sapiens
  misc_feature (18)..(18): n is a, c, g, or t
  misc_feature (25)..(25): n is a, c, g, or t
tcaattcagctcggtccntttttgnatttccccagcggtgacatcttaggtaatgggtgcaaaaccagaaccaggaagttgatgtgggtacgagcacagaaccgccttccccaatttatcgtgtgtgtgtgtgcgctccggcaccttctaacaagcacccgggattaccttctcagagtgtgcaccacgcagcttctggaacacagagcttggctgttctccttgctgccaggctagttgcagagtcagataatcagacagacaggctccgctgggcccgcgcaaaagcagaagaggggtgtgcaggtgtctcagtgtgcgctgctgtaaa

SEQ ID NO: 247076 - DNA, 709 bp, Homo Sapiens
  misc_feature (167)..(167): n is a, c, g, or t
aaaaaatattaaattttgaattgagtgtgtaggctccctatcattatatatagagtttctttttccacggtagtcagtgacttaacctgaattgtaaatgtttgtaaagggttaattgtcctacatcaaacttagttaaataattccatccacttatggaggaggangagaatgtggaagaggtaaaaagctgggcacaagttcatatgcctatgagtcagtaaagactgaagtaatgtcctatgttgagctggttattttgatatatgataataattatctttgaagtagaacaattctgttaactggaaaatcacaggatatatccatcatatttttcaggacagatagtttttactgtggggcaaataggttaaaattacactatgttagttgcatttaggttttaaagcaaagaatctgtagagaaatctatgcaatatatagtttgtccagattagctttcatttggggaatgaagttctgaaatatctaaagcagtttactcatcaattgaaaagtcctccaaaaagagaactattgggaaaccatggtgtggtggtggaaaagaaaagctccctcagttttttggggggaataacttaaaaaaatacttaaatggctaagtttacttggtgcagttaagaattaaacttgtcaattttaacattgctgttacatctgaaataaacttatgtgatgttctggt

SEQ ID NO: 247077 - DNA, 1741 bp, Homo Sapiens
  misc_feature (1251)..(1251): n is a, c, g, or t
  misc_feature (1577)..(1593): n is a, c, g, or t
  misc_feature (1604)..(1604): n is a, c, g, or t
ttgggatatttcatgccccctgtaaatgtttctccaagtaatttgtttggtttaatacactggaacgatttgcagatgataaagcccagattctctggggaaacgttgaagatctttcattctggaattgagaaaacataatgtgatgctctgccgcaacgctacctcaccacccaattccttttgttctttccattaataaccgagggcaagactggggaatttctttctccccatcaccgaccatgtcagactcctgcagaggtggggtgggaagcgtgcctctgcagagcgcttccacctccgtcttcgcggggaggggagacacgagcactcccacagccagctccggctcgggtgctgggtgcaacctagaggactaaacactgctgcaggtcttgctttatatttgtaagttcagcttcccaaaatacaggttccttgtgatgccatgcttctatcctttcattatcatacatctctcataaccgaccatctgttccctttggggcatttcccgtttaagttctagaggcttttagaaaaatacagatccaccatatggattagcattgtggtattgatgatatatttccacagtgcataacagaacttaaattgaggcttttttttaaatgcagtgttaacccatggtttttaagttaatcagtatttgaaaccgtgctctatcatttgaattcccattagattaaacttatttttatgttttgttaattaactatcttccactttggcacactgtaggtggtatcttggccaacaaacaaaactgctttgatgactttcagtgtgctgctgagtatctgatcaaggaaaggttacacatctctcaagaggctgactattaatggaggttcaaatggaggcctcttagtggctgcttgtgcaaatcagagacctgacctctttggttgtgttattgcccaagttggagtaatggacatgctgaagtttcataaatataccatcggccatgcttggaccactgattatgggtgctcggacagcaaacaacactttgaatggcttgtcaaatactctccattgcataatgtgaagttaccagaagcagatgacatccagtacccgtccatgctgctcctcactgctgaccatgatgaccgcgtggtcccgcttcactccctgaagttcattgccacccttcagtacatcgtgggccgcagcaggaaagcaaagcaaccccctgcttatccacgtggacaccaaggncggggccacggggcggggtaagcccacagccaaagtgatagaggaagtctcagacatgtttgcgttcatcgcgcggtgcctgaacgtcgactggattccataaacagttttcgtgcttcctcctgacagcgacagaaaacctcaagggctttcccacgttgacaccaagaaaccactgggcataatgcttccccacgggaacattattcctgcactcacaggctacagttgaacagaactgccgtgggaattttatcttttttaggcttctcctttttagcaaggccttggtgtttctttttccaccctgtctaggcacatgtggnnnnnnnnnnnnnnnnnaagggcatgtngggataaatagctaaatggcaacaaacacattgtgaatattagattgctgaattaaggatcatagtcgggcatacttatctatatccaataacctctataatctttaaaataaaatgtgagaacctgttcaaaagac

SEQ ID NO: 247078 - DNA, 878 bp, Homo Sapiens
  misc_feature (109)..(197): n is a, c, g, or t
acaaaaaagttggattttaaacattacttcatccagcacttctgtgtttgaagtgggatggagatgtctgtgtccgcccagtcctactgtcctgatgagatgtgcccannnnnnnnnnnnnnnnnnnnnnnnnnnnnnnnnnnnnnnnnnnnnnnnnnnnnnnnnnnnnnnnnnnnnnnnnnnnnnnnnnnnnnnnnattcttcactttatagacaagaaaactgaggtcaagaggcaaagcaagcactgaaactcccattcagcatcattcagtcctttggttgcctttctgcaggaatctggtcggcagccctgaatggagacctgggccgagtgaagcatttaatccagaaggccgaggacccaagtcagcccgactcggccggctacactgcgctgcactatgccagccgcaatgggcactacgctgtgtgccagttcctgctggaaagcggagctaagtgtgatgcccagacccacgggggtgccactgctctgcaccgagccagctactgcgggcacactgaaatcgcgcggctcctgctatcacatgggtccaaccccagggtggtggatgacgacggcatgaccagtctgcataaggctgctgagaggggtcacggggacatctgctccctcctcctgcaacacagcccagccctgaaggccatccgggaccgaaaggcacggctagcatgtgacctgctgccttgcaacagtgacctgcgggacctgctatccagctgagccgccaccctatctccagctgcctttaaagggtacacagaccagttctccaagcccctgccttggtcagcatccatgctgctgggcagggaactgaggccagaccacccaggaagagccccagtctgag

SEQ ID NO: 247079 - DNA, 695 bp, Homo Sapiens
  misc_feature (337)..(642): n is a, c, g, or t
ttttttcctgtcattggagaactgcacccagaatcttatttttactacttccatgtgaatgttaaggtactcacagaggtttcatccagaagtcttccctcttctttctggtaagtgcttcaatgtgctcattaagcttctctttctcttcccttttcaacaaagatctagattcgcagtggtgatctttttgatgagttctctatcaaactatgacacatctgaagaacgtacctgaacaaccctcagggataatgcaggatttttcgagaaagttccagggtatctcctggtgtcagtatactttcagtcctacacctcaagagttttttaatannnnnnnnnnnnnnnnnnnnnnnnnnnnnnnnnnnnnnnnnnnnnnnnnnnnnnnnnnnnnnnnnnnnnnnnnnnnnnnnnnnnnnnnnnnnnnnnnnnnnnnnnnnnnnnnnnnnnnnnnnnnnnnnnnnnnnnnnnnnnnnnnnnnnnnnnnnnnnnnnnnnnnnnnnnnnnnnnnnnnnnnnnnnnnnnnnnnnnnnnnnnnnnnnnnnnnnnnnnnnnnnnnnnnnnnnnnnnnnnnnnnnnnnnnnnnnnnnnnnnnnnnnnnnnnnnnnnnnnnnnnnnnnnnnnnnnnnnnnnnnnnnncgtttctttttagtgccaaataatggctatgggcatggggtagaagtgctaac

SEQ ID NO: 247080 - DNA, 1013 bp, Homo Sapiens
  misc_feature (283)..(283): n is a, c, g, or t
gcagaacgacctggagcccgggcacaccgagctcctgcgcgagctgctcgcctccctgcggcgccacgacctgctgcggcgcgtcgacgacttcgaggcgggggcggcggccggggccgcgcctggggaagaagacctgtgtgcagcatttaacgtcatatgtgataatgtggggaaagattggagaaggctggctcgtcagctcaaagtctcagacaccaagatcgacagcatcgaggacagatacccccgcaacctgacagagcgtgtgcgggagtcactngagtaatctggaagaacacagagaaggagaacgcaacagtggcccacctggtgggggctctcaggtcctgccagatgaacctggtggctgacctggtacaagaggttcagcaggcccgtgacctccagaacaggagtggggccatgtccccgatgtcatggaactcagacgcatctacctccgaagcgtcctgatgggccgctgctttgcgctggtggaccacaggcatctacacagcctggactttggttctctccaggaaggtagcccagcactgtgaagacccagcaggaagccaggctgagtgagccacagaccacctgcttctgaactcaagctgcgtttattaatgcctctcccgcaccaggcccgggcttgggccctgcacagatatttccattttcttcctcactatgacactgagcaagatcttgtctccactaaaatgagctcctgcggggattagttgggaaagttggaacccgtgtccagcccagaaggaatctgtgcagatgagcagtcacactgttactccacagcggaggagaccagctcagaggcccaggaatcggagcgaagcagagaggtgggagaactggggattttgaccccccgccatcctttcacccagagcccatgggctcacccactgttggcgtttctgcctgccccctgcagtttggccaaaaaaggaatggttttgttccccattttcctttggaaaggccac

SEQ ID NO: 247081 - DNA, 907 bp, Homo Sapiens
ttggcttagacatccctttccatcaagtgtcctacgtaaaggagtattggaatgatgtgttcaggggcagatgccattgccacaggtcactatgcaagaacttccctggaagatgaagaagtctttgagcagaagcacgttaagaagcccgaagggcttttcagaaatcggtttgaagttagaaatgcggtaaaactcctccaggcagctgacagctttaaagaccagaccttctttctcagccaggtttcccaggatgccctgaggagaaccatcttccctctggggggattaacgaaagagtttgtaaagaaaatcgctgctgagaatagacttcatcatgtgcttcagaagaaagagagcatgggcatgtgtttcatcgggaagaggaattttgaacatttccttcttcagtatctgcagcctcgacctggtcactttatttccatagaagacaataaggttctgggaacacataaaggttggttcctgtataccttgggccagagagcaaacataggtggcctgagagagccctggtacgtggtggagaaggacagcgtcaagggtgacgtgtttgtggccccccggacagaccacccagccctgtacagggacctgctgaggaccagccgcgtgcactggattgcggaggagcctcccgcagcactggtccgggacaagatgatggagtgccacttccgattccgccaccagatggcactagtgccctgtgtgctgaccctcaatcaagatggcaccgtgtgggtgacagctgtgcaggctgtgcgtgcccttgtcacaggacagtttgctgtgtactacaagggcggacgagtgcctgggcagcgcggaagatcctgcggctggggccgtctggctacacgctccagacaggccagcgcag

SEQ ID NO: 247082 - DNA, 742 bp, Homo Sapiens
  misc_feature (665)..(665): n is a, c, g, or t
tagagaggtggtttaaaatgggcttttcaagtttgactttttaggatgcaattaattcattaaatacagaacttaaataagcacaaaaatttaaagatcagcattccttcccttcccatcacgctcaacttaacatgaagaacagtacccatcctatgcttacaccacacctatatacctcgatctccgttaaccatttacacatccccctcccccatgaattatttggaaaaagctgcaggcgtaatatttgatccctaaatactttattctccttatacccttatcagacccaagtatcatttaatagtccataatcaaactgcttaagcagtttgtacactgtgtttttaattatttcaaactatcaaggtccgcattttcttccttagaacttttagtctttttcttccccaaaatatttgagtccatgccagttgcctttagttgtacccaaataatggtttgtctatttcctaaaagtagtactcttaaatttaaatttagtgttatttttgttgtcatcgttccttcttcctcatgtggttgtgcaggcagagcttgagcatccagatttcaaaattaaaaaataaaagataatctagtttaatatatagtagttgaatcaccttaagtctagactgctgtatgagcacccattatcnttcactatattccatcatcccccaacatatccacagtagatgaaggaatatagtgaaagaaatgagatgttggaagg

SEQ ID NO: 247083 - DNA, 1362 bp, Homo Sapiens
  misc_feature (1091)..(1108): n is a, c, g, or t
  misc_feature (1348)..(1348): n is a, c, g, or t
ttggctcttcagtgagactgctgagaagtcaggccagattgaaagatcaaagaatgtaaggcaaagacaaaatgattttaagaaaatgattcaggaagtaatgcactccctggtgaagcttacccgcggagccctgcttcccctcagcatccgggatggggaagccaagcagtacggaggctgggaggtgaagtgcgagctctccggacagtggctcgctcacgccatccagactgtaagacttactcatgaatcgttgactgcccttgaaattcctaatgacctgttacagactatccaggatctcatcttggatctccgagtacgttgcgtaatggccacgttgcagcacacggcggaagaaataaagagattagctgaaaaagaagactggattgttgacaatgaaggactgacttctctaccatgtcagtttgaacagtgcatcgtgtgttctctgcagtcactgaagggggttctggagtgcaagccgggagaggccagtgtcttccaacaacctaaaacacaggaggaggtttgccagctaagcatcaatataatgcaggtttttatatactgtctggaacagttgagcaccaagcctgatgcagatatagatactacacatctctctgttgatgtttcttcccctgacttgtttggaagtatccatgaagacttcagcttgacctcagaacagcgcccttttgatagtcctaagtaattggttgctatctagaacgtcacaccttcctaaatatcgcagaatattttgaaaagcacaacttccagggaatagaaaaaatcacacaggttagcatggcctcattgaaagaactagatcaaagactctttgaaaattacatcgagttgaaagcagatcccatcgttggctccttagaacctggaatttatgcagaaatgagatgttggaaggccttccaacatctcatttcttagaaagacttgacttttgtttagtctttctaagaaatagatcatggagccaagtgaagtgcactttgtcaaatgtaagggtctgctttgttcttgttgcttttctgttttttaaccttttgttccgccatttnnnnnnnnnnnnnnnnnngcttatgtttcttgtcaaatgcagaaatgttccttccgccactcgctgaagttttgcattctggcttgtgcagtttttattgtctgtgtcagacgtacagccagacatgttctctattggcatttttccgattctgttcagatgacagcgaccgccttttcattccccccgccacctgtactcaccctcacgctctttgaagaaatgagatgttggaaggggggatcctctagagcgacngcaggcaggagttg

SEQ ID NO: 247084 - DNA, 762 bp, Homo Sapiens
  misc_feature (173)..(191): n is a, c, g, or t
ctccaccctctgcgaccggaggactatgcccctagtaactgctgtcggtgtggacgctgtgctggttctgttttctaaaggagcagaaggacaggtctctgagacaggatcgttgtccctacaggaggaacagtggccttgcttcttagacggtcttcactgtgtgttttaannnnnnnnnnnnnnnnnnntaaaactcttttgacctgtaacttaaagatcataaacttcaggcaataatattttctgtgtaagcttttaaaattatttttggggatcatagcttgttttattttgtgctataaaattaacagtattaaatgacttatattcttagaatacatcgagtgtcttttcttaacagattagtgcctttttatttttgtattccgttttacgttactggtcccagcatcaaaacccttgtttccatggcctgtttgtatattgtctcaataaaacttgcatcagccggtggtggcggcagcttacggtgtttcagtgtctcctcagtccgcccccactagcctcctggcagttcatcagtggtgaaatctctgatgcttctcagagacccttagtgctgctgctgaccaagagctagaatgaagtcttggcatccgcccattccaacactcgggcacccagaggagagcacctggggtctccctccaaaagagaaatctgcctcccagagtgtctgtcttgtaggtattgtatgggagcctagtgcttggccttctgagcatgaggcaatagttc

SEQ ID NO: 247085 - DNA, 460 bp, Homo Sapiens
  misc_feature (50)..(50): n is a, c, g, or t
ggaagtggatctcccaataactaccccatggggggatggggaggaaaganaagattgaaaaccccaccccactccccaaaaataccccacattttactgtggtctctctcacattacatctaatttccttcctatcagatgagttttaagactgcccaactaaaaactatcatgggaaagaaactgcaaatgaagtcaaggagcagtgaaaccacccaatggcacagatgccattacctcaaatagaggtgggagaggaaagaaaatgggagatgattctcaaagggagagcaaggaccaaacatctgggaaatgatgagaggcagtgactcaaggtcagaataactccatcagaggtgcttctaagaacatggggtggggggaggacatctgctccatttgattctcctacttcaactaagagaatctcgtgtgcattagcaaagtggatgtcttttat

SEQ ID NO: 247086 - DNA, 824 bp, Homo Sapiens
  misc_feature (673)..(693): n is a, c, g, or t
ttgggttcgatttcgagctcgaggtttcccccgccgccaggctgacttctcatcgcttgtttttctttttgcatttttcctcccaccgccgttgccgccctccccgtcctggccgtccgccctccgccctctgcagggacatctctacaccgttcccatccgggaacagggcaacatctacaagcccaacaacaaggccatggcagacgagctgagcgagaagcaagtgtacgacgcgcacaccaaggagatcgacctggtcaaccgcgaccctaaacacctcaacgatgacgtggtcaagattgactttgaagatgtgattgcagaaccagaagggacacacagttttgacggcatttggaaggtcagcttcaccaccttcactgtgacgaaatactggttttaccgcttgctgtctgccctctttggcatcccgatggcactcatctggggcatttacttcgccattctctctttcctgcacatctgggcagttgtaccatgcattaagagcttcctgattgagattcagtgcatcagccgtgtctattccatctacgtccacaccgtctgtgacccactctttgaagctgttgggaaaatattcagcaatgtccgcatcaacttgcagaaggaaatataaatgacatttcaaggatagaagtatacctgnnnnnnnnnnnnnnnnnnnnncctggtgccaatttcaagttccaagttgctaatacagcaacaatttatgaattgaattatcttggttgaaaataaaaagatcactttctcagttttcataagtattatgtctcttctgagctatttcatct

SEQ ID NO: 247087 - DNA, 976 bp, Homo Sapiens
  misc_feature (711)..(711): n is a, c, g, or t
  misc_feature (727)..(727): n is a, c, g, or t
  misc_feature (857)..(858): n is a, c, g, or t
gctacctgagctccatcctcaggttctttgtcaagtccctggccaacaagacctccgactggcttggctacatgcgcttcctcatcatccccctcggttctcaccctgtggccaaatacttggggtcagtcgacagtaaatacagtagttccttcctggattctggttggagagatctgttcagtcgctcggagccaccagtgtcagagcaactggacgtggcagggcgggtgatgcagtacgtcaacggggcagccacgacacaccagcttcccgtggccgaagccatgctgacttgccggcataagttccctgatgaagactcctatcagaagtttattcccttcattggcgtggtgaaggtgggtctggttgaagactctccctccacagcaggcgatggggacgattctcctgtggtcagccttactgtgccctccacatcaccaccctccagctcgggcctgagccgagacgccacggccacccctccctcctccccatctatgagcagcgccctggccatcgtggggagccctaatagcccatatggggacgtgattggcctccaggtggactactggctgggccaccccggggagcggaggagggaaggcgacaagagggacgccagctcgaagaacaccctcaagagtgtcttccgctcagtgcaggtgtcccgcctgccccattagtggggagggcccagcntttctggcaccatggnccatgactggtggtcaccaaagaaaaggaacaagaaagttcccacccatcttccctgagcaagaaacccccgagaaaaaggaggtgggattctaaagagccagggtcatttgaagggcatcagcccgccnntcatctggctcagccaaagcagccagcagactatggctgaggagtgtccatcgaatgggggtccaagtggaagtgaccatcaaggtttcttccagactgggcagccccagtggggcca

SEQ ID NO: 247088 - DNA, 894 bp, Homo Sapiens
gctacctgagctccatcctcaggttctttgtcaagtccctggccaacaagacctccgactggcttggctacatgcgcttcctcatcatccccctcggttctcaccctgtggccaaatacttggggtcagtcgacagtaaatacagtagttccttcctggattctggttggagagatctgttcagtcgctcggagccaccagtgtcagagcaactggacgtggcagggcgggtgatgcagtacgtcaacggggcagccacgacacaccagcttcccgtggccgaagccatgctgacttgccggcataagttccctgatgaagactcctatcagaagtttattcccttcattggcgtggtgaaggtgggtctggttgaagactctccctccacagcaggcgatggggacgattctcctgtggtcagccttactgtgccctccacatcaccaccctccagctcgggcctgagccgagacgccacggccacccctccctcctccccatctatgagcagcgccctggccatcgtggggagccctaatagcccatatggggacgtgattggcctccaggtggactactggctgggccaccccggggagcggaggagggaaggcgacaagagggacgccagctcgaagaacaccctcaagagtgtcttccgctcagtgcaggtgtcccgcctgccccatagtgggggaggcccagcttttctggcaccatggccatgactgtggtcaccaaagaaaaagaacaagaaaggttcccaccattcttcctgagcaagaaacccccgaaaaaaagggaagggggaatttcctaagaagcccaggtccatttggaaggggattcagcccggcccttcaatcctgggcttccaccccaaagccaaca

SEQ ID NO: 247089 - DNA, 1375 bp, Homo Sapiens
  misc_feature (386)..(419): n is a, c, g, or t
  misc_feature (1029)..(1049): n is a, c, g, or t
ttggctcagtttcaaagatccatttgtcattccactgggaaaagaaaagattgcagatgcaagaagaaaggaattggcaaaggatactagaagtgatcacttaacagttgtgaatgcgtttgagggctgggaagaggctaggcgacgtggtttcagatacgaaaaggactattgctgggaatattttctgtcttcaaacacactgcagatgctgcataacatgaaaggacagtttgctgagcatcttcttggagctggatttgtaagcagtagaaatcctaaagatccagaatctaatataaattcagataatgagaagataattaaagctgtcatctgtgctggtttatatcccaaagttgctaaaattcgactaaatttgggtnnnnnnnnnnnnnnnnnnnnnnnnnnnnnnnnnnccgatggcctggttgctgttcatcctaaatctgttaatgtggagcaaacagactttcactacaactggcttatctatcacctaaagatgagaacaagcagtatatacttgtatgactgcacagaggtttccccatactgtctcttgttttttggaggtgacatttccatccagaaggataacgatcaggaaactattgctgtagatgagtggattgtatttcagtctccagcaagaattgcccatcttgttaaggaattaagaaaggaactagatattcttctgcaagagaagattgaaagtcctcatcctgtagactggaatgacactaaatccagagactgtgcagtactgtcagctattatagacttgatcaaaacacaggaaaaggcaactcccaggaactttccgccacgattccaggatggatattacagctgacagcttttcaggggtggtctgaaaagccagtttgacagccattcttcatcattgtttaaattttggctggatgccaaaccctgggacatgaacaattttcatgtgtaaggtagaagccttcagtaggtagtaaagacttaatgtgcatgacttgatgttatatgtagagnnnnnnnnnnnnnnnnnnnnnccataaaagcaatatgttctctgatcatatactctggtgtggtcatgcccactctttgggagtatattccctttatatatattgagtattgtaccacttgagaaattcctttgttctgttatacagaaattaatctttctgctcataatgattgatgataccagcagtaaacaataggatgtataccccaaaacaagtgtcacttaagaatgtgaacacaagcacattgtttacaatgaaacttctatcggaagtacattaatgtgaggtaataaagtacagtatttaatacacagtgtacagtgttaatctcaaaaacaaaacaa

SEQ ID NO: 247090 - DNA, 246 bp, Homo Sapiens
cctagttagttcctgcaagcagacaaatagtgtcctttccaggaagcatcaggaaagagaggatggaaggaggaaaaagaagagtcaaagacctaaggctaaggaggccaagctgaggatggctagtccaggagtacctggtcagtgacgtcatacaccgacgatgatgccatgagccccccggtagtagtctggaagtgatggtccggaaccgttcctggcccgctgtgtgatcgatggggtgaa

SEQ ID NO: 247091 - DNA, 1005 bp, Homo Sapiens
  misc_feature (95)..(169): n is a, c, g, or t
cataaaagagccaactttgtacaaaaaagttggcgcggcggcccttggaagagatctctcaccccgtcactcagggtggcgcaatcacgactcannnnnnnnnnnnnnnnnnnnnnnnnnnnnnnnnnnnnnnnnnnnnnnnnnnnnnnnnnnnnnnnnnnnnnnnnnnttggttctaaagagtggtgagtcagaagagacgtcaggcagcaagcgacttgggccatggcctctgacctagacttctcacctccggaggtgcccgagcccactttcctggagaacctgctacggtacggactcttcctgggagccatcttccagctcatctgtgtgctggccatcatcgtacccattcccaagtcccacgaggcggaggctgaaccgtctgagcccagaagtgctgaggtgacgaggaagcccaaggctgctgttccttctgtgaacaagaggcccaagaaagagactaagaagaagcggtagaagaggaggcctgaggagctgggcgggcagggagagggtcttggggacagccctcctgggaatctacattgtgttcccccgcattccaggctcagggtctgaggaggctgtgacgccctatgaccgcagagatctagacagtcgtaacagtccccaggctccagctgggcaatccaccacttcctcttccttctgcttctgtgacggtttagagtcaagggggctgaaacacactgtgagcatagactgtattaggtttgttcagaagccgggtcagctcacagagtcacatttttcttgctttagtcatgtgtccctccttgagttgccccctccttgtggggtttacactacattttggagtcatttgtctaatgctgacaagcacaccctctcccattatttgtgcactacagatctcctgcctgatcagtcacctttgtggctgctgtgttagaccagagccaggctcacctgtaggtaggccaagatgccatggacatgccgcgttagtgatcccag

SEQ ID NO: 247092 - DNA, 1451 bp, Homo Sapiens
  misc_feature (1017)..(1017): n is a, c, g, or t
cgacgagggcgttgagctcctgcagccgccgccgctgcagtggtcgtccctgccctccccggccccggggtgcaccccgcaaggctcccgctggtgtccctggagcatgggaggctgctgagcgtgagtggcggtgtctggcaggagctgcgtggcagggagggcgtccatggctgcagccaacaagggcaacaagcccagagtccggagtatccgctttgcggcaggccacgatgcagaaggatcccacagccacgtccactttgatgagaagctgcatgactcggtggtcatggtcacccaggagagtgacagcagctttctggtcaaggttggcttcctgaagatcctgcacaggtatgagattaccttcactctgcccccagtgcacaggctgagcaaggatgtccgcgaggcacctgtccccagcctgcacctcaagctcctcagcgtggtgcccgtccctgaaggttatagtgtcaagtgtgagtactcgtgcgcacaaagagggcgtcctcaaagaggagatactgctatcctgcgaaggtggcactggcacctgtgtgcgcgtgacggtgcaggccctcgtcatggaccggcaccacggcacgcccatgctgctggatggtgtcaagtgtgtgggcgccgatctggaatacgactcagagcacagcgactggtacggctttgactgaggcccgaggccccgcctgccccgggccccctcagccttaaaccccgccttgtccccccgacatgctgcgtgatggtgtggcttcctcacccctctctggggtgggtgtgggggtggagcatcattgcctttgtgggaagcccagtggaggacaatgacaaggatctggtgaaactggctaaacgcctcaagaaggagaaagcaaatgttgacactatcaattttggggaacacgacgtgaacacagaaaagctgacagcctttgtaaacaccttgaatggcaaagatggaaccggttctcatctggtgacagtgcctcctgngcccagtttggctgatgctctcatcagctctccgatcttggctggtgaacgtggtgccatgctggctcttggtgccagtgactttgaatttggagtacatcccagtgcctgatccctgagctggcccttggcccttcgtggatctatgggaagagcagcgtcacgcgccccgaggagtgaggcccttcgccccaccctgcaaccttctgcctgctgaagacggggatttgctacccacctggggattgtaaacatttcaaaccgatgcccttggcttgaaaactgacccattcctccccaccaaagatttttgggccggcaactcgcgcctttccctgattttttaacgccccttatgaacttgccaggaaaaacaacctcgacattgcctctattttcccaatcgcacaatatggctgccgcctggtccaggc

SEQ ID NO: 247093 - DNA, 944 bp, Homo Sapiens
  misc_feature (593)..(593): n is a, c, g, or t
ggggcgcggagaatctgctgtcgcctgcagctgctcgcctgtctccgtcggaagggagcccaagctttgcagagaacatgaacgattggatgcccatcgccaaggagtatgatccactcaaagcgggcagcattgatggcaccgatgaagacccacacgaccgcgcggtctggagggcaatgctggcacgatatgtccccaacaaaggtgtcataggagatcccctcctcaccctgtttgtggccagactaaacttgcagaccaaggaggacaaattaaaggaagtcttttcccgctatggtgacatccggcggcttcggctggtcagggacttggtcacaggtttttcaaagggctacgccttcatcgaatacaaggaggagcgtgccgtgatcaaagcttaccgagatgctgatggcctggttattgaccagcatgagatatttgtggactacgagctggaaaggactctcaaagggtggatccctcggcgacttggaggcggtcttgggggaaaaaaggagtctgggcaactgagatttgggggacgggaccggccttttcgaaaacctattaacttgccagttggttanaaacgacctctatagagaggggaaacgggaaaaggcgggagcgatctcgatccccgagaaagacactggggactcgagggacaagggatcgagaccatgacaggggccggggagagagatggcaagaaagagagccgaccagggtgtgggcccgacaatgactgggaaagagaaaaggaacttcagaaatgacaggattcaagggcaggggagaagaagggaaagaaggcaagtagaaggcccaaacagccaaaaaccccccaaggggaagttatccaggggaaaattgaaggggaaggggggaattgttccttttccaacagccaaaccgtgggaaatccttaaaggggt

SEQ ID NO: 247094 - DNA, 1395 bp, Homo Sapiens
  misc_feature (21)..(21): n is a, c, g, or t
  misc_feature (556)..(568): n is a, c, g, or t
aagaataatgtggtagtattntatttagggagagacagatgtgttgccatgttacttagtcatactagagagccagccaagtttgaataatgaaggtgcagacgtgttgtcttcttcactgacaagctgtctgaacaaggagccaggaactgtcgggtcaccagctgtggagcgtgccggggggacaacctgccattggatgtagagaaaagtgccttagagttggcctgagccctcctgcccactcgccctccgcgcgacgccactcggagtccacacggcacacacaagcggagctgagaagcacgatggctctagtcagaggactttgctgtcggtccagatttgaagaggacacggaacagcatgagcctttgtgacaaaactagaatttggaaatgaggactgtcttgggaaaagggtagacacaggcacttctctccacagcctgctaacctaatgtgggcagaactgaaagatcactgcagtggaaactgttctggaagaggctgcaacatagcccatgcttagggactggatggtttttgcaagagcnnnnnnnnnnnnnaaactaccatctcccaacttttaaagccagatacttgacaaggattttagatcttaatgggttcgatggtagggaatacggaaaggatacactgctaatattgtgtctaacaataaagcaaacaactcgatgctgtaagaagacaagctgtttgagctttcaaacacacatgcacacagcacaattcagaaatacccaggaggattcctgcaggcttaacagttggcatcgtactgaaatgaaacgtgtattaacaagaaaatgtcaaccttttggggaaaacaaattttcctgttacttccccccccacttaaaagggaagataaaaccatcatcaccagaacaaaacagattttctccaaacaagtacaatgatagtgccgggttggcagttaactctttcaccctactaaattcaagagctcatctccaccctgtcctgtatattttctacatttctattaagaggctacttggtagtgtcagcgggcatcttttacaccttctagtagctcaagctagtaaaaccttgtacttctctattgcgccgccattaaaagcagcattagtgcattttgtcattcagttcttaatcagttatttaaaagggagctgatcatgggtggctcggtgggaggtggggacccatccacggatgagcctcttgctcttggcaccaacctgagcttttgtttcgatgtttctggttgatttagcctttcgagtgcttgtcatgctcagtgggagaagtccaaacctccaaaacaagaggaaagaatttagtagcacaaacaggcagctctggggcccagcagaagcctcatttg

SEQ ID NO: 247095 - DNA, 1032 bp, Homo Sapiens
ccgggcgatcaaggcgagactctatctcaagacagacgtacgtacggacatacagaaacccaagaaggaacaaatcctgattttgggaaagaattcagtaagtcttctctaatgagcctcctcaaaacacttctccttcaggcaaggagcctttttttcccctttagaataaccatttacagcatctgaggccttttttaagggccaggtctcttccctgctgttaggtttttaattttaaggtcaagtttctaacaaaatttgttttgttgttgtgagattaaactggccatatgagcattaaaaccatctgcttctgaaatagcaagctgaaactcaaccaaaacttgaagctgtttattacgctcacataccaagtcctctctcttcatgggtggggaccgggaattcatttgcagaaagaaggtgcatttccagtcacccagaaccgggcgctgcagctgctttatgatctgcgttacctcaacattgttctgacagccaagggtgacgaggtgaagagtggccggagcaagccagactccagaattgagaaagtgactgaccacctggaagccctcattgatccatttgacctggacgttttcacgccacacctcaacagcaaccttcatcgcctggtgcagcgaacttctgttctgtttggattggtgactggtacagagaatcagctcgccccccggagcagtacgttcaactcccaagtaccccataacatcctgccactggcatccagtcagatcaggtttggacttctcccactgagcatgacaagcactcgaaaggctaattcaaccagaaacatcgaaacaaaagctcaggttgtccccccggcacgctccacagctggtgacccgacagttcctggctccttgttcagacagcttgtcagtgaagaagacaacacgtctgcaccttcattattcaaacttggctggctctctagtatgactaagtaacatggcaacacatctgtctctccctaaataaatactaccacattatttcttc

SEQ ID NO: 247096 - DNA, 388 bp, Homo Sapiens
  misc_feature (38)..(38): n is a, c, g, or t
  misc_feature (169)..(169): n is a, c, g, or t
aaacctgcaaaaagccggaagctgtttccctagtttancctcgcgtgtgtttaccctatatggagtagccccgcagagatcacagaaatgcttgcagcctaaggcagggttttcagaccgtgggtcccagcccatttagtaaaatgggaaatcaattagcaagtggtcnccagcattacacagcaatgaagcagaataaagtaggccagaatgcatcatgtagtaaaggcaaatactgttttgtgaaacttttcacccatacatctaaatgtgagaactggttgcaatgtaagacatttcttgctgggaagttgtgagcaaaataagttgaaaacactaataaagatctgtctgtctgagcaaaggagactaaactccttgggctaca

SEQ ID NO: 247097 - DNA, 407 bp, Homo Sapiens
  misc_feature (57)..(57): n is a, c, g, or t
gaccccctctgtacagtccctgggatccgaccctgatgaatatgccagcagcggcanagcctggtggggctctgactctcccgtcttcgaggcgggagtttttgcaccaccccagcccgtggagccccccggcgatctccccatcttcaatcgcatctctgtttctgagtgacaaagtgactgcccggtcagatcagctggatctcagcggggagccacgtctcttgcactgtggtctctgcatggaccccagggctgtggggacttgggggacagtaatcaagtaatccccttttccagaatgcattaacccactcccctgacctcacgctggggcaggtccccaagtgtgcaagctcagtattcatgatggtgggggatggagtgtcttccgaggttcttggggg

SEQ ID NO: 247098 - DNA, 879 bp, Homo Sapiens
cttctagtgcagttgagacctggccttcctgttgtgcttttcatgactgttgttttcagaatgcttttatctcgagtgtgcccttcggcccttacaagagcccctggggagtaggtggtggcctgtgccgtcatccccatttcaaagcagggagctgaggtcctgggaggggaaagtgcttgcctgaggtcccactgtgttagtgggtgggtaggactggaactcggttctccaacagcccagagctcactcttttacacccagaggtggagcaggtggcttagggggtggttatgtacttcacaagccaattcccttcagccaggagctcctgggtgcatttccgtgtcagaaacagtaccgagtcccaccccctctggaggcacagctgttgcgtcaggcaaggtcacctgcatttatttattgagcagcagtgctgtgtcaggcccagggaccgagcccctctccctgttcccctatggtgtctccgaggccctctgggagggccccacatctggagcagcacctcagagtggacagaaagcattagcgtccacgagctcacccgacgccgagcctgtgaggtgggctgatggtgcccgtctaacccagcgcttcagggaggtcagaatggagccgaacccagggctgtgagcatcacctctggagccctttcactttatgactgcttcctggacgggtggtgggaaggcaggagcctgggtccttaggctgggggcctctctccatccacccacctttccctcattccctctcttggagcagcagccgcccaggcctttagggagggagggtttctggggcccttgggttgtagtggggtcgcgtgcattgtgctcacgagccatgtagcacact

SEQ ID NO: 247099 - DNA, 1175 bp, Homo Sapiens
  misc_feature (50)..(296): n is a, c, g, or t
  misc_feature (316)..(341): n is a, c, g, or t
  misc_feature (1047)..(1047): n is a, c, g, or t
ttctgaatacgtaagatagaacatgggaggtgatgtggccgggtgcagtnnnnnnnnnnnnnnnnnnnnnnnnnnnnnnnnnnnnnnnnnnnnnnnnnnnnnnnnnnnnnnnnnnnnnnnnnnnnnnnnnnnnnnnnnnnnnnnnnnnnnnnnnnnnnnnnnnnnnnnnnnnnnnnnnnnnnnnnnnnnnnnnnnnnnnnnnnnnnnnnnnnnnnnnnnnnnnnnnnnnnnnnnnnnnnnnnnnnnnnnnnnnnnnnnnnnnnnnnnnnnnnnnnnnnnnnnnnnnnnnnnnnnnncaacggagcaagactccctnnnnnnnnnnnnnnnnnnnnnnnnnnaaaatggtgatgtgttaattgaccatggcaatcattacacaaatgtatgtgcatatcaaaccatgttgtatactttgaagaaaataaaaaaacgacaggaacaacaaacacatccttaacactcaatcattttatcccagattatgctgagttcatgtctcaggggaaacaccaaaatccatggaactgctctcattttttatcccctaaatgtcactttaacataggaaatgtccattgtggggttatttgcatttaaacacaggccgaatgaaaaaagctaaattaaaacgtaattatcaaggtaatggaaagatatcctaatctcttaattagcaagactatcaggaatattttgaactgtccaatcactctaggagtcccaattctcttaaggtaagaacttcaggatttaaacaaactcaatgtgaaaataaacatttattataaaaattagttttgacattttaaagtgaatgcagacaaggtgttttccagttcaaaaggtccattgtaagctagagaagtaaattccaaggctggcaataactgactcatattcttcacaagtggcctatacaataaggaaccattcacctcaaattcacagagccatgaatcacctctgcttccccatgaccttttccatatccttcctactctgtcttccaaccatggacacaggaactgaaacatactttaaaantctcatccttgggctagggcacgggtgggcttcacatctggtaaatcccatcactttgggggagggccagggcagggcgggatcagggggtcgggagttctgggggaccaggcccggaccaactgggg

SEQ ID NO: 247100 - DNA, 388 bp, Homo Sapiens
  misc_feature (94)..(138): n is a, c, g, or t
ctgacagacacagttggggaaatggtagtgttagatttaagagagagatcaactatattccatgtatggactttacttggatactgattcaaannnnnnnnnnnnnnnnnnnnnnnnnnnnnnnnnnnnnnnnnnnnncatgcatgcgcgagagagagagaaggaaagagactgacagagttggggaaatgggtggtgttatgtatttttttcaaaagtccttaacacttagaggtatatcaggaaatatttctgggtgatctgatatctggggtttgtctcagaataattcagtaagggtggaagagacatggatgaagtataattgaaacaggattagctatgagttgatcatttttgaaccggcggtgcggcgtggggtaccgag

SEQ ID NO: 247101 - DNA, 951 bp, Homo Sapiens
ggcaggctaaggcagcactgaactgtgctgggctgtggcttcgatgaggagcaccctcagggtgcatggggggtttacaaccctatgcgtccaagacaggaagaggaactgtgatgccggaacctgggcagttttaaaacaaccatttctttttttacctgtaactctagacattatataatttttagaaaaaaaatcctgttagcatgagtaacgggctctgttcctagcctcccttcatgccacagtcattatcaagtgctctcctgctcgccacttgcagtccttccaacagcttcacacacacccagtcccgcccgcctccatcccagccagccctagagttgagcttagtgtggatctgctttgtagccagctctcctcacttaacaggtactttctccaaaaacctaagaaccaaagtcttccgcttgcaacttgggatggtgatatggctgtgtcctcacccaaatctcatctccacctgtaatccccccatgctgggcgttggggggcattacctggtgggaggtgactggattacggggtggtttcccctatgctgttctcatgctagtgggtggtttctgagcaagagctgatggtttcagtgtttggcattacccccctttgcttttctctcttctgccctcatgtaagaggtgcctgcttccccttcgccttctgctacgattgtaaatttcctgaggcctcccccagccatgtgggactgtgagtcaattaaatctcttttctttaactacccagtcccagcttgttctttatagccgttgtgagaacagcctaatacagatcggcagcgggaatgggggctggaacagaggcaaggaggtactaggcagcagcagccctggtacagccgggagacacgtccccagaagggacctccacagattgagaagccacagtgggggaaggacgcgccatcgt

SEQ ID NO: 247102 - DNA, 243 bp, Homo Sapiens
gcttcagccagtccctgacgctgagcactggcttccgagtcatcaagaagaagctgtacagctcggaacagctgctcattgaggagtgttgaacttcaacctgagggggccgacagtgccctccaagacagagacgactgaacttttggggtggagactagaggcaggagctgagggactgattcctgtggttggaaaactgaggcagaccacaggacggggtagacgcgcccgcgaatttag

SEQ ID NO: 247103 - DNA, 455 bp, Homo Sapiens
aaatgccgctttggaaattgtaacagttaattactttgaatgttgctaaaaggacattttgtgtagggtcaagttatttttatatgagttaatgtgaaattgtaaatggaaatttttccttaaaatacaacacaatgatgtctgtataaatctgtctgtttagaatctgtgctgtgtaagggcattcgtactcatgctgttactgtacttatgcaccattcagacttgttagagtagatgtgggtttatgactgccaagtttgcccagtacagtagttttttatcactaaaagttggactcattgatggagtcctgtagtagtttcagtgttagatacagttttttccatcttttcttcttgtgcattttctctttaggtgactgtttaagaaatttgtgtgcatagttactcagtttttatgaactgttgtatcctgttaatgcatattctctg

SEQ ID NO: 247104 - DNA, 1020 bp, Homo Sapiens
  misc_feature (990)..(990): n is a, c, g, or t
ttggggcaaatctatgtttaaatggaaaatcgtctaactggagaagggcggtatccaccccacattcggatcccagggtcctgaggcctcgcattgagctgggggttccctctgagccccagtgtgtgtggaatcagtgcactcttgactgggcctgtagtaaggtgctcatggggtttgtcttctcacccaccatcagaggacttttaaaatcataggcgtagagagttagctatctgctgaattactgccactcttcttggtgggggctcctagctgtggctgggggctccaggcgcccctgtgattacctcctactgccaccatggcgctcattcagattccccactctcactaacattgcttccttttttgaccagcaggaaacagcaggtctggccagattctcacttgcccatcaatctcgttcttggatgatttccctcattgtgatgcttctggggcacgttgaccatatgcacctctagaacctaaccagggcttccttctaccagctgtgggcgggcttggtctggtaaccttgtctgctctgccattccactgctcctccatccactcgccaatcccaagagtctggcctccctccagccctgggcagactgaccagcaaggtggacctttacattcaagcacagctggcttttatgacataaagaactaaaggccgaaagaatctcttgctgctgcaaagaacagattttatatttcttcctctaatcttggcaaatgacctttaccttttggaaagatttcatattgcttcctcctccctggataggacctaatgtagcacagcgggactcaaagaggaggacattttctcttgccagtgcactgggcagtggggctgtccttcaactgctgctgccaaaattggttttctaaaattcttccagtagagactaaaagaagattcaattcctgtaacccaagactgagtcttagggctccagtctccacctgcttggnttcctatcctttgctgcctgcctggggttg

SEQ ID NO: 247105 - DNA, 384 bp, Homo Sapiens
ttttatcgccaaagcccgttccataaccaggagagcaccaccaatacatgtattggtggtgctctccatcattctacgtgccaagcagcaggctgtgcgcgaggatgaggagagcaacgagggtgacagtgatgacacagacctgcagatcttctgtgtttcctgtgggcaccccatcaacccacgtgttgccttgcgccacatggagcgctgctacgccaaggttggggtgtcagactgagggggcggaccatgtgggaacatcagtgggccagtgggggacagatttgttgtctgggtggtgtcttgggagggcatgcagcgcacatccacagttccctccatttgtgctcatccctccagtatgagagcaccaccaataca

SEQ ID NO: 247106 - DNA, 1705 bp, Homo Sapiens
  misc_feature (1609)..(1609): n is a, c, g, or t
  misc_feature (1643)..(1643): n is a, c, g, or t
ttggcaccaaacagctggtgcacagtttcaccgaaggccgggaccagggcagcgcctatgccaaccgcacggccctcttcccggacctgctggcacaaggcaatgcatccctgaggctgcagcgcgtgcgtgtggcggacgagggcagcttcacctgcttcgtgagcatccgggatttcggcagcgctgccgtcagcctgcaggtggccgctccctactcgaagcccagcatgaccctggagcccaacaaggacctgcggccaggggacacggtgaccatcacgtgctccagctaccggggctaccctgaggctgaggtgttctggcaggatgggcagggtgtgcccctgactggcaacgtgaccacgtcgcagatggccaacgagcagggcttgtttgatgtgcacagcgtcctgcgggtggtgctgggtgcgaatggcacctacagctgcctggtgcgcaaccccgtgctgcagcaggatgcgcacggctctgtcaccatcacagggcagcctatgacattccccccagaggccctgtgggtgaccgtggggctgtctgtctgtctcattgcactgctggtggccctggctttcgtgtgctggagaaagatcaaacagagctgtgaggaggagaatgcaggagctgaggaccaggatggggagggagaaggctccaagacagccctgcagcctctgaaacactctgacagcaaagaagatgatggacaagaaatagcctgaccatgaggaccagggagctgctacccctccctacagctcctaccctctggctgcaatggggctgcactgtgagccctgcccccaacagatgcatcctgctctgacaggtgggctccttctccaaaggatgcgatacacagaccactgtgcagccttatttctccaatggacatgattcccaagtcatcctgctgccttttttcttatagacacaatgaacagaccacccacaaccttagttctctaagtcatcctgcctgctgccttatttcacagtacatacatttcttagggacacagtatactgaccacatcaccaccctcttcttccagtgctgcgtggaccatctggctgccttttttctccaaaagatgcaatattcagactgactgaccccctgccttatttcaccaaagacacgatgcatagtcacccccggccttgtttctccaatggccgtgatacactagtgatcatgttcagccctgcttccacctgcatagaatcttttcttctcagacagggacagtgcggcctcaacatctcctggagtctagaagctgtttcctttcccctccttcctcctcttgctctagccttaatactggccttttccctccctgccccaagtgaagacagggcactctgcgcccaccacatgcacagctgtgcatggagacctgcaggtgcacgtgctggaacacgtgtggttcccccctggcccagcctcctctgcagtgcccctctcccctgcccatcctccccacggaagcatgtgctggtcacactggttctccaggggtctgtgatggggcccctgggggtcagcttctgtccctcttgccttctcacctctttgttcctntcttttcatgtatccattcagttgatgtttaatngagcaactacagatgttcaagcactgtgttaaggtgcttgggggccctgcgttgggaaagat

SEQ ID NO: 247107 - DNA, 1246 bp, Homo Sapiens
  misc_feature (1064)..(1064): n is a, c, g, or t
  misc_feature (1107)..(1107): n is a, c, g, or t
aggcagtcagtcaagcatcatcacatccggagaactcggaggaagaggagtgcatgggagcagccgcggctgtgggccctgccatgtgtggggtggaactggactctctcatctcccaagtgaaggacctgctgccagaccttggtgagggcttcatcctggcctgcctggagtactaccactacgacccagagcaggtgatcaacaatatcctggaggagcggctggcccccaccctcagccagctggaccgcaacctagacagagaaatgaaaccagaccctacacccctgctgacgtctcgccacaacgtcttccagaatgacgagtttgatgtgttcagcagggactcagtagacctgagccgggtgcacaagggcaagagcaccaggaaggaggaaaacacgcggagtttgctgaacgacaagcgtgcagtggcggcacagcggcagcgctacgagcagtacagcgtggtggtggaggaggtgccactgcagccaggcgagagcctgccctaccacagtgtctactacgaggatgagtacgatgacacatacgatggcaaccaggtgggcgccaatgatgcagactctgatgacgagctcatcagccgcaggccattcaccatccctcaggtgctgagaaccaaagtgcctagagaagggcaggaggaggatgacgacgatgaggaagacgatgctgacgaggaggctcccaagcccgcccattttgttcaggaccctgcagtgctgagagagaaggcagaagccaggcgcatggcctttctcgccaagaaagggtaccggcatgacagctcaacagcagtgggcggcagcccccgaggccatgggcagagccgcgagacaacccaggaacgcaggaagaaggaagccaacaaggcgacaagagccaaccacaaccggagaaccatggccgaccgcaagaggagcaaaggcatgatcccatcctgagacctggtgcagggccagtggggaggcagcggcaccagactcaccaggccgcgcttccatcgcctggggcctcctcactagggggccccaagnttcactcaaacccctcaacagccctcagcttttcagcccctgnaaaggcccgcttctcatcttaacagccagccatggagcgccttccttgcaagaacacaccggtgccttatgccacaacccaaagaattccgtgggggccggcaaagcaggcacccttcccccagcctggcgctacgggg

SEQ ID NO: 247108 - DNA, 873 bp, Homo Sapiens
  misc_feature (125)..(409): n is a, c, g, or t
ttgggaatttttcttagtacagaataaaatggagtctcctgtgtctacttctttctacacagacacagtaacaatctgatctttcttttccccacacattactgataagaacgttgttgataggnnnnnnnnnnnnnnnnnnnnnnnnnnnnnnnnnnnnnnnnnnnnnnnnnnnnnnnnnnnnnnnnnnnnnnnnnnnnnnnnnnnnnnnnnnnnnnnnnnnnnnnnnnnnnnnnnnnnnnnnnnnnnnnnnnnnnnnnnnnnnnnnnnnnnnnnnnnnnnnnnnnnnnnnnnnnnnnnnnnnnnnnnnnnnnnnnnnnnnnnnnnnnnnnnnnnnnnnnnnnnnnnnnnnnnnnnnnnnnnnnnnnnnnnnnnnnnnnnnnnnnnnnnnnnnnnnnnnnnnnnnnnncattgtgaacatcaattcccatcacagcaagccctggatgaaaacatggacctcttggaaggtataactggctttgaagactctgtccgaaagtgtaagtccctctctgaggctgggctccccaaggggaaggggtagggagtggcagccaggtccggggggacagctgctcaccggttttgtctctgacctccacagttatctgccatgttgtgggtatcacttaccagcacattgaccgctggctgctggccgagatgctcggggatctgtcgggtaacgccctctgggtcctggtgcacatctgggaggttgggggtggctagggcagtggacctcagtcagctcctccaacaggcctgtctgggtctcgtccaggtcagcatggaaggcccagcccgaggaggaaataagaacttggtataacgacagtctctgcctatgagggagatcctagtgccatt

SEQ ID NO: 247109 - DNA, 1366 bp, Homo Sapiens
  misc_feature (1277)..(1277): n is a, c, g, or t
  misc_feature (1289)..(1289): n is a, c, g, or t
aggtcaccctggagcgctcaccccaccggcacccgtgcccaagcccgcccctgcaaaggcaggcaaggccaggcgggtgctgcctgggacccagtgactcagcacccctgcccggatcaactggacttttgccccctgctccgccagcctcctgcttggatctctcctgggtctccctgctgcgcctgtccaggatgcagggagctcgggctcccagggaccagggccggtcccccggcaggatgagcgctctaggccggtcctcggtcatcttgcttacctacgtgctggccgccacagaacttacctgcctcttcatgcagttctccatcgtgccatacctgtctcggaaactgggcctggattccattgccttcggctacctgcaaaccaccttcggggtgctgcagctgctgggcgggccggtgtttggcaggttcgcagaccagcgcggggcgcgggcggcgctcacgctctccttcctggctgccttggcgctctacctgctcctggcggccgcctccagcccggccctgcccggggtctacctgctcttcgcctcgcgcctgcccggagcgctcatgcacacgctgccagccgcccagatggtcatcacagacctgtcggcacccgaggagcggcccgcggccctgggccggctggtcctctgcttcagcgtcggagtcatcctcggctccctgctgggcgggaccctggtctccgcatacgggattcagtgcccggccatcctggctgccctggccaccctcctgggagctgtcctcatccttcacctgcatccccgccagcatcaaagggggcccaaactgacgcccaagcctccactgacagagcggcccccggctgcaatgggtttcgaacctgaacgggcaacgccctccctgcttgcgaactgacgataaggttcgccaaagaatctttccctggaggaaagggaggcccacccaaaactgcgaccgaaaagggatctcctctcatgggtgaaaccgcattacgcattcatagcccgcacggtcacctccattccgagcactgcgcatggaccgtcccctaagcttggggataaacgttccacggtgcgagtactacggcgggattcacctccagtgaaatcgatgtgaaccacatgaggaccgggcgctcaagtcgtgcaaccagcttgaaaacaaggctacctttcctgtcggtaatgaacggtcgtcctgaactcaacgggcaacatgccacgagacgcgcacttagcccatcacagaagngacgccctgagnagcacacgtacgcataagaaaaatcctcaccgcagcgcaagtacgcgctattaattaactccacacgaagatacctc

SEQ ID NO: 247110 - DNA, 879 bp, Homo Sapiens
cggacgcgtgggtcgacccacgcgtcgcaggagcaggatggcggcggcggcggctgcaggcgaggcgcgccgggtgctggtgtacggcggcaggggcgctctgggttctcgatgcgtgcaggcttttcgggcccgcaactggtgggttgccagcgttgatgtggtggagaatgaagaggccagcgctagcatcattgttaaaatgacagactcgttcactgagcaggctgaccaggtgactgctgaggttggaaagctcttgggtgaagagaaggtggatgcaattctttgcgttgctggaggatgggccgggggcaatgccaaatccaagtctctctttaagaactgtgacctgatgtggaagcagagcatatggacatcgaccatctccagccatctggctaccaagcatctcaaggaaggaggcctcctgaccttggctggcgcaaaggctgccctggatgggactcctggtatgatcgggtacggcatggccaagggtgctgttcaccagctctgccagagcctggctgggaagaacagcggcattgccgcccggggcagccgccatcgctgtgctcccggttaccctggataccccgatgaacaggaaatcaatgcctgaggctgacttcagctccttggacacccttagaattcctagttgaaactttccatgactggatcacagggaaaaaccgaccgagctcaggaagcctaatcccaagttggttaaccacagaaggcacaggacggaacttcaaccccaggcatatttttaaggcctcatctcagtgccttatgtgtgggcctgccagaaaaggtcattaacctgtctcagtgtggccttggtccaggcttgtgtattctgtaaccctg

SEQ ID NO: 247111 - DNA, 984 bp, Homo Sapiens
  misc_feature (825)..(825): n is a, c, g, or t
  misc_feature (901)..(901): n is a, c, g, or t
agaggggagctcttctccagggaggacctggtctggtacaagaaggtcttgtgggaggctcggaagttcgagctggaccggcatgaggtcatcctctgcacctgctcctgtgcagcctctgccagcctcaaaatcctggacgtgaggcagatccttgttgacgaggcaggcatggccacggaacctgaaaccctcatccccctggtgcagttcccacaggccgagaaggtggttcttctcggagaccacaagcagctgcggcctgtggtcaagaatgagcggctgcaaaacctgggtctggaccggtctctgttcgagcggtaccacgaggacgcacatatgctggacactcagtaccgcatgcatgagggcatctgtgccttcccctctgtggcgttctacaagagcaagctgaagacgtggcagggcctgaggaggccgcccagtgtcctgggccacgctggcaaggagagctgtcctgtcatctttggccacgtgcagggccacgagcggagcctgctggtgtccacggacgaagggaatgagaactccaaggccaacctggaggaggtggctgaggtggtccgtatcaccaagcagctgaccctggggaggaccgtagagccccaggacatcgccgtcctcacgccctacaacgcgcaggcctctgagatcagcaaggcccttcggcgagagggcatcgccggggtggccgtgtcctccatcaccaagagccaggggagcgagtggcgctatgtgctggtgagcaccgtccgcacctgtgccaagagcgacctggaccagcggcccaccaagagctggctncagaagttctgggcttcgttgtggaccccaaccagtggatgtggctgtcacgccgggcccaggagggggctctgcnctgatcgggaaacaccctccttcttgcgctgcctgccccctcttggcggaagcctccctgggaattcctggcgagggctcaac

SEQ ID NO: 247112 - DNA, 701 bp, Homo Sapiens
tagagttacttcaacttgtcactttaacattgtgcttgactttggttgttttctaagatggaatttttcctgttcattgacagcttgttctcttgccttttcattctgatcctcatttcatctaacatcatctcatattgctcctctgtcaagagaaatgttttaaaatagtttaaagtcttgttttatgggaagaaagtgatcctccaatgctatttgtttctgaggtcagtaagagaaggagttaaaacaagggcagtgggggaagggaatgaatcctgcactggaggcaaaagctgacaaggaaagagccattaattaagacaatttcaaagtcaactgattgtgatcattaatgtcacaatagatcaaaaccctaattatcacagcctaggtaagagccatcagtattaatcggaaaatctaataggaaactattatcaagaaattaggccaaattgaatgcagtgaactttttatcttggcattctctatttttttgtgatgtcccctggcattggcaggtgtgaccctaacagtcgattcaaggccaagtggtcagtttgtcagccttttttaagggatttctttttatttttaggaattccaaacagagttaacctaaactgtcattgccaaaagatcagtcttaaactttcttagcacctgtacctgtttaatgtgatcagctatcagtgagg

SEQ ID NO: 247113 - DNA, 419 bp, Homo Sapiens
ccagttccatggacaggttctgttttcactttttcgtatgcactacttgtatttcctttctaaataaaattgatttgattgtatgcagtactaaggagactatcagaatttcttgctattggtttgcattttcctagtataattcatagcaagttgacctcagagttcctgtatcagggagattgtctgattctctaataaaagacacattgctgaccttggccttgccctttgtacacaagttcccagggtgagcagcttttggatttaatatgaacatgtacagcgtgcatagggactcttgccttaaggagtgtaaacttgatctgcatttgctgatttgtttttaaaaaaacaagaaatgcatgtttcaaataaaattctctattgtaaataaaattttttctttggatcttggc

SEQ ID NO: 247114 - DNA, 618 bp, Homo Sapiens
  misc_feature (499)..(499): n is a, c, g, or t
  misc_feature (531)..(531): n is a, c, g, or t
  misc_feature (534)..(534): n is a, c, g, or t
gatttttccaaaccaggattccttactattgacagatttgctttaccaaaagaaaagacatttattcttttgatgcacttgaatgccagagaactgtccttctttttctcctctccctccctcccagcccctgagtcatgaacagcaaggagtgtttgaagtttctgctttgaactccgtccagcctgatccctggcctgagcaacttcacaacagtaattgcactttaagacagccctagagttcctggacgaagcgtgtttggtagccagggatgaaagcctagggcctcttatttttttctcttaattattattatatttctgagttaaacttagaaggaaacaactatcaagctacaactttttcctgccatttttcctgttggttgcagcctgtcttcctttggaaattggttttactctctgagttttatatgctggaatccaatgcagagttggtttgggactgtgatcaagacaccttttattaataaagnagagacacaggtgtagatatgtatatacaaanagntgtacggtctggccaaaccaccttcccagcctttatgcaaaaaaaggggagaatcaaagctttcatttcagaaatgttgcgtgg

SEQ ID NO: 247115 - DNA, 416 bp, Homo Sapiens
  misc_feature (102)..(102): n is a, c, g, or t
  misc_feature (220)..(228): n is a, c, g, or t
  misc_feature (339)..(339): n is a, c, g, or t
  misc_feature (362)..(362): n is a, c, g, or t
  misc_feature (382)..(382): n is a, c, g, or t
  misc_feature (389)..(389): n is a, c, g, or t
  misc_feature (402)..(402): n is a, c, g, or t
tgcaaaattttgactgtcagctacatgttggtaagacacaggcaaagtattactgtaactaagttatttttaaagttaaaatatatttttacgtgcctttgntttttattgcagagtctacattttatagattctacatcagatgttgtcacttatttccattgggattccattgtaagctgtgtatgtgcgtgtttggaaaagtgtattcatacttagnnnnnnnnncttcatctgttatcatacttttaacagcaaccaataacggattgtaaagtgtaaaggcacaggttactcatgatgcttctgcagagactgtggggctacaccacatatgtntatttgggaaatataggtatttntagtgccagtaccatgcctngccattncataggggtactncaggcaaccacaat

SEQ ID NO: 247116 - DNA, 948 bp, Homo Sapiens
ccgggttttgctcccgcctcggagcccctggcccgggggagggggagaggccgctagcctggtctatgtctttttctgactccagtgcaaccttcctgctgaacgagggttcagccgactcctacaccagccgcccatctctggactcagacgtctccctggaggaggaccgggagagtgcccggcgtgaagtagagagccaggctcagcagcagctcgaaagggccaagcacaaacctgtggcatttgcggtgaggaccaatgtcagctactgtggcgtactggatgaggagtgcccagtccagggctctggagtcaactttgaggccaaagattttctgcacattaaagagaagtacagcaatgactggtggatcgggcggctagtgaaagagggcggggacatcgccttcatccccagcccccagcgcctggagagcatccggctcaaacaggagcagaaggccaggagatctgggaacccttccagcctgagtgacattggcaaccgacgctcccctccgccatctctaggcggaacatgttcccccatatgacgtggtgccctccatgcggcctgtggtgctggtgggaccctctctgaaaggttatgaggtcacagacatgatgcagaaggctctcttcgacttcctcaaacacagatttgatggcaggatctccatcacccgagtcacagccgacctctccctgggcaagcgatctgtgctcaacaatccgggcaagagggccatcattgagcgctcctctgcccgctccaggcatttgcggaagtgcagagtgagatcgagcgcatatttgagctggccaaatccctgcagctagtagtgtttggacgctgacaccaatcaaaccaccccggcacaggctggcccaaggaacctcggctgggcccccccatcatcgggtcttttggccaaaggtggtccc

SEQ ID NO: 247117 - DNA, 1483 bp, Homo Sapiens
  misc_feature (122)..(122): n is a, c, g, or t
  misc_feature (149)..(149): n is a, c, g, or t
  misc_feature (720)..(751): n is a, c, g, or t
  misc_feature (967)..(979): n is a, c, g, or t
ggagtataattcgctttttaattagaacgacgtgtgtaaatgacagaataccaccaccctgcgcagatggcggccacagaatacgcatcgaattcattctgcccaaggagttgagggagggnaggccacagcggggcttgagccagcanttccccgcccccttggtcctgcgagtgatggggtcaccgactttcggcctgcacacgccttttgaacggtaagcagagatcaaaagcacagcagcagtaatactgggtaagtccttccttgcgtaaaacatctgaattaattcattgaaggtatcaaaaatataccctgtaaaccaacacatcatttacatctgcctttccttcccaccgctgcggcaacgatgtgtgaaaaaaacagtccagtcctcggagcatccgttccccccaggccgcacctggcccttttgtccgcccacctggcctgacttggtttccagcaatctcgttggctggggcagtctgtggggaccggaacgagcgcactgggggctggacagggcctgcgtccatctgtccagagcgctaagcgggatgggaggcggagggagggcgcgggggctgcgagctcagtttagactttggttccaaatgcattcggggggaggcagtggcgtggaggtgcgtggtcatcctgctttgggtccctggccgccctggccgcctgcgtgtggctgccacacgcctgccgtgnnnnnnnnnnnnnnnnnnnnnnnnnnnnnnnngagcaccaggtaaacatcccctgagtaaggtctgcacagggccagcccggggcgggagtcttagttaaggctttagacaggcaaggatgccggctctggacggacagatggatggaggcgcaggcggactcaggggctccttccttggttgggggagtcggcagccgccctgctcctgcagggccgttcctgtggctcgctgggacctgacaccgnnnnnnnnnnnnngccctgttctgatgtcactcgctgtcggagagtgtctcgttactgtcgagcagagcagctggcttgggctcctcgtcccaggcgtggtgggggccacgcgaggggcccgctgcccgcggggaggcccggtgcggggtggggaagccatgacacccgcctgcagccgcatgatcagggggttgtaggggaatggcgtggaacctgcggacgagggcctgtcctcccacacgcggttggtgagcggcgtccggcggttgcagtctccctccgagtgcactgaggagacagagggtggccggtccccagatgccaggcccggggccggggacttggcttttcggctgctgggtctgccagagaccttggccttcccgccgccacctggcgaggtgagtgtgtggtcactccgtccgtcagcagcggttatgggcatagcagcgggcaggctggcactggcattcacgagggttaaaagcattggcgctgagcggcggggactcttcc

SEQ ID NO: 247118 - DNA, 893 bp, Homo Sapiens
  misc_feature (125)..(135): n is a, c, g, or t
tttgatttgtgccctttttaaaaagtcaggtgtggctagggtccctgtagacatgaagaccaaagcagacatgattttagatacatcctgtaatgaaggaccctgtcatttgaaataggattggnnnnnnnnnnnctctgcctgtaaaatctttgaacatatgttttctgctactgtttttcaaaatcatttgctgtttcaaatagagaactgtgcgatgatgagaaagagttcatacattttccagtatgtgaggggacctctcaacctgaaccctcgtgttcagctgtcagaataacagccaataaaaactactttttcaaaacctctcaggaaggtgctttaaaaaagatgcatgaggaagaacaccatcaacaaatgtccatcttacaactgcaactgatacaaatgaatgaggtgcatgtggccaaaatccagcagatagagcgagagtgtgagatggcagaggaggaacacaggataaaaatggaagttctcaataaaaagaagatgtattgggaaagaaaactacaaacttttaccaaggaatggcctgtttcctcatttaaccggccctttcccaattcgccctaagactttgggggtggctctcttgtaattaatctgtgttggcaaagaatgtctggaacatggacttggcggtcagtaacctgtaacagagctacaactaggaacaattagagtggtagtagtcacttatttaagaattcattcaggtaaacagctgcaccctctgtaccccttaagtggcaaagaagctgttatagtcttctgaaaattatcactatgagtgctataattctgaagtataatgtcgtcttaagttaggaattcagtacagagaaagacaagacaacaagaacacaaacaag

SEQ ID NO: 247119 - DNA, 482 bp, Homo Sapiens
  misc_feature (465)..(465): n is a, c, g, or t
ttttaatttagacaaatgggattctgctatagatctcaatttggttcttttgcttactcaacactctttttcagagccagtcttggtgctctgtgttcacctggttcatctgaggagctgcatctaccctgcccatgccatagatcctgccctgtttgcttctcctgttgctgctagtggacatgagaaggacagaataacgggctcccagattcacaagccccaccaagaggatcaccccagggaacgcttggaggctgaggagttcactgaggctactgcatcttgagactcaggatgaagacccagcttggggctgtcaaaggttttttgcatgtctgacacccatgactccacctggaccttatgggttccacccagaagcaatttcagcccaacagggagggacagctttcaaccctttacggttttcatctttggccccaaccatttaggcaggcaggnactgtttacctgttcca

SEQ ID NO: 247120 - DNA, 1016 bp, Homo Sapiens
ttggcaaagttcttctcaagtatacagaatataatgaacctcatgaaagcagaaccaactcggatattgttgagactttaagaaagaaaggccttaatggttgtgagagccctgatgctgacgattactttgagcacagtccactctcggaggacagattcagcaaactaaatgaagatagtgattttattttcaaacgaggccctgtaagtacttttactttacctctactttttatttgttgatcctttttgttaacttcattatttaggctctgaacaagaaggaacacagagggtgcgacagcccagaccctgatacttcatatgtgctaactccacatacagaagaaaaatataaaaaaattaatgaggaatttgataatatgatgcggaatcataaaatcgcacctggtctgccacctcagaacttttcaatgtctgtcacagttccagtgaccagccccaatgctttgtcctacactaacccagggagttcactggtgtccccatctttggcagccagctcaacgttaacagattcaagcatgctctctccacctcaaaccacattacatagaaatgtgtctcctggagctcctcagagaccaccaagtactggcaatgcaggtgggatgttgagcactacagacctcacagtgccaaatggagctggaagcagtccagtggggaatggatttgtaaactcaagagcttctccaaatttgattggagctactggtgcaaatagcttaggcaaagtcatgcctacaaagtctccccctccaccaggtggtggtaatcttgggaatgaacagtaggaaaccagatcttcgagttgtcatcctcccttcaagcaagggcatgatgcctccactaaacacccaaaggatcagtagttctcaagccactcaacctcttgctaccccagtcgtgtctgtgacaaccccaagctgcctccgcaaggacttgtgtactcagcaatgccgactgcctacaacactagcaacggcctga

SEQ ID NO: 247121 - DNA, 1236 bp, Homo Sapiens
  misc_feature (1210)..(1210): n is a, c, g, or t
  misc_feature (1223)..(1223): n is a, c, g, or t
gattcattcagaccgcacatgttagaggcagggaatgaagaaggtactgtgggccatggcacacctgatgcgtttttggtgggcttacttggtgcagtgtgctgtccagagagacctgctgacccagtctgggacaggcacagtgggagctgccacagtgccccttgctggccgccctcaggagggggcctctggaccgtcagtgtggcgtaggcagtgggtctgcttcagggaggcagcctcttgactttgtcacaacggttgcactgaagatggcccccacaagcccagttgtgaatatcaaggtgaccctgcccctggctgggagctcccctggggctcttggaaccttgaagcccttagaaggagagctttggaaggaggttgagctcttcactgtgtgtttccatctgggctttgcagcccagctctgtggcaggaggcctgaccccaccccatcagtccctctcccagcattgctgtgcatggctccctcaggaagaagctctggagtggggccgaggccccagatgctctgctggggtctggggactgagctgcctcctgtctctccactctggagccctgggctcttgcctcctgttgaattgcccctgggcctgcccccggccccatttgtgccataaagggttgcttcattgcaggaggggtggctgaaaccaccatcctgggctgcatctatctccttaaagtccactccttacatcaccgccactactgcagctcagtgcccagcggccgcatgcacacctcccggcccctcctcagcagcgcaggggctgggggcccttcctggcacccttttgcctgacggaccctgttgcctgctcctgggcagtggttttgttgcctgacacagggcctttaacatttctgaggtttggagattaagcgggttctgtgcgatttttagcacatccatatcttttctacgttgaatgtctggatctttcctttgtatgtttgtgtctctgtgtgtgtatgtggccaagcgtctgcaggtgagggtggcacatggaacttcacgggtcactgggggcccactcttccagggtcatcgatgcatcctggggctgtgctgaggcagtgctgtctcgctcagtctttccagaccagccggggcagcacctggggaggcctgtcttgaagcatgcagttctgtgggtgctgctcggggatggattccatngcacagtccattntttgacacatttt

SEQ ID NO: 247122 - DNA, 484 bp, Homo Sapiens
  misc_feature (73)..(73): n is a, c, g, or t
aaccccttgaatttgtcaaaaaggtttgcaattgaaaaaggcccccaaaaaacccaaattgtgaaaaatcaangtgaaccctgcccctggctggaagctcccctggggctctggaacctgaaagccctgaagaaggaagagcttggaaggaggttgagctcttcactgtgtctttcccaatctgggctctgcagcccagctctgtggcaggaggcctgaccccaccccatcagtccctctcccagcattgctgtgcatggctccctcaggaagaagctctggaagttgccgaggccccagatgctctgctggggtctggggactgagctgcctcctgtctctccactctggagccctgggctcttgcctcctgttgaattgcccctggcctgcccccggccccatttgtgccataaagggttgcttcattgcaggaggggtggctgaaaccaccatcctgggctgcatctatctccttaaagtc

SEQ ID NO: 247123 - DNA, 924 bp, Homo Sapiens
  misc_feature (200)..(234): n is a, c, g, or t
cccgcccccgtccctgtccctcctcccccctccaactaaggtagcgagcctgggtggcgaattcggcacgagggaagattctgttcccggacatcatcgcaagggccgcagagcatctgcggtatgtctttggttttgagctgaaacagtttgaccgcaagcaccacacttacatcctgatcaacaaactaaaacctctnnnnnnnnnnnnnnnnnnnnnnnnnnnnnnnnnnnatggccccagattgggtctgttaatgatgatcctgggccttatctatatgagaggtaatagcgccagggaggcccaggtctgggagatgctgcgtcggttgggggtgcaaccctcaaagtatcatttcctctttgggtatccgaagaggcttattatggaagattttgtgcagcagcgatatctcagttacaggcgggtgcctcacaccaatccaccagcatatgaattctcttggggtccccgaagcaacctggaaatcagcaagatggaagtcctggggttcgtggccaaactgcataagaaggcaccgccagcactggccagtgcagtaccgtgaggccctagcagacgaggccgacagggccagagccaaggccagagctgaagccagtatgagggccagggccagtgctagggccggcatccacctctggtgagggttggtgaaaagttggccagtgggtccccgtgaggacgaactactgtcctgagtcataagtaatatgggtggggcgagggtcttatttctgtagaaatcgtgtgactttaaggatttagattttgaatcttatgggttgtaacatttaatacttactgttaaaatgccgccttggaaatgaaaattggcctacttttttccctgtaggaatttcacctgaaaagttcttcccttggcgtatgcgacaaag

SEQ ID NO: 247124 - DNA, 1671 bp, Homo Sapiens
  misc_feature (657)..(658): n is a, c, g, or t
  misc_feature (660)..(691): n is a, c, g, or t
ttgggttccggctgctggcggcgttgcggccgcaggtttgactcccgtgcggtgcggcccagcagccacaaagctcccgctgccattgctccctgtactcccgccgtcactgccgctgtccaacccctcccccggggcttgcgcggcggctcccacacccctcggcccgtgtacgcgctctgcacctgcctgcccgaaaacatgttgcagacaccagagagcagggggctcccggtcccgcaggccgagggggagaaggatggcggccatgatggtgagacccgggccccgaccgcctcgcaggagcgccccaaggaggagcttggcgccgggagggaggagggggctgcggagcccgccctcacccggaaaggcgcgagggccttggcggccaaatccttggcaaggcgcagggcctaccgccggctgaatcggacggtggcggagttggtgcagttcctcctggtgaaagacaagaagaagagtcccatcacacgctcggagatggtgaaatacgttattggagacttgaagattctgttcccggacatcatcgcaagggccgcagagcatctgcggtatgtctttggttttgagctgaaacagtttgaccgcaagcaccacacttacatcctgatcaacaaactaaaacctctnntnnnnnnnnnnnnnnnnnnnnnnnnnnnnnnnnatggccccagattgggtctgttaatgatgatcctgggccttatctatatgagaggtaatagcgccagggaggcccaggtctgggagatgctgcgtcggttgggggtgcaaccctcaaagtatcatttcctctttgggtatccgaagaggcttattatggaagattttgtgcagcagcgatatctcagttacaggcgggtgcctcacaccaatccaccagcatatgaattctcttggggtccccgaagcaaccctggaaatcagccagatggaagtcctggggttcgtggccaaactgcataagaaggaaccgcagcactggccagtgcagtaccgtgaggccctagcagacgaggccgacagggccagagccaaggccagagctgaagccagtatgagggccagggccagtgctagggccggcatccacctctggtgagggttggtgaaaagttggccagtgggtccccgtgaggacgaactactgtcctgagtcataagtaatatgggtggggcgagggtcttatttctgtagaaatcgtgtgactttaaggatttagattttgtatcttatgttttgtaacatttaataattactgttaaaatgctgtttgtaaatgagattggtctactttttcctgtaggattttattgtagagttttgctggttttgtaaaatggatggaagaactttgtatttatactgtgattttgaacagattatgcaacattggaaggaaggctgtactttgatggtttgaaggaactcagcagtatgatgatctggttcccaggggaaaaaaatagctggttggtgtctagccccccaacacttttgtctgttgtgtataaaaggaagaaagactggcatgtaccttcatttgcttagctatttgagtatctagagaaaaattaaaatgcaatgagttagcagtataccctggcacacttaataaattaaacattttgtggagcaaaaaa

SEQ ID NO: 247125 - DNA, 800 bp, Homo Sapiens
ttggatgtgggaaggcctttttttggggctcaagccttgctaaacatgagataattcatacaggtgagaaaccttataaatgtaaagaatgtgggaaggccttcagtcgtggctatcaacttactcagcatcagaaaatccatactggtaagaaaccttatgaatgtaaaatatgtggaaaggctttttgttggggctatcaacttactcgacatcagatatttcatactggtgagaaaccctatgaatgcaaggaatgtgggaaggcttttaattgcggatcaagtcttattcaacatgaaagaattcatactggtgagaaaccttatgaatgtaaagaatgtggaaaggcctttagtcgtggctatcacctttctcaacatcagaaaatccatactggtgagaaaccttttgaatgtaaggaatgtgggaaggcctttagttggggttcaagccttgttaaacatgagagagttcatactggtgagaaatcccatgaatgtaaagaatgcggaaagaccttttgtagtgggtatcaacttactcgacatcaggtatttcatactggtgagaaaccctatgagtgtaaggaatgtgggaaggcttttagttgtggatcaagccttgttcaacatgagagaattcatactggtgagaaaccctatgaatgtaaagaatgtgggaaggcttttagtcgtggctatcaccttactcaacatcagaaaattcatattggtgtgaaatcttataaatgtaagaatgtggggaaggcctttttttggggctcaagccttgctaac

SEQ ID NO: 247126 - DNA, 885 bp, Homo Sapiens
gaaacatggacgtgacagaaaattcccagcagactccaactgtgccaggcttgggggaacccattgcccgagctcaagtgtctaaaggatggcactttcccactgcccatcgggaaatcagtgactgtcactcgagatcttgagggcacctacctctgtcgggccaggagcactcaaggggaggtcacccgcgaggtgaccgtgaatgtgctctccccccggtatgagattgtcatcatcactgtggtagcagccgcagtcataatgggcactgcaggcctcagcacgtacctctataaccgccagcggaagatcaagaaatacagactacaacaggcccaaaaagggacccccatgaaaccgaacacacaagccacgcctcgctgaacctatcccgggacatggcctcttcctcggcttcccatattggtggcagtggtgccacactgaacagagtggaagacatatgccatgcagctacacctaccggccctgggacgccggaggacagggcattgtcctcagtcagatacaacagcatttggggccatggtacctgcacacctaaaacactaggccacgcatctgatctgtagtcacatgactaagccaagaggaaggagcaagactcaagacatgattgatggatgttaaagtctagcctgatgagaggggaattggtgggggagacatagccccaccatgaggacatacaactgggaaatactgaaacttgctgcctattgggtatgctgaggccccacagacttacagaagaagtggccctccatagacatgtgtagcatcaaaacacaaaggcccacacttcctgacggatgccagcttgggcactgccgctctattttacaccaaccctgttctggt

SEQ ID NO: 247127 - DNA, 1260 bp, Homo Sapiens
ttggccatgaactcaggacaggtatggttaataaacaggtttacaggggagagaaggggcagggaaggcctgggggagggaatggcagacccccacccaccccaggcaggttctgtacaggggaaaggactcacaggagggagggacactgtcttcagggggctctctggagccacgctgcctacgaaaaatatttacatgcatttgccacgctgaggccagggtcactgtggtgccaggcaggcacctgggggatgctggggccatcggctctcagatggcaactcccagggcccagtctcgatgcctctgtaaatctgtacagtttgcgggcttctatttacaggcaagaggcctggggaggcaagtccagggttgtagttgttgggagaagaaatccagagaacacaggaggcagccactcctaccccatgaggcagagggtctgctccctgtgtccaggggcccccaccaggaggcctgacaggcggctttgccaacccccaaggggggtttggcccacaccaccctaagccctgcccagccctggttgccacccaccatgcctccagcgatcaaggggaccagtctttcaggcaaggcccccatctggcctcctggcctcctggagacagggtctgggctctccaggtcctggcctgcctcgtgctctggcagccaaggccccagaggctctcaagccacagaagctccctctcatttggaactccctgtgcttccagcaaatgccaaagcccctcagaacactccatcacaggcaggggtagggggacatgagggccctgcacccacattgcacctgggagagcctagctggtcctcactgaactctcttggactgccttgccccggtcaggccggccagggcagatttgggctggtcagactcctcatcctcaggaggataaagcctggacatctgccttgggtccagggatccatgaacaaggcccctggcctcttctctcaaatgctaaggacacagagaagagaagccagtgcctggagcccaagccccaaatcagaagccaacccctgggatgtgaggagccaggcttgccggggccacccccaccattggctccagccctactgagaaactgcacccactgttgggtctcccacctggggtccagcatcttctggggctgggggcccaagcccttttctcctctatcctccctggtttctcagcctctgcctgcccaggccgtctcaccagagctgtgctctccaaga

SEQ ID NO: 247128 - DNA, 824 bp, Homo Sapiens
  misc_feature (649)..(659): n is a, c, g, or t
ttgggaagcagcttgtgagagcagcacgccgtcgtgggcgagcgatcacaattacaatgcagtaaagccagaaaagactgctgctccctcgccgtcactgttgtataaatgtatgtatcacctaggggttggcctcctggacccctcccgttctttctggatagccatcccctgggcctgtccaggactgggagttgcagctttgtgttaagctgatcacagacaccggctgcaccatcagcgggaagcagagcccatgtccaggatgcctcctgctgccctgtgtccatccctagtctgtcaggacttcctgtcactgttttccaaagctgtaaacctcactggtgaacgttcaccttaatgattgattctttaatctctgttttcactctcaggctctggtaagtattcgtattctcttcatcccagtctgattgcatagccacactgcccggcacgccacatccacccctgtctgcacatgagttgttctgacaacagcgctgtatacgcttcagtttttccacattgtccacggccagcacatgaaagcatcacttcttttttatgttgtggggaatctttgcaagttagtgttgcatctggattttcaggtgtacatttatttttgactgggcagataggggannnnnnnnnnnccatgtccgattcacacgctacacacccacatgaacacattctaacttcgaaggccacacactcctgcttcatagccccacggtaagtgagtcacaactaaaacactgtcctgaccgcaggacgcgtgcttggacttggtaattctacatgtagactggctttct

SEQ ID NO: 247129 - DNA, 562 bp, Homo Sapiens; identical to SEQ ID NO: 170760
  misc_feature (193)..(370): n is a, c, g, or t
  misc_feature (395)..(484): n is a, c, g, or t
  misc_feature (518)..(518): n is a, c, g, or t

SEQ ID NO: 247130 - DNA, 795 bp, Homo Sapiens
  misc_feature (17)..(17): n is a, c, g, or t
aatgaaaaaagaaattncttttattggcttggttttctagcattgctggtgcagtgggggcctgagctggggtgcagtcggcagtgtcactgggcccgtttgggactgtgtgtcaggcatggtgttcatgaataaccattacctaatttaatcttcacagttacctagcaaagaaagcacgataatccgcatgctagactcaaagaaacactcagcaaagttgaagcactcaccctgagtgacagagctagtgaggcagaaagaactgaaacgccccagccagagccccacacgtgctttctccacacccactcagtaagcggtaactcaaatgcaagaaaagaggcctaaggaagacctctggggaaacagccagttgttgtatttaattttaggctgaagtgtccgaaaagggctcataccttgttgccagaaggatttaaagaggctaacataagtacacacaaaataaaaggtaagatgaatgaaggcagaaaacaagacaaaggaagacaaaaggagaaaagacaagacactgcaggaatgggccagtgcgaaaccgcatgccccaacactaggtacgtttgcatgcacctcagatttgcctctcagttttccagtgaacaaggaaaagaaggaaacatcggttaaagaattcatagtatctgtaagataaaaacactccatttgctaagaataaaaacaaaaactatgtctagtgttgagaccagagagaaattttactccaaaagttcctagagaaaaagaaggaagcaacatcatctcatccaaaac

SEQ ID NO: 247131 - DNA, 1171 bp, Homo Sapiens
  misc_feature (641)..(723): n is a, c, g, or t
  misc_feature (919)..(988): n is a, c, g, or t
gtaaatatttcagttccatggttaaaaggttaattgtgtatctttcacctcacactaaccttccccatctgaaatacatgaaacccatatggcgtattatcaaggcatggtgcaacatagggctctggagtcaaatgacattaaactgagggcttaaccacttgggagctgagaaagcttacctgacatcatgagcctccacttcctcatctaaaaatggagtaagagtacctttttgtggggttgttctgggaaacagaaatattatttgtggagcacttagagtgcttggaagaggcctgtctgtagcttcagaaacaagcccagatctgcaaaatggccttaggaggcccagttggtccagattccagagtggtataaagactcaaatccatctgaactatcagttcattgtgatagcctgaccaaattctcagtgcatttgtatcataaaagaatcctctttttgtgctaagatacatgtgagtcttgtttagaagaatgaacacaatccttcctagtattcacttgaattgcagggacacttttagaaagggaagtggctttttatctatatttgtccattttctatagaatagacagttgctaccttaagtaatattgactccagaatcttgaannnnnnnnnnnnnnnnnnnnnnnnnnnnnnnnnnnnnnnnnnnnnnnnnnnnnnnnnnnnnnnnnnnnnnnnnnnnnnnnnnntcaaaaaaatccccagagtaatgaaaatacaaagtctgcttgttcaaaattatggtgcgaataaaaaaggaaagggaggaagtgatggagtaaagttcagattaaaaataaacggaaagtcacaacagtcgaaaggtggaaaaaaaccgcaaatgcccatgaactgatgaatggataaacaaaatttggtgtgtgnnnnnnnnnnnnnnnnnnnnnnnnnnnnnnnnnnnnnnnnnnnnnnnnnnnnnnnnnnnnnnnnnnnnnncaattaaatagtatttcgtcataaaaaagaagggaatttgcacgcatggataaaccttgaaaatactatgctaagtgaataagccagacacaaaagatcaaacatggtctgatttcacttacatcaggtagctacaacagggagactcacagaaaggggaagtagaatggaggttactagcgt

SEQ ID NO: 247132 - DNA, 565 bp, Homo Sapiens
cgtatatgtcttattttgagaagtgctgtcattgattatcttttctaaagtttatcacccagtggattttcacttctatgaactgcccatatttttattaggctgtttttttcctactgatttgcttctttttcttccttaatcctggattctaatattctgtcagttaatgcactccaaacagatactcctaggttgtggttttatctttgtatttatttatagtatcttttgctgcatccaagattataaattttaacagtcaaatcttataccttcatccttcatgttttgaattttgctaaagaaatctttccctactcaaaagttcatgaaaatagcctccttgatattcttataaaaggttagctttccaaatttagatatttaataatcccataatgtttgatgtgtgtagtaggattctatgtttctatgttcactgttaccattttatttcagtctctcaatccctcaaaagtaatctactacagtgtcagaagtcaggacagtggttaccttttttgctttcctgagactagtctcactctgtcactcgtctggg

SEQ ID NO: 247133 - DNA, 1018 bp, Homo Sapiens
ttgggtgcttaatgtctgctggggatgagtctgattacctcacatattaatcagtttactcctacagcaaccccaaaagatagttatcattattatcaccattttataaatgaggaaactgaaacacagagaagttaagtaacctgcccaaagtcatgcagaaggtatacacacggtctgtgattgaaccacttcctgtcactccaactcgggacgtggctacatctcccatttcacctactgaaaataacaccactccaccagatgctttgacccggaatactgagaagcagaagaagaagcctaaaatgtctgatgaggagatcttggagaaattacgaagcatagtgagtgtgggcgatcctaagaagaaatatacacggtttgagaagattggacaaggtgcttcaggcaccgtgtacacagcaatggatgtggccacaggacaggaggtggccattaagcagatgaatcttcagcagcagcccaagaaagagctgattattaatgagatcctggtcatgagggaaaacaagaaccctaacattgtgaattacttggacagttacctcgtgggagatgagctgtgggttgttatggaatacttggctggaggctccttgacagatgtggtgacagaaacttgcatggatgaaggccaaattgcagctgtgtgccgtgagtgtctgcaggctctggagttcttgcattcgaaccaggtcattcacagagacatcaagagtgacaatattctgttgggaatggatggctctgtcaagctaactgactttggattctgtgcacagataaccccagagcagagcaaacggagcaccatggtaggaaccccatactggatggcaccagaggttgtgacacgaaaggcctatgggcccaaggttgacatctggtccctgggcatcatggccatcgaaatgattgaaggggagcctccatacctcaatgaaaaccctctgagagccttgtacctcattgccaccaatgggaccccagaagt

SEQ ID NO: 247134 - DNA, 406 bp, Homo Sapiens
ttattggcgtatgacaatttacaagggtccctgttgcatcattatacatcacactgagtaagaatcgtttagccatctacattcaatgttactgggtaatatttttctcaaattataattcccaacactgattttacctgtgacaaaaggaacaatagtaattccttgaagaagactaactggaaaaaacattttgcttttaggtataaaaattcctaggatgctgaaagggtacacatacacacctaaagagtcatgggccttcttaaacaggctttcttaatcctttctggaaatatcctttggttcatttttattgcccctctctaggcaaaacaaagtatgttaacgcaggtatcagtgagttatttcctagcacttgtaagcaaatatccttaccaagagg

SEQ ID NO: 247135 - DNA, 1533 bp, Homo Sapiens
cccccaacactcacatctacagtgccctcatcaacgcggccatcaggaagctgaactacacctatctcatcagcatcttgaaggacatgaagcagaacagggtcccggtgaacgaagtggtcatccgctagctggagtttgcagcccagtaccctcccacctttgaccggtaccaagggaagaacacctacctggagaagattgacggcttccgagcctattacaagcagtggctgacagtgatgcccgcagaggaaaccccgcacccctggcagaagttccggaccaagccccagggggaccaggacaccggcaaggaggctgatgacggatgtgcccttgggggcaggtgatgggagcacagctggaacaatgtgctcggcccccagtgctctgtgggagccccaggacaagtgagctggtgtcacctcctgcctgggggaagagccaggccctgaggaacagccgcagcgtgtcacaggtgttggtgaggacacacactaggcccaaggtgcctgtgctcccagcaggtccaagtgcagctccagccacctttgcgtgtcaccttcacgggacttccagctccagctacctttgtgtgtcacctcacacaccacaagggggctggggcatctggtccctggggcctgggccgccccgccgggttccataggccgatgctctgaaagaagagacgtgggggctcgagagatttaaagattttatttttacaaatcacagctgatagacagcgaagccttccccatagagaccgtgctccaactcgggcctggggcactgctcgctgctcccaggaagggggtggcgtgacaggcaggaacctgcgaagtccagagtccagggtggagcgcgccagcctcagccagagcagccacgacagccacagtgtgtgcactcgatgatgcggcccacttccagcttgcttttgggcacgcggcagatgcagttcgtcccgaagttggtgtcccgtgtctgaatgcaccgcaggcagcacaagttctcatatccttgctttttccattttgcaatcaggtttttgtctgcatagccttctttaatacaatattcatagagttctctgctgatggctttccgcttgtaaaagaggtcgaagatgtagcgggttttctggtggtggatcctgaagatgggccacagagattccactttcctctttccctcatgcggttctgtttcagcttctctcatcttttgatctaattcatccagtgttggctcaatcaactcccagccatctgggggtgctttccggcttcttttgactttaggcattttccttccacaggataatctgcaaagatcttaggatgtgctttccaagagtatagacagcagaaagatctctcgtctctgcagttgcaggcttggattcttgttcagctctaaaaaattattctgtgactttcaggtcaccttccctctctggtcctgtttcttcggaagctcctggagcttggccaacttttttgtacaaagttggctatttatagg

SEQ ID NO: 247136 - DNA, 350 bp, Homo Sapiens
  misc_feature (309)..(309): n is a, c, g, or t
  misc_feature (337)..(337): n is a, c, g, or t
tgacacacggtgcctgccccagaatggtttttaaagccacagttgagaggccacccattgcccggcgcctggacagtgatcatcttgttcatcttgttcagtcctttcttgtgtgattggaattattcatcccctttgaaagatgagaaggttgagatgcaaagagtctacctttccaagttctcactgctggaaagagctagaagcacagttcaaagttcttggcttctgggactcttgcagtccagggtctcccttcttcccactttgcctaccctcaatgccacactgttttttgaagtgggcccntaactttgaagggaaaaggttttaaagncagttcaatttta

SEQ ID NO: 247137 - DNA, 1103 bp, Homo Sapiens
  misc_feature (1093)..(1093): n is a, c, g, or t
ttggtaacaatatggaaaccaccgcaaacttggagaaaagttgtaagcacagtaaagagaagcttccttctgagtcagttgagtggttgccgttctggccctgcaccctctgtgctttgggacggcgtccaacccgcattcatgtcaggagtgagtcgcacgtggctttgtggtcatggcgacttaatccgcctggacggtggctccgtctccctgggcttagacgaccttggcacttctggagataagcccatggctcccaggttgtgttcatgtgacgtttccttgtggtaggttctgggtctgcgttttgtctaggagtgtcacaggatggacactgcctcctggcaggggctgcccaatgcagttagcctcctgctggtgttctctcttgttgcttggtgaaggtggccctggtcagcttctccactgcccagtgaacgacccctttgtaatgaatgagtggggaggtagtgtgaagcgatgccaatatcccatccctgtcaaactgcctttactttttccttccttccttgctcccacctgtgtggatcctggtcccttcttgtattcagggctgtggtctgttatgacatttactctcaggctcaggtcctgcttgtttggcccgtgggagccccttcttctgccttttgtgttttttttgttatgtacctacagttctttagctgtttctttactttctggtgcaaaaagatgttcaagccttattttatacttgcctgcccctttctctttcatttattggagtgagctgcagctctaagaagacctgttcttttgaatggagagtagcatcatgaaccaggatgtgggtgcgaggcgtgctcctggctgttgcagattgctgcacccgggagctcttagtggacagagctagaggatatgtgcacgtacttccatctctctctctgtctccgattttagcccagcaccacagggtacgttccagtttttctctctttccatagctgtaaggccctttttgggaatggttctcattctccttaaatctatttattggggtcagtttttcccgcatgttccccagcctcccatcaatgccacccantccccacaga

SEQ ID NO: 247138 - DNA, 441 bp, Homo Sapiens
gctccctatgttatttcaagggcctccaagggcagcttttctcagaatccttgatcaaaaagagccagtgggcctgccttagggtaccatgcaggacaattcaaggaccagcctttttaccactgcagaagaaagacacaatgtggagaaatcttaggactgacatccctttactcaggcaaacagaagttccaaccccagactaggggtcaggcagctagctacctaccttgcccagtgctgacccggacctcctccaggatacagcactggagttggccaccacctcttctacttgctgtctgaaaaaacacctgactagtacagctgagatcttggcttaaaaacaaggcaaagataccagacatacaactgaggtaactgcaaaatataacatgctgattaagaaaacacaaataaaggatttcaatatattaaaag

SEQ ID NO: 247139 - DNA, 387 bp, Homo Sapiens
ttgggtcttggagggggtggtttgtttgctggggcccaacgtctgtcccaagtggtggggtgagagtaagttaactttggtgccaggtgagaggtgggggctctttgcttagactccctatcatggaaagattggagttttctatgcagggcactgtggaaaaggattgctgattctgactgaccctgatcagagagattaggattgtattttgacataggatttggaacccatctaaatgttgaagttccctgagacagctctccagctgctgagcctgcgccaggggctaagcagcccctaatgagaggctctgctccctttcccacctcgccaatgttgttgttgctgcctttttgatttgtatcctctgttatagacattttt

SEQ ID NO: 247140 - DNA, 416 bp, Homo Sapiens
  misc_feature (402)..(402): n is a, c, g, or t
gtattaaaaacgtttgtttttattttgtatttttgagactggaaactgataaaaatttctgattaggaaactttgagaatagagtctttcttctttccaaaataacaaatgtcttttagtttgagagctccagctgtggcaacaagaatgataaatgcttttgagaaaattagcaaggttttgccccacttaaatggttaacagtaacagcagcacagacccaaacttgataaaactttggtacttgttatttggactaaaattttgtctcactcgattcagacacgtaaatgggagttttcagtttatcctgcccactgattcataactggggagacaggttcatggggaagggcaggcattggggcacatactcctttctctttgctggaggaaccaccnatattaatccaatt

SEQ ID NO: 247141 - DNA, 851 bp, Homo Sapiens
tgccggacccgcggcgacagctagaacctcaaaaaagctgtggttctcaaaggggcaaatgacttagatatcaaagcagagggaaatattagattccggtatatcgttcttcaagacacttgctctaagcggaatggaaatgtgggcaagactgtctttgaatatagaacacagaatgtggcacgcttgcccatcatagatcttgctcctgtggatgttggcggcacagaccaggaattcggcgttgaaattgggccagtttgttttgtgtaaagtaagccaagacacatcgacaatgagcaccaccatcaatgaccaccgccattcacaagaactttgactgtttgaagttgatcctgagactcttgaagtaatggctgatcctgcatcagcattgtatatatggtcttaagtgcctggcctccttatccttcagaatatttattttacttacaatcctcaagttttaattgattttaaatatttttcaatacaacagtttaggtttaagatgaccaatgacaatgaccacctttgcagaaagtaaactgattgaataaataaatctccgttttcttcaatttatttcagtgtaatgaaaaagttgcttagtatttatgaggaaattcttcttcctggcaggtagcttaaagagtggggtatatagagccacaacacatgtttattttgcttggctgcagttgaaaaatagaaattagtgcccttttgtgacctctcattccaagattgtcaattaaaaatgagtttaaaatgtttaacttgtgatcgagacctacatgcatgtcttgatattgtgtaactataatagagactctttaaggagaatctta

SEQ ID NO: 247142 - DNA, 926 bp, Homo Sapiens
tctcggacgaggaatcacgctgccgctcgcgcctctcgatgggcagctcgcacttgctcaacaagggcctgccgcttgtaagactttgaccccgacgcaggcttcagtgattgccgcggatcagaagcctgagcactttggctcgagacaattaaggacgtgggatgaggctccgagacaggacgcggttctgcctggggatcctgaagataaaaagctttgaaaagtcgaattcatggtcgtggaagctgagcccatattaagagatgtcaggcgtccgacctccgatcatgaacgggcccctgcacccgcggcccctggtggcattgctggatggccgggactgcacagtggagatgcccatcctgaaggacgtggccactgtggccttctgcgacgcgcagtccacgcaggagatccatgagaaggtcctgaacgaggctgtgggggccctgatgtaccacaccatcactctcaccagggaggacctggagaagttcaaagccctccgcatcatcgtccggattggcagtggttttgacaacatcgacatcaagtcggccggggatttaggcattgccgtctgcaacgtgcccgcggcgtctgtggaggagacggccgactcgacgctgtgccacatcctgaacctgtaccggcgggccacctggctgcaccaggcgctgcgggagggcacacgagtccagagcgtcgagcagatccgcgaggtggcgtccggcgcctgccaggatccgcggggagaccttgggcatcctcgggacttggcagcccacttcctgcctgaccgcgtgtccttgtcccggccagcggtttgggggaatcgggacgttttcggggggtgctccggtgaaggcgggccccaccctaaaggtccccgggggggccagggaagtgggcccctggggtac

SEQ ID NO: 247143 - DNA, 1060 bp, Homo Sapiens
ttggggcagcggcgacggcagctgcgacagcaacccctgctgggccgaaactgggcagagcggagcagacgtctgaagcagcgcgagtgaggcgcgagggtagcgcccgcgcccgggaagacccctcggcgcgaaccggcagcccagccccgggtcccggttcccaaggccccgcctctagggcctggggactaatcggattgagagcgcgccggcccgggccgcgaactcgccaattgcggagggcggtggccaccgcccaatccggagcagacaggtgcgaggtccggaaggcggaggccaatcggcggcggttgcgacctgctggggcaggtctcggccaataaggaggctcgagtgacatcttcgcgcaccaatcgggagtgagggagcattcgtgcccgctcgcccttccggccagacctctatttaccaggggcgtgcagcccgcttgccaatcagagcgcggctgagcggccccgcagccaacccccgaggagcggccggctggcgtccgccgcgcccaggagttggggatgtcctacaaacccatcgcccctgctcccagcagcacccctggctccagcacccctgggccgggcaccccggtccctacaggaagcgtcccgtcgccgtcgggcttcagtgccaggagccggcgctcctttcagaccgctgtttaacgactttggaccgccttccatgggctacgtgcaggcgatgaagccacccggcgcccagggcttcccagagcacctacacggacctgctgtcagtcatagaggagatgggcaaagagatccggcctacctatgctggcagcaagagcgccatggagcgcctgaagaagagtatcatccatgcccgggcccctagtcagagagtgccctggcaagagacaggagcggaaacggcccgcaccgaaacaagaaagcggccttcgggctcagcggtctgggaccttatcccggccaactggcagaagcaccccgccttcttcccctgggcctttcattccccgaaggttggcactttaaacccttcctgggggcttttccct

SEQ ID NO: 247144 - DNA, 987 bp, Homo Sapiens
ttggctcttgtgaaggctgcaagggcttctttcgccgaagcatccagaagaacatggtgtacacgtgtcaccgcgacaaaaactgtatcatcaacaaggtgaccaggaatcgctgccagtactgccggctacagaagtgcttcgaagtgggcatgtccaaggaagctgtgcgaaatgaccggaacaagaagaagaaagaggtgaaggaagaagggtcacctgacagctatgagctgagccctcagttagaagagctcatcaccaaggtcagcaaagcccatcaggagactttcccctcgctctgccagctgggcaagtataccacgaactccagtgcagaccaccgcgtgcagctggatctggggctgtgggacaagttcagtgagctggctaccaagtgcatcatcaagatcgtggagtttgccaagcggttgcctggctttacagggctcagcattgctgaccagatcactctgctcaaagctgcctgcctagatatcctgatgctgcgtatctgcacaaggtacaccccagagcaggacaccatgaccttctccgacgggctgaccctgaaccggacccagatgcacaatgccggcttcgggcccctcacagaccttgtctttgcctttgctgggcagctcctgcccctggagatggatgacaccgagacagggctgctcagcgccatctgcctcatctgcggagaccgcatggacctggaggagcccgaaaaagtggacaagctgcaggagccactgctggaagccctgaggctgtacgcccggcgccggcggcccagccagccctacatgttcccaaggatgctaatgaaaatcaccgacctccggggcatcagcactaagggagctgaaagggccattactctgaagatggcagattccaggcccgatgcctcccttaatccgagagatgctggagaaccctgaaatgtttgaggatgactcctcgcagctggttcccagc

SEQ ID NO: 247145 - DNA, 1254 bp, Homo Sapiens
tgtacaaaaaagttggcgatgagaggcccatggcctgactccgcccagtctcagtgagtccctcctgctgtgtggctcgaggaggtgggtggtgatggttcccgtgggagtggggtaggcccctgggggcaggctgctgaggggccagggccccgggtgtgctttgagtgtggagctccctgattttgccggccaggcacacacggggctgagggaagagagggagtcaaggatgacacccgatgtctggcctgggtggctgctggaatggatggtcttgtctgcctcagggatcagagtggggctcccggcagagcctgctgggcacccccaccctctgcggggcagggcccggcccgggagtgatgccaccctgcctctcccctctccccacagagcaacagcgagctcgccatcctgtccaatgagcatggctcctacaggtacacggagttcctgacgggcctgggccggctcatcgagctgaaggactgccagccggacaaggtgtacctgggaggcctggacgtgtgtggtgaggacggccagttcacctactgctggcacgatgacatcatgcaagccgtcttccacatcgccaccctgatgcccaccaaggacgtggacaagcaccgctgcgacaagaagcgccacctgggcaacgactttgtgtccattgtctacaatgactccggtgaggacttcaagcttggcaccatcaagggccagttcaactttgtccacgtgatcgtcaccccgctggactacgagtgcaacctggtgtccctgcagtgcaggaaagacatggagggccttgtggacaccagcgtggccaagatcgtgtctgaccgcaacctgcccttcgtggcccgccagatggccctgcacgcaaatatggcctcacaggtgcatcatagccgctccaaccccaccgatatctacccctccaagtggattgcccggctccgccacatcaagcggctccgccagcggatctgcgaggaagccgcctactccaaccccagcctacctctggtgcaccctccgtcccatagcaaagcccctgcacagactccagccgagcccacacctggctatgaggtgggccagcggaagcgcctcatctcctcggtggaggacttcaccgagtttgtgtgaggccggggccctccctcctgcactggccttggacggtattgcctgtcagtgaaataaataaagtcctgaccccagtgcacagacatagaggcacag

SEQ ID NO: 247146 - DNA, 1264 bp, Homo Sapiens
  misc_feature (1143)..(1145): n is a, c, g, or t
  misc_feature (1147)..(1147): n is a, c, g, or t
ttgggtcgtggctgctgccgggtcctgcgcgctccggactgaggtggcgtccctgggccggacggcggtgtcccggcgtggcgggaagccggcactggagcgggagcgcactgggcgcgggaccgggaggcgcagggaccggacggctcccgagtcgcccacctgacggtaccgagagggcggcgcccctccgagcagagccgtcccggccactcccctgggatctgacttggctcttgcggtcgcgggcaccgtgaagccctggggtgtgcgtggctcctcctggtaggcgccctttcccggcgtccggcttggggtggtggtggcgttgactccagccccgcctctccctggagaggagggctccactcgctccttcggcctcctcccctggggccgcagcgactcgggccggcttcctgcttccctgcctgccggcggtcccgctggctagaagaagtcttcacttcccaggagagccaaagcgtgtctggccctaggtgggaaaagaactggctgtgacctttgccctgacctggaagggcccagccttgggctgaatggcagcacccacgcccgcccgtccggtgctgacccacctgctggtggctctcttcggcatgggctcctgggctgcggtcaatgggatctgggtggagctacctgtggtggtcaaagagcttccagagggttggagcctcccctcttacgtctctgtgcttgtggctctggggaacctgggtctgctggtggtgaccctctggaggaggctgggccccaggaaaggacgagcaggtcctcatccgggtggtgcaggtgctgggcatggtgggcacagccctgctgggcctctctgtggcaccatgtggccccagtggcaggacagttgcattctgtggccttcttagcactggcctttgtgctggcactggcatgctgtgcctcgaatgtcactttcctgcccttcttgagccacctgccacctcgcttcttacggtcattcttcctgggtcaaggcctgagtgccctgctgccctgcgtgctggccctactgcagggtgtgggccgcctccagtgcccgccactccctatcaaaggcaccccttggcccccgtatcgacttcctttgaaccgtctacccgnnncnccacctcctttctgggcaactgaaatgctcctcttagtcgactgcacgcggaccgccttcaagacggttgcgcagctgttggcacgacctaaccacacactgcgtaaccctagataa

SEQ ID NO: 247147 - DNA, 1719 bp, Homo Sapiens
ttggctggctcactcctgtggaagggaaggattgccggggctgtgtcaccagcacctgggacaaggtctccgaacgaggaccctgaagagaaggctatgcagggggacgggccgctgcctggctcaggacttccctctggtttcttcacggtccacagatgctacccggagcctttctcgaaagcgctgactcagtgtctcaggtgcgcgcccgaggagtggcaaacccggcctggctcagaaagggggcaggagcctcgtgagaatcttccatgagcatcttccgaggggattcctgtcctgtcttctctgtgtgaacgccagtgtggacagatgaggatagatgatggagcccaggccacccaggagggggtgatggggaccatgcgtggcccctgcctgggacttccctccccacacaccccttggcattaacgtctccacagaggggagagggttataggacaacctggtgtggggggcgccggggactctcaagagcccccactgtccagatgctggtcttgccttttgtaaaaggacatcagtgcctcactgtgccgctgacacctggtgagaactctcaaaaggaagcttcccttacgggaacggggatttcctgagagtccagcgatggacagagggcaggagacccgctaggtgcacccagaagctcaaaaggaacagtggatgtgcagtgtgtagttttatttgtttttatttccataacacaagagaggaagcgaagggccagggccagaggcatcccctgcacggttcgaaggctttcaaccgtcccgggtttgttttgaaggcaattttggggccgcgccaaggaaaccctgcaggctgtcagtcccagcatgaacagcttaaaataaaaatctcccgtctggttgctgctcggagaggctccaagaaatgcaaaacaaacccgcctgggaaaatgctgccctgagaaccagagcgagggcttgaaagatgccttcaacacagactcttctaggaatccagccagttttgggacggccgtttcacaaaaccaaaaaacaccaagtaacatttctaaccggagaattgccggttttagcaagaaaaaggggcttcacctaaaagggagggtcacaaaacacgaagggggttccccctggcgcctgcctcttcctttctgagcagatccgtccgagactgtggagcggaatcgccaccctggcaggagggggcgcagcagccggtctgggtgggcgctcactgtttgcccgcctgtctgccaggcttcttctctggctggcctctgcctgtgcccgggatcccacctcggccccggccaccaaacacacctcggccagcgccgcccatgccgcggcctttctgctgcttctgctgctgcaggcctccgcggccgcggcccttggccaccacctcctccttgaccatgtcgatgatctcgtcggggatgcgcaggtacttgatggtgctgccgcggatgtagcactcgggcatccgccagaacttgtccccgtccctggacgtgcagatgacttctcgcaggttaatgttcatccagttgtcgcagctcaccaggtgtccattgtacgtctccccatttttcagctccaccaacatggggtgattctgagccgtcttcagcagtgacaagggaagcatggtgccggcggggaccgggctcgccggccacttccgccgccgccgctccaa

SEQ ID NO: 247148 - DNA, 1292 bp, Homo Sapiens
  misc_feature (1152)..(1160): n is a, c, g, or t
ccttataaaagccaactttgtacaaaaaagttggcgccttgagcgcgaggatgctgacccggagccggagcctgggacccggggctgggccgcgggggtgtagggaggagcccgggcctctccggagaagagaggctgcagcagaagcgaggaaaagccacagccccgtgaagcgtccgcggaaagcacagagactgcgtgtggcctatgagggctcggacagtgagaaaggtgagggggctgagcccctcaaggtgccagtctgggagccccaggactggcagcaacagctggtcaacatccgtgccatgaggaacaaaaaggatgcacctgtggaccatctggggactgagcactgctatgactccagtgcccccccaaaggtacgcaggtaccaggtgctgctgtcactgatgctctccagccaaaccaaagaccaggtgacggcgggcgccatgcagcgactgcgggcgcggggcctgacggtggacagcatcctgcagacagatgatgccacgctgggcaagctcatctaccccgtcggtttctggaggagcaaggtgaaatacatcaagcagaccagcgccatcctgcagcagcactacggtggggacatcccagcctctgtggccgagctggtggcgctgccgggtgttgggcccaagatggcacacctggctatggctgtggcctggggcactgtgtcaggcattgcagtggacacgcatgtgcacagaatcgccaacaggctgaggtggaccaagaaggcaaccaagtccccagaggagacccgcgccgccctggatgagtggctgcctagggagctgtggcacgagatccatggactcttggtgggctttcggccagcagacctgtctgcctgtgcaccctcgctgccacgcctgcctccacccaagccctctgcccggccgcccagggtctcctgatggccgcacggttctggcccaggtgcccgctgtggccaccgtcccggaactggctttacgcttccggaaacccacgcccgttcaattaaatcccttgccgcctttgccccctctttcctcttgcggctccaggccgtcgcgcggcgttcgcggtctctctctcccctcccgcgctgccctaaatgcacgccctcgtttaccgttnnnnnnnnntcatacatccggttcatcgccatcctccgcaccttcgtccctgtcttaattcccccgtctatggctcccgtccattcctcttccccgccttttccttctcttcgcctctcttcccctccccccgattgtttc

SEQ ID NO: 247149 - DNA, 481 bp, Homo Sapiens
  misc_feature (45)..(45): n is a, c, g, or t
gattcggaattaaaaaggctcactaaggggaatttggccctcgangcccaaaaatcgggcacgagggtttttaatcatcaaatttaaccattttcaaaaactggttccctggaggtgtgcagtgcccccttgcctcttcaaacctacagcttctctttgccatttgtggatttcacatcactccacacagaaacattacagcctggcatccccagtctttgccttcttccagctgcctcgacacagcactgtggcctgtccctattgcccaggcacgccatttccaagggcaggaaggggcagtgtcctgaagcccatcttttctgtgactgtcttaggtgatgtgtagccccctccacctttccactcaacaacctcccacccctgtcctgctgcatggtccggagtctgggacctactttgttttttgttatttatgaccttgtttaaagaaaataaatatctcccaacctttaaaaaa

SEQ ID NO: 247150 - DNA, 611 bp, Homo Sapiens
caatgctttttcatttatagccaactttgtacaaaaaagttggctttccgagttggctgcagatttgtggtgcgttctgagccgtctgtcctgcgccaagatgcttcaaagtattattaaaaacatatggatccccatgaagccctactacaccaaagtttaccaggagatttggataggaatggggctgatgggcttcatcgtttataaaatccgggctgctgataaaagaagtaaggctttgaaaggtaagatttttgcttctgaaaatggttgggaatggaaaacagcatcatgtcttttcaggacaaggtatatcgttgttctcaattgaaatcgaaacacagttcagtatatatgtaaggtgcagttgaaatgcttcacagcttgaagtttgctatgcctgctgggaaagagaattctgaatttctgctttttatagtcaagtggatcaagtaaaacttccaggagtaatagaggaatggattaattagaggtagtcgatatcatcaccaatagggaagcacaagtgagctgtgcaagcatgctgtcctagaagttccctaatgatgtcgttttattttgtttattgttttttgagacggagcctc

SEQ ID NO: 247151 - DNA, 433 bp, Homo Sapiens
  misc_feature (387)..(387): n is a, c, g, or t
  misc_feature (413)..(413): n is a, c, g, or t
caggatttaaccataaatttattgcagacctattgtgtgccaggcatgagcccagtgctcccacaaacagcgtctccaggtacgagaagtgtaatttcgaccctggaacaccttcctgcactcagacagaagcatgtgcagactgctctcagcaacgccacctccttcactccctgggccattgggccccttctctctacctgtcccctgttcactccacttcctgccccaggccttctcttagggattttccagggctttggggagctgctgctttcagtttctgggctgtgggggtctcagcaggagtttgttccaaaacccagtaggaaataaaatccttcaagaggggagatgattcgtggggctggggtgggatttccagtngaccagaggacgtgcaaattttgccntaatgatttggggacctagg

SEQ ID NO: 247152 - DNA, 458 bp, Homo Sapiens
  misc_feature (50)..(50): n is a, c, g, or t
  misc_feature (178)..(178): n is a, c, g, or t
  misc_feature (294)..(294): n is a, c, g, or t
  misc_feature (391)..(391): n is a, c, g, or t
  misc_feature (427)..(427): n is a, c, g, or t
ggagtccgaggtgcagggggagcagcccaagccggccagccctgctgagngaagacaaaatgccgccctacgacgagcagacgcaggccttcatcgatgctgcccaggaggcccgcaacaagttcgaggaggccgagcggtcgctgaaggacatggaggagtccatcaggaacctggnagcaagagatttcttttgactttggccccaacgggagttttgcttacctgtacagccagtgctacgagctcaccaccaacgaatacgtctaccgcctctgccccttcaagcttgtnttcgcagaaacccaaacttcgggggctttcccaccagccttggcacctgggggcttcatgggtttgggccccgaccacggacaagtttcagttgccntgaagttttgagcaaggcacgggttgttggcagggncccaaccgtttcaccaccttgcggttctttt

SEQ ID NO: 247153 - DNA, 732 bp, Homo Sapiens
ctgcttttgatgagctgtatttgtgaagttcatatcagagcgaacactacttatgaggggaaacaagctctgtgtattttgtattaaaccatcagtaaaaaaatgagacaatatcattactttcaaaatatagaaagccaatagttgaaatcatttagtagtaaaatttttttctacatataacctcatatgtgtaaagagtattagagcgacatttcagctatattggacttttgttaggtaaagggcttctcactcaggtaaggcttaggattaggagagtgtcgttcagggattgaggtattgaatcggcacactcattccccactctctattttgacgaaaagacagatactatatttggatgtgacaggtgttttttcttttgtacaagagtgcagaactgtttacagtacataaacatcagcgtggaaaatgctagtacatatataaaggtgaacatcagtaccagctgtttccacaaagcccactcttggtaagaatcttctttgtggcaaaaaagcttggcatcaatgtaggctgaaatttatatcattagaaatcaatgtcattaaaggagatatgggagttaccttagaaatattaactccttctctagctaggaaaggccagaagtaaaactgttaaaatcatcatgatcatgatgatcatcatcatcgaaaacacagccccagtttgctttacagcccaagttacaaactgtccctttaa

SEQ ID NO: 247154 - DNA, 601 bp, Homo Sapiens
atttttctcatctataacagtagaccaaggatctacaggcaagatcaaacacagatgggaaaaacaaaaacagtgaaggtatgaagtgagatgcagccgccagctcgtgggatgcagggaccctgaatttactactcctccactatcccccactactgccaccttgccctatggcaggcggcaaatctcagcgaccttattctaatatataggaaacaattttgcatcataattacttagaaaatacccgggaggggttgggggaggaggaccctttgtcatactccatgtaactcaccatcgcataactctgctcggcatccaggtactttttatactcatggttgagtttatcaaaaacagtgggctatcacgggcagcgatgctctgtctgactcacttaacactggaaaggcacaatgttcacacacggatcaaaccaacttcatgtcagcttcagaatttccacacgttgctatgataaaaactaatctcaaaaggttaccaatgcaaaagtacctttaaaggacactctaagaaatacaatactttaaagacctgacagctagatgtcattcgcaacccctttctggttacggtt

SEQ ID NO: 247155 - DNA, 889 bp, Homo Sapiens
  misc_feature (812)..(812): n is a, c, g, or t
tcacatgcaatgctccaaatgtaaacacgacttctgctggatgtgtctaggagattggaagactcatggcagtgaatactatgagtgcagtcgttacaaggagaatcctgacatcgtgaaccagagccaacaagcccaggcgagggaagccctcaagaagtacttattctactttgagaggtgggaaaaccacaataaaagcttgcagctagaggcacagacataccagcggattcacgagaagattcaggagagggtcatgaacaatctggggacatggatcgactggcagtacctacagaatgctgccaagctcttggccaagtgtcgatacaccctgcaatacacctacccatatgcatattacatggagtccggacccaggaagaagctgtttgaataccagcaggctcagctggagtctgagatcgacaacctctcatggaaagtggagcgtgcagacagctatgacagaggggacttggagaaccagatgcatatagcggagcagcggaggagaaccctgctgaaagatttccatgacacctaagttgggatgtggatgtgccggggtgaggaagatgtggctgcaaggtctcccggctgccatactgcatgcttgcaggctctgcctttcatgaccccatgcaacagccagggccccactcctgagagacactggcaacacctcttagttgatttctgttttcttctcttttcactttttgtttctaccaggggtagaggccatgttgaactggcctcttttcaggacttttatttccccctggatggttgttgggagggagggnaaagtgtttttctgaatggctattaatagtattagatcattacaacttatgtaactttcaaaggttgtacaattata

SEQ ID NO: 247156 - DNA, 735 bp, Homo Sapiens
  misc_feature (12)..(12): n is a, c, g, or t
  misc_feature (29)..(29): n is a, c, g, or t
  misc_feature (57)..(57): n is a, c, g, or t
  misc_feature (75)..(75): n is a, c, g, or t
  misc_feature (85)..(85): n is a, c, g, or t
  misc_feature (105)..(105): n is a, c, g, or t
  misc_feature (128)..(128): n is a, c, g, or t
  misc_feature (143)..(143): n is a, c, g, or t
  misc_feature (228)..(265): n is a, c, g, or t
attcccttcccncggtgggcctcaactgnaaggaaaaacagcccaaggttttaaaantcgttcccccaatggcanaaccctgaanaacacaaggtccttccttcnccccccaaagggcaaaagctggnattaaagtgccaccnagctcctcctgttcctctgcaagcccccaagatcttgcctgggtgcccccagggagcccggtggcgggggctggaggtggggttnnnnnnnnnnnnnnnnnnnnnnnnnnnnnnnnnnnnnnaccccaaccgccggcatggatcatgaaagactgggattggatttggggcatagaaatactagctgtgttttggttgaaaggcattccccaggaccaagtcattttagagcagatacggcttggtttcttggtgtctggcctcaggttgccttgaggaagagctgatgagttgacggataaggatgcatatgctttttgacccactcactagaacagagatcagtaaactgtgtcctgtgagtgaaattcagctgggagcctgttaaataaatcttcctggaagggagccaagccctctcgtttgtgtgttgtctatggctgcttttgtgctaggacggcagagttgagtagtttcgacagagacctcacggctcgccaaactgaaagtcctggattcagtatctggccctttgcagacaatgtttgctgaccccctactccagaagagcccagcccaaaagacgagcact

SEQ ID NO: 247157 - DNA, 725 bp, Homo Sapiens
  misc_feature (311)..(311): n is a, c, g, or t
tactgatctctgttctagtgagtgggtcaaaaagcatatgcatccttatccgtcaactcatcagctcttcctcaaggcaacctgaggccagacaccaagaaaccaagcgtatctgctctaaaatgacttgttcctggggaatgccttcaaccaaaacacagctagtatttctatgccccaaatccaatcccagtctttcatgatccatgccggcggttgggtggggaggggaatcattggttgggggaagggaggaaaccccacctccagcccccgccaccgggcttccctggggcacccagcaagatctnggggctgcagagaacagaagagctggtgcacttaatccagctctgcccttggggggaggaggacctgtgtgtcaggctctgccatgggaacgagtgtaaaccgtggctgtctcctgcagtgagccaccgcggcaggcacgttgactgttttactgacatcactcaaaagctaaagcaataacattctcctgcgttgctgagtcagctgttcatttgtccgccagctcctggactggatgtgtgaaaggcatcacatttccattttcctcggtgtaaatgttttatgtgttcgcctactgatcccattcgttgcttctattgtaaatatttgtcatttgtatttattatctctgtgttttccccctaaggcataaaatggtttactgtgttcatttgaacccacacaccggaatg

SEQ ID NO: 247158 - DNA, 768 bp, Homo Sapiens
ggcaagaccgaggccaccaagaggctgctgcagttctatgcagagacctgcccagcccccgagcgcggaggtgccgtgcgggaccggctgctacagagcaacccggtgctggaggcctttggaaatgccaagaccctccggaacgataactccagcaggttcgggaagtacatggatgtgcagtttgacttcaagggtgcccccgtgggtggccacatcctcagttacctcctggaaaagtcacgagtggtgcaccagaatcatggggagcggaacttcctggaccatgtgcgcacctgttttttgctaaacctgaggcggcagctgccccggaatgtcctggacacctcgtggcccacgcccccacctgccctgcgtgaggcctcagagcttctgcgggagttgtgcataaagaacatggtgtggaaatactgccggagtatcagccctgagtggaagcagcagctgcagcagaaggccgtggctagtgagatcttcaagggcaagaaggataattaccctcagagtgtacccaggctcttcatcagcactcggcttggtacagatgagatcagcccccgagtgctgcaggccttgggctctgagcccattcagtatgcggtgcctgttgtgaaatacgaccgcaagggctacaagcctcgctcccggcagctgctgctcacgcccaacgccgtcgtcatcgtggaggacgccaaagtcaagcagaggattgattacgccaacctgaccggaatctttgtctgcagt

SEQ ID NO: 247159 - DNA, 1232 bp, Homo Sapiens
caaaagcccagtcacatgactgtgttcctgttctttcagaacacccactgtatattctttacacatctggcacaacggggttacctaagggtgtgattaggcccactgggggatacgctgtcatgctacactggtcaatgtcttccatatacggacttcaacccggagaggtgtggtgggcagcttctgacttaggctgggttgttggacattcctatatctgctatggacctcttcttcatgggaacacaacagttttatatgaggggaagcctgtgggaacaccagatgctggcgcttatttccgtgtgcttgcagagcatggagtagctgccttgtttacagcaccaactgcaattagagcaatccgtcaacaggaccctggggcagctttggggaagcagtactctctgacaaggttcaaaacattatttgtggctggagaacgatgtgatgtagagaccctggaatggtccaaaaatgtcttcagagtacctgtcttagaccattggtggcaaactgagactggatctccaattactgcgtcatgtgttggattaggcaattctaaaacacctccaccagggcaagcaggaaaaagcgtcccaggatacaatgttatgattttggatgacaacatgcaaaaactgaaggctcggtgtttaggaaatattgtggtaaagttaccattgccacctggggctttttcaggactctggaagaatcaggaagcattcaagcatttatactttgaaaaatttcctggatattatgataccatggatgctggttacatggatgaagaaggctatttgtatgttatgtctcgagtggatgatgtaataaatgttgcaggtcacagaatttctgcaggcgccattgaagagtcaatcctttcccatggtaccgtggcagactgtgctgttgttggcaaggaagatcccttaaaaggtcatgtccccttagcactctgtgtattgagaaaagatataaatgcaacagaggagcaagtttcggaagaaattgtgaaacacgttagacagaacattggccctgtggctgcttttcgaaatgcagtgtttgtcaaacagctacccaaaaacagatctggcaagatcccccgatcagctttatctgccatggtcaatggcaagccatacaagataacttctacaatgtgaagaccccagcattttgggccacgtagaagaaatgctgaagcaagcataatg

SEQ ID NO: 247160 - DNA, 144 bp, Homo Sapiens
cacttgtcttctgagaccaaggctgtcctggaggattttggtggtttcgagctggagcttcgaggggatgtagaaatgaagggcaaaggcaaggttcggacctactggctccttggggaaagggggagtagcacccgaggctga

SEQ ID NO: 247161 - DNA, 434 bp, Homo Sapiens
  misc_feature (200)..(200): n is a, c, g, or t
  misc_feature (402)..(402): n is a, c, g, or t
gcttgctttgatgctgtcatagacaactttgatgtgtacaaggtggagacaattggcgatgctacatggtggtgtcagggctccctgtgcggaacgggcggctacacgctgcgaggtagcccgcatggccctggcactgctggatgctgtgcgctccttccgaatccgccaccggccccaggagcagctgcgcttgcatntggggcatccacacaggacctgtgtgtgctggagtggtgggactgaagatgccccgttactgtctctttggggatacagtcaacacagcctcaagaatggagtctaatggggaagccctggaagatccacttgtcttcttgagaccaaggctgtcctgggaggagtttggtggttttcgagcttggagctttcgaggggatnttagaaatgaaggttagagggagaagcctttg

SEQ ID NO: 247162 - DNA, 1193 bp, Homo Sapiens
ttggcaattcttggttttctgttcccttctaccaaaacccagcataggactcagtgtacacttactttaaaacaaaaactcacatttcttagctgcaggtgatggcctcagtcattttaatacagcctggaatgagtttgcttattacccagtcactttcgtagtgaatgttcaaaccccaaagcaaatgtttgcatctccttgtccataaaggagaaagccaggttataggagaaagagagagaaaggcgcatgtctgtttgcacagagagaggcaattttgtctacctttcgagaatcagttataaacagaagggcctcttaggattttgagctctcctgacaatgaaggaaaagctctcttgagtatacaagttccacactcattacctttcagtggtgacccatcacccactacaatttgttgaaggaagggagtgtcagagatatgctttaaagttgtactttaggctgaaattctctctgtatttggacctgcagatgttgtgtacagaaccgatgcatggcagggtcaggaagctaggagagtgaaggcgcttgtggagacagctctgtagcaaatgaaacacggaagcctccgggaatgtgtttgtgtcaccagcagcaggcatttccctgtcctccccacccccagtctccacatccccagcagcctcttccagaagcatgtcagggagacggacaggtgctctccttctcgtgcaccacatccaagtccacccaccgtggacgcagtgtgactaaatgctggccttgaagagaaaccctcagccagcttgtctgttgtccaggtccctcagtgtctctggtttccctgccctgcataatttaagcattagtgccaaatacatctgtcatattcctctccctggagactgcgaaatgtccagactttttcagactagtggagggaaggaatgttacataactaagtggaggcctggaactgtcaggatttgacagggctggaccagagacccttccgcctctgcctagtgtgtctgtcaggcaggcagcagccatcaatccaagaatgagccatggcggcaagcactgtgtggagaaaggaacccagccgaggtctgagtttcagacagaaactggggagttgggacatcttctctgtgccaggcttcattgacaccatcgctccccacagcagctccttgggg

SEQ ID NO: 247163 - DNA, 484 bp, Homo Sapiens
gggtctgctgtttccacggacgactcagagcaagaagtggacatagagggcatggagtttggccctggtgagctggacagtgttggcagcagcagtgacgcggacgaccactatcagcctgcaagagtggcaccgggcggcgaacagtggcttcgggcccccacctgctggcggctgggccgccccgccctctcgtaggcccgtgccctctgctccttggcctgcctgcccgccagccacgcgtgtcagccctccagttctccttcaattgacgccagcctctccacaggcccagtgctgtgccattctggaagctccagctgctgctgggctgcctggcactgcccgcttgccggtcagggcctgccgagctgcctgccccttccagctgggcagagtcccctgcaaggaggcagggcccagcttccacatccggagccctggtcagcatagccgcccacggtctgttctcagattcctaatc

SEQ ID NO: 247164 - DNA, 1148 bp, Homo Sapiens
  misc_feature (106)..(160): n is a, c, g, or t
actttgtacaaaaaagttgggggcaagatggcgcttgccgagtgattctcctcgaatacctcctgccggcgcggagacaccggggcgggggtcctgccgcaactannnnnnnnnnnnnnnnnnnnnnnnnnnnnnnnnnnnnnnnnnnnnnnnnnnnnnnacctcgaggggcgggcctggttcccgggacaccatgtcggactctgaggaggagagccaggaccggcaactgaaaatcgtcgtgctgggggacggcgcctccgggaagacctccttaactacgtgttttgctcaagaaacttttgggaaacagtacaaacaaactataggactggatttctttttgagaaggataacattgccaggaaacttgaatgttacccttcaaatttgggatataggagggcagacaataggaggcaaaatgttggataaatatatctatggagcacagggagtcctcttggtatatgatattacaaattatcaaagctttgagaatttagaagattggtatactgtggtgaagaaagtgagcgaggagtcagaaactcagccactggttgccttggtaggcaataaaattgatttggagcatatgcgaacaataaaacctgaaaaacacttacggttttgccaggaaaatggttttagtagccactttgtctcagccaaggcaagagactctgtcttcctgtgttttcaaaaagttgttgctgaaatccttgggaatcaaattaaacaaagcagaaatagaacagtcacagagggtggtgaaggcagatattgtaaactacaaccaggaacctatgtcaaggactgttaacccttctagaagctctgtgtgtgcagttgggtgagctcaattttcctattgtgttgatagttttggctgcccttcacctctgggtgtgtctgagaacttctaggaacttgttttatcagtgaccatctctgtagttcagttaacactttcctccgaacttgcttcatctttaagtgttgcctcccagtggcaggcatgtccttgggtttgaaagaattcaactttgggaccacacactttgcattcaaactggaagtctcattctctggaattagactgtttcattgcaaaagaatggtgtccggccgggcgcggtgctcat

SEQ ID NO: 247165 - DNA, 2421 bp, Homo Sapiens
  misc_feature (633)..(688): n is a, c, g, or t
ttggggggtgtttgcatctcctcacccccttctttacctggaggtactgctatctctccaccccctcctttgtctggggatgctaccatccctccaccccctcctttgcctgagggtgttggcatcccttcaccctcttctttgcctggaggtactgccatccccccacctcctcctttgcctgggagtgctagaatccccccaccaccacctcctttgcctgggagtgctggaattccccccccacctcctcccttgcctggagaagcaggaatgccacctcctcctccccctcttcctggtggtcctggaatccctccacctcctccattgtcccggaggccctggcattcctccacctccacccggaatgggtatgcctccacctcccccatttggatttggagttcctgcagccccagttctgccatttggattaacccccaaaaagctttataagccagaggtgcagctccggaggccaaactggtccaagcttgtggctgaggacctctcccaggactgcttctggacaaaggtgaaggaggaccgctttgagaacaatgaacttttcgccaaacttacccttaccttctctgcccagaccaagacttccaaagccaagaaggatcnnnnnnnnnnnnnnnnnnnnnnnnnnnnnnnnnnnnnnnnnnnnnnnnnnnnnnnngtgttggattcaaagacagcccagaatctctcaatctttttgggttccttccgcatgccctatcaagagattaagaatgtcatcctggaggtgaatgaggctgttctgactgagtctatgatccagaacctcattaagcaaatgccagagccagagcagttaaaaatgctttctgaactgaaggatgaatatgatgacctggctgagtcagagcagtttggcgtggtgatgggcactgtgccccgactgcggcctcgcctcaatgccattctcttcaagctacaattcagcgagcaagtggagaatatcaagccagagattgtgtctgtcactgctgcatgtgaggagttacgtaagtgtgagagcttttccaatctcctagagattaccttgcttgttggaaattacatgaatgctggctccagaaatgctggtgcttttggcttcaatatcagcttcctctgtaagcttcgagacaccaagtccacagatcagaagatgacgttgttacacttcttggctgagttgtgtgagaatgactatcccgatgtcctcaagtttccagacgagcttgcccatgtggagaaagccagccgagtttctgctgaaaacttgcaaaagaacctagatcagatgaagaaacaaatttctgatgtggaacgtgatgttcagaatttcccagctgccacagatgaaaaagacaagtttgttgaaaaaatgaccagctttgtgaaggatgcacaggaacagtataacaagctgcggatgatgcattctaacatggagaccctctataaggagctgggcgagtacttcctctttgaccccaagaagttgtctgttgaagaatttttcatggatcttcacaattttcggaatatgtttttgcaagcagtcaaggagaaccagaagcggcgggagacagaagaaaagatgaggcgagcaaaactagccaaggagaaggcagagaaggagcggctagagaagcagcagaagagagagcaactcatagacatgaatgcagagggcgatgagacaggtgtgatggacagtcttctagaagccctgcagtcaggggcagcattccgacggaagagagggccccgtcaagccaacaggaaggccgggtgtgcagtcacatctctgctagcttcggagctgaccaaggatgatgccatggctgctgttcctgccaaggtgtccaagaacagtgagacattccccacaatccttgaggaagccaaggagttggttggccgtgcaagctaatgtgggtcctgtgaccgcggcagctcctcagcggagccgcagactgtcctgacctgcagcatgtgcctaaaggctcaaggggatattcctctggggtggccactcacagcaacctgaccctgtctttctctcttggcctgtgctctctcaaacatcacattacagctcagctgcctggaggccagcaaggaaaggggagggcagggaggcctgaggccgacttaggcagccctgggatgacggaataaccaaaggcagggtccaaggtaagctgagccagtaagccatgattacatctcggtcaacacagaaggggcaacaacttaagaccaggggcgcagcctgaatctatcctcaggccgtgacatactaaagggagtatgcccacccaaaggtcaagactcgagaggacgagagacttcaaatagaggggagacatacagagaccgagagaaagcgatggg

SEQ ID NO: 247166 - DNA, 760 bp, Homo Sapiens
aattgatgagcaatgctgacttaacaagccaactttgtacaaaaaagttggctattctatctgactatctggtgaccaaagtgctgggattacaggcgtgagccaccacgcccagccaagatgaactccttaaggacaggatttggtaagtgattgacttctttttagttccatgatcttgagattatttttagctttataaatttagcagtggcagggcccgtggagaatcaggttaatgaggtaaaggctttctgggtatttgctgccaaggccacatcaccaattttctcgatttaaaaaactgtcaagagatttatttttccattgcaggttttaaagtggagattctgaattggaaaataggtactgtcagaacaaagctacctggaaacagcatagagtgaagcctttcgtgagggcttgcaggccgctgctgagtggcagtttacagaagaggttgcggggtgagcctcttagcaggacagaaaacaaggcagcagcgcacctgccaccccttcacgagctgctccttgagcctaaaaagtaggctttattcatcccttctgttcatttaccaacctgggggattgatacgaccggggaaaatgttcctaaaccaggaagctgcgttagccgatcaggctttgtaagatctcgccaacagctagctgcttaggagtacccacacgatacgcacagcacaccactgtcccttcactgcactttcttcctgccttaggtagttgggcttgcctca

SEQ ID NO: 247167 - DNA, 840 bp, Homo Sapiens
acttttaatggcaactttgtacaaaaaagttggataatctctcgccccatgaactcccctgtgcagctggctggactgaaattactagggcacttgagtataaaatttgaagatcactatgtgattaccagttatattccagatttcctcaccttgttaaacaagggaagtgtcaaaaccaagttttatgttttaaaagtgttttcgtgtttgtctaaaaatcacgccaatacaagagaattgatcagtgccaaagtactgtcatcattggttgcaccctttaacaagaatgagtcaaaggccaatattcttaatattattgaaatatttgagaatataaattttcagttcaaaacaaaggcaaagctatttaccaaggaaaagttcactaaatctgagcttatttcaatattccaggaagcaaaacagtttggtcagaaactccaagacttagcagagcacagtgatcccgaagtgagagataaagtcatacgattaatactaaaactctgaatacccctctgttctcataaagcctcaaacagttttttggaattgcaatatgaaaccaatgcatattgtaattataaattcaatacttatgttttccatgttgattgagggaagcaattttatggataccaattaatcttgagatcctgaacatgtgctgatttttattgtgctatatagttatataaattgagatatttttggtatttctgcaacgtgacctgataatgaatctattcatcctgagtaagctatacttctgtgctttatattgatatgtgtattcttttgagattttatttacatgttgttaataaagttgcatgc

SEQ ID NO: 247168 - DNA, 1107 bp, Homo Sapiens
  misc_feature (500)..(500): n is a, c, g, or t
  misc_feature (532)..(532): n is a, c, g, or t
  misc_feature (589)..(589): n is a, c, g, or t
atgcacccattccgagatcagctccctttcgagcaccgagcgagggatccgctcagaaatgggccagcttcggcaggagaacgagctgctgcagaacaagttacataatgctgtgcaaatgaagcaaaaagacaagcagaatatcagccagttggagaaaaagctaaaagctgagcaggaagcccgaagttttgtagagaaacagttaatggaagagaaaaagaggaagaagttagaagaagccactgctgcccgggctgttgcgtttgctgctgcatctaggggagaatgcaccgaaaccttacggaatcggatcagagaactagaagcagagggcaagaagctcacgatggacatgaaggtgaaagaagaccaaatcagagaactagaactaaaagtccaggagcttcggaaatataaggaaaatgagaaggacactgaggtgttaatgtcagccctctcagccatgcaagacaaaacacagcacctggtagaacagncttaagtgtcagagacgaggaatcaagctggnacctgttctccgcactgggtcgatgcaaagcggtcagttcgtagattgtcccaaggnacaaatccttcagaaagtatcaggaaatcaagggacctaaaacagaagataggccgaagtcatgggccgtcatgcccagcataacatacagtgccgccaccagccccctgagccctgtttccccccactactcttccaaatttgtggagaccagcccctctggacttgaccccaatgcctctgtttaccagcccctgaagaaatgaaggccagctgtgtgttgtgcccaaaaatttggttaccggaaggcattgcaaaggagcgtctcttgcagtcaagataaaaaaacagtttctattgtattttgtggaactgtatctgttgtcatttttaaaaggggggaaaagataacatcccaagtctgattagaactgcccatcagtttttccttgtaaatttttagaagacctcacagaactttacagtttatttttctcggccaacacattaaaaccattcttggatttcaagtagccaactttgccttttatgtattcttacatagtttcctcttgaag

SEQ ID NO: 247169 - DNA, 1324 bp, Homo Sapiens
  misc_feature (110)..(149): n is a, c, g, or t
  misc_feature (823)..(839): n is a, c, g, or t
  misc_feature (983)..(1071): n is a, c, g, or t
tgttactatacatccagtctatctactttcttaatatttaaaattgggaattattttgaagacaaataaaaataatataacgaaagtaaatctaacaaattccaaccttnnnnnnnnnnnnnnnnnnnnnnnnnnnnnnnnnnnnnnnnccagaaccaatgagtggaagcttcctgtttacctatcttcaacacctttcatctttctactttccaacaggtagctactaaccaaaatttaacgtatatcattcttgtgtcaacagagcaaggcttatggccagaaatgaatgaaattcataatgaaggtattctgaggaaatatgatcttactctcaaagtctcaacaataccctgggtgataacaactggctctcaaggaacaagatagctcccaagcaactccagtgcccaggaaagatggtgaagagatctttgcagacaatctatcagttactggggcagaaaaatcattgtgactagtcatcttcatacgatagcttaaaccaacagacagaatttatagtgtagcgaagggcagtctaatgcagtagttacttggatccactcttgctgttttgtgaccctgggcaatccagttaacctcccccatatattagctttctaatgtataaaatggagatgacaatggtatctacctcattgaatggtgcaaattaagcaaattcatgaatgtaagatgcttagaggacatccgacacatgagtgcaggacaaatgttggcttttattcaattctaggtccacaaacaaaactttacaaaataaagaggtttttgttgtttttcttttctctctctctcnnnnnnnnnnnnnnnnncatcatctcaagaaatcaaaggcatgcacctggaaaaagaaaacacacttttgaagtcttctaatcactagggctctgtattttgttgcagtcctatagtgtgggtatttaaagaataaggccaggcaactctgtctctagtcnnnnnnnnnnnnnnnnnnnnnnnnnnnnnnnnnnnnnnnnnnnnnnnnnnnnnnnnnnnnnnnnnnnnnnnnnnnnnnnnnnnnnnnnnaaggatactgccaaaaaggcatacattaaactcataattacacccaaatttaccaaatacaggatccttctttgctaccacaaaattcttaatggctttaagtctcaactttctcatgctgtaacactaagggcaataacagctgctccttctgtatgttgctgtgagaggaaataaaatcgtctttataacaaaactttgtgagagctgatgaagtgtttgaataaatgcattcatgataaggagggatgag

SEQ ID NO: 247170 - DNA, 618 bp, Homo Sapiens
  misc_feature (46)..(46): n is a, c, g, or t
accaggattgagagatgagtttctctacaagtgtagaaagtgcagncgatcattatttcgaagttctagtattctggatcaccgtgaaggaagtggacctatagcctttgcccacaagagaatgacaccatcttccatgcttaccacagggaggcaagctcaatgtacatcttatttcattgaacctgtacagtggatggaatctgcttttttgggagtgatgggatggacaggcttcttttgcccaaaatgcagtgccaagttgggttcccttcaactggtatggtgaacagtgctcttgtggtaggtgggataaccacctgcttttcaaatacataagaatagagtggatgaaatgaaaatattgcctgttttgggatcacaaacaggaaaaatatgaacatgatactttatagcttgggaagaaacttgcagatgatatgtgctgcctttgcttcttatcattcatggcagattgtttgtgctttcaacatttcatttgaaatgggagaagataaaatcacttgatgtaacctggaaactatgctttacatggcatcaagcttgatcatgtacattttatttgatattaatcttagcctcgtccgggatccttga

SEQ ID NO: 247171 - DNA, 1177 bp, Homo Sapiens
  misc_feature (75)..(100): n is a, c, g, or t
ttggcatagtttatgctttttagattttggttgctttcttgccaaaataagtgttaactgtgtttcaaacttgannnnnnnnnnnnnnnnnnnnnnnnnncttccagaatgtcttatttaaaaagaaagctaaaagcatacttctaagtcagagcctctattttggtgtaagacttgggatattttttacttccccttgaatatagccaggcacccaagaagtctgatggccacctgagtgcaggtgacaaggacctgacagagcccatgcagggctttagatttggacacacaagagttgataacttcctcatgaactccttgcctgatctaaactcatattatgggttctgactgtttgagtaatcatcttcaaggttaaacctcttggcagttacccttttcacaaagtgcacagtgggaatcgagaatcgatagggttaattttggagcagtggcttataccattcacctctgtttttttgtgattatttcacagataatgagaccttaataacaaataggcgtaaaaaaattttcacattgaaatgatagaaacatttgatgtaataaaacttggttggcttgatattttaaggaattgaaacctagcaatcttcttggagagacaagaattggtctccagctgcctttgatcaagattcgggtgcaagtggagcaggagccatatacctggagggaatgtgctttgtcacaccaaagaggaataaattttcttcaaacttgtatgttgcctaggtttcaaattctttgccgcaaggctgatctgctttcattaactggaattctgtaggagatactggtgacctaagctaagttgcactcagcatactccagtgtccagctacatgaaggttctattataaaggttctacttttaatctgagggaaaacatgttcagggcttctagaacactaaaaaatttggcttaaaccagtgttcagtctggtgccaaacttcgaatggaatacaaattcacataatctgaactttgttcacaggttatcctaatagagtaattcttcactttgctctattgaactgtcttaaggatttgtttaaacagctaagttacttgattaaaataatgataaaattgtattttgtctttgctttaatattaaagttaacaagttttcattttataatgagatc

SEQ ID NO: 247172 - DNA, 996 bp, Homo Sapiens
ggaccaaagaactttatattgatggtaaatttcaaagtaacacaaagaactagttcaatatacagtacacttcctactcttcacagagaactgaaattttctataaagacatttatacttaggaaacatcagacaaccaaagtatgtataaaactcacaagatattttacacacagttcacaataattaattgtgatattttagatttttgtgtcattgtttttaaagtatccttaattaaaaacaaaaattattatttgagactgaaaacaagtgcaaaagcatttctactttaatatacactgtaaatccccataatcaaaacatttactacacaatgtggaacagctaaatgcccagttttgtattattttctggcagccacactcatcaattgtaatacagttttatcaatagggataagaagagttcaatcgttagaaggaataaaaattttgtaattacatcacagtacattgtccagctttaatgcaagcaggaataccaagcaaaaaaatacgcagtaacaatgagatgtgtacatcctcttcattcaatacatcttttagaatctccaacagcaatgcaagcattgattacttttctttacctaagaatttgaccaaacaaggttatattctttgtataacctctgtgctctaaatataatccttaatttctcctctgaatataatccttaatttctctttatgtaattggctgcataggctaaatttaaattgttttaggatttttctcaagatcatagatttatgatcatacacagcaagttgaaacatgagtaaacaaaacataagcactctctctacaaaaaccttctttttctcatcttccacacatcttaatcctattacatctatcttattaatgctacttccaaagagaaagagcagaaagcatgctaagattatagggaaaaggtatcttaagtaaaaacaattttagaggaaataaggaggggattccctctaccct

SEQ ID NO: 247173 - DNA, 1246 bp, Homo Sapiens
  misc_feature (930)..(930): n is a, c, g, or t
  misc_feature (988)..(988): n is a, c, g, or t
  misc_feature (996)..(996): n is a, c, g, or t
  misc_feature (1013)..(1013): n is a, c, g, or t
  misc_feature (1077)..(1077): n is a, c, g, or t
  misc_feature (1092)..(1092): n is a, c, g, or t
  misc_feature (1225)..(1225): n is a, c, g, or t
tcccggggatgtttaaaggaagtctatcagaaaatagagacgtgaatgaaagctggaatgccttagcaaccccatcagataagctgtttttctggaattccaaatctacgtatatcaaatcaccaccattctttgaaaacctgactttggatcttcagccccctaaatctatagtggatgcctatgtgctgctaaatttgggagattcggtaacaactgaccacatctccccagctggaaatattgcaagaaacagtcctgctgctcgctacttaactaacagaggcctaactccacgagaattcaactcctatggctcccgccgaggtaatgacgccgtcatggcacggggaacatttgccaacattcgcttgttaaacagatttttgaacaagcaggcaccacagactatccatctgccttctggggaaatccttgatgtgtttgatgctgctgagcggtaccagcaggcaggccttcccctgatcgttctggctggcaaagagtacggtgcaggcagctcccgagactgggcagctaagggccctttcctgctgggaatcaaagccgtcctggccgagagctacgagcgcattcaccgcagtaacctggttgggatgggtgtgatcccacttgaatatctccctggtgagaatgcagatgccctggggctcacagggcaagaacgatacactatcattattccagaaaacctcaaaccacaaatgaaagtccaggtcaagctggatactggcaagaccttccaggctgtcatgaggtttgacactgatgtggagctcacttatttcctcaacgggggcatcctcaactacatgatccgcaagatgggccaagtaggagacgtgcacttggtgctgcgcccagggaggaagccgcaccaccagccagcgcaggccctggtggagaggncctccctgggctgcctctgggaggggtgctgccttgtagatggagcaagttagcactnagggtctngtgccaatcctgtaggncacaaaaccagaagtttctacattctctatttttgttaatcatcttctctttttccagaatttngaagctagaatggtnggaatgtcagttgtgccagaaagagagaaccaagcttgtctttaaagttactgatcacaggacgttgctttttcactgtttcctattaatcttcagctgaacacaagcaaaccttttcatgaggtgtcttctnccctcttattgttctcttacg

SEQ ID NO: 247174 - DNA, 439 bp, Homo Sapiens
acgtatacgaggctacggggctcggtttggctgactggggagtcggcaggcggcaggtctttatgtaggggatgagccagtgtgcaaggagagtacaatactccagttaccgaattgaaaccatccctgcagtggagcagcctcctccagtttctgttgggttttgagctacctgttaaataagtcagtgggattgtcaaggacaaagccctccctggctgcctcagggcaaaatcaggaaccatgcgaggccagcggagcctgctgctgggcccggcccgcctctgcctccgcctccttctgctgctgggttacaggcgccgctgtccacctctactccggggtctagtacagcgctggcgctacggcaaggtctgcctgcgctccctgctctacaactcctttgggggcagtgacaccgctgttgatgctgcctttg

SEQ ID NO: 247175 - DNA, 861 bp, Homo Sapiens
  misc_feature (11)..(11): n is a, c, g, or t
  misc_feature (358)..(358): n is a, c, g, or t
  misc_feature (787)..(787): n is a, c, g, or t
accccaggcancccaacttgggcacctccctgggcccagaactgccttccattcaatggggaacccttctatccccaagaacccctttccctgcttgcaccctgggagagaacagtcttgactcccatcaactcaacgctggtgggaaaggacaggggaccgaaccctgggcttcagggcctgggtcattgcctcctcaggcactccctcctgggagggccttaggctctagagtgaggggtgggtggaacctgggggggcaccttcgttcaccctgtccccactccccacagttttaggatctaaatgattgcctctggaactattcttctaggactatcccacatcagaatcactngggaaatttaagtttgcagatcccacacttaccctgaattcttactcagggtggggtcaggaatctgcattttaactagtcgcggggattgtggggggcagtagctggctgtttcgtggcatttctgtggctctgcagtgttcctccaccccaggaccaatatgttcaggccacaccgatggcctgaaccccatgggtagagtcacttaggggccacttcctaagttgctgtccagccctcagtgaccccctagtgccttccctggagctgaggtctgtggggggctgtcccagcaaccatgcgaggggttgccccagttgctcatacaaacagatcagcatgaggacagaaggcaggagactttggtcagttacctgggaattctgggctgccaggaaacgatttgggacctctgtcagtttcttttnccatgtatgaggagggggaaatttgtatattagaaacttattcatcccactcaggacaataaaaatgaatgtac

SEQ ID NO: 247176 - DNA, 1095 bp, Homo Sapiens
ttggggaagagcgatcgggtaggcggctctttgtcgaagctagaggaccggcaggcggcagcagcaactacggcggcggcggcagaacccagcagtgatgtggaggtggagacccacaggagccccggacttcacctgagctacctcagtggtcaccaagagtggcaagataaagaaaaccctgagttgggcgggaccaggatgcctgaccgggacagctatgccaacggtaccgggagcagcggtggaggccctggaggtggtggcagcgaggaggccagtggggcaggggtaggcagtggcggggccagctcagatgccatctgtagagacttcttgaggaatgtgtgcaagcgaggcaagcgttgccgatatcgccacccagacatgagcgaggtgtccaacttgggggtgagcaaaaacgagttcatcttctgccatgacttccagaacaaggagtgtagccgcccaaattgccgtttcatccatggctccaaggaggatgaggatggctataagaagacaggagagcttcccccacggctgaggcagaaagtagcagctggccttggcctttcaccggctgacctaccaaatggcaaggaggaggtccctatctgccgtgactttctcaagggtgactgtcagagaggagccaagtgcaagttccgtcacctgcaacgggattttgagtttgatgctcggggtggaggaggcactggtgggggctcaacaggctcagtcctcccaggacgacgtcatgatctctatgatatctatgaccttcctgacaggggctttgaggaccatgagccaggcccaaaacgccggcgaggtgggatgctgccccccctgatggccctcattttgagtcatatgaatatagtttggctccaccgcgagggggtggagtgcagactgctagaggaggagaatgccatgctcaggaagcggggtagaggaagttaaagaagcaaggtcagcaaacctggctggccccccaatgaaggtacttactgggaaccaaaatggctcacgtttccgcaattcaagggcccaagggtcattaacccctgaagccttccactggcacct

SEQ ID NO: 247177 - DNA, 753 bp, Homo Sapiens
agggccatcttcatcaaggccattgtggacctgacagggctctaactgccccctactggtgtctgggggttgggggcagccaggcacagccggctcacggaggggccaccacactgggccagggtctcactgtacaagtgggcaggggccgcgcttgggcgcttgggagggtgtcggcctgcagccaagttcactgtcacgggggaaggagccaccagccagtcctcagatttcagagactgcggaggggcttggcagacggtcttagccaagggctgtggtggcattggccgagggtcttcgggtgcttcccagcacaagctgcccttgctgtcctgtgcagtgaagggagaggccctgggtgggggacactcagagtgggagcacatcccagcagtgcccatgtagcaggagcacagtggatggccttgtgtccctcgggcatgacaggcagaaacgagggctgctccagtgagaagggcctcctgctggccagagcaaggaaggctgagcagcttggttctcccctctggcccctggagagaagggggagcattcctagacccctgggtgcttgtctgcacagagctctggtctgtgccaccttggccaggctggctgtgggagggtctggtcccacgccgcctctgctcagaccactgtgtgggaggtgcacagcacagcctgcgggtaaagtgtgagagcttgccatccagctcacgaagacagagttattaaaccattacaaatctc

SEQ ID NO: 247178 - DNA, 440 bp, Homo Sapiens
  misc_feature (361)..(361): n is a, c, g, or t
accgaggtgagcctgagcgccttcgcactgctgttctccgagctggtacagcactgccagagccgcgtcttctccgtggccgagctgcagtcgcgcctggccggtctgggccgccaggtgggcgcgcgcgtgctggatgcgctggtggcgcgcgaaaagggtgcccggcgtgagaccaaggtgctaggcgcgttgctcttcgtcaagggcgccgtgtggaaggcgctcttcggcaaggaggcggacaagcttgagcaggctaacgatgacgcgcgcaccttctacatcatcgagcgcgaccgctcatcaacacctacatctccgtgcccaaggagaacagcacgctcaactgcgccacttncacggcgggcatcgtggaggcggtgctcacacacagcggcttccctgccaaggtcacggcgcactggcacaagggcacc

SEQ ID NO: 247179 - DNA, 426 bp, Homo Sapiens
acactgtatttgatatttgtgatcagtgatcattgttcaactgcgaaatagagtgtttgcttttgataatggaaaattgtattcgttttaaaattccgtttgttgagaataacaatatgtttaaaaatataattgagcaaatttttttctttgtttcctgtcattgacatttagtatatcagttttgctaacgttctaaaatgaagtcgttccatcataatctatgatcttgtacagcacttatagaaataagctgttcttttgaagttgaaatacccagtaaaatgttgaagaaggatggaggatttcttcatatctgacgtttctgaaaccctttgtgtctgctgttgtgtgaagattgacatttaccatgattttccttagttactgcagaacatagagaaaaataaaagcctaacgaatagt

SEQ ID NO: 247180 - DNA, 936 bp, Homo Sapiens
agcggaagtcgctgaggggtggtgaagcggttgggaaagtgtcggtttatcttcgcgccccttgcgttcttgccgcggcttgcctgggcaggtaaagcgcgattgcgagagctcggcaaccctgccgactcagccggaaccggctcccggcccgaggggcgtggtgtcctggtgctccgactccttccgcaggctccttgggacccgcggttccgggagtcccttgctcagggtccctttcctgcagtgaggcgccgtccgccttccctgtgtccccgcagacccccatcatgggcaataccagcagtgagcgcgccgcgctggagcggcatggtggccataagacgccccggagggacagctcggggggcaccaaggacggggacaggcccaagatcctgatggacagccccgaagacgccgacctcttccactccgaggaaatcaaggcaccagagaaggaggaattcctggcctggcagcatgatctggaagtgaatgataaagctcccgcccaggctcggccaacggtgtttcgatggacggggggcggaaaggaagtttacttatctgggtccttcaacaactggagtaaacttcccctcaccagaagccacaataactttgtagccatcctggatctgccggaaggagagcatcagtacaagttctttgtggatggtcagtggacgcacgacccttccgagcccatagtaaccagccagcttggcacagttaacaacatcattcaagtgaagaaaactgactttgaagtatttgatgcttttaatggtgggttcccaaaagtggctcccgatggtgtctggagctgttccagttcctccccccagggacccttacccatcagggagcccctaccgtctggcaaaccccgaaaaaaccggcttttcggggccaccccccctatttcttccc

SEQ ID NO: 247181 - DNA, 1227 bp, Homo Sapiens
  misc_feature (27)..(27): n is a, c, g, or t
  misc_feature (50)..(50): n is a, c, g, or t
  misc_feature (56)..(56): n is a, c, g, or t
  misc_feature (84)..(84): n is a, c, g, or t
  misc_feature (137)..(137): n is a, c, g, or t
aattttcccctggatccaaaaaattgnttgtaacccacagaacaacaatntgattncaaccattcaaattccccgaaactgggnaacatcttgtggcgcccatgttgaacaagggcacggcaagaaggggctgtggnatgcccatgctgctgcacggaacaggatgtgatcactgtgtccaatggaggccgaatcatgcgttccctgggagactaacatcgggggcctgaactgggagataaccctggacagtggcagtttccaggcacttgggctggttggcctgcaggagtctgtaaggtacatcgcagtcctgaagaagactacacttgccctccatcacctctccagtgggcacctcaagtgggtggaacatctcccagaaagtgacagcatccactaccagatggtgtattcttacggctctggggtggtgtgggccctcggagttgttcccttcagccatgtgaacattgtctagtttaatgtggaagatggagagattgttcagcaggttagggtttcaactccgtggctgcagcacctgtctggagcctgtggtgtggtggatgaggctgtcctggtgtgtcctgacccgagctcacgttccctccaaactttggctctggagacggaatgggagttgagacagatcccactgcagtctctccgacttagaatttggaaagtggatttccaaccccggggtcctgcctacccagcccaacccagtggacgcttcccgggcccagttcttcctgcacttgtccccaagccactatgctctgctgcagtaccattatggaacgctgagtttgcttaaaaacttcccacagactgccctagtgagctttgccaccactggggagaagacggtggctgcagtcatggcctgtcggaatgaagtgcagaaaagtagcagttctgaagatgggtcaatggggagcttttcggagaagtctagttcaaaggactctctggcttgcttcaatcagacctacaccattaacctatacctcgtggagacaggtcggcggctgctggacaccacgataacatttagcctggaacagagcggcactcggcctgagcggctgtatatccaggtgttcttgaagaaggatgactcagtgggctaccgggctttggtgcagacagaggatcatctgctacttttcctgcagcagttggcagggaaggtggtgctgtggagccgtgaggagtccc

SEQ ID NO: 247182 - DNA, 1313 bp, Homo Sapiens
gtgctgtgatcttcaagtatggggtctgctggcttgtcgcggctgcatgggcttttcgcggtctataagcccccggggctaaaatggaagcacctgcgggatacagtggagctacaacttctgaagggtctcaatgccaggaagcctcccgctcctaaacagcgtgttcgcttcttgctgggccccatggaaggcagcgaagagaaggagctgaccctcacagccaccagcgtaccctctttcatcaaccatccactggtatgtggaccagcattcgcccatctcaaggttggcgtgggacatcggttggatgcccaggcttctggagtacttgtgctcggcgtgggacatggatgcaggctcctcaccgatatgtacaatgctcatcttaccaaggattacacagtgcgtggcctcctgggcaaagctacagatgacttccgtgaggacgggaggctggtagagaagacaacctatgaccacgtgaccagagagaagctggaccgcattctggccgttatccaaggctcccatcagaaggccctggtgatgtactccaacctcgacctgaagacccaggaggcctatgagatggccgtgagaggcctgatccggcccatgaacaagtccccgatgctgataactggcatccgatgcctctactttgcacctccggaattcctcttagaggtgcagtgcatgcatgagacgcagaaaagagctgcggaagttggttcatgaaatcggcctggaactaaagaccactggtgtctgcacccaagtgcggcgcaggcgcgacggcttcttcacgctagacagtgccctcctgaggacccagtgggacctaaccaacatccaggatgctatccgggctgctacccctcaggtagctgcagagctggagaagagcttgagcccggggctggacaccaagcagctccccagtccgggatggtcctgggactcccagggcccgagctctaccttggggctggagaggggtgcggggcagtgaatgcccaggcagctcctggggcagtggatggataaatagaagaactgctatgagctggacctgatagctgtgcagaaagtgagagcaggggcaccttttctacgtaagacacaaaactcaagctgtaacagaaaggtcaatgggacttgaccccaactgagaaaggaaaaactttctggtatggaggggaaaagacagtaaaacatggacaggactgaataagaaaggtattgggcagaaccaaggcgtgggtgggcggggcactttgttaattccccaggctacttcccaagggcta

SEQ ID NO: 247183 - DNA, 511 bp, Homo Sapiens
gggctgcacggccttgcactatgctgttcttgctgatgactaccgcactgtcaaggagctgcttgatggaggagccaaccccctgcagaggaatgaaatgggacacacacccttggattatgcccgagaaggggaagtgatgaagcttctgaggacttctgaagccaagtaccaagagaagcagcggaagcgtgaggctgaggagcggcgccgcttccccctggagcagcgactaaaggagcacatcattggccaggagagcgccatcgccacagtgggtgctgcgatccggaggaaggagaatggctggtacgatgaagaacaccctctggtcttcctcttcttgggatcatctggaataggaaaaacagagctggccaagcagacagccaagatatatgcacaaagatgctaaaaagggcttcatcaggctggacatgtccgagttccaggagcgacacgaggtggccaagtttattgggtctccaccaggctacgttggccatgagga

SEQ ID NO: 247184 - DNA, 632 bp, Homo Sapiens
  misc_feature (45)..(53): n is a, c, g, or t
acaaaaaagttggcttaagccttttttcttagtaattaatacttnnnnnnnnngatcctggcatctatttatgcaactaaatacttttcagaaatggtatataaaaggctacagtttaatatctgtatttttataaaagtatgatgaagggtttggggtgtttttatttgtagcagaggtaagaatatgtattcatataatctgcctacttttgagttctcatattaacatttagataacatatgaagtatggcccccttggatccttgtttttaagttactttcgatgtgtatacgaacaaagaccagggagaaacagaacttttaatatttttttgctgctgtgttggggccagaaataaggtgacaagtacagacttttataatacctaccttcaaaattagaatcagcagcactgtacaaataaagtgcctgtgcttcacctcacaccaagaatcttgcctaaccctgtcagagtgcctagtatcctgtggtgattatgtataatgaaacagtcttattttgtgctctttggtttcttaaaaggaaagcttgttttctttcctttatcattacagaggtatgtctttggttcttaaactatctgtctaaaataaagctgtaaaaaatt

SEQ ID NO: 247185 - DNA, 949 bp, Homo Sapiens
  misc_feature (85)..(104): n is a, c, g, or t
tgggcgctctttctttttctcttagaagagggtttagcacaggttttttcgttctcacttccacaccaccttaccgcctcccgannnnnnnnnnnnnnnnnnnnacctatcgtcatgacggcctctccggattacttggtggtgctttttgggatcactgctggggccaccggggccaagctaggctcggatgagaaggagttgatcctgctgttctggaaagtcgtggatctggccaacaagaaggtgggacagttgcacgaagtgctagttagaccggatcagttggaactgacggaggactgcaaagaagaaactaaaatagacgtcgaaagcctgtcctcggcgtcgcagctggaccaagccctccgacagtttaaccagtcagtgagcaatgaactgaatattggagtagggacttccttctgtctctgtactgatgggcagcttcatgtcaggcaaatcctgcatcctgaggcttccaagaagaatgtactattacctgaatgcttctattcctttttttgatcttcgaaaagaattcaagaaatgttgccctggttcacctgatattgacaaactggacgttgccacaatgacagagtatttaaattttgagaagagtagttcagtctctcgatatggagcctctcaagttgaagatatggggaatataattttagcaatgatttcagagccttataatcacaggttttcagatccagagagagtgaattacaagttttgaagtggaacttgcagcaagatggaaccttattgatgataacaccgtagtcagggcacgaggtttaccatggcagtcttcagatcaagatatttgcaagattcttcaaagggactcaatattgcccaggggaggtgcagcacttttgtctgaatgctcagggtccaaaggaaccgagaaacctcctggttagggttgtaaagg

SEQ ID NO: 247186 - DNA, 1359 bp, Homo Sapiens
ttgggttcagactgccatcaagagtgagctactcatgattattcagatggaaacacaatctagcatgaggaaaaaagtttgtgatattgcggcagaactggccaggaatttaatagatgaggatggcaataaccagtggcccgaaggtttgaagttcctttttgattcagtcagctctcaaaatgtgggactgcgggaagctgcccttcccattttctggaactttcctggaatttttgggaaccagcaacaacactatttagatgtcatcaaacgaatgttatttcagtgtatgcaagatcaggaacacccgtcgatcaggacgttatctgctagagctacagctgcatttatacttgcaaatgagcataatgttgctctgttcaaacattttgcagacttgctaccgggattcctacaggcggtaaatgactcgtgctaccagaatgatgattctgtcctaaaatccctcgttgagattgcagatactgttccaaagtatttgcgtcctcacttggaagcaactctacagctaagtctaaagttgtgtggagacactagcctcaacaatatgcaacgccagcttgcccttgaagtgatcgtcaccctctctgagactgcagctgctatgttaagaaaacataccaatattgttgcacagactattcctcagatgttagcaatgatggttgatttggaagaagatgaggactgggcaaatgcagatgaactagaagatgatgattttgacagcaatgcagttgcaggcgagagtgctctagatcgaatggcttgcggacttggtggaaagctcgttctgccgatgatcaaggaacacattatgcaaatgcttcaaaatcctgactggaaataccggcatgcaggattgatggccttatctgccattggtgaagggtgccaccagcaaatggaaggaattctaaatgagatcgtaaattttgttttactttttctccaggatcctcatccaagagtaaggtatgcagcctgtaatgccgtgggacagatggctacagattttgcacctggtttccaaaagaaatttcatgagaaggtgattgcagctctgctgcagaccatggaagaccaaggcaatcaacgtgtgcaggcccatgcagctgctgccctcattaactttactgaagactgtcccaagtcactacttattccatacttggataatttggtgaaacatctgcattccattatggtactgaagcttcaagagctgattcagaaaggcaccaagttagtttggaacaagttgtgacatccattgcatcagttgccgatactgcgaagaaaaattgtcccctactatgatttatttatgccatc

SEQ ID NO: 247187 - DNA, 1334 bp, Homo Sapiens
  misc_feature (307)..(315): n is a, c, g, or t
ttttttactatgcatcggtcccatcacgactgtagtggtggttttggtgttcctgttggatcgcctggcacagtgcctgtggcagtgtcacacccatttttagggagagccacgaccgaccgtcgttcgaaatgcggattttcccaattcgttatagaatagggcccttttattccggcaaactgcatttttatggccatttaagtggggtttgtttgcctgctttttgggattgaggcggggaaagtttagacctttttgccaagaggctgacttttctttcaatttaactaaaaggagtcccgtnnnnnnnnntcagtttctttcagcggatggggccccctttaaactgcaagtttgccacacatggttcattcatgattgagttataaaactagattatgtcttagcaaaatctgttcctccgtaatatatttgtggtccatagaagtcttctgaaaagtgattactgattcttcctagtgcaaaatgcgtggctgcctctttcataagccaaagtacttgctacacagagcagcaccataccctcctgtccaaacactgtaagaggtggggaaagggagggaagggttggtctgggggttctcagactctcagggtttccactgaaaggtccattccaatggttaaaccagcctacttatctcagaggatggataatgtggcgctgcgaagtggggaggaagctcctctgccatcattaactcgtttcatgaccagaagccatgggcacaggtgctcggctcttccaggcaggcttcccttgtagctacagctactcttccctcaggcgagcagataaggactgcaggacggcatggaagagacaggaacacgctcccctgggcacatcgaagagtcccggacaggcaaacaagccacatgggacaagggtcacagcagcagcctaggggccagtcctcgacctaaacttgttctttcacctacagacaaaagcttaatcaagtgcaatcaatgccttgggatctttgcagcaatctggggggcatgtgtcacagaactctggatgtaaacagatacacaaacatcttcagactggatacatttttccaatacttgttgcgggtcggttttaaagcatgtaccctggagagtgaaggtgcagcagataggtatactgatttgagtcactccacaccaggcagcttccttctccaggtggggcagagccccctgggggaacaactctccaagagtatccgcaggaggtgggcggcactccatctcaccaaggtcctggccgggtcttcgctctgcccaaaccctcctccagcctgtgcaggcctcctccc

SEQ ID NO: 247188 - DNA, 1113 bp, Homo Sapiens
  misc_feature (911)..(911): n is a, c, g, or t
  misc_feature (1092)..(1092): n is a, c, g, or t
ttgggcaaaattcagctgctgcctctgtcttgaggaccccagcgcctttcccccggggccatgctgcctgcagccacagcctccctcctggggcccctcctcactgcctgcgccctgctgccttttgcccagggccagacccccaactacaccagacccgtgttcctgtgcggaggggatgtgaagggggaatcaggttacgtggcaagtgaggggttccccaacctctacccccctaataaggagtgcatctggaccataacggtccccgagggccagactgtgtccctctcattccgagtcttcgacctggagctgcaccccgcctgccgctacgatgctctggaggtcttcgctgggtctgggacttccggccagcggctcggacgcttttgtgggaccttccggcctgcgcccctagtcgcccccggcaaccaggtgaccctgaggatgacgacggatgagggcacaggaggacgaggcttcctgctctggtacagcgggcgggccacctcgggcactgagcaccaattttgcggggggcggctggagaaggcccagggaaccctgaccacgcccaactggcccgagtccgattaccccccgggcatcagctgttcctggcacatcatcgcgcccccggaccaggtcatcgcgctgaccttcgagaagtttgacctggagccggacacctactgccgctatgactcggtcagcgtgttcaacggagccgtgagcgacgactcccggaggctggggaagttctgcggcgacgattcccgggctccatctcctccgaaggaatgaactcctcgtccagttcgtctcagatctcagtgtcaccgctgatggcttctcagcctcctacaagaccctgccgcggggcactgccaaagaagggcaagggccgnccccaaacggggaaactgagcctaaagtcaagctgccccccaagtcccaaccttcggagaaaacagaggaatctccttcagcccctgatgcacccacctgcccaaagcagtgccgccggacaggacctttgcagagcaactttctgtgccaggagccttgtggtgactgcgacatgaagtncatggttcgggagccagggga

SEQ ID NO: 247189 - DNA, 1205 bp, Homo Sapiens
  misc_feature (1143)..(1143): n is a, c, g, or t
  misc_feature (1161)..(1161): n is a, c, g, or t
ttggcacgttagtgcagctctagagcaatttccaggtttctggcttggacagcttatgcggtcatgaggacttccacgaggacagcagtcccaggtggggctggttttatatgtgttgagttggggtactttggaacagccacccagcctggcctccccttgggcatcttgctcccgtgtggcctgctgcagcgacagcccaggctgtggcactgcagggactgcctctcagacctcatcggatccacctgggcatggcagacggctgggcttcaaagcaggttcatctgactgctccttccctctagggtgaagactctacggtaaaaggaatttgatgccttggaaagggagagcggaaactgtgagccctgctttccagccatggcgaaagcgggtacttttgtgcaacccctctcctttcacgttggcctggctagggcggagctgccacgccagtgaccagcgtttctttgggaaaattggacttactccacttccaccttttccactcttcaaatgatcacatttgcatattgggaacagtgtatttgtgaagagactctcaggccttccagggaccaccccccccaccacccgctacagcccaggtcctggttctgtcctccccagatgctgctagagaaactgaacggcacagtgccctgcctgttggataccagcaccatccccgctgaggagctgaccatgagcccttcgcgctcagtggccaactctggcctgagtgacagcctgaccaccagcaccccccggccctccaacggtgactcgccctcccacccctaccaccgaaccttctccccccacttccaccactttgtggagcagtgccttcagcgcaacccggatgccaggcccagtgccagcaccctcctgaaccactctttcttcaagcagatcaagcgacgtgcctcagaggctttgccgaattgcttcgtcctgtcacccccatcaccaattttgagggcagccagtctcaggaccacagtggaatctttggcctggtaacaaacctgggaagagctggaggtggacgattgggagttctgagcctctgcaaactgtgcgcattctccagccagggatgcagaggccacccagaggccctttcctgagggcggncccacatttcccgccctnctggggaagatttgggtaggaaaggacatttttttccagggaaa

SEQ ID NO: 247190 - DNA, 1353 bp, Homo Sapiens
  misc_feature (1029)..(1049): n is a, c, g, or t
cctataaaagacaactttgtacaaaaaagttggatccaattcagtcgcctgggcagcagggcaagtaccggggagcaaaaggctcccttcctccgcagcgctcggaccaacaccagccagcctcagccccgccgatgatgcaggccgccgcggctgctggcccgcctctggtggctgccacgccctattcttcctacatcccctacaaccctcagcagttcccaggccagccagccatgatgcagcccatggcccactacccctcacagccggtgtttgcccccatgcttcagagcaacccacgcatgctgacgtcgggcagccatccccaggccatcgtgtcatcctctacccctcagtacccttctgcagagcagcctaccccccaagccctttatgccactgttcaccagtcctacccacaccatgccacacagctccatgcccaccagccgcagccggctaccacgcctactggaagccagccgcagtcccagcatgcggcccccagtcctgtccaggggccctgacaggcacgccgccctctctgccaccgggaccttctgcccagtcccctcagagcagcttcccccagccagccgctgtgtatgccatccaccaccagcagctgccccacggcttcaccaacatggcccatgttacccaggcccatgtccaaactggaatcacagcagccccgccccctcaccctggggctccccaccccgccccaggtgatgctgctgcacccacccccagagtcatggggggcccccccaaggcgcggtgccccagagtggggtgcctgcactctcagcttccacaccctcaccctacccctacatcggacacccccaaggtgagcagcctggccaggcgcctggatttccaggaggagccgatgacaggattcctccccttccaccccccggggaactgaagattgtcctggccgcgacctgagacctccatgagtggagggaagagtgatctatgtctcttcccccagcagctcggaccactcccagnnnnnnnnnnnnnnnnnnnnnaggggagctggggaattcctgccaagcaccttgaatgggaggggcctcacagagggcagggccagggtccagcaggggtggggggttcctgctctgcccctgcccgtccccacccagtcttgccctcccatcctctcatctattcccccgctggagacggaagatcttttattttctattatttataacttcagacttgggccccctgttctttctttcccattaacttgagtgacctgtgtgagagacagacagatgccccacgaggatggctggacaaggacttttactttttattacataa

SEQ ID NO: 247191 - DNA, 1088 bp, Homo Sapiens
  misc_feature (922)..(922): n is a, c, g, or t
  misc_feature (968)..(968): n is a, c, g, or t
  misc_feature (1002)..(1002): n is a, c, g, or t
  misc_feature (1015)..(1015): n is a, c, g, or t
  misc_feature (1049)..(1049): n is a, c, g, or t
ttggggatgccttatatcgtgatctgcttcttggtggttaatggtcatggtcacctggtcactccaacaatatctattgtttcgtacctctttgctaaatcgaacactgtatacaatccagtgatttatgtcttcatgatcagaaagtttcgaagatcccttttgcagcttctgtgcctccgactgctgaggtgccagaggcctgctaaagacctaccagcagctggaagtgaaatgcagatcagacccattgtgatgtcacagaaagatggggacaggccaaagaaaaaagtgactttcaactcttcttccatcatttttatcatcaccagtgatgaatcactgtcagttgacgacagcgacaaaaccaatgggtccaaagttgatgtaatccaagttcgtcctttgtaggaatgaagaatggcaacgaaagatggggccttaaattggatgccacttttggactttcatcataagaagtgtctggaatacccgttctatgtaatatcaacagaaccttgtggtccagcaggaaatccgaattgcccatatgctcttgggcctcaggaagaggttgaacaaaaacaaattcttttaattcaacgggtgctttacataatgaaaaaaccacttgtggcacacgatgggcatctaaacatcatcatcttctaatgtgttggagattttcatttcaaatatattttttaaattactctattttccaaaacacgtaatgcatttttctcgaaaataccttactgtaaaaataactgtcgcgtacacatgtgtgaagtagctagaacatactgaattttttttgtactgttgggactctattcagtggtcatgtccctatatctgatcaagttatcaaggagaataattctagaattgaaaaagaaaatcctcttgttggaacaanagacgttttatatgtgcagtatgacaaagaggagtttcagggacanctttgaatccttgtcagcctgggagacccagcancagagggagtctncaaggcaaactcccatatatttggcttcccccanatttgctgcccctgacaggacttcgaaggtcttttgtct

SEQ ID NO: 247192 - DNA, 899 bp, Homo Sapiens
ccataaaagccaactttgtacaaaaaagttgggtttgctgtggcggctaggcccgcgtgcgctggagacctccgcgctggcccccgcgagcctcctgccctggcccggcgctgcggctctgccgcggcggcagcatgggtggcccccggggcgcgggctgggtggcggcgggcctgctgctcggcgcgggcgcctgctactgcatttacaggctgacctggggtcggcggcggggcgaccgcgagctcgggatacgctcttcgaagtccgcagaagacttaactgatggttcatatgatgatgttctaaatgctgaacaacttcagaaactcctttacctgctggagtcaacggaggatcctgtaattattgaaagagctttgattactttgggtaacaatgcagccttttcagttaaccaagctattattcgtgaattgggtggtattccaattgttgcaaacaaaatcaaccattccaaccagagtattaaagagaaagctttaaatgcactaaataacctgagtgtgaatgttgaaaatcaaatcaagataaagatatacatcagtcaagtatgtgaggatgtcttctctggtcctctgaactctgctgtgcagctggctggactgacattgttgacaaacatgactgttaccaatgaccaccagcacatgcttcacagttacattacagacctgttccaggtgttacttactggaaatggaaacacgaaaggtgcaagtttttgaaactgcttttgaattttgtctgaaaatccagccatgacagaagggacttctcccgtgcccaagtggattcatcatttccttttccctttatgaccacccacgtagcaaaggagattcttcttcgagtacttacgctatttcagaatataa

SEQ ID NO: 247193 - DNA, 979 bp, Homo Sapiens
ttggggctcgtctgtagtgcacgccgcgggcccagctgcgaccccggccccgcccccgggaccccggccatggacgaactgttccccctcatcttcccggcagagccagcccaggcctctggcccctatgtggagatcattgagcagcccaagcagcggggcatgcgcttccgctacaagtgcgaggggcgctccgcgggcagcatcccaggcgagaggagcacagataccaccaagacccaccccaccatcaagatcaatggctacacaggaccagggacagtgcgcatctccctggtcaccaaggaccctcctcaccggcctcacccccacgagcttgtaggaaaggactgccgggatggcttctatgaggctgagctctgcccggaccgctgcatccacagtttccagaacctgggaatccagtgtgtgaagaagcgggacctggagcaggctatcagtcagcgcatccagaccaacaacaaccccttccaagttcctatagaagagcagcgtggggactacgacctgaatgctgtgcggctctgcttccaggtgacagtgcgggacccatcaggcaggcccctccgcctgccgcctgtcctttctcatcccatctttgacaatcgtgcccccaacactgccgagctcaagatctgccgagtgaaccgaaactctggcagctgcctcggtggggatgagatcttcctactgtgtgacaaggtgcagaaagaggacattgaggtgtatttcacgggaccaggctgggaggcccgagggctccttttcgcaagctgatgtgccaccggacagtgggcgcattggtgttcccggaaccccctcccctaacgcaagaccccccagccctgccaagggcttccctggggcggggggccttccattggccaaccttgcgcggggggggcccttttcccgaaacccgggggaagacttcccacggtgggagcccccccattgg

SEQ ID NO: 247194 - DNA, 1130 bp, Homo Sapiens
  misc_feature (1030)..(1030): n is a, c, g, or t
ttggccaaaatggcgaggggctgtattgaagtgggctgtgtttgaggccggtgtaagaacgctcattctacccccaacccttgtctccaaggacctcggtttgtgcgtgcatatgtgccgggtacccggtggggcgggtgcccagtaagtgctcggactcgcaggggaagcgcccacggggacggattggttgttttttcctgtatgaagcggttggcaccactgaagtgaccgaatgagagactctacaggggcaggtaattcactggtccacaagcggtctcctttacgtcgaaaccaaaagaccccaacatccttgaccaagctgtctttacaggatggacataaagccaaaaagccagcatgtaaatttgaagagggtcaggatgtcctagctagatggtcagatggcttgttttatcttggcactatcaaaaagataaacatattgaaacagagctgcttcatcatatttgaagacagttctaaatcctgggttctctggaaggacattcaaacaggagccactggaagtggggaaatggtctgtacaatatgtcaagaagagtattcagaagctcccaatgaaatggttatatgtgacaagtgtggccaaggatatcatcagttgtgtcacacacctcatattgattccagtgtgattgattcagatgaaaaatggctctgtcggcagtgtgtttttgcaacaacaacaaagaggggtggtgcacttaagaaaggaccaaatgccaaagcattgcaagtcatgaagcagacattaccctatagtgtggcagaccttgaatgggatgcaggtcataaaaccaatgtccagcagtgttactgctattgtggaggccctggagactggtatttgaagatgctacagtgctgcaaatgtaagcagtggtttcatgaggcttgtgtgcaatgccttcaaaagccaatgctatttggagacagattttatacgtttatatgctctgtctgcagttctggaccagaatacctcaaacgtctaccattacanggggtagatatagcacacctatgcctttacaacctaagtgtgattcataagaagaaatactttgattctgaacttgagcttatgacatacattaatgaaa

SEQ ID NO: 247195 - DNA, 1349 bp, Homo Sapiens
actataaagacaactttgtacaaaaaagttgggcagtgtgtccccatcttaactgatgagatctatggagacatggtgttttcggattgcaaatatgaaccactggccaccctcagcaccgatgtccccatcctgtcctgtggagggctggccaagcgctggctggttcctggctggaggttgggctggatcctcattcatgaccgaagagacatttttggcaatgagatccgagatgggctggtgaagctgagtcagcgcattttgggaccctgtaccattgtccagggagctctgaaaagcatcctatgtcgcaccccgggagagttttaccacaacactctgagcttcctcaagtccaatgctgatctctgttatggggcgttggctgccatccctggactccggccagtccgcccttctggggctatgtacctcatggttggaattgagatggaacatttcccagaatttgagaacgatgtggagttcacggagcggttagttgctgagcagtctgtccactgcctcccagcaacgtgctttgagtacccgaatttcatccgagtggtcatcacagtccccgaggtgatgatgctggaggcgtgcagccggatccaggagttctgtgagcagcactaccattgtgctgaaggcagccaggaggagtgtgataaataggcctgcatccattctcctgaggatgtgtcccatctaagggaaggctggactaggccttgcggctcctcagggactcaggtggccctactgggagaggggcctcaaatgcaccatgtcaagggttcaagattgttcctgcttttccccaagtacaaccacacccacactcagatcctcctcattcacatcgcagattctcccttgctctgcgctgctagagtgactcactaattcattaatctgcctccctctcgtaagatttccttctttttttcttgaaagtaccaggtgaacaaagtttaccagaaagcagttgagacaagaaaataagagctcaggatgagggaaaagaaaaagattgagagaatttgtgcccccaaccatttcctcagactctaagaaagaacacgctctctccaggcaggtctgaagctcaactctcttattgcctcacttcaggtatacctcactttacacaatagaattataactgggaaagaagttggggacacatgtatttgggtgattacattttaaacacattagggaaaagttgctatttgaactttttattggatttttgggggggagtaaaggattattttgtgatgcaaataaatatcctttaattgatcgacttgccaaatttagatttgtgtgcatcaggc

SEQ ID NO: 247196 - DNA, 1347 bp, Homo Sapiens
  misc_feature (434)..(491): n is a, c, g, or t
  misc_feature (1320)..(1320): n is a, c, g, or t
  misc_feature (1331)..(1331): n is a, c, g, or t
cttttaaaggccaactttgtacaaagccagcaggatgcagccttctgcctttgcctctcttgccatagttttctcctcctatatcactcttgttgtgctctttgtgcccaagatgcgcaggctgatcacccgaggggaatggcagtcggaggcgcaggacaccatgaagacagggtcatcgaccaacaacaacgaggaggagaagtcccggctgttggagaaggagaaccgtgaactggaaaagatcattgctgagaaagaggagcgtgtctctgaactgcgccatcaactccagtctcggcagcagctccgctcccggcgccacccaccgacacccccagaaccctctgggggcctgcccaggggaccccctgagccccccgaccggcttagctgtgatgggagtcgagtgcatttgctttataagtgagggnnnnnnnnnnnnnnnnnnnnnnnnnnnnnnnnnnnnnnnnnnnnnnnnnnnnnnnnnnactcaggaagcagggggtccccatccccagctgggaagaacatgctatccaatctcatctcttgtaaatacatgtccccctgtgagttctgggctgatttgggtctctcatacctctgggaaacagacctttttctctcttactgcttcatgtaattttgtatcacctcttcacaatttagttcgtacctggcttgaagctgctcactgctcacacgctgcctcctcagcagcctcactgcatctttctcttcccatgcaacaccctcttctagttaccacggcaacccctgcagctcctctgcctttgtgctctgttcctgtccagcaggggtctcccaacaagtgctctttccaccccaaaggggcctctccttttctccactgtcataatctcctttccatcttacttgccccttctatactttctcacatgtggctccccctgaattttgcttcctttgggagctcattcttttcgccaaggctcacatgctccttgcctctgctctgtgcactcacgctcagcacacatgcatcctcccctctcctgcgtgtgcccactgaacatgctcatgtgtacacacgcttttcccgtatgctttcttcatgttcagtcacatgtgctctcgggtgccctgcattcacagctacgtgtgcccctctcatggtcatgggtctgcccttgagcgtgtttgggtaggcatgtgcaatttgtgtagcatgctgagtcatgtctttcctatttggcacacgtccatgtttatccatgtactttccctgtgtgaccctccatgtgaccttgtgtaattttctttcccttaaatcanggggaatcttntgaacagaggccataa

SEQ ID NO: 247197 - DNA, 768 bp, Homo Sapiens
  misc_feature (742)..(742): n is a, c, g, or t
cctatttgaatgatttctttagttatgatgtggactctgatcatgtagacataatatcagatggcaccaagaaagactctgggatggttccaatgacaggatttacacagagagcaactattgatccagaactgaatgaaatacacgtcttatctggactcagcaaagataaggaaaagagggaagaaaatgttagaaattcattctggatttatgacattgtgaggaatagttggtcttgtgtctataagaatgatcaagctggcaaaggataatccaacttaaaagtcttcagggaaggaaggaaccatgtccaaggttttgcccttcagcttgtatacggtgaggctacacaaggttccttacttatttggtgggaatccaggaaaatcttgctctccaaagatgagattagatgacttctggtcactgaagttgtgtagaccttcaaaagattatttactgaggcattgcaagtacctcataagaaaacacaggtttgaagaaaaggcccaagtggatccccttagtgctctgaaatatttacaaaatgatctttatataactgtggatcattcagacccagaagagacaaaagagtttcagctcctggcatcagctctattcaaatctggttcagattttacagctctgggcttttctgatgtggatcacacctatgctcaaagaactcagctctttgacaccttagtaaatttctttcctgacagcatgactcctnctaaaggcaacctggtagacctcatc

SEQ ID NO: 247198 - DNA, 579 bp, Homo Sapiens
gggctcaggttaataatagagagctatggagtcaaggcatgtttaagatgggaggtagagcatgccaatattgatggcaacagtcaagatggtgtgatgagagagatgggaggggcacaaagaggaggacccctgaaggagcagagtccatgagaaagaaggagggatgggacctttgtaggaagagacacagtcctgcagcctcatatggctctattaaacagaaaggggcaagtatagaagattaggatgactaaattaatggggaaatgatgaaggagttttgaatctcttctttgtgaaatgaagtgagactatcagctatttgtgggtggagtgtgttctcagaaggtatgaagtagatgttttcctaggtgttggaaaacaggttgattaaggcaacagcagaagggcagggcataggctgagctctgagatggtcagtttagagtaggatgtctgggcactctaggtgtgtgtgtgttgagtggggctctgcacacacctgtcttcccctctatcaggattcaggagctgggatggtacacttactgcagtgttcgtggaagtaaggtaccg

SEQ ID NO: 247199 - DNA, 1235 bp, Homo Sapiens
catttcactaaaaataaaaatgaattcctttctctgaaggatgtgaattttaaagattaagtccaggatagtggatcaccaaagggttgcaatattcttatctataacaatctcaaattggatatggaggaaaatggacaagttgtatattaacaaaatacaagactatctagtacagtttgccttttaaaaaagaaatctatcgtagtgatttaaggcaagtattgcaaaaacgttatgatccccaaaccagaaaaaaataataataattatgtttccctacccaagtaattctaactgcgggaaacatgttattagaatttgccataagctcagaagttgagctgttttactagaaaattaaacaagtttgactaaatttatactcactattaagtcacttgaaagcttgcctgctgtctcttgtttcaggctcctgtatgtcacaaaattaatttgtttccatatttcctttggcaattataagacaacttctgcccagcttttgttaaaggctcattttacatttaaccccagaatatagctcatattttcctggaatattcaggtgaattttcatttggacacttaagttgtaggagtgtgagtacactaggaagaccccaagtcaggtttctgtatttaagggtgggtgaagtttacccagattcttctccccttaagttgttggaattcaaggcagcaccctcatctgggaattaaacaagattggttagataaatttcacatcatactaacatcttaaaagacgaatatgggtaaaatataaaggaaggaaaattgaaaactccaagacagtaactttgagatcaatttcagctttactttacatttgcatttatgcatttgtttgcaaaaagtatacctgtccttaacattactgcaatgttcagtttagttttaaagtagtacataaaaataaacaatttaagctcctatatattttactgtttccaagcttctacagaacaggtgtgcaaacttaaggtttctcatctcaaacaaatctccatgcacgaactaatcaaaaatgctcaagtcagcaaacacgcaaaatgcattaaagagaaacctcgaataatgtttttaaaaaacaaactttggaacttttataattaaactaagttgttgcacctctcctttcatttgcatataccaaagacttccaacaatagatctcgtacttggcacaaggacatttcaaagaaacaaac

SEQ ID NO: 247200 - DNA, 424 bp, Homo Sapiens
gcttgcaaccctcagcccctttgaatgagggcccctcaggggaaagggtcattacccttggaccctgcaaaccccagactcgttgagcagcaacgcaatcacccatcatccccactgccccaatcctagaatatgtctgctctcctttgctctctgcagctgtaagccagaggggattcaaggtaaataggctttacaggctcccctcctccaaacacacacagaatgggctggtttctttcaagtttaaaaaaagcccccttctccatgcacaagttcattccctccatgctgtcgtcatcgacatatacaggtgtgtacgtaggtgtatgtgtgtactctgcacgtatatctcttctgtcttgaagaccctgttaactttgtgaaataacttccacatttcaacacacttcacagtacagga

SEQ ID NO: 247201 - DNA, 1062 bp, Homo Sapiens
  misc_feature (55)..(55): n is a, c, g, or t
gtgctgcggaccacaaacacttggctgctgaccccaagggccgtgtggagggaancagacgatggcagtttgagcacgccagggaggaagattagggggtggcagcttgggcagacagtggcttcaatccagagcagaggtttcaggccctttggggatcagggacctcttttagaagccatggactttttccccaggaaaatgcatgtatgcacacacatgcagtattttagggacaatttcaagagattcctagaccctctagaatccatgaactctatgggtatgtggatccttggcctatgaaagacagggggctcctgtggtaggtatatctgccccaggctggtctgctttgtaggggagagccccagggtcctggtaccaacagtcatttgcccaagagccagtggggtgaggaagcagggtgtggggatagcaggagcagttccaagacaaggccgtggggtagatgtgtggatgtgttctcagcggctgtgaaaaggaactgggagttctcttcacaaacaggagccacagccagcctcccagcacagtgcaatagctgacccttcaagaaaatccctcctgtagtagggaggggaataagggtgaggttgagccctaatgacttaggggctcctgtagcggggaggggaataagggtgaggttgaaccctaatgacttaggggctgttcttggtccagaagggaagttcccttctttccaaccacccatgatgctgtattgacagaggcaaaaacctttgagaaagcaggagtcaaaaatgacaaacgaggctgggactactcagggatgtgtgtggctacccgtcctttcagtgggtcctggcggcagggacagggcactagctgttcattaatgcccgagagagaggtctcagcctgacacatggccaaatagaagtggagtctgtttaataaactacgcccgaatcttcccctaaagatccctctgcagcctcttgcttagaatgtgggcacccacaggcacaggaccggaagaggcagcgtcgggctcagaacctggggctggtaagt

SEQ ID NO: 247202 - DNA, 567 bp, Homo Sapiens
acggatagcggatctgcagagggtctgccaagaacccgcagcccgcccaggcatggctgttcagtgaccacctcatccagcagcaggggaagtgcctggctgccacctccaccttaatgtcctcccctggatccccagtcatactgcagatgtgcaaccctagagaaggcaagcagaaatggaggagaaaaggatctttcatccagcattcagtcagtggcctctgcctggagacaaagcctgcccagctggtgaccagcaagtgtcaggctgacgcccaggcccagcagtggcagctgttgccacacacatgacggagggattttcttgaagggtcagctattgcactgtgctgggaggctggctgtggctcctgtttgtgaagagaactcccagttccttttcacagccgctgagaacacatccacacatctaccccacggccttgtcttggaactgctcctgctatccccacaccctgcttcctcaccccactggctcttgggcaaatgactgttggtaccaggaccctgggggtcttccctacaaagcagatccgctatccgt

SEQ ID NO: 247203 - DNA, 921 bp, Homo Sapiens
cttttcttgccatctgcataacagccacattcaccatcttatgagtcttcatatttctattttaccaaacaaagtggcggtaaggtgtgtgccctggagaacggtgtgtcaggagttaagaatctcatcccctatgttatgtttcatcttggctgtctgcaacctggccaagtcacccaccctgtatgggcctcagtttccccatgtttacaatgagatactgagctgaatggtaaccaaaagaatcagagtttgcatgtattgagagcattctatgttccacgtacattctgtaatatcaccaatccttacagtcatctgacaggataagtttccatttgacagagaaactaaaacgtggcctataccccacagactgggatttgaacctggctccgcctgcatagcctcagccctttcctttgcactttgttgtaaaggctcctcctctgagtctctgaattcaatctatactggttgaattcctgccatgtatgagatattctgagcagtgtagggggcaacagagtgcctgctcccaaggtactgcctggggaagactgatcagggaccttgagtgtaaagtaaagtagtgtgcactagttacttctgtgaagctggcactgaatgttcattttgtccacagctgggcaagtctgtggtggccaaagtgaaaattccggaaggcaccattctaacaatggacatgctcaccgtgaaggtgggtgagcccaaaggctatcctcctgaagacatctttaatctagtgggcaagaaggtcctggtcactgttgaagaggatgacaccatcatggaagaattggtagataatcatggcaaaaaaatcaagtcttaaaaataaagtgccattctctgaattctcagttcccttgctgatgctgtcaggtgtgtttgagccaa

SEQ ID NO: 247204 - DNA, 865 bp, Homo Sapiens
attcttgtcacccagagcatggaagtgcagatggcctggtgagcgactctcggaaagcatctacctcacagatttaacgcgagcatcatatctcccctgtcgcacttcccgagcctccggaagatgcaggaactcctgtagatccatggacttcagcaatgttccaggcgctagaagcccaagcattgtggacacggtggatgacatgctggccaacgacatctgcagcggctgatggtgatggtgcggcagtgaggagtccctgatgccttcccaggtggtcaagggcggcgcctttgacggcaccatgaacgggcctgttcgggcacgtgctacgtgcgagggggccggcgagggcatcgacgacgtggagtgggtggtgggcaaggacaagcccacctacgacgagatcttctacacgctgtcccctgtcaacggcaagatcacgggcgccaacgccaagaaggagatggtgaagtccaagctccccaacaccgtgctagggaagatctggaagctggccgacgtggacaaggacgggctgctggacgacgaggagttcgcgctggccaaccacctcatcaaggtcaagctggagggccacgagctgcccgccgacctgcccccgcacctggtgccgccctccaagcgcagacatgagtgatggcgtccggccccgcacctgccatttgcacgcccggccgggaggcagagacggggggaggggaagcctcaccatttctcaaggtccataaagactgagcggatgtttcctcgcctctcgaaaaggaaaaccaccatctttcttttaaggctgttcctgggcctggcgggggaggcaggggtgagaggatggaattgtgtg

SEQ ID NO: 247205 - DNA, 376 bp, Homo Sapiens
  misc_feature (32)..(32): n is a, c, g, or t
tcggcccaaccaacgccctaccgcaatgccangcgggctgaacgtgcctcctaatgaactgccctgccccctgtacccactcggcaggaaaacatcatcggccgtggggcagtgtctcatctatgggctgacagtcgtcctccgcaagaaattcctcggccagccgcttctgggacgactgcatcaagtacaactgcacggtggttcagtacatcggggagatctgcccgctaacctctgaagcagccggtgcgcgaggcggagaggcgacaccgcgtgcgctggcggtggggaacgggctgcgtcctgccatctgggaggagttcacggagcgctttcggtacgccaaatcggggagggaggcctgtgccgaatt

SEQ ID NO: 247206 - DNA, 931 bp, Homo Sapiens
  misc_feature (382)..(382): n is a, c, g, or t
ttggcaggaaaggcttttgtgtttttattaagtggaacttcctatattctggctggtctgtatctttcagaggacagctgcaggccgcagagagcaggtatgaggctcagaaaaggataacccaggtgtttgaattggagatcttagatttatatggcaggttggagaaagatggcctcctgaaaaaacttgaagaagaaaaagcagaagcagctgaagcagcagaagaaaggcttgactgttgtaatgacgggtgctcagattccatggtagggcacaatgaagaggcatctggccacaacggtgagaccaagccccccaggcccagcagcgcccggggcagtagtggaagcaggggtggtggaggcagcagcagcagcancagcgagctttctaccccagagaaacccccactccagagggcaggcccattcagcagtcggtgggagacgactatgggagaagcgtctgccagcatccccaccactgtgggctcacttcccagttcaaaaagcttcctgggtatgaaggctcgagagttatttcgtaataagagcgagagccagtgtgatgaggacggcatgaccagtagcctttctgagagcctaaagacagaactgggcaaagacttgggtgtggaagccaagattcccctgaacctagatggccctcacccgtctcccccgaccccggacagtgttggacagctacatatcatggactacaatgagactcatcatgaacacagctaagaatgatggtcaatcagtgttaacttgcatattgttggcacagaacaggaggtgtgaatgcacgtttcaaagctttcctgtttccagggtctgagtgcaagttcatgtgtggaaatgggacggagtcctttggacagctgactgaatgcagaacgtttttggatctggcattgaaatgc

SEQ ID NO: 247207 - DNA, 1017 bp, Homo Sapiens
  misc_feature (77)..(186): n is a, c, g, or t
  misc_feature (699)..(723): n is a, c, g, or t
  misc_feature (726)..(885): n is a, c, g, or t
ttggctcaagcagtcctcccacttctgactccggagtggctgggcctacaaggccccaccaccacacctggctaatnnnnnnnnnnnnnnnnnnnnnnnnnnnnnnnnnnnnnnnnnnnnnnnnnnnnnnnnnnnnnnnnnnnnnnnnnnnnnnnnnnnnnnnnnnnnnnnnnnnnnnnnnnnnnnatgagccaccgcacctggcgacaacctcattttgactagtttatatgcaaagaccctgtttatatacagggccatactcatgggttctggggggtcaggacatgaacacatctttgtgggggccagagaagggacagtttatgggcaatggcaagaggaagctgcttgtggctgtgggtaggaccgaccacaggtgttccatccccaggcttcattgaggaccctgagaggaagtatcactttgagtgcagcagcgaggagcagtgtcaggagtggatggaggctctgcgtcgggccagctacgagttcatgcggagaagccctcatcttctacaggaacgaaatccgggaaggtgacgggcaaggaccccctggaacagttcggcatatccgaggaggccaggttccagctgagtggcttgcaggggtgagcgcagggcacggtggtcagcgtgcagcgggacgggactggccctgcccagccatgaatcgcttggccatgcctggatctgnnnnnnnnnnnnnnnnnnnnnnnnngtnnnnnnnnnnnnnnnnnnnnnnnnnnnnnnnnnnnnnnnnnnnnnnnnnnnnnnnnnnnnnnnnnnnnnnnnnnnnnnnnnnnnnnnnnnnnnnnnnnnnnnnnnnnnnnnnnnnnnnnnnnnnnnnnnnnnnnnnnnnnnnnnnnnnnnnnnnnnnnnngggaggtttttggtttggagacatccaaagcctgaagccaggtgacctgcctgagttgtgtgcatccaggggcctggtgagcccccaggtgtggcactggcccgcctgcaccgtgctatctcatccggacca

SEQ ID NO: 247208 - DNA, 651 bp, Homo Sapiens
  misc_feature (424)..(542): n is a, c, g, or t
atacgttatgtagtaaacatatgtaatatatgttatgtactatatgtactatatgcgtacaaccactatggagaacagtttggaggttcgtcaaaaaactaaaagtagagctatcatatgatccagcaatcccactgctggatatatacccaaaagaaaggaaatcagtatattgaagagatatctgcactcccatgtttgttgcagcactgttcacaatagccaagatttggaagcaacttaagtgcccatcaacagatgaatggataaagaaaatgtggtacatatacacagtggagtactattcatccataaaaaagaatgagatcctgtcatctgcaacaacatggatggaactggaggtcattatgttaagtgaaataagccagccagccgagtgcagttgctcacacctgctcacacnnnnnnnnnnnnnnnnnnnnnnnnnnnnnnnnnnnnnnnnnnnnnnnnnnnnnnnnnnnnnnnnnnnnnnnnnnnnnnnnnnnnnnnnnnnnnnnnnnnnnnnnnnnnnnnnnnnnnnntggtggctcctaaaaataagttggctagacagctgctctagaggccaaggtgggaggatcgtttgagcccacgtgtttgaggttgcacacgtgtcataatacggcacag

SEQ ID NO: 247209 - DNA, 333 bp, Homo Sapiens
cacagtgaaagaaacaagtttattggaaactactcctttacagagtagagtgtcctcagaaagcagggggagaaacccacagccctttgttagtatttctacttataagaaactataaggaactatagttaaacttggagtgtgcagataagctcactaaaggtaggggctattgggtgttatccacgaccattaatcctgcaacctaagcttgctcatttatgttatatttaaggtaatggggggctgcattcttagggacatttgggacattctgcaggcttggggggaacatgttctgtatggccataaatattctgtaattataattgg

SEQ ID NO: 247210 - DNA, 2165 bp, Homo Sapiens
ttgggtgcgtttctctcccaaacgattgcagttctctccttttcaggcctataatgcaaagagcaaaagctttgaagatcctcccaaccatgcccgtagccctggaaacaaagggaagggcaagggaaaagggaagggcaagcccaagtcccaagcctgtgagccgagcgagccagagatagagatcaagctgcccaagctgcggaccctggatgtgttttctggctgcggggggttgtcggagggattccaccaagcaggcatctctgacacgctgtgggccatcgagatgtgggaccctgcggcccaggcgttccggctgaacaaccccggctccacagtgttcacagaggactgcaacatcctgctgaagctggtcatggctggggagaccaccaactcccgcggccagcggctgccccagaagggagacgtggagatgctgtgcggcgggccgccctgccagggcttcagcggcatgaaccgcttcaattcgcgcacctactccaagttcaaaaactctctggtggtttccttcctcaggtaaacgggtagaagccccccagtgttgccagacggcccggggctgtgccgcatgtcagcagtggtcattttcgccctgcactgaggcctctgccccccggaagctcacagctcagctctcaccagggagagactttgataacattcgtgaggggcttccggcacagtgggtcgtttcttccctctgtctgtggaggtgactcctgcagtctctcctgccccctacagctactgcgactactaccggccccggttcttcctcctggagaatgtcaggaactttgtctccttcaagcgctccatggtcctgaagctcaccctccgctgcctggtccgcatgggctatcagtgcaccttcggcgtgctgcaggccggtcagtacggcgtggcccagactaggaggcgggccatcatcctggccgcggcccctggagagaagctccctctgttcccggagccactgcacgtgtttgctccccgggcctgccagctgagcgtggtggtggatgacaagaagtttgtgagcaacataaccaggttgagctcgggtcctttccggaccatcacggtgcgagacacgatgtaccgacctgccggaggtgcggaatggagcctcggacactggagatctacctacaacggggagcctcagatcctggttccagaggcagctccggggcgcacagtaccagcccatcctcagaggaccacatctgtaaggacatgagtgcatatggatggctgcccgcatgcggcacatcccacttggcccccaggggtcagactggcgcgatctgcccaacatcgaggtgcgagctctcagacggcaccatggccaggaagctgcggtatacaacaccatgacaggaagaacggccgcagcagctctggggccctccgtggggtctgctcctgcgtggaagccggcaaagcctgcgaccccgcagccaggcagttcaacaccctcatcccctggtgcctgccccacaccgggaaccggcacaaccactgggctggcctctatggaaggctcgagtgggacggcttcttcagcacaaccgtcaccaaccccgagcccatgggcaagcagggccgcgtgctccacccagagcagcaccgtgtggtgagcgtgcgggagtgtgcccgctcccagggcttccctgacacctaccggctcttcggcaacatcctggacaagcaccggcaggtgggcaatgccgtgccaccgcccctggccaatgccattggcttggagatcaagctttgtatgttggccaaagcccgagagagtgcctcagctaaaataacggaggaggaagctgctaaggactagttctgccctcccgtcacccctgtttctggcaccatgaatccccaacatgcactgatgttgtgtttttaacatgtcaatctgtccgttcacatgtgtggtacatggtgtttgtggccttggctgacatgaagctgttgtgtgaggttcgcttatcaactaatgatttagtgatcaaattgtgcagtactttgtgcattctggattttaaaagttttttattatgcattatatcaaatctaccactgtatgagtggaaattaagactttatgtagtttttatatgttgtaa

SEQ ID NO: 247211 - DNA, 585 bp, Homo Sapiens
attcaatttcctttaatgagtacttgttacagtaaaagaggtataaagtcctgttcccaagtccaaaccactttttaacttaaatcttgagtttttctgaattactgaatttgaagtaattctctttatatctgaaaaatggttttattgaaacgtttgagattaaaaaatatgcattgcaagaagcatatgacaaacattctgagagtacaaaattagttgtaaaaaataacataatttaccagtaaacccactcatatagaaatggtgcaaagccttttgatataaaaagttttgtacaccaagcacctatttttataacttagcttcccatggagagataatggcttgcgtgcattttatgtatccataacatacatacaaggctcggtcttttcaatgggataacagttcacaactcttcgatttgaattgtaatgaatctggtgacaaggatttttctctaatggattccaaagttagccagaacttttaatgtcaagatgaaaaagggtgtaaggtgttatattttcttcaattcctttaccacaggaggctaactccacaggaggctaactccacaat

SEQ ID NO: 247212 - DNA, 935 bp, Homo Sapiens
gaattaaactcgctgaaaaacaggctggtacggtccggaattccgggatatcgccgcgtggtgcctcctgaggcggcccccgtgatgaagagatctgggaacccgggagccgaggtaacgaacagctcggtggcggggcctgactgctgcggaggcctccggcaactattgattttatgacatggcagacttctgcgttatgacccggctgctgggctacgtggaccccctggatcccagctttgtggcgtgccgtcatcaccatcaccttcaagtccgctcttactggaatgtggttgcacgatgggaacacaagacccgcaagctgagcagggccttcggatccccctacctggcctgctactctctaagctgtcaccatcctgctcctgaacttcctgcgctcgcactgcttcacgcaggccatgcttgagccagcccaggatggagagcctggacacccccgcggcctacagcctgggcctcgcgctcctgggactgggcgtcgtgctcgtgctctccagcttctttgcactggggttcgctggaactttcctaggtgattacttcgggatcctcaaggaggcgagagtgaccgtgttccccttcaacatcctggacaagcccatgtactggggaagcacagccaactacctgggctgggccatcatgcacgccagccccacgggcctgctcctgacggtgctggtggccctcacctacatagtgggtctcctattacgaacgagcccttcaccgctgagatctaccggcagaaagcctccgggtcccacaagaggagctgattgagctgcgacagctttgctgaaggcctggccagtctcctggcctgccccaagtggcaggccctgcgcagggcgagactggtgcctgttgctcagggctcgcccccggcgtgtgctgccccagtgcct

SEQ ID NO: 247213 - DNA, 505 bp, Homo Sapiens
ttggcccagctcctgtcggtgctgcagggcctcctgcacctggagcccaccctccgctccagccagctgctctgggaggccctggagagcctcgtgaaccgggccgtgctcctggccagcgatgcccaggaatgcaccctggaggaagtggttgagcggctcctgtctgtcaaggggcgacccagaccgagccccctggtcaaggcccataaaagcgtccaggccaacctagaccagagccagaggggcagctccccgcaaaacactacaacccccaagcccagcgtggagggccagcagccagcagcagctgctgcctgcgagcccgtggaccacgcccagagtgagagcatcctgaaagtttcgcagctcgcccctgagttgcagctcgcccctgagttgcagctcgcccctgagttagcagctcgcccctgagttagcagctcgcccgctgagtctagcagctcgcgcctgagttagcagctcagcacctgaggttagcagc

SEQ ID NO: 247214 - DNA, 1167 bp, Homo Sapiens
ggacgcgtgggtcgcccacgcgtccggcgccgcgcgcaactcggcgggccagacgctcagtgccgtgcagctgcacgtgaaagagccccgcctccggttcacacggcccctgcaggacgtggagggccgtgagcacgggattgccgtgctggaatgtaaagtacccaactcccgcatccccacggcctggttccgtgaggaccagcggctgctgccctgccgcaagtacgagcagatcgaagagggcactgtccggcgcctcatcatccacaggctgaaggcagacgatgatggtatctacctgtgcgagatgcggggccgggtgcgcaccgtggccaacgtcacagtcaaagggcccatcctgaagcgcctgccccggaagctcgacgtcctggaaggagagaatgctgtgctgctagtggaaactctagaggccggggtcgagggacgctggagccgtgatggggaggagctgccggtcatctgccagagcagctcaggccacagtgcatgccctggatccttccagggtgtcacaccgagaggatgctggcagaaggtcacctttagccatgggcaactcccgtaccactacgcttctcagagtacaatgtgtcaagcaacagtcaccccaggaccccccatattggcagagatgttcaagggccacaagaacacggtcctgttgacctggaagcctcccgagccagctcccgagaccccattcatctaccggctggagcggcaggaagtgggctctgaagactggattcagtgcttcagcatcgagaaagccggagccgtggaggtgccgggcgactgtgtgccctccgagggtgactaccgcttccgcatctgcacagtcagcggacatggccgtagtccccacgtggtgttccacggttctgctcaccttgtgcccacagctcgcctggtggcaggtctggaggatgtgcaggtatacgacgggggaagatgccgtcttctccctcgatctctccaccatcatccagggtacctggttccttaatgggggaagagctcaagagtaacgaggccggagggccaggtgggaacctgggagcctgcggtaccgtatagagcagaagggtctgcagcacaagactcatcctgcatgccgtcaagcaccaggacagggctgccctg

SEQ ID NO: 247215 - DNA, 1009 bp, Homo Sapiens
  misc_feature (345)..(374): n is a, c, g, or t
  misc_feature (381)..(635): n is a, c, g, or t
  misc_feature (872)..(872): n is a, c, g, or t
  misc_feature (980)..(980): n is a, c, g, or t
  misc_feature (996)..(996): n is a, c, g, or t
ttggcaatttaattcctctttttagggctaaagttttagggtacagtttggctaggtatcattcaactctccaatgttctattaatcacctctctgtagtttatggcagaagggaattgctcagagaaggaaaagactgaatctacctgccctaagggacttaacttgtttggtagttagccatctaatgcttgtttatgatatttcttgctttcaattacaaagcagttactaatatgcctagcacaagtaccactcttggtcagcttttgttgtttatatacagtacacagataccttgaaaggaagagctaataaatctcttctttgctgcagtcatctacnnnnnnnnnnnnnnnnnnnnnnnnnnnnnngaagcannnnnnnnnnnnnnnnnnnnnnnnnnnnnnnnnnnnnnnnnnnnnnnnnnnnnnnnnnnnnnnnnnnnnnnnnnnnnnnnnnnnnnnnnnnnnnnnnnnnnnnnnnnnnnnnnnnnnnnnnnnnnnnnnnnnnnnnnnnnnnnnnnnnnnnnnnnnnnnnnnnnnnnnnnnnnnnnnnnnnnnnnnnnnnnnnnnnnnnnnnnnnnnnnnnnnnnnnnnnnnnnnnnnnnnnnnnnnnnnnnnnnnnnnnnnnnntgatccaccacacctggcccttgcaatcttctactttaaggtttgcagagataaaccaataaatccacaccgtacatctgcaatatgaattcaagaaaggaaatagtaccttcaatacttaaaaatagtcttccacaaaaaatactttatttctgatctatacaaattttcagaaggttattttctttatcattgctaaactgatgacttactatggggatggggtccagtcccatngaccttgggggtaccaattgtaaacctaggagttttattcaactttgggtgaaccagttttgggcataatagtccaattttctactttctggggaagtccatcttcantgcccactggttgggnatttttattaatt

SEQ ID NO: 247216 - DNA, 877 bp, Homo Sapiens
  misc_feature (98)..(107): n is a, c, g, or t
  misc_feature (772)..(802): n is a, c, g, or t
tttaatttatttctaaaattgtgtgtaggtggagcatattacctctgaattggatttggaggataataaagaagatgtatttctatttgtcgtttagnnnnnnnnnnggcagaaatgcccattgaaaaccactgaactagctaaaaatgggaaccacaaaactgaaaggaagccagagtggcttgcgcagaagaaactaaatgatagaggggtaggggagggagagatcacatggggccatgacagcggttttgaactttatcctgaagacttgatgtgtgttttgaatgtgcattactaagtaaattttaaaaaatataaccttcttgctcttgaagaaaacacagcaaacaacttagaagggaacagagatatttaagaggtaaaactagacttagaaactgcttagatttttatcaggagggagaggaaggagtcaaagatgacttccagatttttgcttgagccaatgggtagatggtgatgcttttcacttacttacagatcctgagagaggaccaggttcatgtgagggaggtagatggagagttccactttggacatattgaatcaaagatgcctgtgaaatatccagctagtggtgtttaatgggctgttggaaagagttggacaaactgcacccctacaatgtgagggtcaagttcagaaaatgaacactccaaaacgaaagttaccatgaaagaaataagtcaatgagaataagcatttgtggtaactctcccagaaaataactttactttaaaaaaactannnnnnnnnnnnnnnnnnnnnnnnnnnnnnnaccggtggagctgtttaagccaaggagttgtggagatctctgtgatgatccaaaatctgactaatataaaaccaa

SEQ ID NO: 247217 - DNA, 983 bp, Homo Sapiens
gcttggcacttttataaaaacgcacggcccttcgctacggtcggaatccgggatatcgtcgaccacgcgttcggtagcaattaactggtctggagggtggcatcatgcaaagaaagatgaagcatctggtttttcgttatctcaatgatgctgtcctgggaatattacgattgcgacggaaatttgagcgtattctctacgtggatttggatctgcaccatggagatggtgtagaagacgcattcagtttcacctccaaagtcatgaccgtgtccctgcacaaattctccccaggatttttcccaggaacaggtgacgtgtctgatgttggcctagggaagggacggtactacagtgtaaatgtgcccattcaggatggcatacaagatgaaaaatattaccagatctgtgaaagtgtactaaaggaagtataccaagcctttaatcccaaagcagtggtcttacagctgggagctgacacaatagctggggatcccatgtgctcctttaacatgactccagtgggaattggcaagtgtcttaagtacatccttcaatggcagttggcaacactcattttgggaggaggaggctataaccttgccaacacggctcgatgctggacatacttgaccggggtcatcctagggaaaacactatcctctgagatcccgagatcatgagtttttcacagcatatggtcctgattatgtgctggaaatcacgccaagctgccggccaggaccgcaaatgagccccaccgaatccaacaaatcctcaagtacatcaaagggaatctgaagcatgtggtctagttgacagaaagagatcagtttccagagctgaggagtggtgcctataatgaagacagcgtgtttatgcaagcagtttgtggaatttgtgactgcacggaaaatttgaaagaaattacttcctgaaaatttccaaggggcatcaagtggcagctggcttcctggggtgaa

SEQ ID NO: 247218 - DNA, 1012 bp, Homo Sapiens
ttggctctgcgtttcttgaccttgtccagtagaaggctatttaattttcacaactgcttgaattttgacatacaagatgaagcaagatgcctcaagaaatgctgcctacactgtggattgtgaagattatgtgcatgtggtagaatttaatccctttgagaatggggattcaggaaacctaattgcatatggtggcaataattatgtggtcattggcacgtgtacgtttcaggaagaagaagcagacgttgaaggcattcagtataaaacacttcgaacatttcaccatggagtcagggttgatggcatagcttggagcccagagactagacttgattcattgcctccagtaatcaaattttgtacttcagctgctgatatgaaaattagattatttacttcagatcttcaggataaaaatgaatataaggttttagagggccataccgatttcattaatggtttggtgtttgatcccaaagaaggccaagaaattgcaagtgtgagtgacgatcacacctgcaggatttggaacttggaaggagtgcaaacagctcattttgttcttcattctcctggcatgagtgtgtgctggcatcctgaggagacttttaagctaatggttgcagagaagaatggaacaatccggttttatgatcttttggcccaacaggctattttatctcttgaatcagaacaagtgccattaatgtcagcacactggtgcttaaaaaacaccttcaaagttggagccgttgcaggaaatgattggttaatttggggatattactcggtccagttatcctcaaaataagagacctgttcacatggatcgagcctgcgttattcaggttggtccacaattagtgaaaatctggtttgcaaccactggttatcctgggcaaattggcaagccagtttcaaattcatcatttaggacaccctcaagccatcctcaatgggttctgtaagccgttggatctggactgtcctgggcatcgaactctccctg

SEQ ID NO: 247219 - DNA, 360 bp, Homo Sapiens
cgcggccgcgtcgacaagctccagcccagaaagcacctgcttaggtctggtagggtcaactcctgaaacccgtatgtctaaaaatgcctggttttgggcaaaccccacatatcctgcttattatgtacacaaggtcagtactgcttgttactaggcttgaatacaacatactattacagatgttgctctcttgtccccaagacaggagacaccacttttctggcattttgtcctcctgttactttagtaccattgcattttagacacagcccactcttcttccaagacactcactcccaatgggtgccaatctgttctgagcatccttctctagttcagcattcttggtctggggtcgac

SEQ ID NO: 247220 - DNA, 1437 bp, Homo Sapiens
  misc_feature (1018)..(1037): n is a, c, g, or t
ttggagaacttctgcttccaaattctttgaagccagaagaagggcttgaagtatggaaaaactgggcccagaccaagaatgctgaactagagaaggatgctcagaacagattggcacccattgggaggcgccaactgctgcgattccaggaagatctcatctcctctgctgtggcagagttgaattatgggctctgtctaatgacacgggaagctcgaaatggagaaggtgaaccctatgacccagatgtgctctactatattttcctgtgtattcaaaagtatctttttgaaaatggaagggtagatgacattttctccgatctttattatgttcggttcacggagtggctacatgaagttctgaaggatgttcagccccgggtcactccacttggctatgtcttgcccagccacgtgactgaggagatgctatgggagtgcaagcagcttggggctcactccccctccaccttgctgaccaccctcatgttctttaataccaagtacttcctattgaagacagtggaccagcacatgaagctggccttctccaaggtcttgcgacagacaaagaagaacccctctaatcccaaggataaaagcacgagtatccggtacttgaaggcccttggaatacaccagactggccagaaagttacagatgacatgtatgcagaacagacggaaaatccagagaatccattgagatgtcccatcaagctctatgatttctacctcttcaaatgcccccagagtgtgaaaggccggaatgacaccttttacctgacacctgagccagtggtggcccccaacagcccaatctggtactcagtccagcctatcagcagagagcagatgggacaaatgctgacgcggatcctggtgataagagaaattcaggaggccatcgcagtggccaatgcaagcactatgcactgagatgccttggccatggcacaagagaaaccagccaggaaaaaccagacagactttcacactaaagaagaggcctccannnnnnnnnnnnnnnnnnnngatgggggtagttacgaagcctttcaggctgcttctgtttaaaatataaaagaaaacttggcccccttgtgcatcttcataaacctgctgcggcagactcctcagccgatggtggctctgggtttccttgagtgtcatatgtcctagaaagttgctggctgactctttaggtctggggcctggggaaagggcttggactgtgaacacgaaattgtggccctttccatcttcaagagagatggaacttaaccgattggatgggaccctgggaagggcaatcttccccagcccgacttccaactgggctgacaagactttgctgacccacagggggaaccgatggtctttttcctttctttcatgatcacgacttaaacttagcatcctaatgggagaacca

SEQ ID NO: 247221 - DNA, 2382 bp, Homo Sapiens
tttcataaaatggtaccagcctgcatgaattttgtgatgacttacaagatttgatcgcccagctgaagctcttaccacatatctcacatttgtaaggtttttccccggtgtgaactcgcttatgatactgtagttgtgaagaccgactgaagactttaccacatacatcacatttgtatggtttctctcctgtgtggacactctgatgaaagttggagacttgaggcctgactgaagtgcttcccacactccccacatttatagtggtttttctcctgtgtgcaccctctgatgcatgtcaaggttcaagctccacttgaagccctttccacactcctcacatttgtatggcttttctccagtgtggactttttgatgggcttgaaggtgtgcactccgactgaagctcttcccacactcttcacatttaaatggtttttccccactgtgaactctctgatgggttagaagatgcgaggcctgactgaagaccttcccacactcctcacaattatatggtttctcccctgtgtggatcctacaatgaattttaagatctgctctacgactaaatccctttccgcactcttcacatttgtatggtttctcaccggtatggatcagctggtgaatctgaagtcgtgagctctgattgaagccctgcccacactcttcacacttaaaaggtttctgtacactatgtgctttcagatggattttaagatatgaactctgacggaaggctttaccacatacttcacatttatagggtttttcccctgtgtggactaccagatgcacttgataatgaattttcattctgaagctcttcccacactcattgcatttgtatggcttctctccagtgtggactccctgatgggcctgaaaacgttgaactgtaaatgaaacccttaccacacactttacatacgtatggtttctctccagtgtggattctccgatgggcctgaaattgtgaaggctgaataaagcacttaccacattcttcacacttgtaaggtttctctcctgtgtggaccctttgatggatacgaaggtttgagctacaagtgaaacacttaccacagtcctcacatttgtatggtttctctcctgtgtggaccatgcaatgattattaagtgctgatctacgacggaagttcttaccacatgtatcacatttgaatggtttctccccagtatgaattctctgatgttcctgaagatgggaagcatgtatgaaggcccttccacattcctcacaattgtaaggtttctctcctgagtgtaatttgcaatgtacagtaagtgttgatctacgactgaagcctttcccacattccacacatttgaatggtttctctccagtgtggactctctgatgagtttgaagatgtgagctctgactaaattccttaccacacacgtcacacttatagcatttctctcccatgtggactctttgatgaatatgaagggctgagatgtaacagaagctttttccacactcatcacatgtatgagacttctctcctgagtgtaatgtgatgaagatcaagatggaaacatcacctgcagatttgtttccagatttgcagcctgaaaaggtctttctgttgtgtgaattctagatagtctctgcctcatttggatcttggctggtgatttcccttttctttgggttgctgagtgttcattatcatcaagttttgtttcctttttaagtgacttgcattttgtttgcagatttgatgccccactgacagcaggttcctgaagttctccagcatcacatcttggtacagcttcctctgggcagggtccagcagccccagttcctcctctgtgaagaccacagccacatccttgaaggtcactgcttccttgaacgtggtcatttttcctcctgtttgggaatgttgctgagtcactgagagcaggttcctgaagttctccagcatcacatctcggtacagcttcctctgggcagggtccagcagccccagctcttcctcagtgaagatcacagccacgtccttgaaggtcattgcctccttgaacgtggtcattttccctcttacttctggaaacttgcagagtcctgagtgatgcagttcctgggaaagcagaattgtgccaagacagcccctggtacgtgggcttccttgctgcagaaagctataatcagctgtctctggttacaggtatgtttctagtggtattcagctgatggtcatcaacaaaacaaacaggaaaaatgtaaacacttggcaaacgtgggtaaagagtaaataagaatttcttaggctacttttgcaacttttctataggtttcaaatgacataaaaataaaaagttttataattttaggaaacccaa

SEQ ID NO: 247222 - DNA, 690 bp, Homo Sapiens
cgacgagggaaagcatggcgtcggtggtgttggcgctgaggacccggacagccgttacatccttgctaagccccactccggctacagctcttgctgtcagatacgcatccaagaagtcgggtggtagctccaaaaacctcggtggaaagtcatcaggcagacgccaaggcattaagaaaatggaaggtcactatgttcatgctgggaacatcattgcaacacagcgccatttccgctggcacccaggtgcccatgtgggtgttgggaagaataaatgtctgtatgccctggaagaggggatagtccgctacactaaggaggtctacgtgcctcatcccagaaacacggaggctgtggatctgatcaccaggctgcccaagggtgctgtgctctacaagacttttgtccacgtggttcctgccaagcctgagggcaccttcaaactggtagctatgctttgatgtcctgttgaggccatcggacagagactggagcccaggtgacaggagatggtgataccagaagtcaagggttggggtggcgacacggcctcccgaggaagaggtctgcttgatggtgactctgcaggagactctgaagtgactgctgggaaaccctttgggagacctgacctggggccaaaaataaagtgagccagcgtcatgacgcatgctatttaggcacgcttgc

SEQ ID NO: 247223 - DNA, 1107 bp, Homo Sapiens
ttggcgtccgttcccaagctggtttgaaactaggggtcgggctcggccgtcgtcgttgtttgtcgccgcatccccgcttccgggttaggccgttcctgcccgccccctcctctcctcccttcggacccatagatctcaggctcggctccccgcccgccgcagcccactgttgacccggcccgtactgcggccccgtggccaccatgtccctgcacggcaaacggaaggagatctacaagtatgaagcgccctggacagtctacgcgatgaactggagtgtgcggcccgataagcgctttcgcttggcgctgggcagcttcgtggaggagtacaacaacaaggttcagcttgttggtttagatgaggagagttcagagtttatttgcagaaacacctttgaccacccataccccaccacaaagctcatgtggatccctgacacaaaaggcgtctatccagacctactggcaacaagcggtgactatctccgtgtgtggagggttggtgaaacagagaccaggctggagtgtttgctaaacaataataagaactctgatttctgtgctcccctgacctcctttgactggaatgaggtggatccttatcttttaggtacctcaagcattgatacgacatgcaccatctgggggctggagacagggcaggtgttagggcgagtgaatctcgtgtctggccacgtgaagacccagctgatcgcccatgacaaagaggtctatgatattgcatttagccgggccgggggtggcagggacatgtttgcctctgtgggtgctgatggctcggtgcggatgtttgacctccgccatctagaacacagcaccatcatttacgaagacccacagcatcacccactgcttcgcctctgctggaacaagcaggaccctaactacctggccaccatggccatggatggaattggaggtggtgattctagatgtccgggttcgctgcacaactgtcgccaggttaaacaaccatcgagcatgtgtcaatgggattggcttgggggcccagattcatcctggcacaatctggcctgcagcggatgccaccagggtctcatctgggacatccagcaaagccccg

SEQ ID NO: 247224 - DNA, 1834 bp, Homo Sapiens
caatgaacaactttgtacaaaaaagttggcgagcccagatgtcatgctgagtgagcacaggaagatgcgggacacatagaaggacagcgtgtatgtgttcaaaggcatgcagagtgacgacatatgctattcaaggatgcgtgtggatggagcagaaatgttaacacacatgggaataacaaatcactacgtccgagacagcgattttggggagcacacagggaggggacttcatctgggaggaacgcattattaggctgctgtgacaggtgtgtgggcgtggaccatctctgtacctttgtatatgtctggaatattgcataataagtaatagcttaagaaagagagagagacagccagggtgtgtggctgtggtgtgtgttgggcttatttttaattctcccataccaggaaaggcggtctggggagagagcggcgagctggtgtgtactaagccgatcccttgccagcccacacacttctggaacgatgagaacggcaacaagtacaggaaggcgtatttctccaaattcccaggtatctgggctcatggcgactactgcagaatcaaccccaagaccgggggcatcgtcatgcttggccggagtgacggcaccctcaaccccaacggggtgcggttcggcagctcggaaatctataacattgtggaatccttcgaggaggtggaggacagcctgtgtgtcccccagtataacaagtacagggaggagagggtgatcctcttcctgaagatggcctccgggcacgccttccagcctgacttggttaagaggatccgtgacgccatccgcatgggcttgtctgcgcgacacgtgcccagcctcatcctggaaaccaagggcatcccgtatacgctcaacggcaagaaagtggaagttgccgtcaaacagatcatcgctggaaaagccgtggagcaaggaggtgctttctcgaaccccgagaccctggatctgtaccgggacatccctgagctgcagggcttctgagtcagactggctggcgtgtcactcagccgcacccgtgtgcactgtaacttttgtgtgctcaagaaattatacagaaacctacagctgttgtaaaaggatgctcgcaccaagtgttctgtaggcttggggagggatcgtttctctgttttgttaaatctggtgggtacctggatcttccacacgagtgggattctggccttcagagaccaggagggagtgtctgggccgcaggtgtggcactgtggtgagagtgtgtgtctttgcacacacagtgcagcgggaacggtggggctggctggtgctgaagacagacacactcctgagccaaggtcttgtcttcaacctccccgtcccgttgtcccattttgctctgtgaaggtgcaaatccctttcttcccttcccatctcaggctctcctgttttccctcagggtccagtatgcctttgagctttagctgttagaaaggaacccccgtgacttgacacagctttcacagctggctgctaggaccggcgggctgggtgttcacgtgtgtctgtgtcatggatgcaatgcaggccctggaggactgtgcgtcacccgtcaaccagagcgtgcctccgggccagcttccctccaaggaatgagtggatttcatacaggatctctttattgcacagactgaatggctttacatgtttctaatgtgaattaggcatgtgaagcagtgggtgtccacccgtgtctctcttgtgtgagccctccagctgtgagcccaggcagtgtggtcaccgagtgaggaccctcctcatcaggaaccgcatccctgtgctgcctccacctgaga

SEQ ID NO: 247225 - DNA, 1290 bp, Homo Sapiens
  misc_feature (86)..(149): n is a, c, g, or t
  misc_feature (431)..(466): n is a, c, g, or t
ttggccctctctgcctctttctctttcacttttgcatgccctgcaaccttttaaaatgttgccccttccctgtgattcgccagacnnnnnnnnnnnnnnnnnnnnnnnnnnnnnnnnnnnnnnnnnnnnnnnnnnnnnnnnnnnnnnnntccctctccccactccgatttgctacactgagactcccgtcaatggactgcattgagagccggctccggcgcgagttgcctctccgcttcacgctcgatttccaggcattcttcccttattaagtattcgtgtaatattaatagtcatgaatatctgctattaggaggctccaggaacgctgcccagcgcggttattagaagctcaagcgaagccgccgctaagaaaggagggggagacacggattaaggaacacgcacgcacccacacactcacacatacnnnnnnnnnnnnnnnnnnnnnnnnnnnnnnnnnnnnaaagaactttgaatcataaccagtcgcggcaggatagagaccgtgggttcgaccagctgaaggcgccgcgcgaatcggtggttcaagttcggatggatccgagccgggctcccgcgctccggggagcgtcggcgccgtgactggagtcctgggtggcgcggggctctcggcgccttttgtgtggggcgcgctcgggcggcggggcagccgggcgctccaggcttgcttgtttttttccaccctgactcgttaccccagactcttcgcagatgttagttcacagtttttcagccatggaccgtcacgacggcaccagcaacgggacggcacggttgccccagctgggcactgtaggtcaatctccctacacgagcgccccgccgctgtcccacacccccaatgccgacttccagcccccatacttccccccaccctaccagcctatctacccccagtcgcaagatccttactcccacgtcaacgacccctacagcctgaaccccctgcacgcccagccgcagccgcagcacccaggctggcccggccagaggcagagccaggagtctgggctcctgcacacgcaccgggggctgcctcaccagctgtcgggcctggatcctcgcagggactacaggcggcacgaggacctcctgcacggcccacacgcgctcagctcaggactcggagacctctcgatccactccttacctcacgccatcgaggaggtcccgcatgtagaagacccgggtattaacatcccagatcaaactgtaattaagaaaggccccgtgtccctgtccaagtccaacagcaatgccgtctac

SEQ ID NO: 247226 - DNA, 480 bp, Homo Sapiens
ttggcttcaaggttacttcgcggagctggaaacgctggccgcgcaggccctgagggctcgcggccccagtggcgcggccccgatgcgctccatggcatctggaggtggtgttcccactgatgaagagcaggcgactgggttggagagggagatcatgctggctgcaaagaagggactggacccatacaatgtactggccccaaagggagcttcaggcaccagggaagaccctaatttagtcccctccatctccaacaagagaatagtaggctgcatctgtgaagaggacaataccagcgtcgtctggttttggctgcacaaaggcgaggcccagcgatgcccccgctgtggagcccattacaagctggtgccccagcagctggcacactgagcacctgcactaaattactcaaaatgtgctgtaaagtttcttctttccagtaaagactagccattgcattggctccttctcccatagaa

SEQ ID NO: 247227 - DNA, 981 bp, Homo Sapiens
  misc_feature (918)..(918): n is a, c, g, or t
  misc_feature (962)..(962): n is a, c, g, or t
ttggcgactgagacagcctccggagacgcttctcaccctgagaccaaagcacgggggcaccacagacgtgggggagccgctctggcctgagcccctaggggtggaacacttcttgcgggagatgggacagttttatgaggctgagagctgtcttgtggaggcagggaggctgccggcaggccagaggcgttttgcccacttcccaggcttggcctcggagctgctgctgacagggctgcctctggagctaatcgatgggagcacgctgagcatgcccgtccgctgggtcacagggctcctgaaggagctgcatgtccgactggagagacggtcaaggctggtggttctgtcaaccgtcggggtgccaggcacgggcaagtccacactcctcaacaccatgtttgggctgcggtttgccacagggaagagctgcggtcctcgaggggccttcatgcagctcatcacagtggctgagggcttcagccaggacctgggctgtgaccacatcctggtgatagactccgggggcttgataggtggggccttgacgtcagctggggacagatttgagctggaggcttccttggccactctgctcctgggactgagcaatgtcaccgtgatcagtctagctgaaaccaaggacattccagcagctattctgcatgcatttctgaggttagaaaaaacggggcacatgcccaactaccagtttgtataccagacaccttcatgatgtatctgttcccggccctaggccagagacaagagacagctcctggatccacctggtgacctgagcagggctgcagcccggatggagaaacagggcgacggcttccgggcactggcaggcctgggcttctgcgaccctgagaagcagcacatctgggcacatcccagggcctgtggaacggnagcacctcccatgggccgcagtgagctttgccttacagtgaagncatattttgaatttgaaga

SEQ ID NO: 247228 - DNA, 763 bp, Homo Sapiens
gttgttgttgtgtttttgttcacgactgaaaacaaggcatctgcttattgttttcagacagtagcgcatactttgtttcctaaacacgtggcagccccaggctcaggggcatatgcaggggcccagcaggaaacggcagggcacagtggctgtggtcccatgattggtcccttcttcagggctccaagtcactgccagggcagggaatgatgtctgctcctcagcccttgtgggcggcgctcacgcagcgctggtatgccttgaccaggtccgagcacagcagcacctcatgcgggcgatctcggtagcagtggagaatctgggcctgcaaccctgagcagacgggctccaccctgcggggcctcccaggcgctaggctaagtccctgacacccagcagcatccttttaaccctcaaggagaagcactgtgctttcccgttctagaaatgagaggacggtcgcagggtcaagccctgtggtgggtggcttaggctcacaatatagcagacactgaaacatgctgtggtatggggctccacaccgggctccttcactggggcctgtgtacactcaggagacaggaaagccccactggagggcccccatgaggatggtgcagcccgcctccaggacaacccgccccgctgtgcccaggatagccatccctttatgcctgagacagccccgacgcgtggtcgacgatatcccgggattccgaccgtaccactgctttttgaccactgttctatagtctatagcctt

SEQ ID NO: 247229 - DNA, 833 bp, Homo Sapiens
ttggctttcattcaatttaagaagcccattattgtagcagtcaatggcccagccattggtctaggagcatctatattgcctctttgcgatgtggtttgggctaatgaaaaggcttggtttcaaacaccctataccaccttcggacagagtccagatggctgttctaccgttatgtttcccaagataatgggaggagcatctgcaaacgagatgctgctcagtggacggaagctgacagcgcaggaggcgtgtggcaagggcctggtctcccaggtgttttggcccgggacgttcactcaggaagtgatggttcgcattaaggagcttgcctcgtgcaatccagttgtgcttgaggaatccaaagccctcgtgcgctgcaacatgaagatggagctggagcaggccaacgagagggagtgtgaggtgctgaagaaaatctggggctcggcccaggggatggactccatgttaaagtacttgcagaggaagatcgatgagttctgagtgtcgggctgcccactggtgacaccgggatcgggctgagcaggagaacatcaccggctcccgttcccctgatccattctcacagcctgaaacaagctcacccgtagcttacgcttggaagcaggactgggaacatcccacgctatttattatcgaggagttttaaagtactgtaactttaaaataaataactacaaaagcttctttgtccaaacgtcattattttatacttatatacacgcaggtgtaaaagtataaaggtgagcactagcctgctcctagaggctctatttttctttcctctgccgcacccgggaccctcagaacgc

SEQ ID NO: 247230 - DNA, 1402 bp, Homo Sapiens
  misc_feature (119)..(119): n is a, c, g, or t
  misc_feature (185)..(194): n is a, c, g, or t
aatattgggaataaaagagttaatttgctattaaacctaaaggattaaaggattcttccccatataatccaggtctatgatctagatcctagtataacctcttcttattttaaaatatntaattatactggaaacagcttcgtgcccttcagtcttttttccttggccaccttgggtgggcttgnnnnnnnnnnatgatgggggcatatccatcactgaagagcagaagccaaaggaaaaccggagcctaatcaagtgttttaaacacatcaggtttgaaatgcctatgaagcacccaagtggaaatgctgagtaggcagctgggctccaggtatcaatctagtctgggaactgagtttggaagataccagcaaacatcaagccaccaatgaggattaggtcacctggagattcccaattccatggaacagagggcctgagactgaatggccaacatttagacaagaagtctgccaaggctcaatccaggtctcaggccagaactgttagcgcaagaagctccttgctcctaagaacagagcctggcctggtaggtgccatgctggttccctgaggatgatacctgctcaggaatgaaggcaacatgcacaaaggtaccaggtgagggactggacccagggataccacacccctgcatcttctgtacttcctctaacataggtggtcagcatactctttcactccttatccaattttatcaaaaatagagattagggcaatatgacataacagcattaagcactaaaccatttgacagggattcctttcaaaagtgaaaaccatattccttctacaatactttgaacactcacttcaatttattgcatattttctaaatgcacctctctctctcttctgaaagagagaacatttcatcagaaaacgaacggggtcttttgcctatctgatggtctcacaccttcacaacagctacaaatccttggaccagccagggacagaccaactccagggttctctgaccacagaagtcctggaaaggctctgcactccaaaccaacccctacaccaccccaagggagggggattgtttcaggttcggggagacgctataagaaattgaacctaaactcttcatcaggcatgtccagagtggctttggctctccatatagagcgaggcctgcagaccctttggctcttctttctcggtggctccatctacgcggttgcacctgggctgaataaacagcagctctgagagcccgcagggcctcacaccattcggcttccatctgagccctatagtctcccaacaaggagtgcatcagctgcctcttcccgggcaagggcgttctttttctgcgcagggttcggattgctccaatacctgctctttctgtttgtggagtagcataaggatc

SEQ ID NO: 247231 - DNA, 948 bp, Homo Sapiens
  misc_feature (748)..(793): n is a, c, g, or t
ttgggtcatctagtcgagtcctctcattagtaaaggagcaaagtgaaacctgggggaggagaaggacttccctcaggttgcacagctgtttaggctatagaatattgatgtgtgaaaccattattgataatgcctagtagatcacatgtcaatgaacttgaaccccaaagatggtcgtgatgctttgccaaacccgcacactgccaacccctctactctccacctcagcccccacccacatctcccagagtattgcaattcagaacatttgggtcaaggtggagcaaggcactgacagtggccccacagggcatgtgtcactaatcactgtcccatggtctacgcacggcatctggctgctctgtctactgtgacttcttcctgtgtaatctcagtggggcccgtgtccacccacacatcgtgacccacataggggagaggttgcttttcttttgtgggctgagagtaggacaatgcaaatgaatgatctctagtagacagaaaagaacttggtctcttttttaaaatttcaaagagccagaagttctatgcctccttcaaagtaggcagaacaacgcagccaagatctactgtctgccatgctctgtgcaatgaagtctgcaggcctgaggaccatgtactgctgtccttcctcagagctctgcacaaacactgccaagtcctgaagacgcattcctttcctgccaacctctttccagataagcccttgaggtctcgggctgacctnnnnnnnnnnnnnnnnnnnnnnnnnnnnnnnnnnnnnnnnnnnnnngacagagaacatgccataaacatccttgaacccatgcaggaaagcccatcccatattctgaaaaaatgccaaattaggtttttctttctttttggaaatcagtcattacagtaaccgaaactcattgggttcaaggatgtttatggcatgttctc

SEQ ID NO: 247232 - DNA, 1239 bp, Homo Sapiens
  misc_feature (104)..(119): n is a, c, g, or t
  misc_feature (1110)..(1110): n is a, c, g, or t
  misc_feature (1143)..(1143): n is a, c, g, or t
  misc_feature (1175)..(1175): n is a, c, g, or t
ttggcaaaaggcaaatggcttcaaagcccttagtgtgcttatccagttcaggcagtgaggagataacctctgctttcctccctgaggagtttggagtatttaannnnnnnnnnnnnnnntgtcactttgaaaatatgttgctttttctcctgattgtattgaggctgatatggaagggttatttctttctggccaatactttttggtatttctaaatattgcaatcttgatttttactattaaatttgttaattgtcagttctggcttttttgcataaagagttggtccattaacttgccaatttgaagcttctaactagatattccctactgaaagttttggatttgtttttagtttgtggagcagtcttagctggggacaggtaattgacaacggcagagatactttcttttcctaggattctaagtctgtaatccacatcctcaatgtattcacaggactttaaaattctctccaaatgaggaaggaaatatcctgttgctttctaatgtttactaaaagttgtgtttagaacaacagattttaataggcatcttcctttgttatgtgtcattagccctttgcccgtttaccttagggctctttgaaggagaaatggatgggagaaaacctgtcacttggcgaaagtaaaagggataattaactggctcagagcttatgtgcagagttccaagccccaaagttaatctagaaccactcgataacaccaataaaaatatttatttcacatctgttatatatctggaaaatgttctaagcatcttacacatatttctcattaaatccacaggtgaccattgtgaggtagatattttgttctaattttccagatgaggaagctgagaccctaaaaggctgaccggttccctgatgtgttacctgcttctgctactgatccaaactgcagaacttctcattcatccccaaggcctccaggcagtatccaatggggaatcagctctaaaaggaaccagaccaacgttttccagccccttcattctgcttccctctgtgtgaggaaaggatagaaatgttcaggacatcatcatacaggctcctcatctacaaagttccagtagcagtgacgncctacacggaagaacttggaactgcaaacaggnctggggtcacctcagtgacatctgacgctgtnccaaccagaagttcgatttttgttctgggggtgaaggaggaaacagactgtactaaaggactaa

SEQ ID NO: 247233 - DNA, 857 bp, Homo Sapiens
  misc_feature (750)..(750): n is a, c, g, or t
gatcccttacagcttcacgatcaccaagcccttccgcccgatacttggcctgcatctggacttgggaatcctgtactatgtctacatggggctgctggcagtgttctgtaccaatgccatcaatatcctagcaggaattaacggcctagaggctggccagtcactagtcatttctgcttccatcattgtctttcaacctggtagagttggaaggtgattgtcgggatgatcatgtcttttccctctacttcatgatacccttttttttcaccactttgggattgctctaccacaactggtacccatcacgggtgtttgtgggagataccttctgttactttgctggcatgacctttgccgtggtgggcatcttgggacacttcagcaagaccatgctactattcttacatgcccgaggtgttcaacttcctctactcactgcctcagctcctgcatatcatcccctgccctcgccaccgcatacccagactcaatatcaagacaggcaaactggagatgagctattccaagttcaagaccaagagcctctctttcttgggcacctttattttaaaggtggcagagagcctccagctggtgacagtacaccagagtgagactgaagatggtgaattcactgaatgtaacaacatgaccctcatcaacttgctacttaaagtccttgggcccatacatgagagaaacctcacattgctcctgctgctgctgcagatcctgggcagtgccgtncaccttctccattcgatatcagctcgttcgactcttctatgatgtctgagtcccttgatcattgtcctttacctcacagtctctagggttcctgactcaggctgacc

SEQ ID NO: 247234 - DNA, 610 bp, Homo Sapiens
  misc_feature (368)..(368): n is a, c, g, or t
  misc_feature (412)..(412): n is a, c, g, or t
  misc_feature (432)..(432): n is a, c, g, or t
gcaccattttgctgtctgtttatttcaactgtacagagaagcttaaacacctgtggaaaaacacgaaaggcttagttgtctcttaagttcatgtactttttagtgataaatactcagtatttaactttatacacctgataaaaggaaaatgcatagtagaaagggtcgggaatgaaacagaagcatcgggcattgaatcgatcacagagtagaaaaatctgcagtccccagaaactcggcctccagctggagaggggaaccagcgtaccctgaaacttccctagcaccttggaagccaagtggaggtcatggttcttccactcggcaacgtgaagctccccgctggaagacaagtgagagcgaacagnccaggcctgtgtgtccacctgcacaggcattctccttgttccanaaaggctctgaggacggaanacctgcctctcaggaaaggccagaccagtagggagaggcctccgcagccccaagtgtcaacaaggggctcaataaggctttctgggaccactggcagctggtgggatggaagggggaggtggaaaagggcagaggaaatgggaagtggatggagggtttgtgcttccttcgaggccac

SEQ ID NO: 247235 - DNA, 370 bp, Homo Sapiens
  misc_feature (64)..(64): n is a, c, g, or t
  misc_feature (66)..(66): n is a, c, g, or t
  misc_feature (309)..(309): n is a, c, g, or t
gtctgtttatttcaactgtacagagaagcttaaacacctgtggaaaaacacgaaaggcttagtngnctcttaagttcatgtactttttagtgataaatacacagtatttaactttatacacctgataaaaggaaaatgcatagtagaaagggtcgggaatgaaacagaagcatcgggcattgaatcgatcacagagtagaaaaatctgcagtccccagaaactcggcctccagctggagaggggaaccagcgtaccctgaaacttccctaggcaccttgggaaggcaagtgggagggtcatgggttctnccactcgggcaacgtggaagctccccgctgggaaggacaagtgaggagcgacagggccagg

SEQ ID NO: 247236 - DNA, 1341 bp, Homo Sapiens
  misc_feature (964)..(975): n is a, c, g, or t
  misc_feature (1024)..(1118): n is a, c, g, or t
  misc_feature (1135)..(1143): n is a, c, g, or t
cagctgctgcttaagaaaacacccacagactcaccacattttagtcttagcatttactttccccaccccacattcttggaacagcctttagttctacaggaaatggcactgatggacagaagactagcattaccttcatgaaagggctgttagagctgcctgggaagaaggcgtgccttggggaactgggaagatgccgtcagtgtgggtgggcaggaggacagccagtcgtcctgctgccagcccaatagcttccagcggcaggtgcccaggtgctaccggagcccctcataggggtaggggcagggactgcacctcctccaggcactcatcgtaagcctcctggtactcctcatggggcttgaccattatcacacaggtggggcgcttggagcctgcggctgcacccaggtcctacagaggggaaagaagtgctgtttggaaaaaagctgtacaacctgtatgccaggaagtcaccaactgatgacccaccagcctaatctggcccacaaccatgttctgttcggtccatgttctatttaaaagcatcttgaattggttgccatcatttaaactcaatcagactttgaaggcatggtccagccacacagggcctacattcccacatggcaactatgaaagggctccagcccagcaggggctgtcccggtcccctgccacccccactttcttgtgcctcagatcctggcccctgttacgtaagataaggacagctacaggtccctctgagcctaaacccacctaaccggactaacatgggtgaagcatcttagcttagaaagctctttcacatacatctatctctttattctcatagtccacagataactgactatttggttcttaccatcaggccaaatggtaagttccttcagaacagggcctcctgctttatcccaagaagtgatactgtaggtacccaagatccacccccagcctctannnnnnnnnnnngagacagggcctcactctgtcatgcagtctggagtgtggtggtgtatgnnnnnnnnnnnnnnnnnnnnnnnnnnnnnnnnnnnnnnnnnnnnnnnnnnnnnnnnnnnnnnnnnnnnnnnnnnnnnnnnnnnnnnnnnnnnnnncaggtaattaaaaaaannnnnnnnngtaaaaagcccgcggcctcgacggagcccctcgtggacgcgctccacaccccgggaccgaccgagccgcgcccttatactcgagatcacacgcatgggcgaagtcaaacgatggcacccggccgcggggacgaaaaggaaagatttttgccgtaacaaccagccacggcgatgagatattttgttttgtgggcggcgg

SEQ ID NO: 247237 - DNA, 963 bp, Homo Sapiens
ggtttgactctgattacttcattatcatttaaaaacggatttccctgtgtattagatgttgtggattgcattcctaactaaaagcttacatacatttctgtttgagcttcagagaagctctgaacctcattcagctttcttctcagcttagaattttcatctttcagctgtggagagagaacatccttattagaaagtcagcatgtctggctcaaaagggcgtgtgcttctgcggtgtggctccagagcctcgtgataagcagagatgctgggtcagtgcagcatccacctgcagccactacagagggagaccacagacggaggcaggcacttttcaaagacctgtggtcacagatgccagttaattttactcagaggccgggggcagtggctcgctaaaaaattttttttattcagagcttataaccttttaggtgattataattttttaaaaattttcctcctcttggaatacttagcaagctggcgactgcagcctgcctttactgagggtacagccctgtaagtgcccaactgcatccaattcacagcttctagctcaccagtcctctttagccggttctattcccacgtgtaaccagaagcaaagtcaaagggaaagtggatagcaggctgtcacgcaaatcgccttgtcctggaaatcaaaccaggccacccaagaggtaggatggctccaggttctccccgggagaagccgctcggacaggcgctgtgccagagggcgccgtgaggctcacttactgcgtcgtaacttatctgcagcgtccgcaggtgcctgtctcccagagactctccatgaaccgcaaagtctgcgctaggactccctgccggagaggccggagacacgcgagaatcagtgtcactcaacgcccacgagggcagagactcaggccctgccagctccgacggggtggagaaaaaggaaggggtaggctatgccaa

SEQ ID NO: 247238 - DNA, 1390 bp, Homo Sapiens
  misc_feature (1372)..(1372): n is a, c, g, or t
cgacccacgcgtcgcgcgggtgtgggccagcagtgatgcactggcccagatcgcagaggacaagccttatgcagagttgtggatggggactcacccccgagggggatgccaagatccttgacaaccgcatctcacagaagaccctaagccagtggattgctgagaaccaggacagcttgggctcaaaggtcaaggacagctttaatggcaacctgcccttcctcttcaaagtgctctcagttgaaacacccctgtccatccaggcacaccctaacaaggagctggcagagaagctgcacctccaggctccgcagcactaccccgatgccaaccacaagccagagatggccattgccctcagccccttccagggcttgtgtggctttcggccagttgaggagatgtaacctttctaaagaaggtgcctgagtgtcagttcctgattggagatgaggcagcaacacacctgaagcagaccatgagccatgactcccaggctgtggcctcctctctgcagagctgtttctcccacctgatgaagagtgagaagaaggtggtggtggaacagctcaacctgttggtgaagcggatctcccagcaagcggctgccggaaacaacatggaggacatctttggggagcttttgctacagctgcaccagcagtacccagggtgatatcggctgctttgccatctacttcctgaacctgcttaccctgaagcctggggaggccatgtttctggaggccaacgtaccccatgcctacctgaaaggaggtgagccacatttcagcagtgagccccactgccatccctgctgggccctgtttccctatctggacaaaggaaggagaagggtggtcaaggagacccccaaggaccttgcagctctgacctctgagggttcctgggctcagcaagcaacagctggtagggatgatgaatgcatttagcattgaacacgccttgaatcctgacaccaaccctgtgatgccatgctactctgattttaagtcctgccagtcagtgtgggaaccacaatttgaacgcaggctatattggatcaaagctgttgttctgtcacagcctttgtatgtctgtcctacctaccagggatttttacactaaaatatgcatgttgccatggaaggatgccacctttcgactgttggctgcttatcacacatgcctcatgcacaggattctgggggtaaaagtgggagactacagaggttggggctccccaacccccaggggttaacatgaactcccctctggacataaatgggtgacctgtcacctgtttttgggattttgatatctaaccccccattctcccaaagaatacaattcatggaaaattttaacttancctgggcatgggggttca

SEQ ID NO: 247239 - DNA, 1040 bp, Homo Sapiens
  misc_feature (1002)..(1002): n is a, c, g, or t
ttggcaagtacccgctgcccttgattgagaaagagaaaatcagccacaacacccggaggttccgctttggactgccttcgccggaccatgtcttagggcttcctgtaggtaactatgtccagctcttggcaaaaatcgataatgaattggtggtcagggcttacacccctgtctccagtgatgatgacagaggctttgtggacctaattataaagatctacttcaaaaatgtacacccccaatatcctgaaggtgggaagatgactcagtatttggagaacatgaaaatcggggagaccatcttttttcgagggccaaggggacgcttgttttaccatgggccagggaatcttggaatcagaccagaccagacgagtgagcctaaaaaaacactggccgatcacctgggaatgattgctgggggcacaggcatcacacccatgttgcagctcattcgccacatcaccaaggaccccagtgacaggaccaggatgtccctcatctttgccaaccagacagaggaggatatcttggtcagaaaagagcttgaagaaattgccaggactcacccagaccagttcgacctgtggtacaccctggacaggcctcccattggctggaagtacagctcaggcttcgttactgccgacatgatcaaggagcaccttcctcctccagcgaagtccacgctcatcctggtgtgtggcccgccaccactaatccagacggcggctcaccctaacctggagaagctgggttatacccccaggacatgattttcaccctactaacacctcccatgtgctcagcaattttgcatgtcccttttcatctgtttcagagtaagttcaatttcaccacggtaaactgggatgttttcaaaagtgccttgccatgtaccttggcgcacacactggttctcctcttttgggtgtgggcctaacaaaaagggctcaaggggctggagactggctgctggggcctccttgcttggaggctggnaagagctccatttcagtatctttctccgtggttttgtg

SEQ ID NO: 247240 - DNA, 966 bp, Homo Sapiens
  misc_feature (57)..(57): n is a, c, g, or t
  misc_feature (71)..(71): n is a, c, g, or t
  misc_feature (167)..(167): n is a, c, g, or t
  misc_feature (354)..(354): n is a, c, g, or t
ggcttgaccttttttgaaaagtgctggttagttcccgcccctgggtaaacctggggnaggtgggggttctntcttaactcgaggggcacctgggatccaggacgcttctagggggctctggctgcccgtgttaatgaaggacagcgcttctgcgagcaccctggganctgggtcttgggtagcaaagccctcccagagaaaagatgggcacaactaaggctttcctgagcaggaagggggtgaagaccaatcccttccttttgtcctttggtacgcaccccctcagagctgagatggaagacatggctagttcttttcagccttgtggagcctgtcagtcgccattatacctcngagttgaggcccagcttagattaatgacttgtccaagatggcacacgtggaaagttgatctgcaccagaacccggatgactgtcaccttgaagcgtcctgttctccttctgtgctgtcccaggaagtgtctggcgggcgtgggcagcacagctctacactgtacgattcactagggcatcctgcgagcctcactagccttctggttcatgcctttgacaagcatttttgtgccccctctgcttactgtgacagtcgatgatgaatcttgcgttgccattttctgctgtgggtaactgcgtgcagtgtcttgccttgctttctcttcttactgtcccacagcttggtttcatgttacaaacagaaaagctcgaggctcccaccccgccacatcccaacttcatttccccctcactgtagcccatttccaccccaccacaaagttgccacaggttttctttgtatagaatatttattttgaagctctattttaatagtatttattcttagaaagtctactattgtaagagttcttctgtttgtgaagaaaaaaacaagttaaaaactgaatgtactgatttagaaaatatatataaatatatattgttaaatat

SEQ ID NO: 247241 - DNA, 763 bp, Homo Sapiens
attctggatctcttttcttcagtactctatgaatgtgttacccaggagaccccagagatgttgcctgcatacatagcaatggatcagcctataagaagacttgggagaagagaaatgtctgagacttctgaactttggcagataaagttggtgttagagtttttcagctcccgaagccatcaggagcggctgcagaaccaccctaagcgggggctctttatgaactcggaattcctccctgttgtgaagtgcaccattgataataccctggaccagtggctacaagtcgggggtgatatgtgtgtgcacgcctacctcagcgggcagcccttggaggaatcacagctgagcatgctggcctgcttcctcgtctaccactctgtgccagctccacagcacctgccacctataggactagaagggagcacaagctttgctgaactgctcttcaaatttaagcagctaaaaatgccagtgcgagctttgctgagattggctcctttgcttcttggaaatccacagccaatggtgatgtgactgtgtctggcggtgaacctaccctgaaacgtgacttctgcacaacaaacgtgaccaaacatcaaagctaaagcaatgtttataaagttttatggtataactagggggaaatgagctgcacaaacctcaatgtattttaaatctgttgctgtcatcattaacggtatatgacatataaaagcaagttaaaatttacttttgtaaataaagtttttggtttgtttcc

SEQ ID NO: 247242 - DNA, 139 bp, Homo Sapiens
ctgagattacttttggggtaatatttaaaatgagagacattttgtaaccctgtaaaatacatagggaatataacattccagtgtatacaaagaaggcaaattctttaatcaaataaagcgcattataaaatgaaaaaaa

SEQ ID NO: 247243 - DNA, 1252 bp, Homo Sapiens
  misc_feature (1032)..(1032): n is a, c, g, or t
  misc_feature (1080)..(1080): n is a, c, g, or t
  misc_feature (1154)..(1154): n is a, c, g, or t
  misc_feature (1164)..(1164): n is a, c, g, or t
  misc_feature (1225)..(1225): n is a, c, g, or t
ttggctacagctattcacttcttcctgagcctgcacccagctgtaactagcagcttccctagccccagcacatttgaggagattcagttcttcaacagccctaattaccacaagggtattgactggtacatggatttcttccctgttccttccaatgccagcactgatttcctatttgaaaaaagtgccacctactttgactctgaagttgtaccacggcggggggctgccctcctgccacgagccaagatcatcacagtgctcaccaaccctgctgacagggcctactcctggtaccagcatcagcgagcccatggagacccagttgctctgaactataccttctatcaggtgatttcagcctcctcccagacccctctggcactacgctccctgcagaaccgctgtcttgtccctggctactattctacccatctacaacgctggctgacttactacccctctggacagttgctgattgtggatgggcaagagctgcgtaccaacccagcagcctcaatggagagcatccagaagttcctgggtatcacaccctttctgaactacacacggaccctcaggtttgatgatgataagggattttggtgccagggacttgaaggtggtaagactcgctgtctaggccggagcaaaggccggaggtatccagatatggacactgaggtaagtaaagccaggggcaggggaatccctctccacttccaggatctgattctgtgtcccacttcttaccatttctgccttcatattctcctgtcagtcccgtcttttccttacggattttttccggaaccataatttggtagttgtcgaagctgctgagccggcttggacagccagtgccctcgtggctttcgggaagaactgcagcattccagtctgggctgatgtcccagcctcccataccagcaaaatgccctctgcttccctaaggggcaggtccagagcagggcccacaagggggattagagtggcctggcccctccccctctacctcagtagcccccaggnctgagatggctgagaagggaagggtatccttttcccacagttctgggncaaataaatgggcttcctttggtaccccacataatagtgctaggtacctttgacccattcatcttggggaggtngggaggattnagagggtccagggcagggttttagggggaatgttatttagttccagttgaggttttccctntttcatcccgcagcagtgttttctatt

SEQ ID NO: 247244 - DNA, 936 bp, Homo Sapiens
  misc_feature (370)..(503): n is a, c, g, or t
catataaaggcaactttgtacaaaaaagttggctcttgaggagtgagactgcaggagatgtgggccgtgccaaagagatggatgagactgttgctgagttcatcaagaggaccatcttgaaaatccccatgaatgaactgacaacaatcctgaaggcctgggattttttgtctgaaaatcaactgcagactgtaaatttccgacagagaaaggaatctgtagttcagcacttgatccatctgtgtgaggaaaagcgtgcaagtatcagtgatgctgccctgttagacatcatttgtaagtgtcagtgatttgtatttatacttaaccaatcagtttattagaggcaattttgtttctttctttgtgagannnnnnnnnnnnnnnnnnnnnnnnnnnnnnnnnnnnnnnnnnnnnnnnnnnnnnnnnnnnnnnnnnnnnnnnnnnnnnnnnnnnnnnnnnnnnnnnnnnnnnnnnnnnnnnnnnnnnnnnnnnnnnnnnnnnnntatatgcaatttcatcagcaccagaaagtttgggatgtttttcagatgagtaaaggaccaggtgaagatgttgacctttttgatatgaaacaatttaaaaattcgttcaagaaaattcttcagagagcattaaaaaatgtgacagtcagcttcagagaaactgaggagaatgcagtctggattcgaattgcctggggaacacagtacacaaagccaaaccagtacaaacctacctacgtggtgtactactcccagactccgtacgccttcacgtcctcctccatgctgaggcgcaatacaccgcttctgggtcaggagttagaagctactgggaaaatctacctccgacaagaggagatcattttagatattaccgaaatgaagaaagcttgcaattagtgaacatgaaatgaaaataaaaattcctcacagt

SEQ ID NO: 247245 - DNA, 317 bp, Homo Sapiens
ggctccccagccggaaactctgttgcaatgaatcttggtgaaagccctccctgcagtttgccgtgcacccgcggcccagcttcttgtagtcacggtgggccttcccaggatggggatgaggttcttgtagacctcattcaccgcctcgtagagcccgcccatggtgaagtagccggctgcctgttccagcaaccctaccagccccagctcagtgaagtgcttcccggagcagaagccctcctcgtcgggcgacaggatgtcgtcggagatggcggactcctctagcacattggatgagatgccaggggtaccgagct

SEQ ID NO: 247246 - DNA, 332 bp, Homo Sapiens
cattggataagcggatgaggggactgtggtggtgctggcgggggttctgcagtcgggtttccaggagctgagccttaacaagttggcgacgtccctgggcgcgtcagaacaggcgctgcggctgatcatctccatcttcctgggttacccctttgctttgttttatcggcattaccttttctacaaggagacctacctcatccacctcttccatacctttacaggcctctcaattgcttattttaactttggaaaccagctctaccactccctgctatgtattgtgcttcagttcctcatccttcgactaatgggctagcaccaccaataca

SEQ ID NO: 247247 - DNA, 952 bp, Homo Sapiens
ttggctttttcatttgtagagactggagacgtgtaaagaagataaataattgtgtaattaaactttccagaaatttatcttcctcatgtgcagtttaacaaacttggtcaaactagttagcaaattagaacttcagaatctaatgatagtttagggtttctaaaataaggttttttattgtaaaaattgacgattgccctgcatttctaccaagtcctgtgaataaagagatgggagatttgattccgtcagaagagactgtaatccgtgtcgtcagcctgggagccttccccagtgtaatgtagctttctctcttaccttctggaagagggaatgtttcatttattactgtttgattttcttgtatctggttctactcccaggatgaaattatccaactacatatatatttagaggaagaaagtgaaggggaaatttaaaatgtttacggcgcttaattgcctggaaatgaaatgaaatcaaatttatcagtttttttccccctaattacccaaaagatcttttgcaaactatgttacatgaatgcttctgcctctttaagacaaagaagaatgtcacccaaaattgtcatttttttcttaatgttcatcataaaagtcctaaaagagtaactgtaattggatgtttattgtttttatctaaagtaaggtgtatgtgtttgagacaagctggttttgttgataaagagatgttaaataattgtgaagcccagatatgcaatgtgtatctgaaaagcaaggaatttgcagccgttttacaaatatctgtggaacatgtaaatactgtcaaatggaaaataaaataagttataatttttgtgaatttcatgggatgtcctatgattggaaaaattataactcttctgattctaatgtggaaattgttgtatttaatctgaaaatgactttacctacaacagttccattgtcag

SEQ ID NO: 247248 - DNA, 884 bp, Homo Sapiens
  misc_feature (181)..(204): n is a, c, g, or t
aaagttggattcgcagtggtccttttcttctccttggatttgttaaggattccaagtaactcttatttggagagaagacgatctgcacttcgcattttggcattgacatttaattttagggtcctttatatagaagggagagtagctacatgaatgtgtaagatcttggaggaagacagcnnnnnnnnnnnnnnnnnnnnnnnntcccagggttaaaagttggagaaatttcacagtacatcatccaaaagaggagtccatgatggaggcagaggtaaacttggagaggacaggaagatgtcacccaagcgcatagctaaaagaaggtcccccccagcagatgccatccccaaaagcaagaaggtgaaggtctcacacaggtcccacagcacagaacccggcttggtgctgacactaggccagggcgacgtgggccagctggggctgggtgagaatgtgatggagaggaagaagccggccctggtatccattccggaggatgttgtgcaggctgaggctgggggcatgcacaccgtgtgtctaagcaaaagtggccaggtctattccttcggctgcaatgatgagggtgccctgggaagggacacatcagtggagggctcggagatggtccctgggaaagtggagctgcaagagaaggtggtacaggtgtcatcaggagacagtcacacagcagccctcaccgatgatggccgtgtcttcctctggggctccttccgggacaataacggtgtgattggactgttggagcccatgaagaagagcatggtgcctgtgcaggtgcagctggatgtgtctgtggtaaatgtgtcctcttgaaccgaccacttggtgatgctgacagttgatggtgacctctacatctt

SEQ ID NO: 247249 - DNA, 979 bp, Homo Sapiens
ttggcgtcgcgcagggtcggggactgcgcggcggtgccaggccgggcgtgggcgagagcacgaacgggctgcctgcgggctgagagcgtcgagctgtcaccatgggtgatcacgcttggagcttcctaaaggacttcctggccgggggcgtcgccgctgccgtctccaagaccgcggtcgcccccatcgagagggtcaaactgctgctgcaggtccagcatgccagcaaacagatcagtgctgagaagcagtacaaagggatcattgattgtgtggtgagaatccctaaggagcagggcttcctctccttctggaggggtaacctggccaacgtgatccgttacttccccacccaagctctcaacttcgccttcaaggacaagtacaagcagctcttcttagggggtgtggatcggcataagcagttctggcgctactttgctggtaacctggcgtccggtggggccgctggggccacctccctttgctttgtctacccgctggactttgctaggaccaggttggctgctgatgtgggcaagggcgccgcccagcgtgagttccatggtctgggcgactgtatcatcaagatcttcaagtctgatggcctgagggggctctaccagggtttcaacgtctctgtccaaggcatcattatctatagagctgcctacttcggagtctatgatactgccaagggtgagagaggggcatcggggagaaggagggtggtgtggaaagaggatcctatgggatctataactcacaaaggacctgatatatattgatcttgttttttctagtctctgggataattgaggcttctgaatgaggaggtgatgtgcataagttaatagctgaagcgttccttgtgtcctctactgaaataaactcctgggctttagttattcagagaggaggaggggggagcctgtctccctctagacacagccatagcagttactgagtttaacttgaa

SEQ ID NO: 247250 - DNA, 1297 bp, Homo Sapiens
ccaggctgaatccttggacaaagtttcaaatcgggccggaatacttctgaggttgcttaattaggaaaagtgagacaccggctttgtctggtcttaaaaaaatgttacctactacaggcgttgctgcagtggactgggacatgctggatggacccaggagtgactatgagaaggaacggtgacaagtgtcttggatttaatggtctcaccaaggaatgttgggtttagaaaaagtaaaaataactcacaccgaacatgaaaaagtatgcctggcatccccaaacttgtatgccattatttttaggttcatgaatatgaacaactaagtgataaaacctttagattccatattgtgctcagaagattgcgtttcttctgcagatctctagtaaaaaaagatctcttccatattcagctgacagaatagcatgttcattttagttttcagcactgaacataagtgggtcaacataaatgtttatacaaaatactgacttcaacaaaatacaaagcactttctttatctttcagaaactgaatatacacagcaagtttttttccaaaatattttcataggcaaaggattaaaaacgattttaattatacacatatggtcacaattttgccttaaaaagattgttgggaaatgtacataaggccgcttgtaaatgtacatcgtgttactgttatgtcttatgtccagaggaaaaaatgttatcatacagatttgctcttacttgggagtaggctattcaaaaatacagtactcttctgtacaaagaaaaaagtcacatcacatttaataagatgaaaaaagcattggcctccatggtaaccaaatatctcagtccaatactttctattatgcacaataccctgacttcaattgaaagtgatccaaattctagcaggtccatattaacagtcaacaactatgttataaaacaaatgatctcacaataataaaaagaaagctggttcatacttctgaaaccatataaagataaaaaatttttaaaaaatcactctcgatttggagaaataaatttacattatacaacactatattgccaggtcaaagagggcagggacgtaaatgtacactaaaatgcaaatgtatcccaaagagataaaacaattccatttacagcatgaaggtttacaaatgtacacctgtacaaccaaggaaagcatcactactaaattagcaaggcttttataataaacatttgaaacaagatttcctttcaaagtgtaaacttacatctattactacacacacaatgcatatatttat

SEQ ID NO: 247251 - DNA, 1033 bp, Homo Sapiens
acaaaaaagttggctcaaaggaacccagtgccgggccacagccgggtcacgtggccggcggccccccatgacgtgctggctgcggggcgtcacggcgacgttcgggcgacctgccgagtggccaggctacctcagtcacctgtgtggtcgcagtgctgccatggacctgggacccatgcgcaagagttaccgcggggaccgagaggcatttgaggagactcatctgacctcccttgacccagtgaaacagtttgctgcctggtttgaggaggctgttcagtgtcctgacataggggaagccaatgccatgtgtctggctacctgcaccagagatggaaaaccctctgctcgcatgttgctgctgaagggcttcgggaaagatggcttccgcttcttcactaacttcgagagtcgaaaaggaaaagagctggactctaatccctttgcttcccttgtcttctactgggagccacttaaccgtcaggtgcgtgtggaaggccctgtgaagaaactgcctgaggaggaggctgagtgctacttccactcccgccccaagagcagccagattggggctgtggtcagccaccagagttctgtgatccctgatcgggagtatctgagaaagaaaaatgaggaactggaacagctctaccaggatcaagaggtgcccaagccaaaatcctggggtggctatgtcctgtaccctcaggtgatggagttctggcaaggtcaaaccaaccgcctgcatgaccggatagtctttcggcggggcctacccacaggagattcccctttggggcccatgacccaccgcggggaggaagactggctctatgagagacttgcaccttaactctgggacctgctggcccagagtggagctagggctaggtgtcaagaagagggtgtgggattgggacccaaggcctttctttctaaactcaacccatttccctccctaccccttatcttcaggactcttcagagctaatcctctaagttctctgtactcagttggttctcagttagctgg

SEQ ID NO: 247252 - DNA, 1135 bp, Homo Sapiens
  misc_feature (885)..(998): n is a, c, g, or t
  misc_feature (1022)..(1047): n is a, c, g, or t
ttggatttatgagacatttgcagttatgctacatgagtttagggtcgaggattattttgtgggaaagaagagtttgcctaaagtcgtgtgattataatgcaactagtactagaatttctattttcttcaaaattggttgcagttttcaccctatgccacatattttcttctatctttggttaagactgatcaggtgaacaggaagtctcaaatttctgaatggattatgttctaaaaggttaccatgtgatgattaatgggaatagtcagaaaaaattatgaagtggcagttcgctttttaagcagattgaaaaaaggcctgtctactgcaaatattctagatttgcaataagtacggtaattaatagatacccaaataataaatatttatgaagtgtgctagacactgttaggcatagtacagagattcacaatattactataattatggaaaaagtaaatacactggttgagcaaaaacaggcttgataagccaggagcgcacagagtatttgacccagtaccggatttggaatggggagtcctaggccataatcttggctctgccgttaactctctgtgtgctgttgggtgggtggttacttcagttctttctcacagagccagtttcttcagctgtaaaatgaagcttttgaccttgaaacgatgatcctcaaggtccttctcagcactggtattccctgaaggcattggatgaataacggagattctaacagtctctgttaagacaggatgtcgaatgggggcatttttgggagtatgttggcctcttattgttggtttgtttctttagctgcaaatgtacttaggactcatgatttttctgtaactagagtgccacaaataaaatacgtttttcattcnnnnnnnnnnnnnnnnnnnnnnnnnnnnnnnnnnnnnnnnnnnnnnnnnnnnnnnnnnnnnnnnnnnnnnnnnnnnnnnnnnnnnnnnnnnnnnnnnnnnnnnnnnnnnnnnnnattttgtgggcccccctcgccccnnnnnnnnnnnnnnnnnnnnnnnnnngggggcggggcccccgagggaaaggaacaagggccaaagtgttttccaagaaaacccggggcaagaaaaaggggttggaatccccccc

SEQ ID NO: 247253 - DNA, 433 bp, Homo Sapiens
  misc_feature (50)..(50): n is a, c, g, or t
tggggaaaaaaagggctttcaatgtcgtttcccttcctgctccctgctgnaaaagctgccccaggagtgctctgccctggagtctgcaagacctcagaagaggtccccagcactggctgtggcctttcaggtgtaggcaggtgggctctgcttcccgattccctgtgagcgcccaccctctgcgaaagaattttctggcttgccctgtgactgtgcagactctgggctcgagcaacccggggaacttcaccctcagggggcctcccacaccttctccagcgaggaggtctcagtcccagcctcgggagggcacctccttttctgtgctttcttccctgaggcattcttcctcatccctagggtgttgtgtagaactctttttaaactctatgctccgagtagagttcatctttatattaaacttcccctgttc

SEQ ID NO: 247254 - DNA, 659 bp, Homo Sapiens
  misc_feature (97)..(177): n is a, c, g, or t
cttttaagggccaactttgtacaaaaaagttggagttaaaacaccttactggaggattctacctcaggtgaagataggagcagctccagttcctctnnnnnnnnnnnnnnnnnnnnnnnnnnnnnnnnnnnnnnnnnnnnnnnnnnnnnnnnnnnnnnnnnnnnnnnnnnnnnnnnncggaagcacaaatcttccaagtcaaatgagggttctgactcagagtgacaaggatgtgacttgttcaacattctcttctcaaacactgaccaaggaacagaggaagatgcagtcagagaaagcagcaggatagagacgccgagagaggagtatatgtgggtcacagcagtgagctcccacccgccttgcagtgaagatgtgaccccaggagagggagtgtctccttccaggtgctagctctggacagcagctgattttaggcaggaaagtttcttcatcgttgtcctccctgctggtcacatgagtttacgattcctttgaagtgtctcccacagggtggcaggactgggagaatctctgaggcgtgtcttccaggccctcccacagcttgtgccctccacagtgtggactcaggtcccatagacatcaggctggagtcttctctgttgttgagaataataaaagctcattatttatttttt

SEQ ID NO: 247255 - DNA, 1511 bp, Homo Sapiens
caaaacagaagagagaacaaaaccttagcactgagtcagccgttggaagctcccatttcccagatgggaagcttgaggtccggaccctaataatggtgggggaccctcagtctcggctggatcacaatgcaatctaggagcccagggccctgaccctttctccccccggcctttgtctctccgcagagtgcatctccctcgccccctgagagtctcgtggaggaggagcgaccgagtggccctggtggtggcgggaagcagagagcagatgagaaggagccatcaggaccttatgaaagcgacgaagacaagagtgattacaatctggtggtggacgaggaccaaccctcagagccccccagcccggctaccaccccctgcggaaaggtacccatctgcattcctgcccgtcgggacctggtggacagtccagcctccttggcctctagccttggctccccgctgcctagagcccaggagctcatcctgaatgaccttcccgccagcactcctgcctccaaatcctgtgactcctccccgccccaggacgcttccacccccgggcccagctcggccagtcacctctgccagcttgctgccaagccagcaccttccacggacagcgtcgccctgaggagccccctgactctgtccagtcccttcaccacgtccttcagcctgggctcccacagcactctcaacggagacctctccgtgcccagctcctacgtcagcctccacctgtccccccaggtcagcagctctgtggtgtacggacgctcccccgtgatggcatttgagtctcatccccatctccgagggtcatccgtctcttcctccctacccagcatccctgggggaaagccggcctactccttccacgtgtctgcggacgggcagatgcagccggttcccttcccctcggatgcactggtaggcgcgggcatcccgcggcacgcccggcagctgcacacgctggcccatggcgaggtggtctgcgcggtcaccatcagcggctccacacagcatgtgtacacgggcggcaagggctgtgtgaaggtgtgggacgtgggccagcctggggccaagacgcccgtggcccagctcgactgcctgaaccgagacaactacattcgttcctgcaagttgctgccggatggccggagtctgatcgtgggcggtgaggccagcaccttgtccatttgggacctggcggcgcccaccccccgtatcaaggccgagctgacttcctcagccccagcctgctacgccctggccgtcagccccgacgccaaggtttgcttctcctgctgcagcgatggcaacattgtggtctgggacctgcaaaatcagaatatgggccaggcaattccaggggccacacggaacggcgcccagcctgccattggatatttcccgaattaacggcacttccggccttctgggaacggggggggcccttggaaacaacaaaccggtggccgccctgcctcggggaaccactgaccggt

SEQ ID NO: 247256 - DNA, 1257 bp, Homo Sapiens
gcagagctcccaagacgctcagcagcttcttcaccccccggaagccagcagtcaaaaaagaagtgaaggaagaggagccaggtgctccaggaaaggagggagctgctgagggacccctggatccatctggttacaatcctgccaagaacaactatcatcccgtggaagatgcctgctggaaacctgggccagaaggttccttacctggctgtggcccggacgtttgagaagatcgaggaggtgtctgctcggctccggatggtggagacgctgagcaacttgctgcgctccgtggtggccctgtcgcctccagacctcctccctgtcctctacctcagcctcaaccaccttgggccaccccagcagggcctggagcttggcgtgggtgatggtgtccttctcaaggcagtggcccaggccacaggtcggcagctggagtccgtccgggctgaggcagccgagaaaggcgacgtggggctggtggccgagaacagccgcagcacccagaggctcatgctgccaccacctccgctcactgcctccggggtcttcagcaagttccgcgacatcgccaggctcactggcagtgcttccacagccaagaagatagacatcatcaaaggcctctttgtggcctgccgccactcagaagcccggttcatcgctaggtccctgagcggacggctgcgcctttgggctggcagagcagtcggtgctggctgccctctcccaggcagtgagcctcacgcccccgggccaagaattcccaccagccatggtggatgctgggaagggcaagacagcagaggccagcacagacgtggctggaggagcaaggcatgatcctgaagcagacgttctgcgaggttcccgacctggaccgaattatccccgtgctgctggagcaacggctggaacgtctcccggaagcactgcaagctgagcccaggtattcccctgaaaccaatgttggcccatcccacccggggcatcagcgaggtcctgaaacgctttgaggaggcagctttcacctgcgaatacaaatatgacgggcagagggcacagatccacgccctggaaggcggggaggtgaagctcttcagcaggaatcaggaagacaacactgggaagtacccggacatcatcagccgcatccccaagattaaactcccatcggtcacatccttcatcctggacaccgaagccgttggcttgggaccgggaaaagaagcagatccagccattcaagtgctcaca

SEQ ID NO: 247257 - DNA, 821 bp, Homo Sapiens
agctgagaagcagcctgcgagggcttgcgggggagattgttggggaggtccgatgccacatggaagagaaccagagagtggctcggcggcgaaggtttccgtttgtccgggagaggagtgactccactggctccagctctgtctacttcacggcctcctcgggagccacgttcacagatgctgagagtgaagggggttacacaacagccaatgcggagtctgacaatgagcgggactctgacaaagaaagtgaggacggggaagatgaagtgagctgtgagactgtgaagatggggagaaaggattctcttgacttggaggaagaggcagcttcaggtgcctccagtgccctggaggctggaggttcctcaggcttggaggatgtgctgcccctcctgcagcaggccgacgagctgcacaggggtgatgagcaaggcaagcgggagggcttccagctgctgctcaacaacaagctggtgtatggaagccggcaggactttctctggcgcctggcccgagcctacagtgacatgtgtgagctcactgaggaggtgagcgagaagaagtcatatgccctagatggaaaagaagaagcagaggctgctctggagaagggggatgagagtgctgactgtcacctgtggtatgcggtgctttgtggtcagctggctgagcatgagagcatccagaggcgcatccagagtggctttagcttcaatggagcatgtggacaaagccattgctctccagccagaaaaccccatggctcactttcttcttgggcaggtggtgctatcaggtctctcacctgagctggctag

SEQ ID NO: 247258 - DNA, 1450 bp, Homo Sapiens
  misc_feature (1429)..(1429): n is a, c, g, or t
  misc_feature (1436)..(1436): n is a, c, g, or t
ttggcttaggcccgccgccgtgccgggtgctcttcagcatgtccttcatcccggtggccgaggattccgacttccccatccacaacctgccctacggcgtcttctcgaccagaggcgacccaagaccgaggataggtgtggccattggcgaccagatcctggacctcagcatcatcaagcacctctttactggtcctgtcctctccaaacaccaggatgtcttcaatcagcctacactcaacagcttcatgggcctgggtcaggctgcctggaaggaggcgagagtgttcttgcagaacttgctgtctgtgagccaagccaggctcagagatgacaccgaacttcggaagtgtgcattcatctcccaggcttctgccacgatgcaccttccagccaccataggagactacacagacttctattcctctcggcagcatgctaccaacgtcggaatcatgttcagggacaaggagaatgcgttgatgccaaattggctgcacttaccagtgggctaccatggccgtgcctcctctgtcgtggtgtctggcaccccaatccgaaggcccatgggacagatgaaacctgatgactctaagcctcccgtatatggtgcctgcaagctcttggacatggagctggaaatggctttttttgtaggccctggaaacagattgggagagccgatccccatttccaaggcccatgagcacatttttggaatggtccttatgaacgactggagtgcacgagacattcagaagtgggagtatgtccctctcgggccattccttgggaagagttttgggaccactgtctctccgtgggtggtgcccatggatgctctcatgccctttgctgtgcccaacccgaagcaggaccccaggcccctgccgtatctgtgccatgacgagccctacacatttgacatcaacctctctgttaacctgaaaggagaaggactgagccaggcggctaccatatgcaagtccaattttaaagtacatgtactggacgatgctgcagcagctcactcaccactctgtcaacggctgcaacctgcggccgggggacctcctggcttctgggacccatcagcgggccggagccagaaaacttcggctccatgttggaactgtcgtggaagggaacgaagcccatagacctggggaatggtcagaccaggaagtttctgctggacggggatgaagtcatcataacagggtactgccagggggatggttaccgcatcggctttggccagtgtgctggaaaagtgctgcctgctctcctgccatcatgagattttctctgctcttctggaaacaaagggctcaagcacccctttcaaccctgtgactggggtcctccctcgggctgtaggcctggtccgccattcagtgacaaataaagccattgtgctctgaggccnattccantcggcagaaacaaa

SEQ ID NO: 247259 - DNA, 1467 bp, Homo Sapiens
  misc_feature (1377)..(1406): n is a, c, g, or t
ctcctataatagccaactttgtacaaaaaagttggcacagagatcccggccgagttccccccactggacgactacagccattccatccccgaaaacactaacttccccgcaggcatcgagccccagagcaatattccagagaccccaccccctggctacctgagtgaagatggagaaaccagtgaccaccagatgaaccacagcatggacgcaggttctccaaacctatccccgaatccgatgtccccagcacataataacttggacctgcagccagttacctactgcgagccggccttctggtgctccatctcctactacgagctgaaccagcgcgtcggggagacattccacgcctcgcagccatccatgactgtggatggcttcaccgacccctccaattcggagcgcttctgcctagggctgctctccaatgtcaacaggaatgcagcagtggagctgacacggagacacatcggaagaggcgtgcggctctactacatcggaggggaggtcttcgcagagtgcctcagtgacagcgctatttttgtccagtctcccaactgtaaccagcgctatggctggcacccggccaccgtctgcaagatcccaccaggatgcaacctgaagatcttcaacaaccaggagttcgctgccctcctggcccagtcggtcaaccagggctttgaggctgtctaccagttgacccgaatgtgcaccatccgcatgagcttcgtcaaaggctggggagcggagtacaggagacagactgtgaccagtaccccctgctggattgagctgcacctgaatgggcctttgcagtggcttgacaaggtcctcacccagatgggctccccaagcatccgctgttccagtgtgtcttagagacatcaagtatggtaaggggagggcaggcttggggaaaatggccatgcaggaggtggagaaaattggaactctactcaacccattgttgtcaaggaagaagaaatctttctccctcaactgaaggggtgcacccacctgttttctgaaacacacgagcaaacccagaggtggatgttatgaacagctgtgtctgccaaacacatttaccctttggccccactttgaagggcaagaaatggcgtctgctctggtggcttaagtgagcagaaccaggtagtattacaccaccgggccccctccccccagactctttttttgagtgacagctttctgggatgtcacagtccaaccagaaacacccctctgtctaggactgcagtgtggagttcaccttggaagggcgttctaggtaggaagagcccgcagggccatgcagacctcatgcccagctctctgacgcttgtgacagtgcctcttccagtgaacatnnnnnnnnnnnnnnnnnnnnnnnnnnnnnnaccactccagcagaccttgccccttgtgagctggatagacttgggatggggagggagggag

SEQ ID NO: 247260 - DNA, 1330 bp, Homo Sapiens
ccacttccggcgtagccatggcggctaacgctactaccaacccgtcgcagctgctgccgttagagcttgtggacaaatgtataggatcaagaattcacatcgtgatgaagagtgataaggaaattgttggtactcttctaggatttgatgactttgtcaatatggtactggaagatgtcactgagtttgaaatcacaccagaaggaagaaggattactaaattagatcagattttgctaaatggaaataatataacaatgctggttcctggaggagaaggacctgaagtgtgaatgagtttccttgacttacactagattttgttttggcttataatgacaagaaaatggaattttttttcccactttctaatgtttaaatcccataaagctaagtttcccgttaaagggaagtgctttgaagatgtgtacccatttttgtaagttaatcatgattatcctggaaaaagaagaaaagagcttcttctttgcagatgaaaataaaggtgtttttggttaactgtcattttgtttattctactgcagtagccagtggaacaaagtttgtagttattttgccacttacttttctgtcattatatgcttatttgttttgtcatttacgtgaccatttgattctcaaacaaaagttgttccaaacaaaatgatgaactttgatttgaacaggtgcatttaaacaaccggaaatgatcacttagaaaattcaattaaaatgctgttgttttgtaatgaggatttttcttctgatttcaaattccatgaactcctattgaaaacaaacaatgtacaggtaatatatgcacattgtagaaatgcaggaattatctattggaattaccctaaagatagaaattttatctatttgcttataaaattgattcagaaggttattaccttaatgtagttattactgaattgccaggaaatgagtggagacagagctttaagataaaggatactaaaaacagctaagaactccaggactcaggtcaaatcaaggaactgataataagatcattgaactgtataaattaagtcaaagaactcctattaaaaacaaacaggtaatatatgcacattgtagaattgtaggtaagcaaaaaggagaaggttgatcatgctttgctgtatgtcttcgtagactttctcagtccactctcagtacacgttttattttacttgctcatcctgattatactgtttttaccctccacttaagtcattttttgaatttaaatggtgaatatctttctgtgtcaaatatttcaacattaatatgtacatagtattaaatggatttactataaatt

SEQ ID NO: 247261 - DNA, 613 bp, Homo Sapiens
  misc_feature (556)..(564): n is a, c, g, or t
tctcctttcctcaacagttttattgccttttatgaaaatttttgtaaaatataaatacaaaggcagagaatttacttacaaagttaaaacacagatttcaaacataaacacacgattcagaaaattttagttttatgtacatttccaagcaacctcaacatattatgttagttttcaatattttacagggtacagaaaaaaatagctcaaagtcttctttaaataagagcataaaatgtttaaacatataaacaatccggtttgatgcgtgaaaactaatttcacagcttttaaattaggatataaaagtttcatacaattagttgttgtgtgtggatatggtttgaatttatattacacactactggattacatccaatagcatttacctggcccgagcaggtattctgtaaacaaaacaaagttatatcaccaagtgccttccccgaattcgctccctcaaaccaaccacacagttctgaccactctacagtcatggcctgtcatcagagctttgtatgaaattaagtcaaagtgtggagctccttttactcannnnnnnnnctccttaaaaaagaaaagaaacaaatgttccaagtaaaaacaaacccaa

SEQ ID NO: 247262 - DNA, 913 bp, Homo Sapiens
  misc_feature (100)..(100): n is a, c, g, or t
  misc_feature (622)..(630): n is a, c, g, or t
gctaatgaggtcaaacggtaggcttcatggtgggtgaagtgggggtggctgggttcccccagacaagaggggacccggagttggcaaaggctttcaccantcagctttatggtcccttatctcctatctcccctcttgagaaaatacacgctttctgcatgtattagaaacgcacgagctccaccaaagtctacaatgaaagtttgaaatttaactgcaaggaattagaagcatatttgcaatcattgcagcttcttctttcttctgctcataaaaggaggaacactttagatagagggcaaatatatctgaaaacctaatttctttctttttttgataaggaaatcttttccatctccatcctaacatgcacaacctgtgaagagaattgtttctatagtaactggtctgtgatcttttgtggccaagagaatagcaggcaagaattagggccttgacagaatttccacgaagctctgagaacatgtttgtttcgaatgtctgattcctctttgtcatcaatgtgtatgctctgtccccatccttcattcctcctcaagctcacaccaattggtttggcacaggcacagagctggtccctagttaagtggcatttatgttnnnnnnnnntagttcagaatctcagccttttctttgtgtcatcaaaacagcttaagaaggggactactgccaatgtcctctagtcttgcctccacccagggaggacccatggcaggtcttttcaactttctgattcatgagaacaaccttgtgaagcttttcccacctcctaaagtgttttctgcatctgttccttcctttggacctcacaacaaatcctgtgaagtaactgagacatctgttgttagatacttcacaggatttgttgtgaggagtaaactgaggcttcgtg

SEQ ID NO: 247263 - DNA, 726 bp, Homo Sapiens
  misc_feature (433)..(433): n is a, c, g, or t
  misc_feature (576)..(576): n is a, c, g, or t
  misc_feature (579)..(579): n is a, c, g, or t
gagggtctagcctgggtgtgtatggagggtctagcctgggtgagtatggagggtctagcctgggtgtgtacggagggtctagtctgagtgcgtgtggggacctcagaacactgtgaccttagcccagcaagccaggcccttcatgaaggccaagaaggctgccaccattccctgccagcccaagaactccagcttccccactgcctctgtgtgcccctttgcgtcctgtgaaggccattgagaaatgcccagtgtgccccctgggaaagggcacggcctgtgctcctgacacgggctgtgcttggccacagaaccacccagcgtctcccctgctgctgtccacgtcagttcatgaggcaacgtcgcgtggtctcagacgtggagcagccagcggcagctcaggagcagggccctgtgtccggcggagccaagntccactctgggggagctctggcgtggaccacgggccactgctcacccactggccccgagggggttgtagacgccaagactcacgcatgtgtgacatccggagtcctggagccgggtgtcccagtggcaccactaggtgcttgnctngcctccacagtggggttcacacccagggctccttggtcccccacaacctgccccggccaggcctgcagacccagactccagccagacctgcctcacccaccaatgcagccggggctggcgacaccagccaggtgctggtcttgggcc

SEQ ID NO: 247264 - DNA, 1115 bp, Homo Sapiens
  misc_feature (448)..(464): n is a, c, g, or t
  misc_feature (466)..(511): n is a, c, g, or t
  misc_feature (750)..(762): n is a, c, g, or t
  misc_feature (1016)..(1061): n is a, c, g, or t
gagacacaggaacaattcttttattgtacattggagaaatagccctgtgtgctggttcaaggtgcaacatacagaatattgaattaagaaaagagggaacggggaagggaagggaaacctcttgaggtccaaagttgcaaacaaaaaatggtaaaagatttcctcacgcaagaggcatttttgcaaataccatgcaaaacaggcagctggtgtgccttaagagaatccctataaataacagaaaagacactccaagcattcctgtacgtggactcagagcacagagaaaagaaactaaaatgccttttggcatttcaagatatttggcactcttgtgattacatttttttacagtccattaaagagaataaactgacataatattagagaaataaacaggctgctcacacaacagactgcaaggggaagttagaaaaagctcaagcannnnnnnnnnnnnnnnncnnnnnnnnnnnnnnnnnnnnnnnnnnnnnnnnnnnnnnnnnnnnnnttttctgacataaaaaatgtgtccatttgcattaacttgggcagatagcttgcagcaacaaagaaacacaagctttacaactcattttaaaataaaatcttttctatgtatcattccttagaaaagttctcttcttgttttaaacacattcctgataacttctaaagatgaccaaaataaacagaatatctacagagatcattttctgaattttttgtacatccaaggataacaacatnnnnnnnnnnnnnctggacagcatttcacatccaagtgcacagaaccatttttgcaagattaaataatgtaaacattgggaacagccaaatcagcgaagaatgccaacacctcaaaacacctggtgttgccgcttcattaagtggttcaaaatccagatctataattgcgcaatattcaccgtatataaaaagaaatggatattaattttgacaaatagctgcaactgagacttctttttatttctttatatgtgtatatagtgaannnnnnnnnnnnnnnnnnnnnnnnnnnnnnnnnnnnnnnnnnnnnngcagaggagcccagagccttctccgatatcccgggattccggaccgtaccagcc

SEQ ID NO: 247265 - DNA, 461 bp, Homo Sapiens
gtctatttattgtatgtatgtacatacagtctgatacctaaaatttaaagtggattccataaaaccagactcaagtcttgtttagactactgaatactgttttagcctgtgccctggattctacctctgtataggaaaattttccatattcattaattagtgttgatctgtattaattggttatgtttcttgcactaaggatgtttaaaactccgctgtaagtgtagattttagttttactggcaggatgaatcacttgacacataggtagatacttgaggttcattttcttttctttttctacatgatgatgaatagttatgttttcttctctgatttgttcaaagtttgccaaaagaaaacacaaaaccagtacagtacttactgataaatcgtagtgactgtaatttgtttgtaaggcgaattaatgctctacaattaaagctggattactattgagg

SEQ ID NO: 247266 - DNA, 629 bp, Homo Sapiens
cagccctcacatacctccgcctcacatcgtgctccccgactgcggatggaccgtgtcaggctaccagatcctacacagtggactctaactatttggttggcttcacagactggcgaggaacgtcctgaagttagctcagaagtgcggaggaggtgacgagagcaaagcagaaggcatgccatccttacgctccagacagctagatgcaggatttgcgcgttcctctcgtttgtataaaaccagaagtaggtactaccagccatacgagattccagctgtcaatggcaggaggcgaaggcggatgccaagctcaggagacaagtgcactaaatctttagcttatgaaccttacaaggccctccatgggcctctgcctctttgtcttcttacaggtaagagggctcactccaaatctctggactacctcaatctagatcccttgatcacggagccagctgatacagaagtgctacagtaccagcttcaagagctaaccctccgaggggacggtgtgtttgctaggaataatacatgagtgacgttggagacatgcttaaaccaatttaggtcagctacgcttgtgtagaaaaaagccagtgtgactcggtactgactcttcacactataga

SEQ ID NO: 247267 - DNA, 449 bp, Homo Sapiens
  misc_feature (146)..(274): n is a, c, g, or t
  misc_feature (277)..(383): n is a, c, g, or t
ctccacccgacggggtgggaggtaggcatgaggctgggtgctaggtgctcagtaatgactcaaatctaagtccacaggtcctgggcagtgggagtggagatgcatgcacagaaaaacggtgcgagtgccaggcgaggtggctcaannnnnnnnnnnnnnnnnnnnnnnnnnnnnnnnnnnnnnnnnnnnnnnnnnnnnnnnnnnnnnnnnnnnnnnnnnnnnnnnnnnnnnnnnnnnnnnnnnnnnnnnnnnnnnnnnnnnnnnnnnnnnnnnntgnnnnnnnnnnnnnnnnnnnnnnnnnnnnnnnnnnnnnnnnnnnnnnnnnnnnnnnnnnnnnnnnnnnnnnnnnnnnnnnnnnnnnnnnnnnnnnnnnnnnnnnnnnnctgggcatggtggcgtgagcctgtaatcccagccaccccgtcggagcgggatactctagagcgacc

SEQ ID NO: 247268 - DNA, 967 bp, Homo Sapiens
  misc_feature (517)..(530): n is a, c, g, or t
  misc_feature (840)..(870): n is a, c, g, or t
gagctattttagaaagctaaatgaatcgcaagttaacttggaaatcagtagaaagctaaagtgatcctaaatatgacagtgggcagcacctttctagcgtgagctgtagagtaacgagaagtgctttatactgaacgtggttgatgggaggagagacgaggcattcgggccggtggggcgtaagggttatcgttaagcacaagacacagaatagtttacacactgtgtgggggacggcttctcacgctttgtttactctcttcatccgttgtgactctaggcttcaggttgcattggggttcctctgtacagcaagatgtttcttgccttttgttaatgcattgttgtaaagtatttgatgtacattacagattaaagaagaaaagcgcgttgtgtatattacaccaatgccgccgtgtttcctcatctatggttctaaatattgcttcaatttcaaacttttgaaagatgtatggatttccagtttttctttactttctcccagtatgttttaacnnnnnnnnnnnnnngcaggaaaaaaggaatatttagcagtattgttcgttctgatatgtgaatttgtttgtgacaactaaacaaggcattcagcagtttctgacaattaacatacatcattccacactccttgtcaacaaagtgctttttcactgcctaaaattttagatgtagatatttgaaatagattttttcatttataccagttttctttatgatgatacagtgttaaaagaaaataaattacaattgatctgtcatccatatttgctaagaatgtctatttccaagaacctatatcttacaaaatacacattcttgctnnnnnnnnnnnnnnnnnnnnnnnnnnnnnnnccacgtactagaaaaattacctgtgtgagattttattttgacagaaggctatttcatttgctgttcatcttgtacaaactttgtttttggtttttta

SEQ ID NO: 247269 - DNA, 466 bp, Homo Sapiens
tgttgacagtactttaagagatttttgtggtcggtgtattcgagaattccttaaatggtccattaagcaaataacaccacagcagcaggagaagagtccagtaaacaccaaatcgcttttcaagcgactttatagccttgcgcttcaccccaatgctttcaagaggctgggagcatcacttgcctttaataatatctacagggaattcagggaagaagagtctctggtggaacagtttgtgtttgaagccttggtgatatacatggagagtctggccttagcacatgcagatgagaagtccttaggtataattcaacagtgttgtgatgccattgatcacctatgccgcatcattgaaaagaggcatgtttctttaaataaagcaaagaaacgacgtttgccgcgaggatttccaccttccgcatcattgtgtttattgatctggccacgtgctttagctcactgg

SEQ ID NO: 247270 - DNA, 1817 bp, Homo Sapiens
  misc_feature (528)..(528): n is a, c, g, or t
  misc_feature (1505)..(1505): n is a, c, g, or t
ttgggttttcttctctcttttctggagttagattagtctgaagccgccaccagccccaggcccccgtgcagaagaaaagcgggagggaacggcggaggccgccgctgccctgcaccgccctcctggaggccacttggagagtccggccccgaggaggccatggccacaagtgcccacagctggccccaggcggggtggagcggagctgctgggaggctgctggataggagaggggtcacggctgcggaagaggaggttcttcgggacacccgtggatggacacggcaaggaaacaccaggccaaccacagctggggataaaatagcacaaccacaccctgccgtccagcgcctcccagcctggtgccccttcctagtaccaccagcaaccatcaatcccgtctcctcctgcctcctctcctgcaatccaccccgccacgactatcgccatggcagccctgatccgcagagaacttccgcttcctggtcacttttcttcaagagcaaggatgtgatgattttcaacggncctggtggcactgggcacggtgggcagccaggagctgttctctgtggtggccttccactgcccctgctcgccggcccggaactacctgtacgggctggcggccatcggcgtgcccgccctggtgctcttcatcattggcatcatcctcaacaaccacacctggaacctcgtggccgagtgccagcaccggaggaccaagaaactgctccgccgcccccaccttcctccttctaagctccatcctgggacgtgcggctgtggcccctgtcacctgggtctgtcatctccctgctgcgtggtgaggcttatgtctgtgctctcagtgagttcgtggacccttcctcactcacgggcagggaagagcacttcccatcagcccacgccactgaaatcctggccaggttcccctgcaaggagaaccctgacaacctgtcagacttccgggaggaggtcagccgcacgctcacgcatcagtcccagcctctttggatggctgctcattggcgcgggggccactcctggggttcctgaccaacgtgcctcaagcaattcctgctcaaccactccagctacccgccagggagggccttactgggccggcaactacccgcccccccaatgcgccgaccccagcctggctccccggccggccacgcggcccccaaaggtggtccactatactcgcgggggtgcccttccaccatgtgattaaacgaaccatcggtgggcggccacccagcactagacacttttttagggacccactcttgggggaggggcaggccttgtccccaaaacacctcgcgcgttagtttgctaattgtgcaccgcgcaaaagctttggggagacctggggggccgaaaaaaagttctctctgtccaaacaagctggggcagaaagagggcccactcctctttaacgtgactctacaagtgaggacctcaccggacgatggttgaggcaccattgggcctcnactcccacccccccgggcccggacctccgttaaacctttgcgtgaaatccgccacgtggggagtagaatctccgagggggtgccacactctccgatatggtttctctcccccatgggcgcgtgcgcgctcgcgaaaaacagagaccgcgcggagcccctgcaccgcggccacatggtgagatagagctcgaacaccgaggcgcggcgaggtggctcactatgcacacacaccgtatgtgcgaggacacagccgcaccccgcgcggggtgcggccactccccacacaaaagagagagcgcccgcctcctccac

SEQ ID NO: 247271 - DNA, 941 bp, Homo Sapiens
ttggggatcctgcccttctgccaccagcctgccttggagcccttggtgatctatctgtggaacaacccgtgcagttcagatcttttgacagaagtgtcattgttgcagcaaaaaagtcagcagtctcaccttccacctttaatacaagcatacctaccaatgctgtcagtgtggtttcctcagtagattcagcccaagcctcagatatgggaggagaatcaccaggcagtagatcatctaatgcaaaattgccctcagttccaacagttgattcagtttcacaagatccggtttcaaatatgagtattacagagaggcttgaacacgctttggaaaaggcagctcctctccttcgtgagatttttgtggattttgcaccttttctttctcggacacttttgggtagccatggacaagaactgcttatagaaggaacaagtctggtttgcatgaagtcgagtagttcagtcgtggaattggttatgctactgtgttctcaggagtggcaaaattctattcagaagaatgcaggccttgcttttatcgaacttgtgaatgaaggaaggttgcttagccagacaatgaaggatcatctagtaagagtagcaaatgaagctgaatttatcctgagcaggcagagagcagaagatattcacagacatgcggaatttgagtcactgtgtgcccagtattctgcagacaaacgagaagatgagaagatgtgtgatcatttgataagagcagcaaaatatcgtgaccacgtgacagcaactcaactaatccagaaaattatcaacattctcacagacaagcatggagcctggggaaattctgcagtgagtcgtcctcttgagttctggcgccttgactactgggaagatgacttgcggcgccgggcgacgatttgtgcgtaaccctctaggatcgacacatcctgaagc

SEQ ID NO: 247272 - DNA, 944 bp, Homo Sapiens
ttggttttaggcaatttcaatataatgtagaagtagtagtgtgccctgaaaaatgtacacgttttttcttattgttaccacatgttcacctttatcagcgtggatactgtcagcatgagtacatatttcaacccacgcttgtaaaagacataagagtttataaaggaccaaattcagttccttggtccttggaagacctatattctctgtagttactgaaaaccgaaagtcaattctaattattcatcttacatatttttccaccatgtcatttgaaaacttgcttttcttctgcataagagattcttatgccaaaaacattaaacagaagaaatcattttttttgctatgtaatacctcgcaactttgctctaaaatcaagctcagttattattttccaagtttgaacatgttaaatatcagatgccttgtaaattatgtctttaacgttttcttatagactaatttcctcttttccacctgccagacttgctaaccaagctcgaaaatgaacatgaaaaagccatacatgtattatttctcctaaaacttaaggcattatctgttggtttggcttgctgctcctattttgtagtcttgatagtagatgcttcttcagcgtaagagtagctatgatattcctttttatcttttcagtacatagtgctgaaaaatctgcaacttcttggatcatatttaatgaattatagtataatgcttgcaggcccagtacaagcatatatattgtgcctcttacagcctttggaatacattgtttccattttttaaatatcttctatatccatatagtattcaaattattaatgctcatgtaccaaggttttgctataaaagttttgtctgtatgaataatgtggctttagtaaataatcatttttcaactgtaaacttaattctgaaataaagtaaaattctaattgttt

SEQ ID NO: 247273 - DNA, 1017 bp, Homo Sapiens
  misc_feature (307)..(307): n is a, c, g, or t
  misc_feature (800)..(893): n is a, c, g, or t
  misc_feature (920)..(963): n is a, c, g, or t
atttgtacaaaaaagttggctgaaaccttctgggaggagaagaggcctgaccttggcgctggggtccagtgggcgctgctctggtccgaggctgctgctcttgacctctgctctgcggctgttttccattggagtagaggctcctcctgtcctgtcctgcctgtggagggaagcaaaccttcccctggaccagagagaggagaaagcggagacaggtagcaacgctgtggactggtgatgacaggctcttcagctccctgcaagtgaccgggcctggggaacagggcatggcacaggcacacagganccccccagcccagggctgcccccagccagccccgtgtgttcaagctggttctcctgggaagtggctccgtgggtaagtccagcttggctcttcggtatgtgaagaacgacttcaagagtatcctgcctacggtgggctgtgcgttcttcacaaaggtggtggatgtgggtgccacctctctgaagcttgagatctgggacacagctggccaggagaagtaccacagcgtctgccacctctacttcaggggtgccaacgctgcgcttctggtgtacgacatcaccaggaaggattccttcctcaaggctcagcagtggctgaaggacctggaggaggagctgcacccaggagaagtcctggtgatgctggtgggcaacaagacggacctcagccaggagcgggaggtgaccttccaggtaccgcccaggagaccctgctctgctcttccacagcaggagagagccctgcccgcctgtgtcaagaccttggcacnnnnnnnnnnnnnnnnnnnnnnnnnnnnnnnnnnnnnnnnnnnnnnnnnnnnnnnnnnnnnnnnnnnnnnnnnnnnnnnnnnnnnnnnnnnnnncccccacattcactcttacttgcaccnnnnnnnnnnnnnnnnnnnnnnnnnnnnnnnnnnnnnnnnnnnngctttccacctgagtttctcttttagtcaaagatttcgggtctttcctgaaaaa

SEQ ID NO: 247274 - DNA, 476 bp, Homo Sapiens
  misc_feature (219)..(219): n is a, c, g, or t
aaaaaacaaactgcaaaatggtatttatttacattaaaacatgaattgcctgtatacacacaaatataagaggaacaatctgttatgcacaataactgtaatatttagtacatgttatacacagcagtatctgttaagtcagtggtttgagtgaaaacacagtaccaaaacattcctgatacaaaataagttactcattcacatattctaatcatacanggacacttaatattttaaaagttacatacttcaaataacactggctaaatgtacaactaaagtttattaattttttttatgaaaagacttcagattgttattcataaatgatccctttcaggatgcattatcttttaaataaataaactaaattgacttcaagactatttataaatagcccactaaaatatgattgaagacattccttcattttattaaaggtgtagctatatactagagaatatgctcaactactg

SEQ ID NO: 247275 - DNA, 1799 bp, Homo Sapiens
  misc_feature (667)..(678): n is a, c, g, or t
  misc_feature (1729)..(1729): n is a, c, g, or t
taatgaaatactactcgaagtagtggacaagatatatataattgtaagtcacataataacttaaatcctgatactaatttaaccaaaatggtagtaaattatttgggaaaacttgtgggaatggtaggagatgtatcacagagctggatctcatctattaaagaggaaatcaatagctgatatcttaattgatccataataaaacatattcggttaacagtctttttcttaaaacttcagtggaagaacgcagttttgttgaaaagcacagatggccgtcgaatatgtacttgaagcagcttgcggaatacaggaagtatattcactcccggaaatgtcgttgcttagtaatgtaacctggagcttttatacactacatttcttttttattattatgaagaatgggatacctccaggttccagtaaaattcttctgaccgaaaccaatgtgggtgttagaaaaattaccatatagcttaatatgtttattagttctctttggaaaaaaactaccactgtggtcttaaaagggaacaaaatataccataggctaaaactaaggctttcactctagaatgcaaagctgttttgcagctgttttcccttaaagatgtcctgttgctttagtgatatttagacccctctcagttaagaaatgcttagattnnnnnnnnnnnnttacgtaggattaatacagaaatttaatcatgtctgattaattgctctattaaaataaggggcatttaaagacccagcataaccatttgtataatgagaaatctaggggaaaaccaatcagtccaacatgagattttaggaatagaaatttgccggccatttggaaagtgaaatgccacttagttctcaattgatgacagtgtttgaatcatcataaaaaaaatacctgcttttcatctggacaacccaattgagccactttatctccttttggaatctgagtaggcggggaacctaggcagggctggctttcttagcgtgtaacttgtgtagcagcacagggcccacacttagaaggaccccacacttggttcaaggctctgctatagcggaaattcttaataatgtttgaagaagggccccatgatttcattttgtgctgagccctcaaaattatgtctgtttcgtggtgggaaatatcctatgttttcttgctcaaacacctttctctctgaaagcagaaaaaggcactgatataaagggaagagaaggaggctcaccggagggaagagaacatagtgaagattcccgcctttggggaggtctggaccacccagggcctccactgccaccttggctggcaagggagaaatgtgttgtgttgtcttagctttaaaacagtcacagttcttgctctatcatagatgaacaaatactttcttgatcattctgtaagaccaggaggttggtaagagtgactaaccagcctaactttaatacacatgtataaagatgttcacagagaaagatgctctgtagagaatttgctaccgaagttggctcaagaatttgtttttagtgttatttaccaagattaggacgtcagtggcttaaattctttgaattcttttcaaggactgcaagattatttgataaagagtagcatgaatcttgtgctctaatattacacagtaagttcaaagaaaggatgtaagtcaaagacttgttacatagaggggaaatggactgggatagaggacagactgatagnttcttttctttcatatcacaggtatagagaaataattatatcagaaactcacaaacctagacatggaaaa

SEQ ID NO: 247276 - DNA, 474 bp, Homo Sapiens
  misc_feature (17)..(17): n is a, c, g, or t
  misc_feature (51)..(51): n is a, c, g, or t
  misc_feature (244)..(244): n is a, c, g, or t
gtgccccacttgtgaanggggtgtatggagaactgcaaaggggtacctgcntggagggctccctgtctggactaatcccgggatcccaatattactgcccttctgaaactccccctttagggtaacccatcatgtatggccccacgagggtgatagtaattccgtgagactgaagttgccttagagtacttctttgacccaaggaatacccacagacaccctaccgatagaacagtggctcagntcttacttgctcctgcttacgaagtattcccaatcactggtcatctgaccctacttgaacactcctgaacagtcatgttttttaaaatcttcctttatatcaagtcagagagtatacttctataaatttcactcatggatgttaggaaatctagtcatcttccctgtgattgccctgttaagtatttaaccatagctatcatgtgtttcccaaatcttctctagattaaa

SEQ ID NO: 247277 - DNA, 831 bp, Homo Sapiens
tagtaccagcacaagtagaatccccagtggtaagaaagttctcgttttgtttaaaaccacagatttaagaatgtggttccccactatcctgagctcagaggcataaaccttcccagattggagcaatgtgaaagacaccagttgctgtatttttccatgaatattgttaatggcaggaactgagaggtatcccatgtggctgaggctaaaaaagccccaacaaggcttttaccgggctatcttgatcttcaccactgagcctgctctcagatgcacctgtagctttatgagattcaaattcagttccaactgggctttgtccatttctctggctttagcagtcctattgcatggggtaaactggttcttgatgagtcttgcaccctctaggaccccttatgttgaaggcagctccagggacctcttaacacccattctttacattcattcattccagtagagaggggcctcgacagacaagccacgccctagaacttcagtctcactcctgatgcacagaaaccagatatgagcagatgaaatttgcctggaaatctcaagagccattaacttctctgaagtggggtccatcatgataagtctgaacatcgtagtaaagattgtctcattcttattcctcatgatctgatgattgcatagcagaatataaccacttaattctgaattgtcatgttttgtacagatggtttgctttcaaatgataagacttaattgatcagcattcataagtaactgtgagtattcggcaacattaatcaatctaacatcaatgcttaaaaataagcccagtgcattatgtgggaataattt

SEQ ID NO: 247278 - DNA, 928 bp, Homo Sapiens
cgaaatggaggggtgtgtgtctaacctaatggtctgcaacctggcctacagcgggaagctggaagagttgaaggagagtattctggccgataaatccctggctactagaactgaccaggacagcagaactgcattgcactgggcatgctcagctggacatacagaaattgttgaatttttgttgcaacttggagtgccagtgaatgataaagacgatgcaggttggtctcctcttcatattgcggcttctgctggccgggatgagattgtaaaagcccttctgggaaaaggtgctcaagtgaatgctgtcaatcaaaatggctgtactcccttacattatgcagcttcgaaaaacaggcatgagatcgctgtcatgttactggaaggcggggctaatccagatgctaaggaccattatgaggctacagcaatgcaccgggcagcagccaagggtaacttgaagatgattcatatccttctgtactacaaagcatccacaaacatccaagacactgagggtaacactcctctacacttagcctgtgatgaggagagagtggaagaagcaaaactgctggtgtcccaaggagcaagtatttacattgagaataaacgaagaaaagacacccctgcaagtggccataggtggcctgggtttaatactcaagagaatggtggaaggttaaaccagcttggatttattctttactcttgtatgttcgtgtttgttgtcccccagtgtcctacaaacttgatgtatttgtgcaccaagacatcatctatgaattgctgaagttttctcacctttcaaaggtcttataaacatgttgactcttgttcctggctgagttacttgttcgaagcttacagcttgttttccaggcatcgaataactgttgagattgttctactgttgtaactcgaggta

SEQ ID NO: 247279 - DNA, 1919 bp, Homo Sapiens
  misc_feature (460)..(460): n is a, c, g, or t
  misc_feature (1885)..(1885): n is a, c, g, or t
gactggtagcacagccagcacagcagctgccacaccacaggtcagcagctcagggtttagcagcccagcttttggtaccacagccccaggggtctttggacagacaaccttcgggcaggcctcagtctttgggcagtcggcgagcagtgctgcaagtgtcttttccttcagtcagcctgggttcagttccgtgcctgccttcggtcagcctgcttcctccactcccacatccaccagtggaagtgtctttggtgccgcctcaagtaccagtagctccagttccttctcatttggacagtcttctcccaacacaggaggggggctgtttggccaaagcaacgctcctgcttttgggcagagtcctggctttggacagggaggctctgtctttggtggtacctcagctgccaccacaacagcagcaacctctgggttcagcttttgccaagcttcaggtttngggtctagtaatactggttctgtgtttggtcaagcagccagtactggtggaatagtctttggccagcaatcatcctcttccagtggtagcgtgtttgggtctggaaacactggaagagggggaggtttcttcagtggccttgcgaggaaaacccagtcaggatgcagccaacaaaaacccattcagctcggccagtgggggctttggatccacagctacctcaaatacctctaacctatttggaaaacagtggggccaagacatttggtggatttgccagctcgtcgtttggagagcagaaacccactggcactttcagctctggaggaggaagtgtggcatcccaaggctttgggttttcctctccaaacaaaacaggtggcttcggtgctgctccagtgtttggcagccctcctacttttgggggatcccctgggtttggaggggtgccagcattcggttcagccccagcctttacaagccctctgggctcgacgggaggcaaagtgttcggagagggcactgcagctgccagcgcaggaggattcggcgcaggtttgggagcagcagcaacaccacatccttcggcacgctcgcgagtcagaatgcccccactttcggatcactgtcccaacagacttctggttttgggacccagagtagcggattctctggttttggatcaggcacaggagggttcagctttgggtcaaataactcgtctgtccagggttttggtggctggcgaagctgagggcgtgtcagcaggcctttcgatccctggggaccaaccgcatcctcagtttcttccccgagaaatgctggagcaggcctgttcagaccgacgttgccatcaaaacacatacacccagaaagaaacaacagaaaccaaaactcacaaggcgcatgattacttgttttatatttcatgttgggttttccctcccactattaaacagtctgtttccgtacagaacgtatgtgggttttttcagatcacagccaagaagattgccccgtttctgtggctctgagaagccagcagagcctccatcagccagaacactgtgtcttcaaggatggcatcagaagtcaccagcgtcgggtgttgataaacagcatcgaatgtgccgtggtctcacttggacctagcgccctccacatagggaagaggttgaatgctggtgggtcatctttttgaggctgaaacttggttatctcctctccttgttcttttagccattgtgtatcagggacatccaaggacgcactctgcgattgagtggaggcagaggaagccactcatgccagcagcagttgagtttcagaagcagccatagcgcttttcagtacagtaccatagtaaccagcgtgaaggcaggacagtgctgcgccctagccggccttggcctctcatctccatgngggctcctgggtggcatgtgtcctactcccgaaa

SEQ ID NO: 247280 - DNA, 492 bp, Homo Sapiens
  misc_feature (418)..(427): n is a, c, g, or t
aacccttttctaagcgctttttctttctggtttgatcctgactgctgtcatggcgtgccctctggagaaggccctggatgtgatggtgtccaccttccacaagtactcgggcaaagagggtgacaagttcaagctcaacaagtcagaactaaaggagctgctgacccgggagctgcccagcttcttggggaaaaggacagatgaagctgctttccagaagctgatgagcaacttggacagcaacagggacaacgaggtggacttccaagagtactgtgtcttcctgtcctgcatcgccatgatgtgtaacgaattctttgaaggcttcccagataagcagcccaggaagaaatgaaaactcctctgatgtggttggggggtctgccagctggggccctccctgtcgccagtgggcccnnnnnnnnnnccaccctggctccttcagacacgtgcttgatgctgggcaagttcaataaagatttttggaagttt

SEQ ID NO: 247281 - DNA, 1429 bp, Homo Sapiens
  misc_feature (58)..(58): n is a, c, g, or t
  misc_feature (156)..(156): n is a, c, g, or t
  misc_feature (218)..(218): n is a, c, g, or t
  misc_feature (252)..(252): n is a, c, g, or t
  misc_feature (1039)..(1049): n is a, c, g, or t
  misc_feature (1051)..(1081): n is a, c, g, or t
ttcttattgttgcattatcaaaatggttatagttttcaattaaaactgtaattgattnctatgtataaaacagctttgaagttgtaaatgtagtttccaatcgttagttaatgctacattagttagcaatatttgaaaattttattggtataaaangttttaattactaaggctgtttgtaggctgcatagtaagcttcaggatcatcacacgttttntcccctgtaaattggtgggaataggaagcctttnaaggtctcttgcttctcatgggtgggctacaaggagcagcagccatcgtggcaggcttgtgatctttttcctgctgacacctgctgcttgacatggagaagttctgcacagaaagcagtggcatccttcatgaggtggtacttggggcagacactgagagcattgtaatcgtcttttgtatcaatctctctaaagtagaccaccacgtatttgtgcagatgaatctggcttcttagatcactgcagaaaaggttaaaggcaagggggaagaggtcttgagagttctcactgggactgccctcgctcttgccacaggtaccatcgcacacactgttgacgtcattggaaagaaggaagacgactttgtctgctgccttcttttggaggcaagccactgcactggacccatctctgctattttctttttctgccacttttcaaggatgacctcacttctgcaatggttttgaagaaattcagtgaagtaacaaattgtgtgatggaaacatatttcagatgggtaaaccacaagaaccttaatggggggcagtagtgtggtggtagaaaaggaagtcttcttgatcctttctgtgagaggagaaaagcatttgttatctgtgaacagcaaacagcaggctttcactctgtaaaccatccctgacaaatgatcccttgctagagaatgtcagctgagcaccaagggccttgttagtgacagcaaggaaaaacatcctgatgttccttttgaacacatcacctgaaacacactgatgcttaaaccttaacnnnnnnnnnnngnnnnnnnnnnnnnnnnnnnnnnnnnnnnnnntatatgaacagggacacttgacctctgcacttcacattttgagtcgggtcaattaggtagttgcttgtactgtcttctacctgcaggtggtagagtttctttatagttcccaaagttaagtggcaccccttttcagcccctggaacttaacctggaattctgccctatacggtgctgtaaaacaaaccatgtttgaaactactgtaacgaatacaggtcagacagcatccctaaatgtaagaattcctgaggtccaggtgcccctgtggctttcttagcttagaacatggagttaatctcattttatttacaacatcacaaatgactcaaaggatgcatttgtaccaa

SEQ ID NO: 247282 - DNA, 1658 bp, Homo Sapiens
ttggatgaaaatctaccaatttcttctagagcacttcacagatgaacagcgattcaacatcacttccaaaatctgccttagtattttggcgtgctttgctgatggcatcctacccctggacctggacgccagtgagttactctcagacacgtttgaggtcctcagctcaaaggagatcaagcttttggcaatgagatctaaaccagacaaagacctccttatggaagaagatgacatggccttggcaaatgtagtcatgcaggaagctcagaagaagctcatctcacaagttcagaagaggaatttcatagaaaatattattccaattatcatctccctgaagactgtgctggagaaaaataagatcccagctttgcgggaactcatgcactatctcagggaggtgatgcaggattaccgagatgagctcaaggacttctttgcagttgacaaacagctggcatcagagcttgagtatgacatgaagaagtaccaggaacagctggtccaggagcaggagctagcaaaacatgcagatgtggccgggacggctggaggtgctgaggtggcacctgtggcacaggttgccctgtgtttagaaacagtgccagttcctgctggccaagaaaaccctgccatgtcacctgccgtgagccagccctgcacacccagggcaagtgctggccatgtagcagtatcatctcctacacctgaaacagggccattgcagaggttgctgcccaaagccaggcccatgtccctgaacaccattgcaatcctgaattctgtcaagaaagccgtggagtcaaagaagcaggcatcggagtcggagcttaggagtgctgcctttcactttaaattctgggaagcccagaaaaaacgtgcagtcatgtgtcttcagtacagtttggagcaagagtcgaatggcgagattgagcacgtgaccaagcgggccatcagcacccccgagaagagcatcagtgatgtcacgtttggagcaggggtcagttacatcgggacaccacggactccgtcgtcagccaaagagaaaattgaaggccggagtcaaggaaatgacatcttatgtttatcactgcctgataaaccgcccccacagcctcagcagtggaatgtgcggtctcccgccaggaataaagacactccagcctgcagcaggaggtccctccgaaagacccctctgaaaacagccaactaaacagcgcctcccaccagtgtccaggcaggcaggagcccttgaggaagcagtctcgtgtcctccgtgtgaaggcagctggatcacttcccgcagtccttgggcagcgctttgctgtggaacacgagagctcctcctcaaggggcctggcactcaccttctattctgtatgatgtatttggttaaacactgtcaaataatagagatgtgccagatttagattttcttaccctaatctggtttaatattgtaactttattccatttgaaaagtgtcaagcccattcagataaagctataatctgggtctttaaggaacacaattttaaaaacttgcagctttcttttatatacactcaagcctctgtttaacttgaattcctttatagtacattattttccccatctggtaatgacgaaattttgattctaaatattttcctatt

SEQ ID NO: 247283 - DNA, 800 bp, Homo Sapiens
tggattctcactactgcacagaccctgccaagttcatttcagtactgtgtacctccctggccaccatgctgcacgtggaactgccccacatcaacctcctttccaagatggacctcattgagcattatgggaagctggccttcaacctggactactacacagaggttctggacctctcctacctgcttgaccacctggcttctgaccctttcttccgccactaccgccagctcaatgagaagctagtgcagctcatcgaagactatagccttgtctcctttatccctctcaacatccaggacaaggagagcatccagcgagtcctgcaggctgtggataaagccaatggatactgtttcagagcccaagagcagcgaagcttggaagccatgatgtctgccgcaatgggagccgacttccatttctcttccacactgggcatccaggagaagtacctggcaccctcgaaccagtcagtggagcaggaagccatgcagctgtagcaacaaggtggaccctggagagcaggatgcataatccagcactggggaaagtggaggctcctgatgcaggctgcagacccaagagcaagtcctcccagccagagctggcgggctggcaaggggatattcagctctgcaaaggacttctggccaaaaagccagacatggtgccaagcagaacaccccccatactgtcagtggtgtccgtgagctctgggccctgccaccagaaagtcgagcactggtcctagtcaggctgtgatgaaatgtgctacaatacaagagtttattttctaa

SEQ ID NO: 247284 - DNA, 1131 bp, Homo Sapiens
  misc_feature (482)..(494): n is a, c, g, or t
  misc_feature (503)..(553): n is a, c, g, or t
taagcaattccattagagatgtggcagcagcagcacattatgaattaacaaggactggctgccaatggtgggcttaacattccttagtttgaattaacccaagtgacctcatgggtcagcatgctcctcatgggtgctatctgctggatagcagagaccaggagtcggtggtggtgggagggtgggggggacggcggcagggacagaaccctgcagccccgcagcggcatcctcatggagttctgctgctctccttccatcctgccacctgtctgcaagaaggcagcaccccactccagacaagcatgccacaggctggcatcagcatgttggcaaggacctcataactcatcttactggctgtcaacagggccccagagctcagggagcaccgtgaactccaatttacacccacaaagggtagcattttcactgtcaaacactgcctcactacagtcagtttttgacatttaacaatctcnnnnnnnnnnnnnaacattaannnnnnnnnnnnnnnnnnnnnnnnnnnnnnnnnnnnnnnnnnnnnnnnnnnaacaatcttttgatttacatttttatagccactctatcaagatttgactcatgctgagtgtgggtcctgggaacctgcatgaccagcagtctgatgggagcacccatgaccataatggctacactctagtcatgaattaacatttcattaaacccaaacgtctgcttcaattcttcctccagtgtgatgtacagtttccttgcagtgcccaagggctctagagctcatcccacccaaaccaaagaatgctggtcaagtgggaaggagtccctgttctcagctgtagagggtgtggggagcactccgagtgccgtatctcagaacatctaagaacagtctaggaaaacacactccatttgtggttctccagagaatcagcacttggaatcctttgccaccgcgtaccccaggctctgaatcctgactgcgagattacacctgccagttcaccatcgactgtgtcacacggctcagcacagctcccaggccaacccatcctgatttccatctacttctaaactgcatcactctactcctcacagcaacaactcaaattccctaatgactaatctgttctt

SEQ ID NO: 247285 - DNA, 968 bp, Homo Sapiens
ttggctttctgtctaggcctcctgaattgcaagatgccacctgctgagaaggcttccaggatcagagctgctgagaaggtttccaggggcgatcaggaatctccagatgcttgtctgcctcctacagtacctgaagccccagccccaccccaaaagccccttaactctcagagccagaaacatcttgcacctccgccccttctttctccccttttaccttctatcgagccaaccgttcgtaagaccaggcaagatgggagtcaggaagctccagaggctcccttgtcctcagagctggagcctttccacccaaagcctaaaattagaactcggaagtcctccagaatgacaccctttccagctacctctgctgcccctgagccccacccttccacctccacagcccagcctgtcactcctaagcccacatctcgggccactaggagcaggacaaatatgtcctctgtgaagacccctgaatcagttgtccctatagcccctgagctcccgccttccacctccacagagcagcctgtcacctctgagcccacatctcgggttactaggggaagaaaaagtagatcctctgtcaagacccctgaaacagttgtgcccacagcccttgagctcgagccttccacttccaccgaccgacctgtcacttctgagcccacctctcaggctactaggggcaggacaaataggtcctctgtgaagacgcctgaaccagttgtccccccagcccctgagctccagccttccacctccacagaacaggctgtcacttctgagccacatatcaggctactaagggaaggaaaaatagatcctctgtcaagaaccctgaacagttgtgcccacagcccctgagctcccgccttccacctccacagaccgacctgtacccccaagcccacttctcggaccactaggagcaggacaaatatgtcctctgtcagacccctgaa

SEQ ID NO: 247286 - DNA, 318 bp, Homo Sapiens
tcctagattaattcttgacattttttggatcaagtaagaaccactggagcctttcctggaaaaaagaacacatactcagtctcacacacaatttctgggggctcacagaccctcttgaagcctatccataaaccccctggtgaagtccccctgcccgatagcctgagggaagacatgtgagtggatatatgtgcactaacaggggcgaagacagacctggatggtctgcaatcccagagagcatgaggcaccatgtcccaaagcttggtatgtggccctgggctcctcccccaattttatctctctgaagaagctgag

SEQ ID NO: 247287 - DNA, 1113 bp, Homo Sapiens
ggcccacataattaggtgaacacaactaaataagaaaaacaaaagcctgggggcgtctttattaatttttataatgtcccagttgggcctggtacggtacggaatgctgggatatcgtcgaccacgcgtcggacaaagggtctgagaacattatctgtagctgtatctccccatgtggaagtggatagcctatctacagttctcggttttctctatcggctgaattatgaacatgacaacataagcctcaaaagggtttccaaaatgccagcattccttcgctctgcccttcagatttgttttctgaagattcaacaaagctctttgtagcatcaaatcaaggagctctgcatattgttcagctgtcaggaggaagcttcaagcacctgcatgctttccagcctcagtcaggaacagtggaggccatgtgtcttttggcagtcagtccagatgggaattggctagctgcatcaggtaccagtgctggagtccatgtctacaacgtaaaacagctaaagcttcactgcacggtgcctgcttacaatttcccagtgactgctatggctattgcccccaataccaacaaccttgtcatcgctcattcggaccagcaggtatttgagtacagcatcccagacaaacagtatacagattggagccggactgtccagaagcagggctttcaccacctttggctccaaagggatactcctatcacacacatcagttttcatcccaagagaccgatgcacatccttctccatgatgcctacatgttctgcatcattgacaagtcattgccccttccaaatgacaaaaccttactctacaatccattttctcccacgaatgaatcagatgtcatccggaggcgcacagctcatgcttttaaaatttctaagatatataagcctctactcttcatggatcttttggatgaaagaacactcgtggcagtagaacggcctctggatgacatcattgctcagtcccaccaaccattaaaaagaagaaatttggaacctaaaacagggcactgtctgtgtccttccttgaactgtctaccctgttgcttttcacaaatcatggtaataaaacaagttattcttgagg

SEQ ID NO: 247288 - DNA, 1044 bp, Homo Sapiens
  misc_feature (385)..(432): n is a, c, g, or t
  misc_feature (962)..(962): n is a, c, g, or t
  misc_feature (982)..(982): n is a, c, g, or t
ttgggtgaagagttctgcagccttacagagactggaaaagaagcccaaaccaaggcccccagagaggtcccccaggcccctttgggtccctgagcctcagctggagatccggcgcaggagaccaacgcctgccatgctgttccggctctcagagcactcctcaccagaggaggaagcctccccccaccagagagcctcaggagaggggcaccatctcaagtcgaagagacccaacccctgtgcctacacaccaccttcgctgaaagctgtgcagcgcattgctgagtctcacctgcagtctatcagcaatttgaatgagaaccaggcctcagaggaggaggatgagctgggggagcttcgggagctgggttatccaagagaggannnnnnnnnnnnnnnnnnnnnnnnnnnnnnnnnnnnnnnnnnnnnnnncagccaggctgaagtcctgaaggtcatcaggcagtctgctgggcaaaagacaacctgtggccagggtctggaagggccctgggagcgcccaccccctctggatgagtccgagagagatggaggctctgaggaccaagtggaagacccagcactaagtgagcctggggaggaacctcagcgcccttccccctctgagcctggcacataggcacccagcctgcatctcccaggaggaagtggaggggacatcgctgttccccagaaacccactctatcctcaccctgttttgtgctcttcccctcgcctgctagggctgcggcttctgacttctagaagactaaggctggtctgtgtttgcttgtttgcccacctttggctgatacccagagaacctgggcacttgctgcctgatgcccacccctgccagtcattcctccattcacccagcgggagggtgggatgtgagacagcccacattgggaaaatccagaaaaccgggaacagggatttgcccttcacaattctattncccagatcctcttcctgggncacaggagacccacaggggcagggaccctaagatcttgggggaaagggaggttctttaggaa

SEQ ID NO: 247289 - DNA, 361 bp, Homo Sapiens
  misc_feature (47)..(200): n is a, c, g, or t
atagaggggcgtacgacaatctagctcattatataggtggcccctcnnnnnnnnnnnnnnnnnnnnnnnnnnnnnnnnnnnnnnnnnnnnnnnnnnnnnnnnnnnnnnnnnnnnnnnnnnnnnnnnnnnnnnnnnnnnnnnnnnnnnnnnnnnnnnnnnnnnnnnnnnnnnnnnnnnnnnnnnnnnnnnnnnnnnnnnnngtacccaatcgttttgttaaaaacatgtaacatctgttttctgtgcttgctgcttacacgttcttgttttccccaacaaatgttgccaacaaaatgagacacagctgctggtgacatttgtagaggaaaacggatgatgcctcatttttgtaggagggaga

SEQ ID NO: 247290 - DNA, 486 bp, Homo Sapiens
  misc_feature (475)..(475): n is a, c, g, or t
aacgcaaaagccgaggccccagatttagtattcactagcagcgccttcgggtagcaggatgaatccttttcctgcctgtctgctgctggctctcttcccctaaggtacaggttggcaggacccacctccgccctacttctcccacccatcccctagcatgcccagcccgttccccagatcaacctgcccagtggagtcaggcagtgcactccctggagccaagagggaagggcagggtagagagggtatgtccagtagcctggagctccatggtggcttcatgcctcccttctcccagctcaggttgccctgagggctccctcggaacagtgcctcaaatcctgacccaagggccagcatggggaagagatggttgcaggcaaaatgcactttatagagattttctattgctgggaaggtgtgtttctcccacaatttgtttgtgaatattcacttgttttataaatgtctgaantaatcttcagt

SEQ ID NO: 247291 - DNA, 1148 bp, Homo Sapiens
  misc_feature (1031)..(1031): n is a, c, g, or t
ctccgtggagccgcacttcctgcgagggctccgtgcgcaccttggccgagccgaaccgagccgagtcctgtccttccaggccgttcgcaatggtggatgagttggtgctgctgctgcacgcgctcctgatgcggcaccgcgccctgagcatcgagaacagtcagctcatggaacagctgcggctgctggtgtgcgagagggccagcctgctgcgccaggtacgtccgccgagctgcccggtgcccttccccgaaacgtttaatggcgagagctcccgggtccccgagtttatcgtgcagacggcgtcttacatgctcgtgaacgagaaccgattctgtaacgacgccgtgaaggtggcattcctaatcagcctcctcaccggggaagccgatgagtgggtggtgccctacatcgagatggatagcctccctcctaggtgaattaccgggtcttcctcgatgagatgaaacagtgctttgggtgggatgactacgaagactacgacgaggaagaagaggaggatgattattaggccctcgaccctcgggcctcgggggggagggccctgcacgccgccaccccctccccgcagccctcaccccgccaggagccactgctctcccccttgccctccggtccccttacctacccgcgcccgtctgctctctctcttcatttctccgtagtgcttgtctttgttccgggaatagcgctccagttacctgctgctggggtcggggctggagcctcactcactcggaagtgcttggaagtgtcatctaccctggccatccccgggatccctcccctgctaatctgaactgtgtcctgaaccccagctattggccaggcccctgttacaaactgcgcagaccacccgtagccctgctgctgccacctgccctgctgccaggcttacatcttcccagagaactatgctgccacttcacatccactcaccacatcccacctacagactaccacctttcgagatcaggaccaacctggaaaatgccagaagttggctatgnccttttcaggacatgtgatttggaaacagctccacccaaccccctggaaaggggcccgggtccagcccctggggttaggttttttcctacccctaacttcccgaaggtggttccctt

SEQ ID NO: 247292 - DNA, 573 bp, Homo Sapiens
ttggcgagcgggaggccggggctgcgggcgctcgctggtggcggacccggaggctgctgcggcgccggggctccgtggcctggattgaatccgatcgggagccatgagcgtggacaaagctgagctatgcgggtctctgctcacctggttacagacgttccacgttccgtctccctgtgccagccctcaggacctgagcagcggccttgcggtagcctatgtgctgaaccagatatgacccctccttgttcaactgaggcatggctccagggcatctcggtagatccagtgtcccaactggaagctgaaggtgacaagtggactcctgattagaggacagactggtgaagagatgaccagggacgggccagctaggcacatgtcctgggtgatgggcaggaagagggacagatgtctggtgatcaaccatttgttcatccattcatctatggagtactcaccctgtgccaggcctgtgcattcagcaaggaataacacagacaaaaacctgccccacacagccatcattctagtgacaagcaacacatacacaaccataccaattaacttcca

SEQ ID NO: 247293 - DNA, 1039 bp, Homo Sapiens
  misc_feature (770)..(779): n is a, c, g, or t
  misc_feature (1009)..(1009): n is a, c, g, or t
  misc_feature (1028)..(1028): n is a, c, g, or t
ttggactttttggatggaaactctttgagcaaagaggcttacgtttttccccagtagtggacgttgacgggtggtggcgcaggaaaaaacctcccaggcagagtgattacgtatttttgtcattgcagggaaagggattcacagcttgtcattctaactcacttctccccctctaactcacttctcgcctctacacttttctccaccttttaaggtttttggctttcatcgctttttctacatgtttttagcctcaccagaagtctttcatctcggtggtccaactcaggatctcagcctcattattttcttacccttctggagtgcatatgtgcctttacagtttctgtttgcaaacgctgtctagcatactaagaggatgttagcaaacctgttccatggacactaaatggcagttgtacatctcccctcatcagtcatagtgacaaccagaaatgccctccatattttccagtgatcccagtcttcaatgcgtctgtctcataatttgtaaacgtttattatcttgaagtcattgttaatctgtggtgaaaagtaattgctaaatagaaattctgagaagaaaaaggcctcatccttttcacatgatgtaggaaggtctgttgcatgagcaatgggaaatccagaaaacatagaagatgcatatgttgctgttattcgtccaaagaatactgccagtctcaattctcgggaatacagagctaagtcatatgaaattttgttgcatgaagttcccattgaaggacagnnnnnnnnnngagaaagaaagttttattggaaacgaaacttcaaggcaacagtgaaataacacaaggcatattggattacgtagtagaaaccaccaaaccaatttctcctgcaaaccagggtatcagaggaaaacgagttgtactaatgacaaaaatttcctctggatggagagaagatgggcagagaagcatcattatttattgttccatcagttgtcacgattgtcaccggggatccnctagagtcgggccgcaggnaggggttcaaa

SEQ ID NO: 247294 - DNA, 1213 bp, Homo Sapiens
  misc_feature (251)..(259): n is a, c, g, or t
ttggctctatgaagaactatataataaaacaaaaccttttcagctacaactagatgcttttgaagtagaaaaacaggcattgttgaatgaacatggtgcagctcaggaacagctaaataaaataagagattcatatgctaaattattgggtcatcagaatttgaaacaaaaaatcaagcatgttgtgaagttgaaagatgaaaatagccaactcaaatcggaagtatcaaaactccgctgtcagcttgctnnnnnnnnncaaagtgagacaaaacttcaagaggaattgaataaagttctaggtatcaaacactttgatccttcaaaggcttttcatcatgaaagtaaagaaaattttgccctgaagaccccattaaaagaaggcaatacaaactgttaccgagctcctatggagtgtcaagaatcatggaagtaaacatctgagaaacctgttgaagattatttcattcgtcttgttgttattgatgttgctgttattatatttgacatggggtattttatcatgttgtatttaattttaactgccaatccttaaatatgttgaaaggaacattttttaccaaagtgtcttttgacattttattttttcttgcaaatacctcctccctaatgctcccctttatcacctcattctgaaccctttcgctggctttccagcttagaatgcatctcatcaacttaaaagtcagtatcatattattatcctcctgttctgaaaccttagtttcaagagtctaaaccccagattcttcagcttgatcctggaggtcttttctagtctgagcttctttagctaggctaaaacaccttggcttgttattgcctctactttgattctgataatgctcacttggtcctacctattatccttctacttgtccagttcaaataagaacataaggacaagcctaacttcatagaaacctctctatttttaatcagttgtttaataatttacaggttcttaggctccatcctgtttgtatgaaattataatctgtggattggcctttaagcctgcattcttaacaaactcttcagttaattcttagatacactaaaaatctgagaaactctacatgtaactatttcttcagagtttgtcatatactgcttgtcatctgcatgtctactcagcatttgattaacatttgtgtaatatgaaataaaattacacagtaagtcatttaac

SEQ ID NO: 247295 - DNA, 487 bp, Homo Sapiens
  misc_feature (183)..(199): n is a, c, g, or t
ccttaatatgtttgccctgtgtttcccactttaccaaaggagtaggtagacaggcaagtcagattccaggtagaggatgtatagactggctagttcaagggtttgggggcagaatacctctattactttgtatgtttatatggcaggtttgcttaacaaaacaactgaaacttctctaaaaannnnnnnnnnnnnnnnntttaaagtttaaactcatatcccaggcatatgaagtgctttcagatccaaagaaaagggatgtttatgaccaaggcggagagcaggcaattaaagaaggaggctcaggcagccccagcttctcttcacccatggacatctttgacatgttctttggtggtggtggacggatggctagagagagaagaggtaaatgcttttaaagaaacataaataagttgtatggtttccacaattatacgtgttgttggaatcaggatagatcatgctttcaaaggatatgattggg

SEQ ID NO: 247296 - DNA, 993 bp, Homo Sapiens
  misc_feature (727)..(745): n is a, c, g, or t
ccgctgatccgcttaagcagcagtgaaaacaatactcatcctgaatggagctttaccaccgtacgaaagaagcctgatccaaagaaagtacagaatggggcagagcaagatcttgtgcaaaccctgagttgtttgtctatgataatcacacctgcatttgctgaacttaaacagcaggacgagaataacgctagcaggaatcaggcgattgaagaactcgagaaaagtattgctgtggctgaagccgcctgtcccggcatcacagataaaatggtgaagaaactaattgaaaaatttccaaagtgttcagcagacgaatccccctaagaaacttattattggcttctgtttcatatggacccagagagccccaccaaacctacgtcaagattaacaatgcttaacccatgagctccatgtgccttttggatctttgcaacactgaagatttggaagaagctattaaactattttgtgatggcgtttatcattttatattttgaaaggattattttgtaaggaataacttttaatactatagtttcacctgtattctagtaaatgttgagacaccgttttgcttttaagtatccctatttcttaagttacgaggatgaatacctttcacattttgatctttagttgactctacagtcatgaaacatacaggtctttcaaagtcattctcaatattcagcttttgtaaattatcaagcttcaaaaagcnnnnnnnnnnnnnnnnnnncatgcatattctaaaaatgactattggtggggaggtgtaaataaagtcataccttcttaaaacagaaaatttaagtaaagtcttttaaatgaaacctgtaaaagtattgactcttctaccaagttggtatgatattccaggcagctcaatgattatcacatttgagaccctgtgtttgaagcatttacaggctatgtacagcaacagagtacctcttggtgtatagtatttacattctcttttaggta

SEQ ID NO: 247297 - DNA, 373 bp, Homo Sapiens
ctatgtgctgggccctgtgttcactcccagaaatgcaaaggtcagcaattctcatggttaaggacctcacactcatgtaggagagacaggcctattatgatgaactataatgcaataagagccaaacatcctagagaaagtcactttgcttctctgagccaccttttctcaactctaaggtgtgagcagcgttgggtatatttagttatgatggtacttgtagatgctcacatttccagttccaaactcgcccgtactttttatgtgcttcaaaatattggacacatttctgcttaatatatgatttctgtatccacaaaccgctgtttgctatgctgagtcaatttagaagttaattacaaggggatcctcc

SEQ ID NO: 247298 - DNA, 294 bp, Homo Sapiens
  misc_feature (275)..(275): n is a, c, g, or t
tctgctggaaacagactcgattcatattgaatataatatatttgtgtatttaacagggaggggaagagggggcgattccggcggagctggccccgccgcctggtactcaagcccgcggggacattgggaaggggacccccgccccctgccctcccctctctgcaccgtactgtggaaaagaaacacgcacttagtctctaaagagtttattttaagacgtgtttgtgtttgtgtgtgtttgttctttttattgaatctatttaagtaaaaaaccntaaattggttctttattat

SEQ ID NO: 247299 - DNA, 348 bp, Homo Sapiens
ggtcgactactactactaaattcgcggccgggtcgacccctgcccccacctgacagggacgggccccctcctgactgagacctagtcctttcctgacaggaacctgccccctgttgtctggaacctgtccccacctgacaggcacttgcaccctccagattgggacccgccctctcctgacaaggacgtgccccctcctgaccgaaacctgcccctcctgactgagacctagtcccttcctgacaggaacctgccccctcttgccccctcctcactgggacttgccccctcactgtgatttcctttctccttgtctcttcctcctgagcactccatttcagctgtcgg

SEQ ID NO: 247300 - DNA, 1197 bp, Homo Sapiens
ttggcaatgatctcttagggttctcagatgccatgactttcaaggagagagtatggaaccacatcgtgcacttggaggaccatttattttgccagtatctttttagaaatgccctagaaatagcctctgaaattctccaaacccctgtcacggcatatgatctctacagtcacacatcaatttggttgttgcgaacggactttgttttggactatcccaaacccgtgatgcccaacatggtcttcattggtggtatcaactgtcatcagaggaaagccattgtctctggaatttgaagcctacattaatgcttctggagaacatggaattgtggttttctctttgggatcaatggtctcagaaattccagagaagaaagctatggcaattgctgatgctttgggcaaaatccctcagacagtcctgtggcggtacactggaacccgaccatcgaatcttgcgaacaacacgatacttgttaagtggctaccccaaaacgatctgcttggtcacccgatgacccgtgcctttatcacccatgctggttcccatggtgtttatgaaagcatatgcaatggcgttcccatggtgatgatgcccttgtttggtgatcagatggacaatgcaaagcgcatggagactaagggagctggagtgaccctgaatgttctggaaatgacttctgaagatttagaaaatgctctaaaagcagtcatcaatgacaaaagaaagaagcagcagtcaggaagacagatgtgaagagctggagcatgttcagatgagaggagacggaacacggggacacaccaacttgagcaagggacaacaggggaggactgatgactgacttcccaccttttgagtacaaggaaaacatcatgcgcctctccagcctttcccagggacgccccggggggaaccgctgggacttggccctgttcctgggtggaattttgtgatgaagggccaagggcgggccaaaactgggcccccgaagccccacgaacctcacctggtaccaatacccattccctgggacggggattgggtttcctctttggccgtccgtgcttaaaaaggggcccttcatcacccttttaatggtgggggcttatgtggctacccggaaaatgccttgggggaaaaaagggcccaagattaaaaaaagcccccacaattccaagaaccccttggaaa

SEQ ID NO: 247301 - DNA, 253 bp, Homo Sapiens
tcccctagttttagaagtttcaatagcagaacaaagccactctctgcttcaggtcgcaccatttgctgaattgaaaatcatatcctgaatcatactgagactgatcaacttggtagctttatttgttcagatcttatgagacactactcttctcaccgtgagattttctcagccagtgatagtacattctgaaatgctggctaccaggagacggccacagacacacactgctattgaaacttctaaaactagg

SEQ ID NO: 247302 - DNA, 3195 bp, Homo Sapiens
aagcctctccagactggaacagccagatctttcttcagagatgtcaaaggtctcaaagcctagggcctcaaagcctggccggaagagaggtggtaggacacgaaaaggccccaaaaggccccaacagcctaatcctccatcagccccactggttcctggtctcttagatcaatccaaccctctgtccacccccatgcctaagaaacgaggtcgaaagtccaaggcagagctgctgctgctgaagttgtcaaaagacctagatcggccagaatctcaatctccaaagaggccccctgaggactttgagaccccttctggggaacgaccccgccgaagggctgcccaagtggcacttctgtatcttcaggaactggctgaagagctctcaacagccctgcctgcccctgtgtcctgtcctgagggccccaaggtgagcagccccaccaaaccgaagaagatccggcagccagcagcctgtccaggtggagaagaggtggatggtgctccacgggatgaagacttttttctccaggttgaggctgaagatgtggaagaaagtgagggcccaagtgagagctcatctgaacctgagcctgtagtgccccgaagcaccccacgaggatctacttcagggaaacagaaaccacactgccgaggaatggctcccaatggcttaccaaatcatatcatggctcctgtttggaagtgcctccatctcaccaaggacttccgagagcagaaacattcatactgggagtttgctgagtggattccttttagcctggaagtggcacttgttatctgagcttgaggccgctccctacctgccccaggaaggagaagtctccattggttttctgtacaacgtgaagggctacctgaagatggcaccctctaccgaataaacagatttagctcgatcacagcacatccagagcgctgggatgtgtccttcttcacggggggaccgctctgggctctggactggtgcccagtgccagagggggcaggagcctcgcaatatgtggctcttttctccagccctgacatgaatgagacacacccactgagccagcttcattcgggtcctgggctgctccagctctggggccttgggaccttgcagcaagaaagctgtcctggcaacagggcccactttgtctatgggattgcttgtgacaacggctgcatctgggacctcaagttctgccccagtggagcatgggaacttccaggcacccctcggaaggctcctctcctgccccggttgggtctcttggctctggcctgctcagacgggaaagtacctgctattccagtctaccccatccggaggccctgctggctcagcaacccccagatgcagtgaagcctgccatatataaggtacaatgtgtggcaactctgcaggtggggtctatgcaagctacagacccctctgagtgtggtcagtgccttagcctggcctggatgcctaccaggccccaccaacacctagctgctggatattataatggcatggtggttttctggaaccttcccactaactcacccctgcagcggatacggctctctgatggctccttaaagctctaccccttccagtgtttcctagcccatgaccaggctgtgcgtacccttcaatggtgcaaagctaacagccatttccttgtctctgcggggagtgaccggaaaatcaaattctgggaccttcgacgtccttacgaacccataaactctatcaagcgcttcttgagtacagaactggcctggctgcttccctacaatggtgtcactgtggctcaggacaactgctatgcctcttatggactctgtgggattcattatattgacgctggttaccttggtttcaaggcctacttcactgctcctcgaaaaggcaccgtttggagtctttcaggatccgactggcttgggacaatagctgcaggagatatatccggggagctcattgctgctatattaccagatatggcactgaatccaataaatgtcaagcgacctgtagagcgaagatttcctatatataaagcagatctgataccgtatcaggacagtcctgaaggtccagaccattcttctgcttcatctggggtccccaaccctcccaaggctcgaacttacactgaaactgtcaaccatcactacttgctctttcaagacacagatttgggttcattccatgatctgctccgtagagaaccaatgctgcgcatgcaggagggagaggggcattctcaactctgcctggacaggctgcagctggaggctattcataaggtacgtttcagcccaaacctggactcctatggatggctggtatctggggggcagtcagggctggttcgaatccattttgtccgtggactcgcctccccactgggccaccgtatgcagcttgaaagccgagcccacttcaatgctatgttccaaccatcctcccccactagacggcctggcttctctccaaccagccatcgccttctgcccactccctagccttggcccacaccagatccttggagtgaagtcggtcaagaacaaatggcccctatgcacagagccataggaactgggggccttccctggacagtgatcatgccaggcctggacctttaggcctgcctccccaggactccttagatcccactctttctacagacttctgtgatcacagccccctgctcatattgagcatattgttaagtgggtaaagccaagtaaaggtactgggtgtttttgtgaccacttgtgaatgggtgtatggagaactgaaaagggtatctgcatgaaggctcctgtctgactattccaggatccaatattactgcccttctgaacttcctctttagggtaaccatcatgtatgcccacgagggtgatagtaattcctgagaactgaagctgcttaaaagtacttttttggaccaaggaataccccagactcccctaccggatagaacagcggggctccaaatccttaccttggcgtcctggtttacaaaaaatattccccacatcactgggctcattctggacccctaaccttgaaaacacttgcgtggaaaaagagcaatggtgttttttaagaaatcccttcgctgtttaatattccccggcccgcgaagagaggaatccacttccgttataaaaaatctttcccacttgccatgg

SEQ ID NO: 247303 - DNA, 1248 bp, Homo Sapiens
  misc_feature (17)..(17): n is a, c, g, or t
  misc_feature (116)..(116): n is a, c, g, or t
  misc_feature (1124)..(1153): n is a, c, g, or t
tcaaccagtatctatgnccagatcacctttcaccactcagctggttgcagatcccataagcaaccagtaataaccaacaaattatgataagcattgaactgcacctgccaaagtgnttgacaaagagtgcaacagaaaggaaccaatcatatcaccattggggaagatggccacagacaagggcccagggggacatgagcaaacctcagagggagatcttctgacctctctttcaaagtgtaactgagaaagtcctgttatgactgtctcagggagcactgatgactcccaatgttgtagccaaactgaaaagaagaggtggggtgaccctgggtccccatggcccttatctaattcttttcgaatattcaagaagagctaggagtgggattccagagacacttcttccagccaacaaaaccttcaaagtgtccttggcagcaagttttcaggtcctcagtaatgctataaaactcactcatcattacagcatctctgcattcttgctttaccacatttatctcaggcccaaacttagttatttctttgtattacatctgaaccatcaaagctaaatattttattctattatgaacaacggcaacaaaaccacgtttatcccaaataaatgttacaggaatctaatagatgagctattttgaaactttgtgggagtctgaggcaatactgcagaattactaaaaggatcagtgtttagtaaacaaaagcataatagttccaaaatttgtaaagccttttacctgggaatttattctctcttttgtatttttgatagtgattacaaagtttttcagatttttatgttggcaagttaacactggaggtccaatagtttagtgaagttgttttgagactcttgctaatggtttaggaagtagaaatgcttggggataaaattgacttctatacattaccagtaaatctagatgtactttaaagagcttaaaaaatggtttacattacacaaggtaagtatcactatgggtttttttgtttacagaccgcaggtttacttaatagttttcagtagactatcaagagatgcatgataaagacatttccccatgtaattttcaaattttatactcaagtccttatattcnnnnnnnnnnnnnnnnnnnnnnnnnnnnnntcaattgtttaaaattcagttttctttacctgaagatatgaatgtatgaattattagagtggttattaggaggaacagccgtgtaagctcagttc

SEQ ID NO: 247304 - DNA, 1761 bp, Homo Sapiens
  misc_feature (1079)..(1120): n is a, c, g, or t
  misc_feature (1380)..(1475): n is a, c, g, or t
ttggcttcatctttgccgccgctgccgtccccttcctgggattggaggtccagcgcctagtgtccgagctgatcggcgggaccggaggggatgaggaggaagagtggctctatggcgatgaaaatgaagttgaaaggccagaagaagaaaatgccagtgctaatcctccatctggaattgaagatgaaactgctgaaaatggtgtaccaaaaccgaaagtgactgagaccgaagatgatagtgatagtgacagcgatgatgatgaagatgatgttcatgtcactataggagacattaaaacgggagcaccacagtatgggagttatggtacagcacctgtaaatcttaacatcaagacagggggaagagtttatggaactacagggacaaaagtcaaaggagtagaccttgatgcacctggaagcattaatggagttccactcttagaggtagatttggattcttttgaagataaaccatggcgtaaacctggtgctgatctttctgattattttaattatgggtttaatgaagatacctggaaagcttactgtgaaaaacaaaagaggatacgaatgggacttgaagttataccagtaacctctactacaaataaaattacggccgaagactgtactatggaagttacaccaggtgcagagatccaagatggcagattcaatctttttaaggtacagcagggaagaactggaaactcagagaaagaaactgcccttccatctacaaaagctgagtttacttctcctccttctttgttcaagactgggcttccaccgagcagaaacagcacttcttctcagtctcagacaagtactgcctccagaaaaagccaattcaagcgttgggaagtggcaggatcgatatgggagggccgaatcacctgatctaaggagattacctggggcaattgatgttatcggtcagactataactatcagccgagtagaaggcaggcgacgggcaaatgagaacagcaacatacaggtcctttctgaaagatctgctactgaagtagacaacaattttagcaaaccacctccgtttttccctccaggagnnnnnnnnnnnnnnnnnnnnnnnnnnnnnnnnnnnnnnnnnnctccgactgtcagcactgctccacctctgattccaccaccgggtattccaataactgtaccacctccaggttttcctcctccaccaggcgctccacctccatctcttataccaacaatagaaagtggacattcctctggttatgatagtcgttctgcacgtgcatttccatatggcaatgttgcctttccccatcttcctggttctgctccttcgtggcctagtcttgtggacaccagcaagcagtgggactattatgcnnnnnnnnnnnnnnnnnnnnnnnnnnnnnnnnnnnnnnnnnnnnnnnnnnnnnnnnnnnnnnnnnnnnnnnnnnnnnnnnnnnnnnnnnnnnnnnnggagcgtgatcacagtcctacaccaagtgttttcaacagcgatgaagaacgatacagatacagggaatatgcagaaagaggttatgagcgtcacagagcaagtcgagaaaaagaagaacgacatagagaaagacgacacagggagaaagaggaaaccagacataagtcttctcgaagtaatagtagacgtcgccatgaaagtgaagaaggagatagtcacaggagacacaaacacaaaaaatctaaagaagcaaagaaggacaagaagcgggcaggagcctggccc

SEQ ID NO: 247305 - DNA, 1048 bp, Homo Sapiens
  misc_feature (369)..(378): n is a, c, g, or t
aataaaggagtattttttttgtcagcttatcaatcagactgatctaatgtgaaatgtaagtatccttaaaaacaaagcatctattttggcagaaattgtgttcttaaattcagtcatttgatattctgtgagacttcatatttctcatccctttattgctttttagcaaacataagaaaccatgagtcattttgtcatttagagtattctgataaaatctcttgaaaatactgaaatcaaaaggttaatgattttttgttcattctgatttgtcattttattatctgttatcggtctaaagtgctaatttacccatttgatttttctgctagacagataacttttaatttttcaaatttggcagacacnnnnnnnnnnctttggaaaatctttccttccagatctgttgcccactgaacagccacccgtccctcactgtcctggtgtccgattgggctggatggtgttggggcatgatgtgtggaggaactggaaggtgctttaggtctggttcagggtcgggcattctttgttgtttgcacatctttttaaattttacaccttttcttaagaattctaatgccgtcttaagtttttataccaataatgctgagctttaagtgtaggatctggtagtacagacagtgtgatggatgatgctgctggttgtaaatttcatcgtgtgtgtctaattttttttcctgttgaatgggtaaaaacaaaacaaaactttttttagaagatgaatttgctgtcatgttttgtggaatgagggaccgttgagctcactaccacctggagtttgagttgaagcatgaaaatggtgcccatgcctgacgctccagcgccctggatctgcacgtgccccttgtagaggatccttaccgtcctagagagcagacgctttctgaaaactacttgctccaaaagaccctctgagttaacgtttcagctgtatcattagacttgtatttagagcgtgtcacttcctctgaactgttactgcctgaatggagtcctggacgacattgggtttttcctctaggag

SEQ ID NO: 247306 - DNA, 755 bp, Homo Sapiens
  misc_feature (348)..(409): n is a, c, g, or t
atttacaatgcaaaaagtatatgaatcacaatttaacagtctggtcctggcagccagtatagttttggaggtagctttaattaagcgaaatgaccagaagccacatttcccgacttgtgttctaaaaataatttacataagataaaaattcattatatgcacagtatgtacagtttaattatgaaactgcaatctagatggatttttttaatatattcagaataactaatatggcagtgggtttgctattgatttagcacactattcaaaaaacatattgaacaattataactttaagactccacccagtaataggtctaaagcccatagatgggaatcaagtaaaannnnnnnnnnnnnnnnnnnnnnnnnnnnnnnnnnnnnnnnnnnnnnnnnnnnnnnnnnnnnncatattatcttgtttaacccagagttcaacctctgagctattgaataggctcttttatcaaaaatagtatggggaagatgtatggaaatttccatttaatagcacaggttcaagataatccagctcactaagaaataaacataagtacttcgtgtcataattactccccgtttcgtgtaattaaatgcaagtattgaccacagtttactttctatataatccaagctattgctaggtgacatcccagcaaattggaaaatattagtagagccaacgatattaggaagtattcattaatgagaacattacatgaagccaccaaatccctcagatactattaaacccc

SEQ ID NO: 247307 - DNA, 1491 bp, Homo Sapiens
ttggggatgactgtttttttccttatcttttaataactttgatgtgatgaatgttgaactaagtgatctgatcaacacaatctttctgacttttccagaggccatgtggaagtgttacatcaccttttgcttggaaagatttactaagaagtcaaatagtgggttccttagagggaaggtgaggttgttacatggttacagtggttgactagatagtgactgccttctgaaagaacagaagcacagatcttttggtgtctggcacagtttctgagaacttttatgtttagccactctctctctccttgtgggtgacgtgacattctaaaggtctgagtctggtttgccgccaggttaggaggggctctcgtgtaactgggctctgttcggtgcagctgcccattgcatctattcataagtgaaaccaccatgcaggagcaagtcagcttctttgaattttaagaaatgcgcaaaactgcttttgttcatgtcagaggccagaggcccctgctgggatctttgtaatgaactgagggatttttctgttttcagaggttggaaagaaccatgactgtattcaggaaggcacatgaactgaagcttctgtcagaatgccaatacaagcagttgagtgtttcgttgctgtgttataacttcctgagggaagctctggaagtggcagtagctggaactgaattgtttagagactctgggacaatgtggcagctgaagctgcaggtgctgatcgagtcaaaagagccctgacatagccatgctttttgaagaagcctttgtgcacctgaaaccccaggtttgtctgccattgtggatttcctgggcagagtggagtgaaggtgccaaaagccaagaagacactgagggcagtctttaagaaagctctcttagctgtcataggtgccgactcagtaaaccctgaagaataagtacctggattggggcttatccgaagtggtggctacaaaagggccaggagctgtgtttaaaattttacaggagagccgaccattttcagttgactttttcaggaaaatgattcagtttgaaaaggagcaagaatcctgcaatatggcgaacataagagaatattatgagagagctttgagagagtttggatccgcagattctgatctttggatggattatatgaaagaagaattgaaccacccccttggtagacctgagaactgtggacagatctactggcgagcgatgaaaatgttgcagggagagtcagcagaggcatttgtagctaaacatgctatgcatcagactggccatttatgaagatgaagaatacagtcagctttgtgaaatagtattgcaagcaacgcccgtgggcaaatttgtattgagtccatctgtaatttgctcagtgatggcagacaagatggctgtctggttttgagacacactttaattttatgttaacttgttaaatctttttaaaaattaaaaaatttttatgattga

SEQ ID NO: 247308 - DNA, 1355 bp, Homo Sapiens
ttggggtgaattggcgctatgtctggggacagcagcggccgcgggccagagggccggggccggggccgcgacccgcatcgggatcgcacccgctcccgctcccgctcgcggtcccctttgtcgcccaggtcccgccgcggctctgcgcgggagcgcagagaggccccagagcgcccgagcctggaggacacagagccgtcggattccggggacgagatgatggacccggccagcttggaggcggaggcacgactaaggcttgtgccgccagatccgccatcagtaccgggcgctcatcaactccgtccaacaaaaccgtgaggacatactgaatgccggtgacaaattaacagaggtccttgaagaggctaacactctgtttaatgaagtgtcccgagcaagagaagcagtcctggatgcccactttcttgttttggcttcagatttgggcaaagagaaagcaaagcagctgcgctcagacctgagctcctttgacatgttaagatatgttgaaactctactcacacatatgggtgtaaatccgctagaagctgaagaactcatccgtgatgaagatagtcctgattttgaattcatagtctatgactcctggaagataacaggcagaacagcagaaaacacctttaataaaacccatacattccactttctgttgggttcaatatacggagagtgccctgtgccaaagccacgagttgatcgtccaagaaaagttcctgtgatacaagaggagagggcaatgcctgcccagttaagaagaatggaagaatctcatcaagaagcaacagagaaagaagtagaaagaatcttgggattgttgcagacatattttcgagaagatcctgataccccaatgtccttctttgactttgtggttgatcctcattctttcccccgtacagtggaaaacatctttcatgtttccttcattatacgggatggttttgcaagaataagacttgaccaagaccgactgccagtaatagagcctgttagtattaatgaagaaaatgagggatttgaacataacacacaagttagaaatcaaggaattatagctttgagttaccgtgactgggaggagattgtgaagacctttgagatttcagagcctgtgattactccaagtcagaggcagcagaagccaagtgcttgatgctagctgaaggactcaaatggatagtgaagtccaaaacggaaagcggcatgtattgtacatattgtatgattcaacatttttaaaggcagattgtttttagtaaaatgtagcttttgatagttaataaatttgtcatggttgtctttgattaaaggaaactcaccgccatattcac

SEQ ID NO: 247309 - DNA, 576 bp, Homo Sapiens
gcccgccactcggggacccgcgccaaggttgtacggctccagccacaaagagggagcactttgtcaacaatttaaggtgcggtgaggggttggcacccggcgcgtctctactaacgccgcgccgggcctccgcccggcacctgcctccggtgccctccccccgcgcccggcgcagggcggggacagcggcccgtccgggcccgcgccgcccggaggcgccgccttacgttggacggagttgatgagcgcccggtactgatggcggatctggcggcacaggccttggtcggcctccgcctccaagctggccgggtccatcatctcgtccccggaatccgacggctctgtgtcctccaggctcgggcgctctggggcctctctgcgctcccgcgcagagccgcggcgggacctgggcgacaaaggggaccgcgagcgggagcgggagcgggtgcgatcccgatgcgggtcgcggccccggccccggccctctggcccgcggccgctgctgtccccagacatagcgccaattcaccgtgcaacttcggaacggcgtgaagggtcgcgccagaaacccaa

SEQ ID NO: 247310 - DNA, 1323 bp, Homo Sapiens
  misc_feature (530)..(584): n is a, c, g, or t
  misc_feature (1033)..(1033): n is a, c, g, or t
  misc_feature (1260)..(1260): n is a, c, g, or t
gtagtagactggggttaatgttttattaatgataacctacattcacactgcatttctaagatttacatccaaagagcatactgtatttacatgcaccggtcagcccaagataacaaattcaaaccatggctgcgttaagacaatggtttgttccaattaaattaaacagataatactcttatcaccccccttggacatgtacaaagagacccctctttctccccctcagggaaatataaaattgcattgataactgcactgatgagcaacaattacatttgaaacatttaaaacttgagagagaaacccaaatatgtttaagcactcacgtctacactcaaaatgccctgtgaactctagtgtaacacagattgctcagtggtcaacagtgcatgatctagctggctctgatagggactgacgccggctgctggcttttaacgggaagtgctattcttgcccagggcagagagagctacatccccgctgcctgcttgacggacagtcaggggcttttgttgttggtttgnnnnnnnnnnnnnnnnnnnnnnnnnnnnnnnnnnnnnnnnnnnnnnnnnnnnnnncactctgaaggagtcaggcccaactagaaccaagtggtcaaaaaaataaatacacaatttaaaacaatggacagctaagcttgtcatgacagacagtgggaatttcattccatgatgcttcatttttgcattaaatactgaagatgactcagtgcataattgctttgtggtccatgagacgctttcgtgaaggcactcctatctgaaggacaggctgggtgaacacctatcactgtcacttgagacttcttggctggtcattaaggtgaggcggcatactgtctccatcaccctgtgttgagtctttcccctcaccgggtgggaggagaaggccatcccttggggtcgtggagccactctctcctcaccacggtgggctgccctccccttcctcacttgctagtccccgcttggtggccgatgccctgccctccttgctgtcactttgngaaagagatcctcctgaggcacgtgtcatgttttattcttgagtgaattatctgaccatcacggcccttgctccccttttatgacatgtgcctgttatttcttttgatgcttatgatgacaagaaggcagtcccgagaggggagtctggcacagctgcccttgtgaaggaactggtgtttctgagggggagggggctggtggagtgtagcatatgcttatgtacggntatccatactcagtcaattgtgaagggaacagtatacccacaattccacccaaagactctaca

SEQ ID NO: 247311 - DNA, 1059 bp, Homo Sapiens
  misc_feature (593)..(593): n is a, c, g, or t
  misc_feature (756)..(756): n is a, c, g, or t
catcagaggatagcttattttctgcatggtgtcttttcaaagatagaatatttgaagcatgttttctagcgattgtgtggatgagggtgagctggctgaggcatcgctcaagctggggggtggtgtgtaagaagcacgtggagccacaagaggcacctcctatagtcagctaagggcttccctttctgcgcccagcttttgggtgaagggtgatttctattagacacatctgtgcttcagtcatagatgttaatagaggaagcagttttcctgctgcagattcctgaatagagttgctgaaagagtctacttctggactcaggggaagttgaaggccagtctgtgtagaaaggctgaggcaacggggaaagacctgacagctagttacatacgctttgacatagtactcccatgatggcttccagtgacacatgtgctgatagaattctaaacctctggaatttccctgctggcgacttctatggccgttgactgtacagggtaacctgatgccagatgctatgggcgtgatgagaactagagcattgcagcatggaggaaactgtgaggcaccagatcctgtgcttctgcangccattttctgaaaacccctgttaggaaggttggatttggcgtgacttgcttgagcaagagtcctggggaagagatttttgaggttaattttaacggtatatcccagagctaacagtggactccaactccgtctaagtcctgccaagtcagatgtacacctanaagtctcctctggtaaaggggttgggggcctgaaccttgtggaataaagggccaaacttgcccataaaagccaccccccctcacccctctggaaaaaaatttcccttttaatggcccccgaacctccctggtttggaaaaaaatgagataaaggggttggaaaatgggttcccccttcccttttggggcggttcccccaagttaaaaaagataggggccccctgggttccccccaaatggggtttataacctttcccaccctttttttgggaacacctaacccaataaaaattacaccctaaa

SEQ ID NO: 247312 - DNA, 1329 bp, Homo Sapiens
  misc_feature (990)..(990): n is a, c, g, or t
  misc_feature (1168)..(1168): n is a, c, g, or t
  misc_feature (1188)..(1188): n is a, c, g, or t
ttggcggcgtccggagggtgctggtttgttctcggtgaacggcgcgcggggtctctcctgagtgcgagctacgggaccttcgccatgccggggatggtactcttcggccggcgctgggccatcgccagcgacgacttggtcttcccagggttcttcgagctggtcgtgcgagtgctgtggtggattggcattctgacgttgtatctcatgcacagaggaaagctggactgtgctggtggagccttgctcagcagttacttgatcgtcctcatgattctcctggcagttgtcatatgtactgtgtcagccatcatgtgtgtcagcatgagaggaacgatttgtaaccctggaccgcggaagtctatgtctaagctgctttacatccgcctggcgctgttttttccagagatggtctgggcctctctgggggctgcctgggtggcagatggtgttcagtgcgacaggacagttgtaaacggcatcatcgcaaccgtcgtggtcagttggatcatcatcgctgccacagtggtttccattatcattgtctttgaccctcttggggggaaaatggctccatattcctctgccggccccagccacctggatagtcatgattcaagccagttacttaatggcctcaagacagcagctacaagcgtgtgggaaaccagaatcaagctcttgtgctgttgcattgggaaagacgaccatactcgggttgctttttcgagtacggcagagcttttctcaacctacttttcagacacagatctggtgcccagcgacattgcggcgggcctcgccctgcttcatcagcaacaggacaatatcaggaacaaccaagagcctgcccaggtggtctgccatgccccagggagctcccaggaagctgatctggatgcagaattagaaaactgccatcattacatgcagtttgcagcagcggcctatgggtggcccctctacatctacagaaaccccctcacgggnctgtgcaggattggtggtgactgctgcagaagcagaaccacagactatgacttggtccggaggcgatcagcttcaactgtcacttcggctccatcctgcacaccacagggctgcagtacagggacttcatccacgtcagcttccatggacaaggtttacggagctgccgtttttagtnggttctggatcacagggaangagtctgttgtggtcgctgtgagggggaccatgtctctgcaggatgtccttacagacctgtcagcggagagtgaggtgctggacgtggagtgtgaggtgcaggaccgcctggcacacaagggtatttctcaagccgcgcag

SEQ ID NO: 247313 - DNA, 463 bp, Homo Sapiens
aggtaatttaataaaataaattaaatttaggtgtaatggctggctgttacctccctttttaaagtaattgtgagctcacaacttggaatgcccccatttgttcaccctcttcaggagcagaattcaagaacaggaaatgtgcccagagcgtaggctgggaatgaatttgtaatttaacctttgtactctttgtaaacctctactgaagagttaagtataaaaattaattaagcagaaagtactctaaactcagctaataccttaagtaatacattttataaactatttatttatttggtaggtacagcttttttaaacacaaaaatagattagataaattccagcttggaacaagctagtgctggttcacaaggttgtgctcacccttcaattaaaatcaaaatgactacaagacttgccatcagctctcttcaggaccactgctgggtcagaatcagaaacc

SEQ ID NO: 247314 - DNA, 548 bp, Homo Sapiens
ttccctacctaaatggctgtgactctgatcggttattatcccctcataatttttgtaggaaataagtttgcttgtcttctgatgggtgctcaacacagtcacacaggttcctaaagtaaccatttaatctgaactaggtccttaaacggcaacttttataccaggctctcttagatctattctcagttcatatgaaaactactcttccgattgttgcttgtgtctcaacagtagtatctgcttccatccttatcaacagagcatcctgtggagaaacctaagtcatttgcccatgagtaggcacacgagcccccgagcccacgcaggcacaccagctctctctgggactaacgcgcctgactcgacgagcaccaccctttcagttccactgggaccaatccagtgggcagcgccctccccagggtacattccagaacataaacttggtacccatttactttatcgcctcaacgaagttaatttcctcctcaagatctacctttagatggattttcttattggtcccttttcttttaacagcccttccc

SEQ ID NO: 247315 - DNA, 709 bp, Homo Sapiens
tcagtcgcgtcaggagcttcctcaaatgaaggcatgagaaactaaagaaagcaccaccacaggagaaaaaggaatgaattgatatgtaattaaggatgtatggctgcttatgaattaaaaatcagtaaatctgtttttgtatttaatactgaagttaaatttcatgtgttctatctactgaagacatgtgagtcattttcatgccacgcatcccaaccactgcaagatgaataccccctctgtctccctggtgctttctggactccgggaatcattttccatttctaagtcctaaagtctttgaacatttgagaaatgaaaagcactgaggcaaagagctagaaactctggccttaaatctaactcttgagttaagataaaacctgaatctcaacagctaacacagcctgtggaatgagtttatggagaaggagacaagtgggacagtgagaagcgtctagccacagaaaagatggtgctacgcccgagcaagagccctgagcgctgccatggctccaggtccgccactaaccaaataaatgcatcacaatgaggcactcaccttttctgggcctcaaataatataaagggttgggccagacaagtgattgctaagttctctttccactgtgagattctatgagctagtgattaataataacagaaagaagactgaaatagtaaactagtggccaggcgcagtagctca

SEQ ID NO: 247316 - DNA, 1175 bp, Homo Sapiens
  misc_feature (952)..(989): n is a, c, g, or t
  misc_feature (1027)..(1027): n is a, c, g, or t
  misc_feature (1097)..(1097): n is a, c, g, or t
  misc_feature (1130)..(1130): n is a, c, g, or t
  misc_feature (1145)..(1145): n is a, c, g, or t
  misc_feature (1153)..(1153): n is a, c, g, or t
acctataaaaggcaactttgtacaaaaaagttggcgccaggcttgcctggctcttgctctcccaaggcagaggagatcgttgggtttcaaggccccgcgggcatttctcgccggccctgcggagagagttcttcactaccacaaccaaggagggatatgataggcggccagttaatttcctttagaacaaaggaaattaacttttgatacccatgcattggttcaggacttggaaactcatggatttgacaaaacacaagcagaaacaattgtatcagcgttaactgctttatcaaatgtcagcctggatactatctataaagagatggtcactcaagctcaacaggaaataacagtacaacagctaatggctcatttggatgctatcaggaaagacatggtcatcctagagaaaagtgaatttgcaaatctgagagcagagaatgagaaaatgaaaattgaattagaccaagttaagcaacaactaatgcatgaaaccagtcgaatcagagcagataataaactggatatcaacttagaaaggagcagagtaacagatatgtttacagatcaaagaaaagcaacttatggaaacaactacagaatttacaaaaaaggatactcaaaaccaaaagtattatttcagagaccagtaataaaaattgacgctgaaattgcttccttaaaaacactgatggaatctaacaaacttgagacaattcgttatcttgcagcttcggtgtttacttgccctggcaatagcattgggattttatagattctggaagtagtattaatgctcatcctgctgtggttgttggcttcttagaacaccaaaccgggagagatttactttgaacattgtcagttgcagcaaaaatttactacacaagattattcgaagtgtatacgggactaaaagaggaagtgttttagaatgagaagagatacnnnnnnnnnnnnnnnnnnnnnnnnnnnnnnnnnnnnnnctttattatattgaaaagctgtcacttcagacctgggntttgaggataggaaggagcctttttgtccttttcgatagtttaataggaattggaacccagagttttccntatgtttgccttggaaccagttgtgttaaatcntaccgggtttttgtnggggtttnggttgatttttgttaaaccctt

SEQ ID NO: 247317 - DNA, 614 bp, Homo Sapiens
gaaccccatcctataagttccatcctgtgagtccgtcctaaagggccgtgaataaagtcagagcatcttttccctgaagacagaaagacctacacaggctctaaggcacccaaaggggtctaaggttatacaatcaactagctgaagtgaaacaacaaaaggaagaaaaaacaaaacaagaagcttatgcccaaaacagagcaagggcaaaagaattccataagaaaacactagagaaacttcgagccaaaaatacatgctgactttctagaaatagtgtaaaggtttttttaattgtgtatatgtagcattagacaaaattatttaaagtcaataaattgttattcgaggaattccatgttgtgatttcttccactgtccatcaaggtcactttagatcctctaaagagctggagtcaaaagatttatcttcaagtttgccctgatgaaatttgacaagtttccaaccagaagaagcttcataagaaaaaaacagatatgaaggctaaggtcctctttctgtctcggattccattttggatgcgaatggaaattggatgtgtccttagactcctcgtggccgtggcagtttatcaggctttccttgctttcag

SEQ ID NO: 247318 - DNA, 1241 bp, Homo Sapiens
  misc_feature (253)..(273): n is a, c, g, or t
gtgggtgttccatgattcatctctgtgttcatttcaggaagataggcctgctgttgctccatgaccagtggtctcctttggtagcttgattcgttatttagttagttgaaaaaagtatagtagaatatgttctgcctggtattattggccaacacataggggccgtcaaaccaaaaattgccgccggctaaaaatgaaaacacaaactatgtttcggtggaggtaaaaacccttcctgtttggagccaacgcnnnnnnnnnnnnnnnnnnnnnggcaactaatcgccccgaataaaatcaaacataactggtattcaccacagcaatgtctagataaatgacccacatagcacaaaactttgtcattcacaatcacatacagttaagttgcttttccctcagttacataatagttgtcttcaaacaatctccttttagaaaactatcacattagttaaacctatttattcttactatgaagttattaacttcatttatataggccacacaggtttaattggcacactttacttaagaataagacaaaataagtcactcttctttaaaaaaaattatggtcatctgttttcaaagaataatcccagatacttaattaattaaagcaaattttctacgatcagcagtgagctttttaaatgatcactaagtgttcacctgaagattatcaatgctatatgaagtgtaaacttgaaaatttgtgtccattttataataagatacaatttgcactgaagagtttttaaaaagataacctacacacatacagttaatttgcctcaaacaacttcttagaaatacagtataaacatttaagaaccacgacaaagttgtggttcaaacttcaacaaagattttcttgaaacccagtataaagattactggctcaagaccatatcccaaagtgaaatcagcaggagatttgattgtaagactctaccttttaaaaaaagagcacacttggttatacatgggttttaaacttgagctacagttatgctacaaatccccccaccctcccaatctaaaatcagtcatgtggagatatgtacattctctgagcattgtttagagtccttggttttccagctttgatggagatctagaaggcgttcagaagtccgtgtgcttacattcagagcaggatgaactttacaaattccactttcctccattagtgacaggccacagatcccaaagtatgcatgcaaagcatctggatg

SEQ ID NO: 247319 - DNA, 1234 bp, Homo Sapiens
  misc_feature (1033)..(1033): n is a, c, g, or t
  misc_feature (1161)..(1161): n is a, c, g, or t
  misc_feature (1187)..(1187): n is a, c, g, or t
  misc_feature (1207)..(1207): n is a, c, g, or t
ggaaatgttatgtctgactaaatttataagatatgtattggttaaaaccatgccatgttggtgcctctttccattagagcttttatgtcgtaatgaatttgactaaaattatcttagactttcattatcccaggccaagaactcactggcatttgtttcaaggtaactgaacaagaagctgtttggaattggcagaagtcagatgaaaaaccaatcttacatgccccttcttcctctcttgagctgttgttgatattcaaattaaatacacattgtttctctctgtagatacctatgtacttaatagattctagttagtaaactgcacatgcccaataactttgaggaaatttagtgaaaatgaagaaaaagagaaaatatttctctttagacctgaggttatgtttaggctggcccatagaaacaggtccagataaatttctaaaaaagcaaagtagatatttatgaatagtattcaatgcctaggattaacatctaaaatgactcagtagtactgctagccagccaataaaatataaactccatttgtcttagttatatagaactgtgtttccagcttagaaaaagtcaaaccaatgacttttagaacaatctactctcattttttattcagcctctagaacatggaagctttaaaagtgaattggctaaataggcaagaccttctgaaagttaacatcttaatgattaaaaacagtaagtacaggttagtaattacctgggtaattaattgaagccttattctgttttcataagacttacttgcttaattcaagcaaaacaaattttggtctaaattacctagataattatgacagctttttacttgagaagtgtagaacttgcttcaggctacaaaactgtattattcctaaatggataaccaggtaggattctaactggcattattgtatgcttaagattgatttaacaacagctattcccagtaaggaaattttaaaaatcagatccagttacatgtattatgatttttctaccttatggactattntggagggataagctattaagactaagactatgaatgagagttggggaaggagcaggaagggaggaacctgcacaccacattgggaacctgcacaccacattaacacaaagggcaatcttctgggctcnggacttgtttcttttacttactgttncttaaaaggaaaatgttccnttctggctggcagcttaactaggcttc

SEQ ID NO: 247320 - DNA, 1161 bp, Homo Sapiens
  misc_feature (1066)..(1066): n is a, c, g, or t
  misc_feature (1100)..(1100): n is a, c, g, or t
  misc_feature (1114)..(1114): n is a, c, g, or t
  misc_feature (1145)..(1145): n is a, c, g, or t
catattctctccgggccttatggagaatgaggattcagccttgacttcttgcccaaggcctgctactggggtagcaactgacagctcagaaaggagctgagctccctctgccctgccagttgtcagtcaggcagggagggagtggctgtgttggtttggggaactaatttccaaggacggctgcccgtggacaccaggtggactggttcactaatcaagtcagccatattgttctctggctaagtttggttccagccaacgtcatctgctcttcggttcctcactgccttcttgggatactaagacttgaattttttggggactattaagggtgttagtcttggagaagacacagcctcaccttctcacttgctgtgggtgaggggccatttaagtggactgggagacagtgcgcagtttgtatataattccctttcttgtggaacagaagactgaggcctgcaggttccgatgtgtctccatgggctgtgctcccctcttcctactgtcagtttctgaaacttctgactggcctcccagttatgcctcctcctcaagttcctgggcccgtggatgttaaagctgctcgattcccagggatctcggctgccttttcctctatcttgagccctataaatgcccacgggaacccccaccaccagcctcttgaagtgggtccacagctcctgtccctggaacatcctgtcagtttggtcataaaccctgagccagatgaaatgagccaccgtgaacagacatctgccatgcccccaggtgggcttcggtggccctacccggtaccagttctctctgagaaactggagatgtcttgttagcataagtgtcttcattcccacctggagggtttgggagaggagcaaagcagttgaaaactagttaatgagctacaagagtcaaatagtcctctgaatggagcccccatcacaaaacagtgcccaggaggctggctcttcaagctacccatgcccagcgccctaaagcagcaccagatgctttgggaattgggggtgaaacacccacatgggcagcctgctaggcagcagtngactttgatttctgggtcttaaagagtccctcantttcagccccaggngctttgggtggggtttaggcagtttttgtcnttaaccttttttagtt

SEQ ID NO: 247321 - DNA, 712 bp, Homo Sapiens
  misc_feature (192)..(486): n is a, c, g, or t
ggcccatgaggagtccattacttcctttcttccttcatattttacaggcagatgcttttcttataatctaattacatcttttcattgttatatattacaaaccatcacacttagaaatacttccaggaaatgcttttttgaagtgtgaattaataagaaatggggtaaatagaaaagaaatttattgctgannnnnnnnnnnnnnnnnnnnnnnnnnnnnnnnnnnnnnnnnnnnnnnnnnnnnnnnnnnnnnnnnnnnnnnnnnnnnnnnnnnnnnnnnnnnnnnnnnnnnnnnnnnnnnnnnnnnnnnnnnnnnnnnnnnnnnnnnnnnnnnnnnnnnnnnnnnnnnnnnnnnnnnnnnnnnnnnnnnnnnnnnnnnnnnnnnnnnnnnnnnnnnnnnnnnnnnnnnnnnnnnnnnnnnnnnnnnnnnnnnnnnnnnnnnnnnnnnnnnnnnnnnnnnnnnnnnnnnnnnnnnnnnnnnnnnnngaaatttattgctgatcacaaggacagacagttttttcccgaccatactcatcaaagatttacgtttgtatattcagtaactagtgcattcactagagcaggtgcacggtgacggtcttttaacagttttcaactgaacagtttcttctggatctacagaccacaaattctcctctctccccaaccctaaaaaacctgcgaaattctaggggcttccctgtccatc

SEQ ID NO: 247322 - DNA, 987 bp, Homo Sapiens
  misc_feature (903)..(903): n is a, c, g, or t
ttggccgagagctcactcccttccaccccacttagcctcctggtttcctgtggtggctctgctctcacaactcatgcttttcctcccattggagggcctattccttcacgttttcctgcagccaacaaatatttacccagtagtgctcgtgtgcaaggcagtgtgggaatctctatatatccagccacggataaggcaacatacctctccacctggagcgcacattctggcaggagagaaagacctaaataagcaatagatgattagttcttcaataacagttgtgacaaggtctattgataatattttgtaatcactaatattcatataaaccgtgcaccaccattgatttgagtgcattaactcacacttcatgagcaggcactgccgtcatctcattttatagatgaggaaactgaggcacagaaaggctgagagacctggcctagtgacagagccaggattcaaagccatagatcatggtcctgggttatgtaggttattactgcatctgttcaggggagatggggtactgtgaggctcgtcatgggaagcctggcttggtctcaggtcagggaaggcagatgtgaggaaatgacatttatggtaaagtctgagggttgagtgggtaggttgggaagaacattccagaaagaagcacatgaactacagcctggaggtggaggacctaaaaggaagcccgcatggctggatcacggagtggccattgagggaggcgagctggagggctgcagcttcttgtattggcagtgctgacctcgcacagtccttgggctccagtgacttcactcagtgtttatctaacatgagtgagtgaatggtgtttgctgtttttttggcaaaggtcccaggggttgtcgggtacacaggtcctgtctttgnccactgagcaacctgctgaagatgtctccagagaccttctgcaggtaccgcaggcatccccatctgctgacggccgtgtcccga

SEQ ID NO: 247323 - DNA, 1538 bp, Homo Sapiens
ttggctagcttaacgatggccacggaagtggcagcgagagttacatccactgggccacaccgtccacaggatcttgccctcactgagccgtctgggagagcccgtgagcttgaggacctgcagcccccagaggccctggtggagaggcaggggcagtttctgggcagtgagacaagcccagccccagaaaggggcgggccccgcgatggagaaccccctgggaagatggggaaaggatatctgccctgtggcatgccgggctctggggagcctgaagtgggcaaaaggccagaggagacgactgtgagcgtgcaaagcgcagagtcctctgattccctgagctggtccaggctgcccagggccctggcctccgtaggccctgaggaggcccgaagtggggcccccgtgggcggggggcgttggcagctctccgacagagtggagggagggtccccaacgctgggcttgcttgggggcagcccctcagcacagccggggaccgggaatgtggaggcgggaattccttctggcagaatgctggagcctttgccctgttgggacgctgcgaaagatctgaaagaacctcagtgccctcctggggacagggtgggtgtgcagcctgggaactccagggtttggcagggcaccatggagaaagccggtttggcttggacgcgtggcacaggggtgcaatcagaggggacttgggaaagccagcggcaggacagtgatgccctcccaagtccggagctgctaccccaagatcacgacaagcctttcctgaggaaacctgcagccccagcaacatacctgctgtcatcattacagacatgggcacccaggaggatgggggccttggaggagacgcaggaagccctcggggcaacctgcccctgaggaaactgtcctcttcctcggcctcctccacgggcttctcctcatcctacgaagactcagaggaggacatctccagtgaccctgagcgcaccctggaccccaactcagccttcctgcataccctggaccagcagaaacctagagtgagcaaatcatggaggaagataaaaaacatggtgcactggtctcccttcgtcatgtccttcaagaagaagtacccctggatccagctggcaggacacgcagggagtttcaaggcagctgccaatggcaggatcctgaagaagcactgtgagtcagagcagcgctgcctggaccggctgatggtggatgtgctgaggcccttcgtacctgcctaccatggggatgtggtgaaggacggggagcgctaacaaccagatggacgacctgctgggccgacttcgactcgccctgtgtgatggactgcaagatgggaatcaggacctacctggaggaggagctcacgaaggcccggaagaagcccagcctgcggaaggacatgtaccagaagatgatcgaggtggaccccgaggccccaccgaggaggaaaaaagcacagcgggctgtgaccaagccacggtacatgcagtggcgggagaccatcagctccacggcaccct

SEQ ID NO: 247324 - DNA, 872 bp, Homo Sapiens
  misc_feature (739)..(739): n is a, c, g, or t
aatggagggttggttagattcctgacagtttgccagccaggccccacctacagcgtctgtcgaacaaacagaggtctggtggttttccctactgtcctcccactcgagagttcacttctggttgggagacaggattcctagcacctccggtgtcaaaaggctgtcatggggttgtgccaattaattaccaaacattgagcctgcaggctttgagtgggagtgttgcccccaggagccttatctcagccaattacctttcttgacagtaggagcggcttccctctcccattccctcttcactcccttttcttcctttcccctgtcttcatgccactgctttcccatgcttctttcgggttgtaggggagactgactgcctgctcaaggacactccctgctgggcataggatgtgcctgcaaaaagttccctgagcctgtaagcactccaggtggggaagtggacaggagccattggtcataaccagacagaatttggaaacattttcataaagctccatggagagttttaaagaaacatatgtagcatgattttgtaggagaggaaaaagattatttaaataggatttaaatcatgcaacaacgagagtatcacagccaggatgacccttgggtcccattcctaagacatggttactttattttccccttgttaagacataggaagacttaattttttaacggtcagtgtccagttgaaggcagaacactaatcagattntcagggcccacaacttgggggactagaaccacctttatgttgaggggaactctgccaacctggcgtgcaaccccacagcctaaaagtaaatttcaatggacaactactggccctggattactcccctttagga

SEQ ID NO: 247325 - DNA, 891 bp, Homo Sapiens
ttggatttgcttgtggatcactttatggaactttaccatcaatctgtggtttaccggaagcaagctgccatgatccttaatgaactggttacaggggctgctgggctggaggttgaggatcttcacgaaaaacatattaaaacaaccccagaagatctgagagagattgtgacatcatatccttgaagaatacacaagtcaagaaaattggtatttggttatctgtcttgaaactgaggaaatgggagaggagctgatgatggagcacccaggcctccaagtcatcacgtctggtgaacacacctgccaagttacatcttttctagccttctcaaagccaagtcccactatttgctccatgaacagtaacatctggcaaatatgcattcagttggaaggaattggccagtttgcatatgcactaggaaaagacttctgtttgctcttgatgtcagccctttatccagtactggagaaggctggagcccaaaccctactcattagtcaggtggctaccagcaccatgatggacgtttgccgtgcttgtggctacgactccctgcagcacctgatcaatcaaaattcagactatttagtgaatgggatctctttaaatctgcgtcatctggctctgcatcctcataccccaaaggtcctggaagtcatgctgcggaactcagatgctaacctgcttcctttggtggcagatgtggttcaagatgtcttggccaccctggaccaattttacgataagagagctgcttcctttgtcagcgttctgcatgctctgatggcagcattagctcagtggttcccagacacaggtaatcttgggcacctccaagagcaaagtttacgagaagagggaagtcatttgaaccaaagaccagc

SEQ ID NO: 247326 - DNA, 840 bp, Homo Sapiens
  misc_feature (123)..(139): n is a, c, g, or t
acattcaagggaactttgtacaaaaaagttgggaatgttacaaaccttcacaaagtaaaaatatttttatatcagatagattcttctgtttcaatccataaaaccagggtttggatcattttnnnnnnnnnnnnnnnnntaatttattggaatcattagggaggacctgatagaataaaatgacaagctgaccaaataggccttagaagggagaggtgcctgggcagttacaaggacctaggtagcaggggtgacttggccacagtcattttctttacttgatttaaggaggttaaattacagtgagagagttgcacttatttagtttgcataccgtactcaactcttagctagcatagggcaggttccttagttgaaaaatttccacaaaacatgatgtaaagtggaaagatcagttcccccaaagaatatcagttaccaaagtaggatgaaaggatgttgggtagatcaaaacaacaaatgtccattacagcaattaacaaaagttagggagtggggaagtctgagtgctaatatggatttcaaaacaactttaaaaatggcttcaaacattttatgctttttgtaatttagtcattttaatattagataaatcttcctgtaactgaaagttcttgagttaaagaaaaatattcggtagttcagctcttccttcaattttattagttgctttttctttttgttcaagtgaaataaacataaaaaataattttaaaatattatgtatcatatccttcgatttaacataattctatctagctgttcttatattttctctgatatatttttaaaagcttcctgggaaaatattaacccttg

SEQ ID NO: 247327 - DNA, 1079 bp, Homo Sapiens
gccccgggccgaggcgatggcgccctgggcgctcctcagccctggggtcctggtgcggaccgggcacaccgtgctgacctggggaatcacgctggtgctcttcctgcacgataccgataaaagtgcagatgaactgctggccacacacagccactcatggaaccaacatctccaggcctttgctcagccaggaacacacttccccacctccaactgcaccccaaccccacccactcctgttctacccggcccagcctcactgtgctctccggcctctccagagctgcggcaatgggaggagcagggggagctgctcctgcccctcaccttcctgctcctggtgctgggctccctgctgctctacctcgctgtgtcactcatggaccctggctacgtgaatgtgcagccccagcctcaggaggagctcaaagaggagcagacagccatggttcctccagccatccctcttcggcgctgcagatactgcctggtgctgcagcccctgagggctcggcactgccgtgagtgccgccgttgcgtccgccgctacgaccaccactgcccctggatggagaactgtgtgggagagcagcaaccacccactctttgtggtctacctggcgctgcagctggtggtgcttctgtggggcctgtacctggcatggtcaggcctccggttcttccagccctggggtctgtggttgcggtccagcgggctcctgttcgccaccttcctgctgctgtccctcttctcgttggtggccagcctgctcctcgtctcgcacctctacctggtggccagcaacaccaccacctgggaattcatctcctcacaccgcatcgcctatctccgccagcgccccagcaaccccttcgaccgaggcctgacccgcatcctggcccacttccttctgtggatggccctcagggtcctgggagaccctctggggctgaggaggaaggaaaagggcaccaaccccacctggtttaaggttggcttggagggcccggcttaccgtcttgtggccggaaaacccacggggggcctgtcccccagctggggggggagcccgctcaaa

SEQ ID NO: 247328 - DNA, 1026 bp, Homo Sapiens
atggcaacacagatttattgggagaaagacctgcggagagggggtaccagctagtgccagagcccccttcccgcttacaggctggaccagttacagtcccgggcaggagaggtctgggattgttgtgaaaatggggtgggggcggtgtgtttggctgctgataatgaaggaatttagtgcagccaggggttaggcctggggacctgcctgacaggatgtttctcacagctcaggcccctggtggaatttttccactctgaccagtttgtaaaatggtaggggtctgcaaaatagtgcagtttgggctaacattcttatttcttactttagtataaaaaggaaaaagggcgtcgttgatcatctggctgcttcctgctggataggggcgttgtgattagggcctgggttctggagcttccgaatggtttcctcgtaggctctggtattagacgtggcaaaggtgaaatatattatcaatgtgtttttgcatgcttgcctggataaaacaattcagcctttgggaaatgaagcgggatacaaggttaaatatgcatggcccaatcattagtaacaggaagaggaagatcaggggtcctaggaagggggcaacccagggtatccatcttagaagggatgatccttgccaccaggagtcagcgacttgatgtcaaagctctgcagccctgtcatgaagcctacgaactgcgaaaagaacaatgccagattcattaacacagaaacagcattcttcctggaggtatatgcaggtaccccctttctcagtggttaggaggtccaggactctccagttttgaaggatgactcccacgaggaagtctaattgtcgttggagactggtaatggaagtgtgcatatcttctacggtgttagaaagggttgtgaatagtgtttggtatgaggtgattgaggtggttatgcctgctattccagtgccaagtgcagcagtgatgcctaatcctgttagcagggtgatgagatgtagagcccagttatttcttatgccaa

SEQ ID NO: 247329 - DNA, 478 bp, Homo Sapiens
  misc_feature (351)..(351): n is a, c, g, or t
acagtgctcacgccactaacagagaaggattatgaggggttgaagagggtgctccgttccttacaggcccataagatggcctggcctttccttgaaccagtagaccctaatgatgcaccagattattatggtgttattaaggaacctatgtaccttgccaccatggaagaaagagtacaaagacgatattatgaaaagctgacggaatttgtggcagatatgaccaaaatttttgataactgtcgttactacaatccaagtgactccccattttaccagtgtgcagaagttctcgaatcattctttgtacagaaattgaaaggcttcaaagctagcaggtcttcattagcnaccaaacttgcagtcttacagcttcttttaaagtttcagcgtttttaacctaaaccttaaagcaccagccaagattcttggtttgtctttgagctgtttttaaattttaagggagcccggtgttttt

SEQ ID NO: 247330 - DNA, 484 bp, Homo Sapiens; identical to SEQ ID NO: 174582

SEQ ID NO: 247331 - DNA, 720 bp, Homo Sapiens
ttggatttctccattttgtggaccaagccatcctgagggcatggacattgtctctgaggaaattggggccacccttaagataccaagaaaagctcctgcccatggtcccactggaaatggactctgctgagcaaagccaccagttgaagagaacagaatccacacctgcattgaatacctgtttctccatgtgtatcgtctctgagattaccttcttgccctttccaacaccttagtgattcctcaatttctcccccattgggaaggccatagggcattaactgaaggaactgacttctctccttttcctgtacctttaacctttagtctgtcaaggaaaacccttaggacctctgaatcaagaggactgagtttgtgggtgaaccttgaaggtgctctttctgctacaagggccctgggagatagcatggacgtgcattgagaagccagcctcagaccttagcttgaagcagcttgaggccagacctactgtagcctcagcatcttgctaggaggcatggaagtgatctatcctgccaggaggcctcagagtgatctgtcctgccaggaggtgtgagagtgatctgtcctgtgaggcgtttaggggctttcaggaatttagtaaaaaggtggagtatgcctttccagtatcttccatcttcctttgtatacttgtccttcctcccatttcctccctttggcccgaggtaggaggatgga

SEQ ID NO: 247332 - DNA, 1328 bp, Homo Sapiens
ttggctgtgttcatggagcttctttgaggctctaagattgattttaccatcagacttctctaatacctgttcttcaaccatattggttactttgacataggaatttacttcttttctttgaatggaaaacactttaaaaaataataacaaccattattataaactaatatatgtgagagtacttagttgatacaaaaaggagttttagtagacagtattatactatatttgaaaatcaaggtgaattttatgcaacttaaaatgtttacaagctgccgtgcaatctactgtttgtgagtgtccaagtattatgaggaaaagtgtctatacaatcacagagttatgtttcctcacaaagttctttacaaagagtgaaatatgtttttgtacctctcggtttcagttagaggcatattttgtgcaatatttatgttaatgtgcctatacattatgaatgaattatttcagtcatacattgcctaaatcataagtttatgatgcttgggaaagaatcaacagttaaaacttcataaagttctaatgtctgtgttccaaaatacatcacattattaggatgtagggagataagtatgtgtgctccctagggtggcaatttctagttactagaccacctctatttttagcatttggcatcctcatgatacttttataaatatgacattaataggaaagcaataatttcattttacagatagaataacagatttgcctgcattcactgaaagagtgcaaagactgggtccttgtgaattcaactgactctcccaaattgtattaattacctgttcttgccttttattttctgaacttgctgcttttgcattcttttgagttcaaagacagttactttaaatccatttttaaaccctcggggtagaaatcataccactgttaatcagccacattatttggtctaaggttttttgtttatcattctgaaactgagtttatctaatacattgatgaattatttcaaaggtatttttatagttcaaatcggttcacttttaccctgatacgtataaattactaggaatgaccttcagatagcgtttagcatctgtaaccaatctgacaataatgtgttcatcaggtacctgtggattaaatcatatactgggcgtatttaagctgaatgtcagtctggaaaataaatttactatattaactgaaataccactctttgtgtaatattttgtcatatgtttaagaaaaagctaaagagaatggaaatcctatgacaataactatgacaataactatgacaagtctttcttcaaagtgcatgcagtcttttgcagtacctc

SEQ ID NO: 247333 - DNA, 951 bp, Homo Sapiens
actctgatttagaagtcagtttaaggaaaagtaatagtcattagatagcacatcactaccagaattttaaacaactctatatgaacagaaatacccacaaaatggcaaatattgtcaacataagccaatttaatttagggaaacttccagcatagggcttctctgattctgtgtttaatctcagtccaaattttgtgaagatcctcagcaaataaatggatgtgggaaatgtgtgattgggaaagaggcagcttttaaaaatgtgtctggcctttgaccacgcaatttcactttccagtatttattctaggaaaatactcatactattgcaaagtttatatataaagatagttataactgcattgtttatcatttacaaaaagaaaacatctgaaagcccaacaagacggaactggttattccacattggcacattcctacaagggaatgtcattaggaagaatgatgaagataataaatatttattgatgagaaagatatttgaacataccatttttttaaaaaagaaatggaaaaatcttataaaccattcaaggaaagtagctttggattcagcctgaagggttgagatctagcttagtctcttaaccaacttgggaactcaggcaattaatgtgatctccctgaacttgtttcctgcctgtaaacggggcacaataacacctatcttgtgaagttggaaggattaagagagattaacacatctaaaggcctcagcacagcccagtaggtgatgattgctcagtagctgggtgcttagatgagacatggactgtgatagtatttttacccgtttataagcctggaaacattctggaaattcatacaccagcagtggagttttctgactgatagaatcatgggtgattattaatattttcttatttttctacaaggaatatctcctgcttatctaagatggtatagttt

SEQ ID NO: 247334 - DNA, 1099 bp, Homo Sapiens
ttgggttctttctgggtctgtaccgggcactctacctggctaactggatcaggcggtaccagactgagaatttctatgaccaaattgcagtcgtgtctggagtagtacaaaccatcttctactgtgacttcttctacttgtatgtgaccaaagtccttaagggaaagaagttaagtcttccaatgccaatctgaggaccttcagagacagtctacgccttaacaagcacatgaaggaaactattttgaatgttctctttggcaacttatccataatttgggatcaaatgttaaaaccagaaaagtgtttagtgtggatttcagcaaaacctgatcatcccacccagaagaccttctcatcaatagatcgcccttaaagacccattgtaaggtcataaaaaacctcggccaactgcacaaagatggtgcctcactgcaacaagaaaccttaaggtgtcttaccgacgaaataaaaaacataaatgattgttctccaaggcctgagggcaagactcatgatgagcaagtcaaccccaatctggaacaatgtccctcctcttagaatgtcccaactaaagaccagttaaaatattagggtacgttcttgtgaatttccactttccaggtagatgaccaaatttaggtggtcaagatataaaggtgtcagctagttttaagtgtgaaaacttatttcactttcacactgccttcaggccagaagcaaaccaaatttaccaggtttggctggaggagttttgtgactcatctttttactggtttgaattttttcaaaccagtggctgatacctgccttgtacttagtaccttaataccaataacctaatggtacttaggcgagtaccatttgcacaatcactgttttacttatgagcagatacagatatatccaaacccttacctactaggtatcctgctagggttttcaattccaattcttgtattaagttttttcctttcagttttaggtgcgaaagtaatcagtcaatccaatatcccccatctttgtcttgaaacaaaaactgttttaagacgtctacgttgaattattcagagaattaagcaataaaagctcacacctt

SEQ ID NO: 247335 - DNA, 455 bp, Homo Sapiens
agtaaatgaccaactctcaatggttgggaaaatgtttttggggaatttccttagtgaaagcctactagaagatttttgcgcttggaatagagcacacggggaatggggtaggtaaaagaaaagtcatgaagtgccagaagtacaaacgagcattataattcctcttggtacagtggagcatgcccccgttaactgggtttccatctatctgcatggctattccccaagcgtcacttagttagctggagagaacagaccaatattcaggaattctgaacagaattcaccctgaaacttatctactgtgtcaagaagtagctgggcatactaagatttaaacaagagttcatttcagacaccaggcacttagaaacacccaacctgcttttagatgcttagcttagatgtctttcttggaatggctgcgctaacacacactgacacggcctaagccc

SEQ ID NO: 247336 - DNA, 747 bp, Homo Sapiens
catccccaaaggctctctgacacacctcccagacgctaatgcccctcacttggaggccaaagggaacctgccacatcaaggacgcgtgcccagcgctgtgtcttcactgaccagaggaccttctcaagtactatcaccaggtgactcgtgctgtgcctaggggatgatccgcaactgctgaaggttgcactccaggacttgcagacgaactccaagattggggcactcctgccttactttgtttatgtggtcagtggggtgaaatctgtaagccatgacctggagcaactgcaccggctgctgcaggtggcacggagcctatttcgtaatccgcacctgtgcttggggccctatgtccgctgtctggtgggcagtgtcctctactgtgtcctggagccactggctgcctccatcaaccccctgaatgaccactggactctgcgggatggggctgccctcctgctcagccacatcttctggactcatggggaccttgtaagtggcctctatcagcatatcctgctatccctgcagaagatcctggcagatcctgtgcggccgctctgctgccactatggagccgtggtggggctgcatgctcttggctggaaggcagtagaacgagtcctgtacccacacctgtccacctactggacaaacttgcagcctgtgctggatgattattcagtatctaatgcccagtcaaagcagatggacacgagtctatgaggccattcactcatccga

SEQ ID NO: 247337 - DNA, 937 bp, Homo Sapiens
ttggctacgacatgtcgggggacagagagctgaagagcagcaaggctcctgcctacgtccgggactgcgtggaagccctgaccacgtctgaggacatagagcgctgggaggcagccctgcgggcccttgagggcctggtctacaggagccccacagccactcgggaggtgagcgtggagctggccaaggtgcttctgcatctggaggagaagacctgtgtggtgggatttgcagggctgcgccagagagccctggtggccgtcacggtcacagacccggccccggtggccgactatctgacctcacagttctatgccctcaactacagcctccggcagcgcatggacatcctggatgtgctgactctggctgcccaggagctgtctaggcctgggtgcctcgggaggactccccaacctggctccccaagtcccaacaccccgtgcctgccagaggcagccgtctctcagcctggcagtgccgtggcgtctgactggcgggtggtggtggaggagcggatcagaagcaagacccatcggctctccaagggtggcccgaggcagggcccggcaggcagccccagcagattcaactccgtggccggccacttcttcttccccctccttcagcgctttgacagggagcgtcccgcaagattcctctgtggttgagctttgccatgaggcaccaggcatctgctccgatgctgggcttgtggcatggccggcagtgccgcccgcacgtgcccgacgccatcacctgctgggccctgctcgcctcctcctgcctcagccggcgctgcactggccccacgttcagggcgtgaggctctcgagatggcagagaagtgtggggcctgggttgtgctgcagcaggggtgggggtctcggctttgggaactcctgggcccatgtggacttgtgccagacagccctgc

SEQ ID NO: 247338 - DNA, 1024 bp, Homo Sapiens
  misc_feature (143)..(166): n is a, c, g, or t
ttggggccgcacaactttatacaagaaagttggggaatcttcttcctgtgtggcaggaggctgcggctgcctgtgacctgatgagctcatgttggctggtcccatgtgtgaaagggactctctcggggaaaccaaggcccagnnnnnnnnnnnnnnnnnnnnnnnnaggtgctagagagccaggcagagctggggccacagcgtgtctggagaagccaggtctgagcagagcagctgttgaatcccagacgtggccacctgtggcttgcagcccttctccccgcgcttgggactctgacatcttaaggctgcacggtcgtgtccttgtctgggtgaggccatgtctgtgatccaaggttcctggaactgacacaggaaggggctgtgaaccctaagtgggtgtcatctcctccgaccgaggcttctcaccctggagatggcagttactcctggccatggttgctgagcatgggcagaccagtggaggccaccctactgtgttatctgcgccttcgatgaagtgagacccttggggagaacgggctgtggatgaaggagtggactgcagccttggcctagccactgggctgggatcttctgggtcatgtgactgtgtatccaggagcagaaacttgtattctcaggattcaggatctacccagcaccaaagatgtattttcaggagaacagacctagaaatgggcctgtctggcatttcagagtcaggcaaagcaggcagggccagggagcttctgtgggtctacacaagaaggttcctgtgagggctatcagttgttgccttctagcttgctggtaactttggcgcctccgccaagccctgccagactcccctggctgtgatggcattctgtgccatcctccttgtccccagcctctgcaggatgccctccctacccacctctccctgggccttccctgtccactgggctggattcatgttcaaaccactggactggcacggcaacgacttctcctcacctcaagatgaggtcctcgccccctg

SEQ ID NO: 247339 - DNA, 562 bp, Homo Sapiens
ccgcgttccccacagaggacagcaggacttccaaggagagcatgtcggaggctgatcgcgcccagaagatggacggggagtcgaggaggagcaggagtccgtggacaccggggaggaggaggaaggcggtgacgagtctgacctgagttcggaatccagcattaagaagaaatttctcaagaggaaaggaaagaccgacagtccctggatcaagccagccaggaaaaggaggcggagaagtagaaagaagcccagcgatgccctcggttctgagtcgtataagtcatctgcaggaagcgctgagcagacggcaccaggagacagcacagggtacatggaagtttctctggactccctggatctccgagtcaaaggaattctgtcttcacaagacagaagggttggccaacggtccagatgtgctggagacagacggcctccaggaagtgcctctctgcagctgccggatggaaacaccgaagagtcgcgagatcaccacactggccaacaaccagtagcatggctacagaagagcagtggaccatgaattgggcgtacggag

SEQ ID NO: 247340 - DNA, 483 bp, Homo Sapiens
  misc_feature (374)..(382): n is a, c, g, or t
ggaacatgacttaatacattcattttggaggataagtctctcaaaataggcctttcactgggggaaaatggtaaaaatactccctggtaattcaagaattggagactcctgagatgctgctcatattagctgagcacttatcaatacttcacttttttccatatatactcaaggaacaagtgctatttaaagtgtttcactctgctgtgctaggtgcaagactataaagaggtgtgaggatcaacacttttatgaaaaccagtgtcattctggatatagtttcagatgctagtgcaaaggaagttcttggtatatggaagaagtattcaacaataaattaggcatggttgcttccattttctgcctcacatacnnnnnnnnncgtggttaaagtgatacaatgtctatgatattttagattggcagttgcaaactagtggtcctcagcgtgctttttatgacaactacaaggtctgaagccaa

SEQ ID NO: 247341 - DNA, 802 bp, Homo Sapiens
  misc_feature (99)..(99): n is a, c, g, or t
  misc_feature (169)..(169): n is a, c, g, or t
aaaaggaaatttagggttgggggtggtggggtgggttaaaataggaatggaaatttttaaaagttgtattaaaggggggggtggaaggggaaaaattanatttggaacccctgggaaggttggaaagtgccagtgaacctgagatcacgggccattgcggttttcaagnctgggcaacagggtgaagactgtctcaaagagaaaaacaaaacccataagatgcacaggtatctgagaagggtctaaacaccctagaactgcaagcaaaattttgagtgtatacatgttttcctggcgaaggggtcctcattctcaaatcctgagcttttaggaaaaagtactaagccagtttcaggttacgatacaaaagccaccagatacacttagagccagtcaagtttgagaattctcaaagccatcactgaaaagttggaacacatactcacagcagagacaagtgaacatttatttttatgcctttcttcctatgtgtatttcaagtctttttcaaaacaaggccccaggactctccagattcaattatgtccttgggcttggtcgactgctgcaggagtctcagggagccttctacaaatgctagagtgactcatttaccaacattaaaccctaggatacatgcaacaaagcaggactccttcctccatggaatgtgccgatttcagatgacacagcacccaatgcagaaaacgctggaatttttccttggaactcgactgtgatgagaggtgcttgacatgaacatatgctactgtcttttctttttgttttgagacagagccaa

SEQ ID NO: 247342 - DNA, 677 bp, Homo Sapiens
tcatcagctcgctaccgctctcgtgagactcgttacttaggaaaaatgtgtctggcgtgggacggtagtcagagaggatttcttacaagacacacactccttctatcccaatcggacagtgatatgaccctggggatgttccatgaatcatttgttcctctttggccccatctgattgtgtacttatctccttacacagtccttctgaccttgaaatgatccagaaaagatgtaaaagagtaaattctatagtcagtttaaaaggcagcaggaaaggattgggaagcattttggacaaggggtctaggagacaggcccagctctgcacttttccgtgggacaaaggcctttgcattctctcctgtaagtttaggggattaaaatgaaaaatcagtgcttaaccctttggatggcaggaggccactctgagaaacctattcccaaaatgaatattcacaatacagctctttctataatttcggaatgttccgatttcccccaagcccacacatggattctggattgtaaaccctttacgaggtccttcatgtcctgaccagcctaactagctatctgtggatctgcgacaatcaaaggctttctccacgacctggcccaggagccccctccttcctattacatcagtggaaatgtctgaagtacaacccctaggggag

SEQ ID NO: 247343 - DNA, 174 bp, Homo Sapiens
ccgtgatatttgagaggttagtaacaagattttaatctaggtcatctgagaccacagtgcccttcatcacaaacaatcctagaaaaaaattaagccaaaggagaaagttagtggaaaccacaggtctattctccatgtccatgattttcttttctgtggaaagtttcatttatg

SEQ ID NO: 247344 - DNA, 553 bp, Homo Sapiens
  misc_feature (181)..(189): n is a, c, g, or t
gcaaaccattacatttttaaattaactttttcttgcaaaatattcatttcattttttccaagaaaatcttataaaggcaaaaataaaattttattttggcaaatgtcatgaagtcgatactggcagcatatggagttagttaaaaatagacaacaactgctagatatattcaaaattctannnnnnnnnctgagtatagtcaaagggaaattttcatttaaagtgtggctccactcaatggaggttttcgttgttgttgttttttccatgttaaacgtcattgtttatatgcagaataatataagaaaacaaccttaaataaagggccacaaacactgcacttggcttggtagcccccctcctcatgtggggctggaagtcaaatcaaagtcctgccattatggccctgctggcggcaggccatgagggatggtgggggcacactgctgccctcctgccaccagacctgagtcccagggaagccaatccggggttctccaagggcaggcagcaaaggttcccatcatggcctggttagagggaagggatccaa

SEQ ID NO: 247345 - DNA, 275 bp, Homo Sapiens
taactatgtatgtcgggagaccaccgactacttcgagaccactgacaatgagataactgacatcaatgagaacatctgcgacagcgagaatcctgaccacaatgaggtccccaacaacgagaccactgatatacatacgagagtgctgatgacctacgataaccactgactaacaatgagagtgcagatgacaacaacgagatatcctgaagacaattacaagtacactgatgacaacgaaggacccttacgacatacatggcgaatacatgata

SEQ ID NO: 247346 - DNA, 300 bp, Homo Sapiens
actatatcaagtttttattaagaagtaaagtgctcagtattacacattaataacattcttgattgtcgagaaagacttgcgtatgtaatgtctttttaataataccagtacacagggaaagataatagggaagagatgagggggggagttctccatgactaaagaagaaaaatatatgtaatttatgggtagaaaggaggatttctgcaaaattttgcaagtgaaatgaaaaacagtacaataaaaagtatcataaagagactttctagtgaccataaagatatatgcacatggtcgaca

SEQ ID NO: 247347 - DNA, 333 bp, Homo Sapiens
taatcagaggctatggagtggggggcgttgcagggcagaagttgctttttgagatctttcttgccttaagcctgaatgcttcatgttcccaaagaatccaattatgggaacaaaaattccctcatattcagtttcactttaaaatacaataaacaggttacattctcaattgttattaagttgcttatacaaacttaaagtcaagagcataacttcaggatctgcactttttatgtcaagcgctttaactaagcagtttagggcctcctggatttttctacactcttttagttcttttccacgctttacaagagtattatagtatttgtagtt

SEQ ID NO: 247348 - DNA, 951 bp, Homo Sapiens
ttggcgagcctgcgttttccggccagaggacatgatgcagggggaggcacaccctagtgcttcccttattgacagaaccatcaagatgagaaaagaaacagaggctaggaaagtggtcttagcctggggactcctaaatgtatctatggctggaatgatatatactgaaatgactggaaaattgattagttcatactacaatgtgacatactggcccctctggtatattgagcttgcccttgcatctctcttcagccttaatgccttatttgatttttggagatatttcaaatatactgtggcaccaacaagtctggttgttagtcctggacagcaaacacttttagggttgaaaacagctgttgtacagactacgcctccacatgatctggcagcaacccaaatccctcccgctccaccttccccttcaattcagggtcagagtgtgttgagttatagcccttctcgttcgcccagtaccagtcccaagttcaccacccgctgtatgactggttacagccctcagctgcaaggtctgtcctcaggtggcagtggttcttatagccctggagtgacctactcgcccgtcagtggttataataaggtaatgactctcttctcttgtctagtcacattattttagaattgagaggtatactaaaaatcatctaatgagtcaaaacttatcagtgagcaaactgagagttgatttgcccagaacacccatttaaaaaccgagaatagaacataatatcttaaacacaacatcttaaaatgaaagagaaaaaattagcatttacagagataacaaacttagtgcaccatctacgatctttcagctgtctttaaaacaagttgaaacaggataaattttttactttagttgcttttactcctgttttccctcatggcttcccttcttcatgtgaagccctttgtataaccttttta

SEQ ID NO: 247349 - DNA, 654 bp, Homo Sapiens
gccaatcacatcccagacgaagagaaacgactcttcacaccatcttttggaaatatatggtttactaccccactaccccaaatccaggtctctacacataaagagatggggacaggagctgtatgtggaaagatcacatctcttggcaatcctgtcttcagaagttggaagtcacatctagccacaaagagccaggctgtgttttctgcaaccaaacatatttggcaatttcacagtatatttctgctggtcttcaccttctctccagacctacccttccctaaaagttatggctagcaagtaatccacccacttagtaagtccagttcttttcatttagagctaagatcccacccaccatcattttatctaatctctggcctccctcccttcctacctctataccacaagcttatcagggcattggtctgccaacactcaaactgtttctgaaatctcccattgttataaaagaggtgcaccacttccctggcccaagcaaatgtggtcatggaaatcacctaactacctgccttgctttccactcctaaatttgtttctccttcatgctgagtttaaacatcttttcccatagatgaatctgtatttgttctcaaattactcttatcagagaagtctgagatgggaacccca

SEQ ID NO: 247350 - DNA, 876 bp, Homo Sapiens
ggtatccatatcctatagagaaccatcgtctccttagtcttggcaagcatccctcagggagagctgctgttctctttccacccctctgatgtcagccccagttcctgggagcccagatccacagcgttgtcagcctaagagagaggttctctagaagaatagatgttagcttgagaacagaacattacaaggagagtacacacgccatagtaaaccatatgcctattcagggaggtcaaggaagacaaaggtctttaaaggaaaagcgagcaggatcacagtggttttgagataattctccttggctacaaacatcaataacaaaggtcattccagtctgaggttggacaggcaattgctgggcagttgtccttgcagaaatattttttgtgtaagggtgtgatggcctctgtgccgggttgtggtttttgtagtcctttctggtatcaggcatgcaagcataagtgtcctctcttcatggccttccccaccaactctttgtcagggctttcttaacattagtgactccattttgattctgacaactttcacagcatgtatttagagcagccgctaggtgttcatccacagaggtggccgtgagcagttcctgggatcataacaagagtccattctgcttggggcttaccacaaatgaagtaaagacaggcccttggggaaaggttgggcagactgagccccacatgagcggggcaggagatgggcccgcgccccaacagaaatgtcaggtgatcatcaggtgatggtcaagctgttgttaaactgtctaaaataattattggttgcagctggtgccagagaaaggcaggctcccaatagatagaaaacacctaaagctgatccaacttttttgta

SEQ ID NO: 247351 - DNA, 491 bp, Homo Sapiens
ttggtgagaagactgaagtctgatgttgctcttgaagttcctcctaaacgagaagtagtcgtttatgctccactttcaaagaagcaggagatcttttatacagccattgtgaaccgtacaattgcaaacatgtttggatccagtgagaaagaaacaattgagttaagtcctactggtcgaccaaaacgacgaactagaaaatcaataaattacagcaaaatagatgatttccctaatgaattggaaaaactgatcagtcaaatacagccagaggtggaccgagaaagagctgttgtggaagtgaatatccctgtagaatctgaagttaatctgaagctgcagaatataatgatgctacttcgtaaatgttgtaatcatccatatttgattgaatatcctatagaccctgttacacaagaatttaagatcgatgaagaattggtaacaaattctgggaagttcttgattttggatcgaatgctgccagaact

SEQ ID NO: 247352 - DNA, 474 bp, Homo Sapiens
ccgcccgctgggcgatcacatctaatttgctgatacagctttttaaaaatctgtgccttttaaaaatttgagacatctcgtttctggtattttggtaaccccaacctatcttaccaacttcacaaagattatagtagtgtgcacttacacctctgtggagaaggagctgttcagactcagaattagtcaaagtaattcaaagaaccttagtgctgtctctatgtacttacctgtctcagattttaaacttttgttattatttagtcttatgatttattttaataccacagaatacatttgacacacagcaatctccttgggcctcatagtgaagtaataacgatcagagctacagcacaaattacttacgactatatgacattcacaatatacatcaaaacccagaacacataaaccatgtgtatcaatagctgctggttttattggacatttaacgatgtcgcccgcgggcgc

SEQ ID NO: 247353 - DNA, 566 bp, Homo Sapiens
  misc_feature (22)..(22): n is a, c, g, or t
aaccttacgccgcgggcgacangtagagctggcccgctcttgtagacccgtcagaagtgattgggcctattttagcccacagagccctcaggtgttcttcatgaaaccttcagggagggagtggccttgtaaaaatggtcgtaacctgaggcttgaaatgcttggaaggcttagaagtaacgggctgagcaggtaccgagaagctgaaaggatatcctctccttgcattgattttgatttccgtttgtgtgacttcctaactccacgttcagaatccagcacagggtgatgtagaacaagtcattgaggttttccaagtcccagatagctatgagaatcctgtcgttgcttctgttctctagactggctgactgtgcctccttcctttcccgcccttctatttcctgcctttggctgtttgtggttggaaggagaggaaagagaaaaggagccggaacacacagccatggtgaggtttgggcttatctgggacttatgtgtgttctgttctcctcccttccttctggagtttggatcaatgagctgtcgcccgcgggcgctaaggt

SEQ ID NO: 247354 - DNA, 354 bp, Homo Sapiens
ccgctggccgatcaacagcctcagctctcactaagctcttgactaagcgggttatcttgggagcccccaccatatacagctacttccccgattcaggctgacattcttcatctgttcagttggtttcacatccccaatgctgtttgatgagaggaagtatccctaccacctcatgctgcaaaaatttctctgctccggaggccacaatgctctttttgaaactttcaactgggctctgtccatgggaggtaaagttcctgtttctgagggattggaacactcagacttgcctgatggcacaggagaattcctagatgcctggctatgctggtggagaagatggtgatcccaccc

SEQ ID NO: 247355 - DNA, 1040 bp, Homo Sapiens
  misc_feature (892)..(892): n is a, c, g, or t
ttggctggagatgcttccgaactgtgggcaaaaatggcgatttgctgaccatgaaagaatatcactgtttgctgcaattactgtgtcctgatttcccgctggagctcactcagaaagcagccaggattgtgctcatggacgatgccatggactgcttgatgtctttttcagatttcctctttgccttccagatccagttttactactcagaattcctggacagtgtggctgccatctatgaggacctgctgtcaggcaagaaccccaacacagtgattgtgccgacgtcgtccagtgggcagcaccgccaacgacctgccttgggcggggccggcacgctggagggcgtggaggcgtcgctgttctaccagtgtctggaaaacctgtgtgatcggcacaagtacagctgcccacccccagcacttgtcaaagaggccctcagcaatgttcagagactgaccttctatggattcctcatggctctctcaaagcaccgtggaatcaaccaagccctcggagctttgcctgacaagggggatctgatgcacgacccagcaatggatgaagagctggaacggctgctggcccaggtcccaggcctggtcaactcggtcacagccagtccagaggccagttgcctgccttcccggacctctctccgggttggctctccctggagacctctccatcattcccgaaaagtggatggagagagtgatggctccactgaagagacagacgagtcggagacttgaggagtccaaagggtcctgcccacagcgctctgtacctgctctcacccagctcttggtgtgcccacccagcctcctctccagcaccttgctgtgctgccctctgctgctgacaaggtgaataacagccccagaccagncagaagggctctgatgatcagcccagccagtggcccccgaaaggtgaatggcctgcctctcccctggccctatcaacctgtggaacttcacttaagcccccaacttgaaaggactgtggctggaggccccccttgttcacccccgtaa

SEQ ID NO: 247356 - DNA, 929 bp, Homo Sapiens
ttggcaaaggccatacttggggccctaagagtgttcagtattgaatgctgatcagctgccaggtgaggagtcagaagagggagcccccctagacatttctttgcagctatggacatgcgggatatctccccctgctctctgggtatttgaaatgtcaattttagcactctccaggcacaaggacagcccagcaccagctttacagggcagtgtttcagatggccctgagcccacggaaaaggccaggtagacctccaaactagaaatgctggctgatttgccctgatccatgcttccatttccctgtctctcttccccaggcaattactggcctcaaaagaggaacagaggtgctgcgaggtgctcacctcacagagtctggaggcctccaggatcaactgtgggcaaagtgcctgcctctgacctcatcatggttctagttctcatacagaactccagaatttttaaagaactctataattggattgcaaactaggatgctacataggattctggtattccacatccaatatggatttctagaatgctgtgattaaaggagccagccaggtgtaatacagtcaaggcagcccccagcctagagacaatctgtgaaatccaaagttggtggtgttgggaaagcagggggacatgtgtccctcagctcagcagaggctgtggtacaatatggtccttggtgaagacctgcactcctggaacctcccaccatcatcacaactgtagtctcatttgcagtggagaaaagatcccgacgtcccacagccagatatacacccagctccatgccagcccttcatgtttaccttttgctttgttaattacatgtcagactcctagagggcctccagactaataggaagcatttctgtaaccaacgtgccacccagtgattctagaaacttggtagt

SEQ ID NO: 247357 - DNA, 410 bp, Homo Sapiens
cgaaatggaaccgcttggatctacacaagtgaaaaagacttgaatggtagtagccactggggaatcattgcaacttatagtggagctggctattatctggatttgtcaagaacaagagaggaaacagctgcacaagttgctagcctcaagaaaaatgtctggctggaccgaggaaccagggcaacttttattgacttctcagtgtacaacgccaacattaacctgttctgtgtggtcaggttattggttgaattcccagcaacagttggtgtgattccatcttgggcaatttcagcctttaaagctgatccgatatgtcacaacttttggctttcttcctgggcagcctgttgaggttatcttttgtttctttatctttactatgtggtggcagagataacggtcgtgtc

SEQ ID NO: 247358 - DNA, 357 bp, Homo Sapiens
tatagagactggcttcattttactatagcaatatgcattgaaggttcctgcatgtctttcaggtctatgatagctatatttgtttttactactattacttttcgttactctatggatgtaccaaactttgtttacccactcccctactgaaagacatctgggttgcctccaagttttggcaattatgaacaaaactactataaacatttgtgtgcaagtttttgggtagatgttattttcaactcatgtgactcaaggagccaggttgctagatcacacgataagggtatgcttggttttgtaagaaactgcctaactatattctaaagtaggtgtaccagttctgcataccacctg

SEQ ID NO: 247359 - DNA, 142 bp, Homo Sapiens
tgatgtgagatatgactctgaaaagacttagccttgggaacctgtaaatctgttggattctatcatagaatgcacattagtattaaattatttaggatagatatatggagaatcctctatagttatctgtgtagatttggcg

SEQ ID NO: 247360 - DNA, 1221 bp, Homo Sapiens
acaaaaaagttggcacagggttctgaggctcaaactgaaagcctggtggtggggcacctgtgacaggtcccatctgatgccgaggctgaaggagtctcgctcccacgagtccctgctcagccccagcagtgcggtggaggcgctggacctcagcatggaggaagaggtggtcatcaagcccgtgcacagcagcatccttggccaggactactgcttcgaggtgacgacgtcatcaggaagcaagtgcttttcctgccggtctgcagctgagcgggataagtggatggagaacctccggcgagcggtgcatcccaacaaggacaacagccggcgtgtggagcacatcctgaagctgtgggtgatcgaggccaaggacctgccagccaagaagaagtacctgtgcgagctgtgcctggacgatgtgctctatgcccgcaccacgggcaagctcaagacggacaatgttttctggggcgagcacttcgagttccacaacttgccgcctctgcgcacggtcactgtccacctgtaccgggagaccgacaagaagaagaagaaggagcgcaacagttacctgggcctggtgagcctacctgctgcctcggtggccgggcggcagttcgtggagaagtggtacccggtggtgacgcccaaccccaagggcggcaagggccctggacccatgatccgcatcaaggcgcgctaccaaaccatcaccatcctgcccatggagatgtacaaagagttcgctgagcacatcaccaaccactacctggggctgtgtgcagccctcgagcccatcctcagtgccaagaccaaggaggagatggcatctgccctggtgcacatcctgcagagcacgggcaaggtgaaggcgacatgatggctgggcagaggaagcgcaggaagagggaggcgctgatgagccgctcactgatgtccgggcggccgcgactgctgcactcctgcctccacgaggcaaacacctctttcaactcccgtgggaagacacagtaggagttgatgatcttgcagaaggccagctcgcagcacatcttgaggttgccctggtgctctgggaggtcagcggccgagcacttgctgggatccacttcgcagttctcatctgactcatacagcgctttgatgaactcacctagggcgtcctgcaggtacttctggcccactagcttgaggtatcctcaatgggggtccgagctc

SEQ ID NO: 247361 - DNA, 232 bp, Homo Sapiens
  misc_feature (22)..(22): n is a, c, g, or t
aaaccatacgaatcgagctcgntacccctttgcaggcctcaagagaaccccttgctctggggagtctgctccagccccactggggctcctggagcagtgcccaccttgtggaagcaacaacagctaacaacaacaggcccttcctactgccaggcacagcacaaaaccccccaaagtgcacagggttcaaggaggtgatgccctttgaggggttttgtgctgtgcctggcag

SEQ ID NO: 247362 - DNA, 620 bp, Homo Sapiens
tccctccactagtgcaggcactctgggcctgatccaagaaccagaaatccagaaaagttgaaagagtctcattgggaagaaaatagaaatgaaaattcaggaaattcttggaataaaaactttggttctggttgggtatctaaccgtggtagaggcagaggcaaccgtggcagaggcacttacagaagtagttttgcctataaagatcagaatgaaaatcggtggcaaaatcgaaaacccctctcagggaattcaaacagttcagggagtgaatctttcaagtttgtggaacagcaatcctataagcgaaaaagtgaacaggagttctcatttgatacaccagcagatagatctggatggacatctgcatccagctgggccgtgagaaagactttgccagcagatgtacaaaactactactcacgacgaggcagaaattcttcaggtccacagtctggatggatgaaacaagaggaggaaacatctggacaggattctagcctaaaagaccaaacaaaccagcaagttgatggttctcagctacctataaatatgatgcaaccgcaaatgaatgtaatgcagcaacaaatgaatgcacaacaccagcctacactagtgga

SEQ ID NO: 247363 - DNA, 498 bp, Homo Sapiens
tttcctccactagtgcaggcagaggctgtcagaaagagccagaaaatgggggtagggtggtcttctattctaacattgtctataaatgagttcctgagaattttgtctggttagttgggcaaagggctcaactgactcccgagtttgtccatctcaaagggtggggggcgctgttggcaggaaggctgccccaaacatggacctgttgtgaccccagagagcccctaactgggtattaatgagcgcctgcacctgatggtgggggagtgggagaagggcaatcaggtttgctccccctctaccctttcccccactccgccacccgctttctgcacttctggcaggtcagcccaaggctaaagaggagggactgaaagccgcagcaggtgagcacctaaggccaagagcaccacctgcaatcatcctggtggccttgatggggacactggtttattccagatggggaaactgaggcaaaggtggcgtacactatgtgga

SEQ ID NO: 247364 - DNA, 244 bp, Homo Sapiens
tccactagtgtaggcccgccagtcgtggcttgctgaactaacccaaatcccgacactgtgttccttttgttcacaaaaccatttttaatattttgacaggaaaagtaaaggtatcaaacaaaagcagatcattccaaagaacctactggactccaagtccctgaaactcatcatcagcatgactctgcacgaccgcaccaccaagtccctactgcacctacactagtggaggggtaccgagctc

SEQ ID NO: 247365 - DNA, 1288 bp, Homo Sapiens
  misc_feature (1219)..(1231): n is a, c, g, or t
actttgtacaaaaaagttggcaaggatacatagtctttttgctttatttccaaacaggatgattgtttattgacagaaccagtatatatctgcttgtgtcttgaatacagtacagatattattgaacgtaagttgttctaaaaggacccaacctatgagcaaaagaactggagactgaattcatgggtgaaccttttttgagtcatggagcaaatcaaggaatattttctgggttagggaagtgggtactgtttttataccacagagtagtgggttagagaaagggaagacctaaggaggaatgcctagaaaaatgcctctttttttattttaacctcttcattctgacttctgactcaaaggcagttttaaaggtgtaaggctagctgagggagagaaaacttaacgggcctctagcttggtagctgccgataagtcgtgtgtacagataaatgcttctgtgaaatttaagactccttttgaacaaagagggtgtgcccttggaaagagagcatgtaaaaagcggttgagagttgttctttagtgtattgaaacatgcctcttatcttccccaccttctcattctctctcttcaaatagaagcttgctttcccctgcttaagaaaaagtaatgagcaaagaagggcaagcttggaacctgtgcatattactaggtaaattactcaacaatgtcagcaaaatttcagacagaaagtattgccaggaagagatgagagcattctcagtccatgtgccccagagcttctagaattcaatagtcactgcttcatgggcttgtttgtatattatcagaggatggagttcagggctgccaagtagtagaaattgaagacgggaatagtggcaaagagggagctatggtagatggggaggggcataggcccacaatctatttgagctcctttcagatctttgtgctcactcctgacctgcacatgtttagggaagattttatagggcatagtggaaagcaataattggaaggctgaaagagctgagcagagaagatcatcattgcctaatgcagggaaggcagaatttggagttcgaattccaactagacttggcaaaaacctgagggctttgattgaaaccaataaaggctcacacttaaagagttaaagaatgtttcccaggacgaaggcattcaccataggattaaggagggaaccaaaatagactccactatgcttttatnnnnnnnnnnnnngctccacaaaatgaaggtaaccaggtagtagtagtatgcctggcactagtggaggga

SEQ ID NO: 247366 - DNA, 433 bp, Homo Sapiens
tcctccactagtgcaggcataaaatatacagttatattatcaaacttcttttgtaggtttcaaatattatgctgagaatatggcaagaaaaaagaaaacaacctccaccactcataatggcattccctttacccaccatcaactaagtcaggaacctgcgtcactttcaagttttctgaaatgtggactgaaaatacttgtggagggccctcacagatgcatttagaaatggtatgttctggaaaatggaactgaaatgttttagcgagagtcatgggcccaaaccttgaaatagaggttggcggagttttctatagtatgtaattacaacacaataagattcaaaagcatttcaataaagtgtggatggaagacaagatactgcttcaagggcttcattagctttctgcagactggagctctccaaggcatg

SEQ ID NO: 247367 - DNA, 867 bp, Homo Sapiens
ttggctgatttccttttgtgaaatttagctcagagactattgatcttttgtttcattaatatgaacaactattagtaaaaaatagctttaacagcatttctgctgatatctagtaatctattcttttaatgtgaaaataagataaaatgtcctggagctaattctagcttaaatttgccagtatttctgtatgtcattaagtttttttcctctaaggttggtaatagaattttgttaatctttgcatacctgatggcatctatgtcaatgctgattgggtaattataaattctgtgctaatttaaaacttaatttgcctcttaaggtgattgtcctctgagtaatgattgtagttaaatgaagtatagcttgcaactatactatcacatgggtcgttaagtaaaaataaataaaccaaatttgtctgagacaggctaagatcaatcttctcatcaaaccaatttttctctaagagcaatttcactttcagttttagggtggacattcttgaatgcctcaaattaaacgttatctatttaatcttcctggaatagtctgtgaccaaaaaggagggtgtgatatatttaggtgtaaatatatcacatatatggtgtgatatatttgggatttatatattcagctcattctctgtgaagaagtcttcctgactaaaattggtttcaagataaactaatttctgttagtatttctactctgcctaccatgtatgcctttttgttagaaactaataaatgtatcagtcactagcaggtactggtcctttttcctctcatttttgtgggaaaggatatgcaaacactgaattttctcagggagtactaaggctgtgcagaggctgagaatctg

SEQ ID NO: 247368 - DNA, 566 bp, Homo Sapiens
tccactagtgtaggcttttcagatatcaaacgtatttaagaaagagaattttcatgttggaaacattaagactttcatggaattaaaatacaaagaacttccaatgaaccacatatatggaagaaagtcatctcagcagatctaacagctaatttatagaaattcagagccagcctgggcagcagtatattaaaagctatggccaatcacacacttgctatcatgcactgaataacaagatataatctttgaattatatacgtacaagatttttaatgactaatcaagttacgtggcccagccaacaaatattacatattcacaataaacattctgcctttattagcctctaattaaatcaagagtgatccattggctcagttgtgttagtcatctcagcatcttgactatccatctcttcaagctcctccacggaatttcccctttgtgcttttgaccttgtggcaaaggctgctcccagtgcatctgctacacaaacatcagttgtttctgtattcaaattttcagtaccaccaggcctacactagtggaggataccgagctgg

SEQ ID NO: 247369 - DNA, 443 bp, Homo Sapiens
agaggatccccgtcagcatttccagcagcggtagcatctgaagtattggagtgtttctgccacgaagcaaagctccattcatggccgtcatggaaggttatttattaatgttacataatggtagaatattactagttagagggttggatttgacttggtcctaaggccacagaatctctctcatggcttcctaagggatgtacctttatgcttttaagaactacaaagattcaataaagaaagaaatgtttttgaaactatagaaaaagattttaaaacacgctgctgtcctaaacaaatcctgtttaaaggaattttaaagagatgcattttactatatcaaagaacatacgtgtatttgcctaaacactctgtacctttgtaatgctaaaacttcccccttctttacggtgaagcttaaactgattaagcctacactagtg

SEQ ID NO: 247370 - DNA, 439 bp, Homo Sapiens
tcccaggaccagtcttaagtgcttctgtcttaccagaccttccttctgtcccctcacttaacagaccatctgctccggccaccattcccacatgcacatttgtcatgtgtctctactgctgcagctttgctcatcttgcaagaagtccccactcaaacttctgctacagaaagcccagccatcccccaatgggctctcaactgctatccctgtcgtatctcacacacaaactgcttctctgcttagagatcatagagtggccttactgcttctgagataggtgctttgactctgttgtcatttatcttctagattgtaaattcctgagggcggtttgtatgaatgaatgataaaatggaatattaagagggcaatattgtgccttggtttgttcctttttaatttctctttttccacttgttaagactggtcctggaga

SEQ ID NO: 247371 - DNA, 224 bp, Homo Sapiens
tctgtctcagaaaataataataattattattatctcacaactggagaaatgctattgcaggaatactattgccctttaatttacacttctaatgttactctttactatttcaataaaatatcacaaatttataagttatttttcattgattactaatcaaaatatataccgaactatcttcgtactctgctatatgtattaagactggtcctggaaaccgagct

SEQ ID NO: 247372 - DNA, 1239 bp, Homo Sapiens
ttggcgcagtgcgtcgcgccgctgcccgcatctccgaggcccgcgacgagcggggcctcacgggagctggatgctcggagcagcaaggcggccctgggggccccttccggtcccggggctgacgcctggcggcgtctccgggaacccgcgccctttcaagcgccgctggctcctgtttcacagatggagaccctgaagccccaacaagcagcctccccagcacctcccagtgactgaaaaagctggcactgggcgcccgtctcactctccacccagctcccaggctgccccacgggaccagcacctttggggagagacgagacctgaacaaacgctggggctggatccccagggtgggtcagaacagccgttgccctgaaagctggcccggacagatgcgtgcggggcgtgccaccggagctccttccagcttgcgtctggggccaccatgtcccttcctcagggcactggatccatctcttcaagctcagtggtccaggccatggtggcagaatcaccccaccagggtgtgacgcctcgatccctgtcaattccatcacagctgcacccggaagagctgtggccgggcgccgctctgacctgtgtgcggtcccctgaatgggtctcaggtgtcttcagcaatggtgaggccagcctcatttcctcaccacacaaccctcctgaggacgttgcctgcacatgggcggaattcctaatttctaccattcagttaaagcgagggatccttaagccccaaatgctgggaaagctgtccgttaatttagtgcgcgtgggccgtctcagaacagcatggagttcccagggatgtccatgctgtggaacggggtgagtgggatgagtggcctgtgtccccctggcagagaaggccttgtctgaaggctacgccctgcctccggtacatgggacacctccttgctcatctggcagcagcaacagcatgaacgttggagtcggtgccacctgtggacgtacctgagcatggagcctgaagcatgtggtactcacaggtatggaaatgaggccatcttggtccgagacaaaaacaagctcgaggtctctagggacacaggggcagtccaagttttgcagcaattatgtaattccgatgtgagcaccttgaacccaggaccacgactttgaggaacaacagacctgagtttcattcagattgtcctgttgatttccaatccttgctggaagattttgaataatgaacgt

SEQ ID NO: 247373 - DNA, 1392 bp, Homo Sapiens
ttggcgcagactggttctggaggctccttccatgagttctgcacatccgtctgtctctccctgtatgaggcccagcagcagcgcccgatcccccagtctggggatcccgccgacgctactcgctgcagcatatgccagaagactggagaggtgaggacactcagtgggggctgatttacagagcctggccagccctgacctgcccctcccatcctggggctgcagggtccaggccctgtggaaaggggagtggggaggaaaggcggccatcatgagggagcgtattcaaggacagagcttctccaggatgtgcacagctggccttccttacctcccaggacctcaccatcaagtcggcagcctgcggcgcaggttggggggtccctgggcccactgtctgctgtgaaggtctagggtgaggtggggggctgaccttgcattggggtgggcggtggtggccaggccctagctcagggtgcgtgtatgtgtgtggcaggtcctgcacgaggtcagcaatggcagcgtggtacaccggctctgcagcgattcttgcttctccaaattccgggccaacaagggactgaaaaccaactgttgtgaccagtgtggggcttacatctacaccaagaccgggagtcctggccctgagctcctcttccacgagggccaacaaaagcggttctgcaacacaacctgcttgggggcgtacaagaagaaaaacacacgtgtgtacccatgtgtctggtgcaagaccctgtgtaagaactttgagatgctatcacatgtggatcgtaatggcaagaccagcttgttctgttccctgtgctgtaccacttcttacaaagtgaagcaggcagggctcactggccctccccgaccctgcagcttctgccgccgcagcctctctgatccctgttactacaacaaggttgaccgcacagtctaccagttctgcagccccagctgctggaccaagttccagcgcacaagccctgaggggggcattcacctgagctgtcactactgtcacagccttttcagtggcaagcctgaggtcttggactggcaggaccaagtgttccagttctgctgccgtgattgctgtgaggacttcaagcggcttcggtgtgtggtgtcccagtgtgagcactgtcggcaggagaaactcttgcatgagaaactccgattcagcggagtggagaaaagcttctgcagcgaaggctgtgtgctgctgtacaaacaggacttcactaagaagctgtgcttgtgctgtatcaacttgtacttacttgtcccagaccttccagcgcgggagtcacctagcaacttgttggcagcacctgggtcttcttctgtgaggacttgtagtacaagaaccccctcgggtactcg

SEQ ID NO: 247374 - DNA, 409 bp, Homo Sapiens
  misc_feature (47)..(47): n is a, c, g, or t
tctcgaccctacagtcttgtgagcagagctctagagagcacagcatntgcgatagtcagggtgggagaggcagatctttgaaggaagggtcattccagctgctcctctgttggagtggactcgccagccacaatgcctgccagacactctgcctggggcagggtggggccaaggctgtgccgcttacaactccactcctctaggccatttgggaagttttcaggctcttgttcctgaagacagacaagctgacctgaggcctgagccttgaggagtaagacacctgacagtaagctaggggacctcccatcccatgcccccaactctcatgaagcatctttaatagtctctgaagcacaatttgcccaccacaaatagttcctctgcagctcaacagctgttgtaactg

SEQ ID NO: 247375 - DNA, 564 bp, Homo Sapiens
ttggctttctttttctcgggtgtgggttccaagtctcctcttattcaacccagaggctggggtttgatgtttcctagcccctgggatgagggatggccacgctagactctggctttcgctgagaagatggtggagggagccgtcagcagtgtctctgtgcaagctgagccctaatgcatagttggagcccagtgcgtgggaagcacattcttctgaccacacagcttgccagacacacagagcgcgtgtcggcaggagcacaccaccgggagagtttggcccggggcttggaagttcaatttgaacaggcctccaaaactgggaacagggctgcagccccagacgaatctccaggcagcttctgtgagctctcatgtttcctgcttccaacctggccagggattgcaagcttgcgtggctttcttgctttcccgcttctgggcttaggctacccgggaggcccagaagtgtgtgaacacaaggaatagctaggggtcggggtggaatcaaataattccttatttatatttcagggatcacgtagcttgccccttttttaattgt

SEQ ID NO: 247376 - DNA, 537 bp, Homo Sapiens
  misc_feature (61)..(61): n is a, c, g, or t
gagaggactagggggagggggcttcccctttcagctgcccggccccccacacccacagctngctcttctatctccacaacgtgagcctggaagaggagaaaatgtggctcctctggactttggcagaccacttttcggtctttgcgtgatgttccttagcccaaagacggtgagacagggctgaaatcaggtggcttctgccaccttgagccctagacccatgggtggctaaatccactggactgtgaagactataatttatttccataatttatttggagattgaggaggctttggttgcacttctttggctggtgggtaatgccaggggtggggtgggcacaggccctcaagagccccttttgccttgtagtcctacaccttgccctgcctgggctttggtgcagactaggtgtggatttgagctctgtgatctatgtctgctgcctggctcctagatggctctgcgggcaggtgctggccaaggacatcatctaggcagggggagagcctgggctgaacagctgttgtaactgg

SEQ ID NO: 247377 - DNA, 1118 bp, Homo Sapiens
tcgccagttacaacagctcatggttgatgggtgagtgtcaggccccacccagggacagtgaggcccagtgccggctgtggagttacccagaccttacggtaaaaacgcatcaccctgaatgggggccaggccaggcatcggcccaagccggccctgcccagcggctggattctgactcgctgtgccttagtcacaggccagagactcttctgcttccagctgaggctgtcccctgccttccctggcggcccgggttcctggaaaagctgtgtgccagaggacgggagtttccctccaacttaagccattagaaagctcatttattgagcacttactaagtgtcagagactgtgctaggcactttacatgaatcttctcatttaatccttttaataaacttccggggcacatgctcttctaatctcccttttactgatgatgcaggcttgacagtgggaatgctaaccgcagaaagcagctcacctcacttgggtgctactgtgtgccaagtcctggggttagcacccaatagccccgtggcggcatgctgttattactctccctgcataggagtgggaggctgagacctgggtgtttctgggtgtcccagctcctgtatgccatctgcctgtccagcccttagccacaaagctgttgtgccatgtggggagatgcggccagtttcccaggtgaggctggtcctgcttcaagcgtgggagctccaaccactgctccacgctgcctccactcctgaacctgaaggtggaggagtttcccactgtctcaaataagcaccggggcccaggggtcaccaggctcagatggaatttgcttaaaggactcttgggagaaaagctgattgggggatgggaagagacagctggcagtcacttaggagacagatgtgtcaccagaactaaagactgacctgggaggactgactttcacccaaaagggcctgggctgggaattctcctttatgtctccttccctcacactcaagattcaggtgctcacaaggagcaccttcgagtgaggaggtgtaggagggaggatggctaacagctcagtctgctcagcacttttacagtttataagccatttcacagacattatct

SEQ ID NO: 247378 - DNA, 376 bp, Homo Sapiens
  misc_feature (27)..(27): n is a, c, g, or t
aatcgactcggttttttttaaacgccngcaacaccaatcactaagcattgccatgtaccaggcccaggggctgggactatgggagctagttcttatagtggctcatgatctacttgggaaggcaagacctaaagaaatgacaagtaagccacaatggcatatgctttgtcgaatgagagggtaccaatcagcgagtgtgccggggacttagaggaaggggtcacaatgccctgggatggctgaggtccccacggagatgttgggccttgagccagaacttgagtgctggataacacttgagtggaaaggaggggcacagagactgtccagattggaatggacaaggcttagcagaaagggtgttgcagcgtttgaa

SEQ ID NO: 247379 - DNA, 761 bp, Homo Sapiens
cctcctagccctcttaccctagcccttcttaccttcgtggtgcagctgttcgccgaggagtggggccagtacgtggacttgcccaagggcttcgcggtgagcgagcgctgcaaggtgcgcctcgtgccgttgcagatccagctcactaccctgggaaatcttacaccttcaagcactgtgtttttctgctgtgatatgcaggaaaggttcagaccagccatcaagtattttggggatattattagcgtgggacagagattgttgcaaggggcccggattttaggaattcctgttattgtaacagaacaataccctaaaggtcttgggagcacggttcaagaaattgatttaacaggtgtaaaactggtacttccaaagaccaagttttcaatggtattaccagaagtagaagcggcattagcagagattcccggagtcaggagtgttgtattatttggagtagaaactcatgtgtgcatccaacacactgccctggagctagttggccgaggagtcgaggttcacattgttgctgatgccacctcatcaagaagcatgatggacaggatgtttgccctcgagcgtctcgctcgaaccgggatcatagtgaccacgagtgaggctgttctgcttcagctggtagctgataaggaccatccaaaattcaaggaaattcagaatctaattaaggcgagtgctccagagtcgggtctgctttccaaagtataggacatttgaagaactggtatgctactctggaa

SEQ ID NO: 247380 - DNA, 466 bp, Homo Sapiens
aatgaaccattctaacccaatctccttattttacagcccagagggactcagattagcggcagagccagagctagcatctggttcacctgttaatctagaatttttccccaccggacaaggatgcccttcctgagaatcttctccatcttagaagtcagcactgttgctattaagccttggaatctcgaagcatttgtcccaggttgcctgattttgatagatttcagtacagtatcttggcaaggggtcaaaaatgcggggcaggcacaagctgttttcagggttctgtctgtagataaatctgacaggcaccatataatgatgaaggcctgacacccacccacccacaagatagattttattaacaatccaacaaccatctggatttcagccagcattacagtgttggcactggatcatatctatctgcctgtctagacaaatccctctacatcagctctctgaa

SEQ ID NO: 247381 - DNA, 413 bp, Homo Sapiens
tagtgtgattttcagatgtttgaggatgtgttctttttacagactatcatacttgcacatttctagtaggatattcacacattaacactttggatttagacatatgtagattagctataagtcagaagtgttaatgaggtatctcaatagtaaatcacagttgatgaagacatgtttctatttattaggactttggtagagtagagtaagatgctgttttactaaataagggctcatcataggaaataaacttagactactagaacagaccgtgctgtatcagcaaaagccctgtgtttgaactagatagctccctggctacataaggaaaagagacattaattgtcctcttctgtttgcttttataagggaggatgacacgtactttgaggtattctgctcattgctctatg

SEQ ID NO: 247382 - DNA, 1180 bp, Homo Sapiens
  misc_feature (151)..(463): n is a, c, g, or t
ttggctcaactagcactgtgcctgcaacataggcatccaataaaggtttctctttttccttagtagagatctacatgcttgaattgctagtttatcataacaagttttttacaaaaatagtaaacataaatgatctattaatatgttttcnnnnnnnnnnnnnnnnnnnnnnnnnnnnnnnnnnnnnnnnnnnnnnnnnnnnnnnnnnnnnnnnnnnnnnnnnnnnnnnnnnnnnnnnnnnnnnnnnnnnnnnnnnnnnnnnnnnnnnnnnnnnnnnnnnnnnnnnnnnnnnnnnnnnnnnnnnnnnnnnnnnnnnnnnnnnnnnnnnnnnnnnnnnnnnnnnnnnnnnnnnnnnnnnnnnnnnnnnnnnnnnnnnnnnnnnnnnnnnnnnnnnnnnnnnnnnnnnnnnnnnnnnnnnnnnnnnnnnnnnnnnnnnnnnnnnnnnnnnnnnnnnnnnnnnnnngcctgtttaatgcacaggtgtgagtggattgcttatggctatgagataggttgatctcgcccttaccccggggtctggtgtatgctgtgctttcctcagcagtatggctctgacatctcttagatgtcccaacttcagctgttgggagatggtgatattttccaccctacttcctaaacatctgtctggggttcctttagtcttgaatgtcttatgatcaattatttggtgttgagcctctcttccacaagagctcctccatgtttggatagcagttgaagaggtgtgtgggtgggctgttgggagtgaggatggagtgttcagtgcccatttctcattttacattttaaagtcgtttcctccaacatagtgtgtattggtctgaagggggtggtgggatgccaaagcctgctcaagttatggacattgtggccaccatgtggcttaagtgattttttctaactaataaagtggaatatatatttctactgtgtgtcatgttgacttctgctcttgaaattcgtggtagggagggtcttaatttctgagacctgaggtttaattttaacatctcaatactttggagcaggaagagtgcttaaatcactttgtttcccacatagtatcagtagacttctgaatttgggggcagaggcagttgggtctgccatgtatcaaccagtgatgtgagcctagccacgattatttcagcctctc

SEQ ID NO: 247383 - DNA, 238 bp, Homo Sapiens
ttcttttagaatgtttctattgggacttcacttgaaaccatcatgaagaagacaaattctaattaaatgtatgtgataaaattatagccagggccactctgttcccaagagaggatttgagatgggaggaagaggggacaatttcctagctttctggaccccagtttcagggtagactcctgagtcaacctgggctgccagagctttccctctgaggtccccttgctttcctcgttgt

SEQ ID NO: 247384 - DNA, 514 bp, Homo Sapiens
ctctccagagttactgttttattcattgggaagaaacctattgaactcagactggatgacagaagagagctggttattaagttggagactgttgaaaaggtatatgaaatcttcacctcagatgatgttgatctcgttttgagaaagtcagctgctgaacagttagctgtgattatgcaagatattaaaatgcatgctgtggtgataaagttatgcttaattgacaaaataattgagtatttaaatgaatgtgtgagtcacgatggcaaggttgtagaatgtttggtacaaccatgcctcacactcttgaggaaggttttatgtggtgatccagtcatgcgtgtttcgctctcgcaacagtcttctcttttgaccgtgttattcagagtttccttaatatttcatgaagattgtagtgtcgtgaactgaagttggagcactattttgtgttctattatttgatgcagtactcgagaatggatatgtggtctgtaatccttcccatcactttatt

SEQ ID NO: 247385 - DNA, 918 bp, Homo Sapiens
ttggggctgagctcggcttcaaggaggagacgctgatgagccagctggcttctaatgattttgaagattttgtgacccagctggatgaaatcatggttctgaaatccaagtgtatccagagtctgaggagccagctgcagctctatctcacctgccacgggcccaccgcagcccctgagggcacagtgccgtcttagagccagaccctgtgccgagatggtgggggccctgcaggagtctgtgctgggctctcaggctggaggagcctctgccaggtcctccctgcacacaccagaacccacacgctggtcctgcctatgctagcgtcaccccagccccacgtggcttcagataggtcccagcttctccctcagggacaggcccctgtccctcagttccatgcacaggagtgcctccaagggtgggccaggccgaagaacctaatgcctttcccttgtgcctagagaatatgattaactaaccccttgcctgtgggaatatatttgggtctaataaccctgaagtttctaagtttggggatcagaggatggggtggtcagtggtagcctagaggtcagaggtcacaagacagagaagacaacatgctgagaccagaggcttcaccagctgaattctgtgcctaacttagaagactaaacactggcccaaacttaaccattggtgctagggggacaggggtggggtgagctctgccccatcagcccttggagattgatttggggatttagaggcgtttttgaaaatgtaaatagcataaaccttgacttgatgtgtcactgacagcagcagatgtgagacaggccttatatttacagctcccttcccttcctgcaatccagtgttgaggcagaagagggtgcctgtgtcacacaatcaatttttctcctgacttttgct

SEQ ID NO: 247386 - DNA, 338 bp, Homo Sapiens
caattttgtatacgggaaagaaaaggctcagtgaaagtgacttagtacacagtatcttggtttggggcctcatcaaggtgaggcttcaagtacaactagcttattcaacaaggtgaagagaactcccacagggatgcgggaaagtgagacggggaaaggaagtcagcaggaatgggcgcatcttcaagccagttaccaccaggggcaacttgaacccgacctgctggggagagtctggaagccagggtagaacacctgccttccttcattagtagggtgcaagaaaattctgagggaacctttcagaaactaacagtacaaagaaatggagaatagca

SEQ ID NO: 247387 - DNA, 177 bp, Homo Sapiens
tgcagttggattttaaatactatattgctggtttttaagctggggtccatgaatgggatggagatttgtgaaccctctcaaattatgtaccccccgtatacatgcatttcatcagtttctctagggctcattgttaaaatcagctggtatttaaagtacttatggggaccggtctgg

SEQ ID NO: 247388 - DNA, 399 bp, Homo Sapiens
gctgggaagccctttttatcagtttgaggaagtggctgtccgtggccccatccaaccactgtacacacccgcctgacaccgtgggtcattacaaaaaaacacgtggagatggaaatttttacctttatctttcacctttctagggacatgaaatttacaaagggccatcgttcatccaaggctgttaccattttaacgctgcctaattttgccaaaatcctgaactttctccctcatcggcccggcgctgattcctcgtgtccggaggcatgggtgagcatggcagctggttgctccatttgagagacacgctggcgacacactccgtccatccgactgcccctgctgtgctgctcaaggccacaggcacacaggtctcattgcttctgactagagtgg

SEQ ID NO: 247389 - DNA, 942 bp, Homo Sapiens
  misc_feature (242)..(278): n is a, c, g, or t
ttggcaagtacaggtgagtgatggatgtgatataaaaatccctattttacatgtgggctgcaggcagagagtctgcggtcaccagtgcaggggctagatggggcaggctctgggctcaggacgcctaggttcacagccagctcagattgggtagcagctgcatggctcctagtgccttttttctcagccttagtgtcctcatctgttaaaggaggtgagaatataggaataacaaccaaagnnnnnnnnnnnnnnnnnnnnnnnnnnnnnnnnnnnnnagagagagtgagaccctgtcttaaaacaaataaacaaataagaaaatggcacacatttctcctgttgagccacaagagggaggggctgtgtgaacctcatctgtagtttaggggcagcttttattggagtttctttaccaccggctttaaatgtgttcagagtagaattaggactttcccttcagcagagcttgggatcttagccctggcagaattccagggatgtctttatgttttaaagtcgccagcttttggaactgtgggaggcctctggtattcagccctgccgccagactgtggggccactggggtgctctccgctctccagtctcgcccccacttctgtacctcaggaggtttctctgcacctcactccctcgcgcccaaccttccatgaagcccgtgtgagggagttggcagggggcagaggcgggctgtgctggggctccctggagtcctcatctgtcacgccagtccccacacggtcatgaacttccactcatttcccctcacgcagggcatcccgccctgctgcctcgcaccagggtgaaagctgtgggctccttccccaaggaagggctcgtcctgtctgcattttgattaatttaggtccctttgcattgccagctctcagatggctttacctttgattttgttgcttgtt

SEQ ID NO: 247390 - DNA, 922 bp, Homo Sapiens
  misc_feature (239)..(253): n is a, c, g, or t
tgtacaaagaggttgtccttgtttctctgtgtggatgagcaacatatagttgctatgaatttctattttggacctgaatttccaccaagttcaatttttagaaatatgcattactatgtacctaatagtttttttagcatgtacaatctgccaacttccttacaacattgataaaagtagaatacacatataaagcaactcaaacttagaaactgaccaataaaagagacactatttannnnnnnnnnnnnnnccagaacatttcaaaaacttcccatactgtttttctgttagcttaagcgttgttaaatccttcactttcacacctactgtcaagaacccaaatttggctgaagcagcttaagtgattcagttcacgtcaaacaacatttcacaggattcttacccccaaagcaactctttactatccagtacataagactctagaacattaaaattctttatatagtgccatgtggcatctaaaataactttggctaggaaataaaacatatttgcagaaagtttggggttgaaatcaaagaatggatcaaagtggcccttcatttggctccacgtcatctcacaatagtgaaatacagcagaatgtcactaaactaccataaaactaaggggagagattttgcaaaaacagggagtgacagacacgttttttgctcctgttttaaagtaaattgtactaatgacaacaatagtgatctcttataggcccaagttggatcagtgatcaatttatagcatttctgtttcaaatattcaaaagcaaaaagtaatctgccaattagaaaacaaaaaacttcaaacttaagtgatgtaatgatggagcacctgtatttgactagatgttatatacatgccaattgaaaggacatagtacctaatctgccctaatgtctataaa

SEQ ID NO: 247391 - DNA, 454 bp, Homo Sapiens
ccactctagtcaggaactccacagggctgacaaaatgagagtcccagctgtcagcctggagaagagccctcgaatccacgcccccagcacagcagctttggtctttgcgggctcccctttcttccgttagtgtgctgatgtgttctccccagactagaaaccacacgaggacactgacagagaaaaatctcctgtgagcagacttcctgcgagcgggcgcggttcccaagccaacgatgtgtctcctgttcccctttgccactcttggatgttggcgagtctttctcagccagaatgccagtgtttataaagagctcaggaggcagcttggaaagggagtaccaagataatgatgacgaatgagccacgcactgcttcctccgtgccttggcctgcttatgaagtcatcatcttagctgcctcttctccatccacactcacacgctctgcacct

SEQ ID NO: 247392 - DNA, 539 bp, Homo Sapiens
gaattcaaacccatgtctccccaccacacctggttatcactaacaaagggacaggacagggtcttggtcccaattcgggacctggatatcaggcacgttagcagaacaggaactaacacagaagcctcttagaagaactgagactcagagaaggaaacgggacacaggaacgaggcaggaggccctgccatgtcaaagccagaatagtgtctgagcccagaatcctagccagaagggatctgagtctccgtttcctcagaccagacatgactataagacctgagggcagggctctggctgaaggaaataagccaaggagctgccctcaccagggatgaggcaggcagggtctgttatggttgtgcaccactcagcccgacagaccccacagagaaccaacgtgtagtgacacaggcttcccaccatgggcaacatcagctgccctcagaatgggagggaggctgtggaacatggagaatctgactttgaataaatgtctgaaaatcttgcctttgttttctatctgtatgaccgctgat

SEQ ID NO: 247393 - DNA, 484 bp, Homo Sapiens; identical to SEQ ID NO: 174864

SEQ ID NO: 247394 - DNA, 197 bp, Homo Sapiens
ccacttaggatgctctggaaatgttcattcaaaaatcatcataatgacattaaagaaaacctcttagataggcagttatttagaaatgtaacggacacccaccaaggtagcaattacaaatgtctaagcacaagctgctcactaatggttaggggcagtacagatgaactcacgcagtgataactgttgactggtgc

SEQ ID NO: 247395 - DNA, 543 bp, Homo Sapiens
agaagtttaaatgtttgttactttgctttatcttgagaagcctagttttaaccactgctttaaactagtggtctccatccttttgtagttcataagtgtgatggttgagttttcacatgcatgtgtgagatgtgcctgcctcaaaccttgttatgttggcacattacctgtctgacatgggggataaaaagaagtagcagtctattttaataggttaaaattgggaattttgtgagaagactgatactttttaagaatataagtgtagctcttatgttccatctttcttttatcttgtcttttgctttagctttgtaaaatgtattagagagccattaaaaatgcagaatttcaataatcaagctttggacaaatagtaatattaggcatgtactttgattatttatgcattcctcttttaaaaataactactttgtgcctgaggctctacttttatacttgactcatgctcaactctcacttcagccttcttcgcatgtcagatgccttctgacatttaattatagtttctcgtgactagac

SEQ ID NO: 247396 - DNA, 506 bp, Homo Sapiens
tccgctatatacactcttgagtctctctagagaactgggagaaaaatgcctaatccagatatttcagtgtgtagaaatttcctagaattgagttgccagacatcagaatgtgattatatttaggagttcttaggtgaagtaaatcttgtccttattattcttttcagactgaggagtgttaaagtgaacagacgctttcttgactactgctagtgtcgtccatcacctttgttttaaaaaaggtcttaagggtatttcctaatatttaaaaatcttgacggtattttagggtttgtttggctttaatttacgtctacgtttttatttccactgtcaagtagctcttgttcataagagcataacatgagtggtcaaatagcctttaatgatgcagcaaggatggggtagatgaattgggctatagaaatataccaatacatggagattatttccagagacatcgtgtggacttctataatgtatccttgagtccggaagtatgtagt

SEQ ID NO: 247397 - DNA, 607 bp, Homo Sapiens
ttggcaagagcttcccaagctcttccttcagtcccacgactacagtctgtattccttggatgtggaattcatcaatgagatcctcaacatacgtaccaagggccggacatggtacattctttcactgaccctctgccgtttcctggcctggaattattttgcacaccttcgtttggaggttttacagctgacccgccaccctgagaactggaccctgcaagcccggtggcggcttgtggggctgcccgtccacttgctctttttggcggcttctacaagctgtgacaaagacgagcattaccgtacctatgatgcctactccactttctacctgaattccagtgggctcatttgtcgcgatcgtctagataaactgatgccttcacactcacctccaacgcctgtgaagaagctgctagtgggagccctggtggccctggggctgtcagagccagaacctgacttaaacctgtgttccaagccctgatccttgaccttggagtggaggctgcactgaagactgctacgcccaagagaaggaggtggaggcagccaagaatctcaggagccagcttcctctcctcgtttcactccttcacccaagcta

SEQ ID NO: 247398 - DNA, 489 bp, Homo Sapiens
cccctccagactgccttcagactctccgggatactttgatggccatgtgtggcccatgtatctaaagtacagacaagaaatgcaggacatcacatgggaagttgtgtacctggatggaacaaaatctgaagaggacctctttttgcaagtatatgaagatctaatacaagaactagcaaagcaaaagtgtttgcaagtgacagcataaagacggaacacaacaaatccttcctgaagtgaattaggaaactccaaggagtaatttaagaaccttcaccaagatacaatgtatactgtggtacaatgacagccattgtttcatatgtttgatttttattgcacatggttttcccaacatgtggaacaataaatatccatgccaatggacaggactgtaccttagcaagttgctccctctccagggagcgcatagatacagcagagctcacagtgagtctgaaggcagtctggaggtaccgagctcgagtg

SEQ ID NO: 247399 - DNA, 447 bp, Homo Sapiens
tccagactgccttcagactcttctcacccacgtcagcctcccgggagaatctcctggaggagcaaggcagcatagcactgcggcaggagcagattgacaatcagacacgcataactaaggaggccggcagtgtatctctgcgtatgaagcaggtggaagaactatatcattctctgctggaactgggtgagaagcgtaaaggcatgttggagaagagttgcaagaagtttatgttgttccgtgaagcgaatgaactacagcaatggatcaatgagaaggaagccgctctgacaagtgaggaggtcggagcagacttggagcaggttgaggtgctccagaagaagtttgatgacttccagaaggacctgaaggccaatgagtcacggttgaaggacattagcaaggtagctgaagacctggagtctgaaggcagtctggaggggatcc

SEQ ID NO: 247400 - DNA, 288 bp, Homo Sapiens
actcagaagtcagaggactgactgggtcactcgggatctgtgttcgaatcctccccacccctttctttgtggagtttcctaacctgctgctgaagcacaatgttttggtgctttcttttctcatttgttaaaggcagtgtccaaaagccattccagatgccaagaccaggggcttatttctagggaaggtaggtcggtttccatgtttccctcccgttatttttattttttactttttgcttgagacaagccgagtctgaagcagtcaggaggtaccgagctctatcc

SEQ ID NO: 247401 - DNA, 195 bp, Homo Sapiens
tttgtttttgacagagacatgtaggagacaggtggaaaatttgaggctgatgaaccaaagagaatttcgagtttttagtactatatgtggttgatacttgaagccatggaaattgccaaatttatcaagaaaagggattgtgtggccaacagaatgttagagaaatttcaagagtctgaaggcagtctggaggtg

SEQ ID NO: 247402 - DNA, 540 bp, Homo Sapiens
tccagactgccttcagactcccccattttctttttatcggcctactttacttgttcactgtagaagtgttggtctttagcaagctattccatttaggccagaaatagatgttacatataattgtaagtgtactatattatgatattgaggactggttgatatttattcatgagattaggctttatttattaagacattagtcttgagtaggatttgggatggttggagccttttaaataaaattaagcataacaatggtgaggagagacagggaagacaagcaaaaagttgagatgccctagcagcagttcctgctgaggttatgattagttttgaggcattgatgtcatggacctagtcattctttaggtatagattgatggaataaagaaatattattttgacttatcttcggatgcttaatgttaatatttgttttttagagcatagttggaaatgtagaaagggtttgtcaaggacagaggaaatgttctagtttatttctgttgtattgagatggtgagtctgaaggcagtacgg

SEQ ID NO: 247403 - DNA, 334 bp, Homo Sapiens
  misc_feature (103)..(111): n is a, c, g, or t
tccagactgccttcagactccaggtgttagaaggccatagatttggaaacactttacaaaactgcaagttatcaacgtttctaggtatatttttgattaagtnnnnnnnnnccccaaatttacaccgaacatatttatgttcggctacctccaaacaggaagaaagagctatgaaggtgagaatgaggtaccacgtgtttataataactggatccagagttttattctgttatgaattttcttctgctctgccttcattatcaatcatccttctctaccggttcctttccttctgcctttaaatcttaagatttgaaggcagtctgagatttta

SEQ ID NO: 247404 - DNA, 480 bp, Homo Sapiens
tccagactgccttcagactctccagactcccttcagactctccagactgccctccaactgccttcagactctaagaagccctagttagcacctgccaccatcctcccatgtatcagagtgtcagttccctgggagggtggtggcaggtgctaattagggcttcttagagtcaagaaggctgatgctggaggctgtggggtctttgtctagctgggctatcaaggagctggtgggaagcttacctgggggcaggacaggacaaaagtcagctgggtgtggggcgcctggagtctgtcctcaggagcccaggagacctgaggccagggagagtcaaggagggccaggcccctccacaccagcccagggccacccgccctgcagtgtctcctggagcgtggaccctgtggagctgcgcccactgacccatgtgccttttcttcaccaaggctgtggaaagtcccggagtctgaaggcagtaag

SEQ ID NO: 247405 - DNA, 180 bp, Homo Sapiens
tacctctgactgcttcagactctaccagctctcaggtgccctcccaaggggctgctgcatgaagatgccttggaagtagcccctttcacaatcacaggaattaaccccctggtgttggaggggcctcactttaagcaatcccagtagtaaacattggataaatctaaaggctttctttaa

SEQ ID NO: 247406 - DNA, 872 bp, Homo Sapiens
  misc_feature (69)..(69): n is a, c, g, or t
ttgagcttccaaaataacttttattactatataaaggaagtcaagaaaaaatagatgcatatttttccnacaaaattataaaatattcaggatagttaatattttttccataaatgcgctaagataaaaagatagaaatctttttcacttaaggttttcgagtaccttgtaggaattaaagaacaataatgttctttcttctacattttcctaaagacatagcagttacagtttcctgctgggagttatctaaaaaagggacataccaaggataaattttctatccatattggaaataaaattagcataaagctttacttctgtctttgtgcttttagattggcaactgtggtcaatcagtgctgcactggaatttccaactcagcaggggaaagaatctaattaaaaatgacacacactctgtattttgtcctttagaaaacagaaactgcttgtcgatatcccttaaaaagtgcaattgccttctttgtcatttctttgtaaagtctgagatgttgtttctaaacagcacagcttacatgaaaccacgcaagtaaaggaaagaaagtgctttagagggcaggttccatttgacacaagcagcacaggaagccgtacactcttgatgacagtaattcaaaaagtatattcatttgagtttctcaataaacgctttgagagaaaaggctttaatgttgactcagatgagtgttaaaataaagctttcttttctgaaattagattatggggtaaaccaagccagattatctctggagatgacagaagccataattattttgggaaatttcaatcactgttttggaattgatacctaaggctttcttctcccctattatttatggacaccgtgg

SEQ ID NO: 247407 - DNA, 419 bp, Homo Sapiens
tgacagtaaaatgtacacattgctatacctgctcatacctgttaagcagtttcatatttctaaatgtgataaatgacagaggtgattcttacgtatctacattttcaggtaccccacagggtccatccacattgaatcaactgtcttatcttttaaacagacaatactacaaccttatagttatattacagttgatattttctcaaagtgctgtcatatacattatctcatagtcattaaaataatgtgaacaataaagtttttttaaagaaaagggaatgtaggactaactaggttttttataaactcaagttggtatttctttactacaaagtgcacattgctgtgttgctgaggtctgtccaaaagaatgaccccattgaattttttaaatgactgaattctactgagtgcttggt

SEQ ID NO: 247408 - DNA, 412 bp, Homo Sapiens
attatagaagttcattagcaccgcaccatgtatataaatatattggcagccaagactctgaactctgcagaaacatttgtttcacccagacttcaaactctagccctgactattatgcccctgtgtgcatttacaataaagactccaacggagggagcctgttggtgttaaattgtttacatttctttatacaaataatgtgctttcagtgccttagttacagctccctttctgtttcttgttccagggattctgtagtatgtagtgtgtttcttaggtaaagtctctttttgctactgaaagggaaatggtctctaaacactggtcactgtagcaggtaaacactactctaacgtggagaaatgagcttcatgctgaggtagtggttgccttagagctgttatttatgcta

SEQ ID NO: 247409 - DNA, 224 bp, Homo Sapiens
cctagttttagaaggttcaatagcagcagttaggaagtaaaagaaaaatccttttcataatgacaagaaaaaagtaagataataagtacgtgggaactgtgtgcatcaactttgaaatccattaaagtccacttgggtaaatttaaacagttcctacaagagaagactgaatgtttatacggatactactctttctgtatactctctagggtataatgctatga

SEQ ID NO: 247410 - DNA, 196 bp, Homo Sapiens
ttttagaagtttcaatagcaggattagagtcagataatggcaagtgagggtgtagtgaaatcagtaggttggagtgaaatcagcagccccatacactgctagtgggaatacaatgggtgagccactctgctttaggtgtacatccagagtaaaatgacatgtctacaagcgttcatagcagttccacagttgctag

SEQ ID NO: 247411 - DNA, 219 bp, Homo Sapiens
ttttagaagtttcaatagcagcaggaatggactaagagagatttaatatggaatccccaacaatgaaacaactatttgtacttctaaaatataggtagttctcaaaagcattatgtctcagtaggatagctctctaacttatctctaaagttaattaaacattatggctgaaaatgacttttagtttcctctctttgacttctaaactagggccaggct

SEQ ID NO: 247412 - DNA, 345 bp, Homo Sapiens
cctagttttagaagtttcaatagcaggaattgatctctctctggtattttaagttctttgtggtcaggggactcaaatgtttgttccaatgactaatttaaacttctgatagaagacttgcttgaatgcggtggaggggaagggacttggtagaaatcagaaaataagtttgtggctgttattaacaaacttcaggtggacttgcaatttgtgatctgaaaaatgatatcacaatctgcttacactgaataaagctgaaacagaagtagggcagcaagtcacagaattgctagtctaacccacaagcgaattgctattgaacttctaaactagggcaggctcagt

SEQ ID NO: 247413 - DNA, 232 bp, Homo Sapiens
cctagttttagaagtttcaatagcacctaagttatttagttgctatgaagattgaatgaattaaggcctgttaagtgtctagaggacttcctggttcttagcaatcatttaatgattgttcagatattattattgtgattattatcattttattgcattctagagtaggagagaagaaatgaacacattatcaaatagatgtgctataatgtcaagtagtgataaatgctat

SEQ ID NO: 247414 - DNA, 327 bp, Homo Sapiens
cctagttttagaagtttcaatagcagtgacaagtgagctctcacggcctgggatctttacagtgtctggcaaagccaggagctggaagagacaacaagggcaggaggatgagagtttcatcaagctcctgctgtgaagaccagagctttatagatccaacaaatgacttatcccaaaattctcgcccactccagggcaaattgagaggcttataaaggtcaccctttgggggcctctttctccttttaaggttcctccagtggtcattttagctgtggtttacctatgctattgaaacttctaaaactaggggtccgagctcgatgg

SEQ ID NO: 247415 - DNA, 201 bp, Homo Sapiens
cctagttttagaagtttcaatagcacctagtagtaaaccaccccaggcagcagcccatcaacattcaaggcaaggccctacacaacagaaaggttccaacttgctgagtcctgcaaatgatcacaacattttgtagcaggattttaaaattaaggtatgtactttttattctagacgataatgctatgaacttctatatag

SEQ ID NO: 247416 - DNA, 134 bp, Homo Sapiens
cataagaatgtgttccaccagcaataccaaagagatacttttcccttttagaatagaaattatggtaccatgcagcttatttccccatattgatcaggtgagcatttgtcttaaggagtaagagagtttgtcag

SEQ ID NO: 247417 - DNA, 930 bp, Homo Sapiens
  misc_feature (173)..(250): n is a, c, g, or t
ttggcctcaacacattaccctaaccagccagcagtaacagatttcagagtaagataaagcagattctgtcttcattgcaaaaagttattctcaatggaagaatggcatctgatctcataattactagtttatattaatatagtttttttctccctttttaataaaataattannnnnnnnnnnnnnnnnnnnnnnnnnnnnnnnnnnnnnnnnnnnnnnnnnnnnnnnnnnnnnnnnnnnnnnnnnnnnntgatataaactggcatagtagttgcatataatctatgcacatcctcctgtatacattaagtcatctctagattatttataacacttaatacaatgtaaatgctatgtagttgttataccatactggttagtgaataattacaatgaaaaaaaacgagtctgtacatcttcacgagtttcagtgcggcaatttctgtggccatggatgtagaacctacagatataggtgagccaactgcattaggaaataactctaataattctgttaattcttagagaggaaaactttcaaaatcttcctcaggtatttattacaactgcctttaccattttagttgtaacacagtttaaattgttatgataacaagtaaataagagcaaagaatttatttcttaattcgaaactatacgtttgaattcaatatggtataacttaaagtggttaatacatacaatgcatgtatcataatggattcttttataagttattaattttctatggtttaatcagtctaattgttttgactgttatagaaaccaaaatattttactgtttcttttaagactaatattgtcaaaactgctgttattaacttcacttgagttgtttactttcttctgttttagattgtaatttaaaaattactattttgttatatggaatggttaatttttacctaa

SEQ ID NO: 247418 - DNA, 203 bp, Homo Sapiens
cctagttttagaagtttcaatagcaaataaacaaaggaaggtaccacacttggcagatacaaaatggcttctttgtccatgtgtctgtgcaattaaaacagatttaggttccccattgggacaaaaggaaaaacacactaaaaaaggaaggagattccttttgaacacatactcccgttgctattgaacttctaatagggtgc

SEQ ID NO: 247419 - DNA, 292 bp, Homo Sapiens
  misc_feature (12)..(12): n is a, c, g, or t
  misc_feature (167)..(167): n is a, c, g, or t
  misc_feature (176)..(176): n is a, c, g, or t
  misc_feature (251)..(251): n is a, c, g, or t
ttaaaaatctgnggtggagatgactgaaccaagaagataatctccaaaggtccacgatgggcttttccaacagctccaccttacttcttctcatactatttaagagcacaagcaaatataaacagccacttgtgttcctaacaggaattttcagttgttctataacnacaacgacnaaagcgattattattttagagcatctcatttataatgtagcagctcataaatgaaattggcaatggtattaaagntctgcaactactatcccacttatatttctgctttcaaagtt

SEQ ID NO: 247420 - DNA, 246 bp, Homo Sapiens
cctagttttagaagtttcaatagcatagccatctgatgaatttattgttagaatgaaattaattgggttccaattcctggtaagtgctcagtaaatagtaacttattatcaactcatacaggtatctaagaaaataagcaatatggaggccgggcacagtggctcacacctgtatatttcagcattattgggacgcccgaggtgggtggactcactagagctaaggagtttgacatgaaaaggcac

SEQ ID NO: 247421 - DNA, 281 bp, Homo Sapiens
cctagttttagaagtttcaatagcagagagcagggaaaggctggtgggtggatctgagtacaaacaggctagcatagaccagcacagggccagaaacacccaagggacagaccttagagtatattattggaaaatcgtattttctaccagtccagcactaattaatataacagagtaggctttgatttttataataagatacacacgccggattccttgattttagaaaaggatagagcacatttgaaagtagaaggcccatgtattagtttcctagttgc

SEQ ID NO: 247422 - DNA, 258 bp, Homo Sapiens
cctagttttagaagtttcaatagcaagtttgggcagaaatgtcgctagtattaaagctgtgactgctattgagaaacaaagagaagaaaactcttctgaagcgagtgatgtggagacaaaactacgtgagtttgaagatcttcagatgcagcttaacacaagcattgattggcgcacaaatgtcttgaatcatgcttatgaaaatcttacacgctataaagaagcagtcactagggcatgaagcatcacctgagtttt

SEQ ID NO: 247423 - DNA, 549 bp, Homo Sapiens
atgtacaattttcgttaattacctcaattgtggctgttatccccttaatgagaaacataactttacttctaagcaggcagtgacgctggcagaaagttgaaacctgaaaatcagcagatacagggttgcatataaccctttctattgaaattaagccacatagaaaacacagggagaggactccaaatagcttcagacagcagccagccatgcagggccctcaccaggcaccggatggacgctctctggactcctcaaaagaggcccaaatcacaagtgctcatttcaataacataagaaaataaacatggggcttatttatagcacaggaaagggactggggcaagagaactgctcatgtggtaatccatcctgacggggccagataggatccagacccccaggctctctggtaacacggtaagcagaaataggggccggaagagggctggctgccagcatcacaaggtacaatctaggtaaacgactctggttaataaaacggggtaagagatatgatacatcattccttcaccaactgaggcatat

SEQ ID NO: 247424 - DNA, 1176 bp, Homo Sapiens
  misc_feature (521)..(557): n is a, c, g, or t
  misc_feature (565)..(627): n is a, c, g, or t
  misc_feature (640)..(689): n is a, c, g, or t
acaaaaaagttagagcttccgccagctctcccaccttcagcagcacacccggatccactccaagatgcacacggagaccatcaagccccacaagtgcccgcactgctccaagaccttcgccaacacctcctacctggcccagcacctccgtatccactcgggggccaagccctacaactgttcctactgccagaaggccttccgccagctctcccacctccagcagcacacacgaatccacactggtgatagaccatacaaatgtgcacacccaggctgtgagaaagccttcacacaactctccaatctgcagtcccacagacggcaacacaacaaagataaacccttcaagtgccacaactgtcatcgggcgtacacggatgcagcctcactagaggtgcacctgtctacgcacacagtgaagcatgccaaggtgtacacctgcactatctgcagtcgggcatacacatcagaaacataccttatgaaacatatgcgcaaacacaacccgcctgatcttnnnnnnnnnnnnnnnnnnnnnnnnnnnnnnnnnnnnntggcccannnnnnnnnnnnnnnnnnnnnnnnnnnnnnnnnnnnnnnnnnnnnnnnnnnnnnnnnnnnnnnctcccaggcatcnnnnnnnnnnnnnnnnnnnnnnnnnnnnnnnnnnnnnnnnnnnnnnnnnncaccaccacacttccagtctcctggagcagccccccaggatgagagtgataggagacagcaatcccaaccctccaccccagtgtttcctttgacctgaccccgtataagacggcggagcatcataaggacatctgcctcactgtcaccagcagcaccatccaggtggagcacctggcgggctcttagagatccgtgctgccacccactgggaagaggaagaagtagtcctggtgtcttctttctccaactcttggtgggaaaagtccttttcttccttgacaggccttggctccatctccttgggcctctgtcacggctttccttcacaggataccatcctttttctgaactcttcttcaaaaggaacatcagccctcctgattgcaaaggaatactgagctgatggtgtcatccagcagcctcccctcccaagcaaagcttctaaaactgggggtcggtgctcaagggaaggatttgctattgaaa

SEQ ID NO: 247425 - DNA, 1120 bp, Homo Sapiens
ttggtgcagaagcagccctagcctgcctggcagtggaccctgccatcctgctgatcgtggtgggtgtcctcatgttcctgctcaccttctgtggctgcattgggtccctccgcgagaacatctgcctcctgcagacgttctccctctgcctcaccgctgtgttcctgctgcagctggccgctgggatcctgggcttcgtcttctcagacaaggctcgagggaaagtgagtgagatcatcaacaatgccattgtgcactaccgagatgacttggatctgcagaacctcattgattttggccagaaaaagtttagctgctgtggagggatttcctacaaggactggtctcagaacatgtatttcaactgctcagaagacaaccccagtcgagagcgctgctctgtgccttactcctgttgcttgcctactcctgaccaggcagtgatcaacactatgtgtggccaaggtatgcaggcctttgactacttggaagctagcaaagtcatctacaccaatggctgtattgacaagttggtcaactggatacacagcaacctattcttacttggtggtgtggctctaggcctggccatcccccagctggtgggaattctgctgtcccagatcctagtgaatcagatcaaagatcagatcaagctacagctctacaaacagcagcaccgggctgacccatggtactgagaatcatcctgcacctcctcaccatggaaactggcaagcctcataaacgaacagcagtgggtgctgaaagcagcaccaaatggagatttggattccagccccccagtgacagcccagtgggaagaagcaaactccagatgggcagaaggcagggtgcacaggtggctccagtctcaggaggatgcgcctcctctcccccatcccagccctcagcattgtgccagagtgatacccttaagtgtttgggtttatgttttcagttttgtttgggaaacagcagttgcacagagagttgggggtactgctgctgccttttcacgaggcactgccaccaccagctctagcagggatgctcctgagcttggcggacatacttagatcctaacgtgccagtgagacctgtttgtggaggtagcact

SEQ ID NO: 247426 - DNA, 389 bp, Homo Sapiens
cctgtgctacctccacatactagtctagccagccagtctgtttcggactccatgagtctctctgagaaatcataggaaagtattccgaatatttcggtacagtgggaatctctgtgctcatgctgaagatactccagcgccttcctggagatagctgtaatgagagtgactttttgaaaaattaaggctgagttcctatcggtcagctgacactaagtttttcctgttctgggttaatcataaggagcctcctgccatagcaaaggcagtgagtgtcaactatctgcatctggctgagagagacccgtttcctttcagggatgtggacagggtaaggcagacacgcatggttctgtttgtggagtagcactaacatccttagatcacct

SEQ ID NO: 247427 - DNA, 323 bp, Homo Sapiens
agtgctacctccacaaacagggtggttgagattcagaatttgttttagtgtgtcttttgtgaaactgcataaggctcacaatgtatggattttcctctttagcattttgaagtacacaaacttggacaccgactcatttgacatctccatattggtttccacctattagttgtagcatgtgagagatgttagtgaaccaatgtacttcttttttgaataaggcatcatgaaagcctaattagccaaagacagccagggacaaacctgtaggcaacaaagtcaggttgattggctgtttgtggagtagcactacagcctgtaga

SEQ ID NO: 247428 - DNA, 477 bp, Homo Sapiens
tgaggtgatctagaggagctcagtgctactccacaaacagagtgctacctccacaaacagcacgacctcctgagagcagggagacacacagggtagacacatcgtctgtgctcagtgctgaaccaatctgtgtcttcctcccagtgctatctgatgggactgcctttgaactgttatttccatcttgaggtcttgacttctaggctctgatcctagaactgtggctgccaccagctacagaagtcaccccaaatgtcttccatttcttaataaagtcatctttctgggcctcaggaatctcaaatcccttctgtagagcctcccagcacagggctgctaagagttaattaatccacttgggaagccagtctgccctggcagggttcagtccatggagacgatcacatttatcgtttagttaaaggcttcatttagcccctgtttgtggagtagcactaagctcctgtagatcgaccg

SEQ ID NO: 247429 - DNA, 362 bp, Homo Sapiens
gcttaggctactccacaaacagctctttcatttgttttgcccacaagaatcagagaagtaggttggggttcaggcatccagctcagaacatccaaggtctgccagaaagggctgaacttctgtcctccctgcaccaccaaaatccccatgctgatcgaggagcaaatagatgtcctcccttccctgctcatccttagaggagaacgccaagatccagagaccctgggacgactgtggctgtctttatcactcagccaaagagagaacagcgcaggacgtgagtagacttaagccgccacagctcagctgacagaggaccacttcctttttctctcttttatactgtttgtggaggtagcact

SEQ ID NO: 247430 - DNA, 851 bp, Homo Sapiens
ataaataatggatacccttggttttaatgccacgtcctcttcaacagttgttggttgaaatgacacgtgattccaggtaagcttttccagataaattgccctggaacttcagactttgtcaggtgaatcgatgtggaatttcagaatgggctggaatgtctaagatgggcatgtccaatattcagctcagtgtggggaaactggtggccagggctggttgcaagctgagttgtaggggtgacagttcaccaacagtgtataagcaagcgttcccttctttgcattctcgccaagaggtcaacgtttttctgtaaatggagtgcataggcagcagtgcttctcccccaaggctggggcgatggaatcagttagactattgagggcatctggaagggcatctgtgtcagggttagtcctcagggtatggtggccaatgggtttcttttggttgactgttgacaatgcgtttgttgaatggcagcctgcactaggtgacgctgaagccacagaagacacattgtttatttccagggtctcctgagaacacagaccagaattactgaggtaatcttggcacattttcttaaccatttatgcgactttcaaattccttatatgtagctgggaaaaaaggctttgctagatgatctttttcaacctttgtgaagataaagattaagaaaaaagtttaaatctgaggcaaggaaaacacagaagaaaacctaaacaaagtttcggttctcagcccctgagcagccactcagtggtgggcgtttccttcactccccagtgagcacctactgtgtgttccgtatggcgcagggcagggagagcaggccaagaaacaacaa

SEQ ID NO: 247431 - DNA, 353 bp, Homo Sapiens
acaggatcttaggctactccacaaacagagtgctacctccactaacactccctacataaagaggcagggtgggcagtgaacacatatgccagccagctcagtcctcatctgacatgccatcaccttttgttggtaatttctaccctgcaaatctagaagttatgatgtgccatagcctttatctttttggaagggctgtccctgaacgcacatgaaaagtttcgaccgttttcccttgaactgccctctgattctgtttgacagtgtttgtggaggctagcatctgttgacttctgtggtcctcagtgcctgagcaggaaaggctggctctggctgtttgtggaggtagcact

SEQ ID NO: 247432 - DNA, 929 bp, Homo Sapiens
ttggcccagatgtgacccttgcgattatttcctctgaggtttgaggatgaagataagttggagggaaagagagtaactaataggggatgaaatatagcagaagctagaagaaagcggtgaggtgagagagatgcatctgcacgtttttttcaacagcaccaggtgattcagcatattcctaattacctttcactattcgtgtatataagatcgtttacttgcataatatatcatcaatttgacatattcttaaaactagagggtgtgagaagcacagcaataggaagtctctccacaaactaggggaacacaaatggggtcattcacgtgcctggactgtcactatgtggctgtcacgtgaagtgctggtgttgatttccatttcagccagtgggtagctgataagccagtgccagcatccagcatgagcagatgtcggggagactgggaagtctccagcgttactgctctccttcccttcatgataagccagtgccagcatccagcgtgagcagacgtcggggagactgggaagtctccgatgttactgcctgccttcctttcatgtgaggggctgcacttgcttttcttgtgatctgttagtggacgaggtcttccaaggaagtgctttgcacactttctttgctcctttttacagtctttgtctttgcagcaagcaaatgaaattaagccactttgggataatgaacattcagtataattctactttgtctcattttggatctcactgttgtctttataaaaatggcacattttacaaagtagtttattcttattatactttctgctggagagtgccttgaaataaaatgtgagagtattctggtactctgtgttccagatgcatgaaattgggtgaggataacccctagtctggaatctttgtgaagcatagggttattgcaagg

SEQ ID NO: 247433 - DNA, 186 bp, Homo Sapiens
atggagtgcaaattagtgtcaagttttctcttattaatgacatttagttgcctggaaactaaaagaaactacaaatagaatttaagtcacaaaagtggttagatattttcaaagagaatgcatttgcacttattagtcagctgggtaggttttccttctcgacaccggacgttagcacccggtgtc

SEQ ID NO: 247434 - DNA, 1167 bp, Homo Sapiens
  misc_feature (862)..(871): n is a, c, g, or t
gcttaacttaacccagtgtgaagcgaagtgacaggtcagatttttcagcatatcaagttactacttaggtaagcttacaaaacttgttaaataaagtgggtatggttagtataccctttactaaatggtgaggatagctgccaaaataatcaaaaggctaattatgtgttaactttcattttattttggattgcagacatactcttgccctttatctatctacacaaattccttattaccagcagctggaaatccagttgtgcaattaatggcaactggacagacctgagccgtcagttatgagatagatgaccttttaattgtactagcaaacaatttatagactggaagattgtttttcgggaataccagtttaactgagactttaattatggtccaagagcttttatgagaaattcaatcaaaaattttgctttagaaaaattttataggtatatgttactaatactgagaatggttgaattaaaagaaattgagactgaacagtacatttccactggaaacataaagctctgaatgctgtgactgagtgaacaaaggaatagttctaaattttcttttgcaacatacataacaaaaagatttcaaactgaaggacaacaggtttaactgaatgacagatttaactacatagttttcattctataaataaataacttgtgaaatatccctgaagtcagtggacaaatggggaaaccattatttttgtcatattctacaattctgagaactaggattagaaattctaggactttaaatctttgtgctacagagaacaatattatccactaaaatcaggaagtggcttcctgaagggtattcattctctgaggtcatacannnnnnnnnnctttattcaaaacacttagtaaaggaaaaggacacaaggaaattctgattaaagtcttctcctgctctgtttgcaattatacatgctttcaaagtcatttgaaagtaagaccatttcctttggcaggtatcttgtataaagtaactttacaacatatgtttcttgaacagaaactttacaccactgtcattatgttacctatagagacaaaactactaacacaagtaatatgggcttacaattataacacaaacctgtgagagggcccaacttttttgtacaaagttgcctttatg

SEQ ID NO: 247435 - DNA, 775 bp, Homo Sapiens
tcatcccagaataaacctttgttacatttattgcttttcatggaaacaattacgtgatacacacttgaagtagaggtttataagttctagttctccaatgactgctttccaattaacatcatgtggatatctgtcctttgtgagtgccctggtgcttaataaagcttgtgtgccacttgaaagattttccacatatgacacattggtagggttggcttccagtgtgaatgacctgatgtcgaaaaagattcctcttaaaactaaacgttttcccacattctccacattgaaagaattcctcctttgtatggattctttgatgctgaatgagatccacattcctaccaaaggactgtccacattcactgcatttatgggtgttcggtttactgtgaatctgttgatgacatagaagggttgaatgccggccaaaggcttttccacactcaaggcatttatggcgtttttctccactatggatcacctgatgtcgaataagggttgaattctgactaaacgtttttttcacatttgctacatttataaggtttttctttggtgtgaatcctcttatgttcaacaagatacgcgagctgccgaaaacactttccacagtcatgacatctgtatggcttgttttgcaggtgacactgtttatggaccgtaagagctgaccgctgtctgaaggcttgcccacagaccttacactcaaaaggattctctaaaaagtgaattctttgatgttgatcaaaccatgccttacgcctaatgactt

SEQ ID NO: 247436 - DNA, 1441 bp, Homo Sapiens
  misc_feature (1378)..(1378): n is a, c, g, or t
ttggctaataggtcacttaaccattccattctctctccaagtgaaaattgccaccaaggccaacccttgggatggaaaatcactaaagcctgacagtgtccggtcccagctggagacgtcattgaagaggctgcagtgtccccaagtggacctcttctacctacacgcacctgaccacggcaccccggtggaagagacgctgcatgcctgccagcggctgcaccaggagggcaagttcgtggagcttggcctctccaactatgctagctgggaagtggccgagatctgtaccctctgcaagagcaatggctggatcctgcccactgtgtaccagggggcctgctgactggcaagtacaagtatgaggacaaggacgggaaacagcctgtgggccgcttctttgggaatagctgggctgagacctacaggaatcgcttctggaaggagcaccacttcgaggccattgcgttggtggagaaggccctgcaggccgcatatggcgccagcgcccccagtgtgacctcggctgccctccggtggatgtaccaccactcacagctgcagggtgcccacggggacgcggtcatcctgggcatgtccagcctggagcagctggagcagaacttggcagcaacagaggaagggcccctggagccggctgtcgtggatgcctttaatcaagcctggcatttggttgctcacgaatgtcccaactacttccgctaggcccatcatggctcaggctgcccaaggcttttctgtcacctcttttgttctctcacactgaccagtcttggccttaagctgacttagaagggtttttctgaattgtctagatccatgcattatttttctagcttcctgccttgctccctattcactttacactgtgaaaggtggggggtgagtcccacttgagcgcttcctgttgaataaagcaggcacttgacctggctgtagcctaggtcttgagtgaaccccaaaaacttgctttctctgctgttaacactttgtttcccatcctacctggggactgagaaagggcagaaccatgggctggagtcttcagagggcagaggtagtaggagggtcacagaagcacactgccctcccagggtctcctcgggcccctggtctgaatacccacctgacctctcaacattgaggtgtctctcactcttctacacacgatagaaaagagagtcatacacctgcagtacattttctctaattcagagttgcctcaatacattcttaggaatgaaacaactgggacaaagaaactaccattagagtcactaccaagaagaagaacacttcccaggatctgtggaacatcttgaagctctcaatcttagcctcctcttgtcttaactanagcctcttgtcttttcacccattaggttctcagtcttggctctggggcttcctgtttcgggaa

SEQ ID NO: 247437 - DNA, 402 bp, Homo Sapiens
tgcttacttaacccagtgtgtttaccattattacaaaaagcttgtatgattgctcactgcatcttctccatcctccaaggaaacatcatcgcatttaaactctgtcctccattacgcaaacgagaaaatagaggttcagaggaggagacaagttgcccaactaccaaaatacaaattcaaaccggagtcttggctctaaagactgtttccgttatttacgcttttaacacgctccatctttctatcttcccctcggtgtaccatttactctacccagagggagacatccatgcctcccgctgcttgtcacacctcccccgtctcagagtccccagaagttaaaagcaatctccacgagccctatttgagacagatatttcccacactggtaatagcgggtct

SEQ ID NO: 247438 - DNA, 503 bp, Homo Sapiens
acttaccaggtgctccgcctttgtcacaatcagccatatctttatgctaaatagatacatacactcataacttgaacgtgcactgtgttactcatcattaatttatttcccatggaatatgagacatagtgatacaatgtacatgagatcttttgtctagactcagtggatagcaatgagaaagtttaagacactaataagaagttatttcaaagtacataatggggtattgatacaaatctaatgttgatcctaaagtgaaatctatatcagctaatggaagaaaaacaaaatgaatgtaagatttgtcttgagtaaaattgttaacgtaggaaatgctggttatgttttgtctttgtcttctccatccttgccagttcttaatcccatgctaccaaaagactggactctgtgcctttggaggactcctcctccccactagccctagagctagtggtcccacattcattatattcccctcctttctcaacacacacacacaa

SEQ ID NO: 247439 - DNA, 201 bp, Homo Sapiens
ttaactggcattttgaggatattggtttaatggaaggaaaaaggaatggtgcaaagcacatggtatttgaattccaaagaccttgaccctcagcatttagcaagtcacattgttttctgagcctcagttttcttactctcaaatgaggtaatatccataagtacttgacagcacactgggttaagtaagcaaagatcctgg

SEQ ID NO: 247440 - DNA, 467 bp, Homo Sapiens
caactttgtacaaaaaagttggcttcttcctcattgcggctggcaagttcggaggtgacttcctggtctatcctggtgaccccctccgcttccacgcccattatatcgctcggtgctgggcccctgaggacaccatcccactccaagacctggttgctgctgggcgccttggaaccagcgtcagaaagaccctgctcctctgttctccgcagcctgatggtaaggtggtctacacctccctgcaatgggccagcctgcagtgaactccagagacctaggggatgtggctgtgtcggcagcaagagcctttctggatgttccccagctctttttcttggagtttagaacatcctcctacctttctccgcggttagtttttgattccaggttttcgaacactacatcttttttatgttcttccttgtttcaaagcacttattggctgtgttttagtagttacctatttt

SEQ ID NO: 247441 - DNA, 887 bp, Homo Sapiens
ggggcttcgcccacctccccggaggctttgggtgcgctgcagcggtccgcggcgcgcagctgtttcggtaactgctttgcctcccggctcccgcaggaggatgctggtggtggaggtggcgaacggccgctccctggtgtggggagccgaggcggtgcaggccctccgggagcgcctgggtgtggggggccgcacggtaggcgccctgccccgcgggccccgccagaactcgcgcctgggcctcccgctgctgctgatgcccgaagaggcgcggctcttggccgagatcggcgccgtgactctggtcagcgccccgcgtccagactctcggcaccacagcctggccctgacatccttcaagcgccagcaagaggagagcttccaggagcagagcgccttggcagctgaggcccgggagacccgtcgtcaggagctcctggagaagattacggagggccaggctgctaagaagcagaaactagaacaggcttcaggggccagctcaagccaggaggccggctcgagccaggctgccaaagaggatgagaccagtgatggccaggcttcgggagagcaggaggaagctggcccctcgtcttcccaagcaggaccctcaaatggggtagcccccttgcccagatctgctctccttgtccagctggccactgccaggcctcgaccggtcaaggccaggcccctggactggcgtgtccagtctaaagactgggcccacgcccggccgccctgcccacgagctggcctacagtatctaccgaagacctgtgggaaccaaggcttcttcctcagtgcgggctggcaagttcccgaaggtggacttcctgggtccatcccggatgaaccccctcccgctttccacggccccatta

SEQ ID NO: 247442 - DNA, 177 bp, Homo Sapiens
tgcttacttaacccaatgtgggagcaggcaaggccgtgaggccttcttcctcacaaatccagcacctcccacctgccatcgggtaaagagagggagggcactgctatggctggtgttactgagccctcgcagcatgccgggcactgctcattcgtgttttacaccattgcgtaacac

SEQ ID NO: 247443 - DNA, 504 bp, Homo Sapiens
  misc_feature (131)..(149): n is a, c, g, or t
attatcgataagtaaagacttactcctgccttgttatttatttgttttctggttgttttgtggtcttcttctttcttttcttcctgtcttcctttagggaaggtagtttgctctggtgatatgatttaggnnnnnnnnnnnnnnnnnnnatgtatccagtgtatgttttataggtttgaggttaccataaggattacaaatactattttgtaacccattattttaacctggtaacactgtttgcattaacaaacaaaaaactaataaaaactctacatcttaacttcatccccccactttttaactttttgttgtttctaattttatcttatttttctgactggtcttgaaaagttgtagttactatttttgattggtttatcatttattctttctacttacacaccacagttacaatgttatcacactttgggtttttctgtgtacttactcttaacagtgagttttttacctttagatgattctttgttgctcattaatgtc

SEQ ID NO: 247444 - DNA, 899 bp, Homo Sapiens
  misc_feature (116)..(161): n is a, c, g, or t
cccttcttcctttactttggccgtcatcctagagggaatgtactggaattaaacgtcgagtcatattcttccctcttagagcaacaaaatttgaatgtttctctcactttctggannnnnnnnnnnnnnnnnnnnnnnnnnnnnnnnnnnnnnnnnnnnnnctcattagccttttttccttgaactccattttggagtgcaccctgtagttgtaagagcattgtgctgagagcgttccccaaatgagggtctgcagcttgcactgacgcctgagttcctcacccaccagccccgtgccgaccctgtctaacccgtgtgggggtgctccactcaaataggcccttggcagaaaagattgtccgttctgtccacacactgcctggatacagtctccagctctaggagatggaattggtttgctccatttagaaatagatcaaaactgggcattcagtagatggtaccaatatcttcctgtactgggaaatactaaatttagattgtgaatatttacctaatgataatttttagagaaggagatatcatagatgagtatgattgggaagttcagaaaactaaaatttgatttttacagccatccaactatagaatcattacgaatttagtcatttatggataaattcaaatgaacacctggactcttgttaaaatcataaggtccaaccccaagataggcacttcccattcaccattctgttttaaagcagtaaaaattgaggtgcccttggatatcccacaagcctaaattgagtacacccttgaaaccagagcccctcagttaatggggtgaccgacatgggggtagctgatccccaggggggcattcccctctcgagctggcccctgcactgggtgggcctggggattgtgcttccttg

SEQ ID NO: 247445 - DNA, 554 bp, Homo Sapiens
cgttaccgtaccgaacggcaggtcaacaagaaatactggttgcactctcagcagcgggaagctgagcagcgggctgccctggcacggctggcagggcagctggagtccatgaacgatgtggaggaattgactgcgctgttgcgaagcgctggtgagtatgaggagcgcaagctgatccgagctgccatccgccgtgtacgggctcaggagcttgaggctgccaccttggctgggaggttgtacagcgggcgtcccaacagtggctcaatagaggacagcaaggggctagcggcacacaggctggaacagtgtgaggtgccagagcgagaggaacaggaacagcaggcagaggtttcaaagccaacccccacccctgaaggcaccagccaggatgtgaccacagtgtcactcctgctgcgagccccacctgggagcacatccagctcacctgccattaaaggagctgttcagctcctttaatggcagtggcatgaacatggctcactgaaacctctgccttctgagctcaagtgattctcctgccattaaaggag

SEQ ID NO: 247446 - DNA, 1081 bp, Homo Sapiens
  misc_feature (898)..(898): n is a, c, g, or t
  misc_feature (1000)..(1000): n is a, c, g, or t
  misc_feature (1005)..(1005): n is a, c, g, or t
  misc_feature (1012)..(1012): n is a, c, g, or t
  misc_feature (1038)..(1038): n is a, c, g, or t
  misc_feature (1070)..(1070): n is a, c, g, or t
ttggccgcaggccccgccgccgccgccatctttgttgggggcagccaggcctggctcgagatgccgaagtcgtgcgcggcccggcagtgctgcaaccgctacagcagccgcaggaagcagctcaccttccaccggtttccgttcagccgcccggagctgctgaaggaatgggtgctgaacatcggccggggcaacttcaagcccaagcagcacacggtcatctgctccgagcacttccggccagagtgcttcagcgcctttggaaaccgcaagaacctaaagcacaatgccgtgcccacggtgttcgcctttcaggaccccacacagcaggtgagggagaacacagaccctgccagtgagagaggaaatgccagctcttctcagaaagaaaaggtcctccctgaggcgggggccggagaggacagtcctgggagaaacatggacactgcacttgaagagcttcagttgcccccaaatgccgaaggccacgtaaaacaggtctcgccacggaggccgcaagcaacagaggctgttggccggccgactggccctgcaggcctgagaaggacccccaacaagcagccatctgatcacagctatgcccttttggacttagattccctgaagaaaaaactcttcctcactctgaaggaaaatgaaaagctccggaagcgcttgcaggcccagaggctggtgatgcgaaggatgtccagccgcctccgtgcttgcaaagggcaccggggactccaggccagacttgggccagagcagcagagctgagccccacaggctccggacgcagaggtggcagtggcaccagggccggcagagctttggagctctggctgtggacatttttgtctgctgtggacactgagaaagttggccatgaggctgncttggcccgtgtgatcgagacagtagccaagctcccctgcgagagcctcaagtgccgtctgggggacgttttagaggcgtggcacttaggagttcacatctntgagnattacangctttattccttccatggttaacagnatttccagggtttaaggttgatttttggacgnttttctttttt

SEQ ID NO: 247447 - DNA, 746 bp, Homo Sapiens
gcgcttacgcgtctgctgggccttacgcgcgcgctgtgaggctgcttgtggcggattcctcaccaagctcaacggctccatcaccagcccgggctggcccaaggagtacccccccaacaagaactgcatctggcagctggtggcccccacccagtaccgcatctccctgcagtttgacttctttgagacagagggcaatgatgtgtgcaagtacgacttcgtggaggtgcgcagtggactcacagctgactccaagctgcatggcaagttctgtggttctgagaagcccgaggtcatcacctcccagtacaacaacatgcgcgtggagttcaagtccgacaacaccgtgtccaaaaagggcttcaaggcccacttcttctcagaaaagaggccagctctgcaagcccctcgggatgcccccatcagctcaaattccgagtgcagaaaagaaaccggaccccccaagtgagcctgccaggcttcccggaccccttgttactcaggaacctcaccttggacggaatgggatgggggcttcggtgcccaccaaccccccacctccactctgccattccggcccacctccctctggccggacagaactggtgctctcttctccccactgtgcccgtccgcggaccggggacccttccccgtgccctaccccctccgattttgatggtgtctgtgacatttcctgttgtgaagtaaaagagggacccctgcgtcctgctcctttttcttgc

SEQ ID NO: 247448 - DNA, 1927 bp, Homo Sapiens
ttggccaatttctagctaaatcattttgcagccttcttttcagtgtttaataacaaagtttttcctaatggcccttcttttagtaaactggacatgttattccactacaaaaaccacaagttatctggccttttagatatttttggaatcggacctggttgagtaaggacctcttaaaagggaaaaataaattttgccgtcagcttcttcataacgttttcaaggaaattctaggcaatcattcctgtcaccaaagaactaaaattttggttgactggaactagtgagctgtgtccatggtgtgtcatgaaggatgtaccccagagagtaacatgagccactgggcagatcccagggaccagtacttgctgcaggatctagtctgtaatagtcttggccatggctctgctgaaagcaagccattcagtttcttgtttgtacctaaaacaccaaaaaagaaacactcaaatccagctgctttgtcaattgtcagttctgactccttttgctgtggccttatccgtactatattgtgggtagagtaacttctcagaaaaaaaggaaatgtctgtattggttggatgaaactccaccagagcacagcttagctggggcgagatgcatgtgaaggcaggcagtgccaagattccgcttcctttgtttgccaaatactataaacacaaggaaatgcaagttacgctaaatggcagtaatactacccaactgccctttctgttcattttgtttgaaggaaattgttttgaccaaacagaaaattactttggaatggtgtgttttacagtctacctagcaaatagatggacaatatttttcaactgtatgagcacgtatataaccgagagaatgtggccacctgtgttcaagaatccactgatactggtttttgttaaacattggaagttcaggcaatggaataaatgtaggaacatacagaatgttgcactaatttggtagcctgggaattttttttattgtgcagtatgtatttaaattttgtctatgttaattaccagcatttacctttatttaaatgatggtaaggtggaatattgaataaaattaggttttgtgttttgttctttgtagtctgataaaatctccacctggtcattcattgtgtgtgacttgatacctgttaacttgccccttagtatcagctgttacttgacacaaatgtgtgtgttattcagaggttttcagtctggacactccataggtgagtgtcgtgtcttcgtgagacagcacagttgtctcatgttgtgcatagttcatgtttcctcaccacccagtcctttctcctgctcatcaaaatcagcatacacatttttgactgtacacactataaatggcatcaaatttggatatttttcttaattatgacatgcatagtaatgtgagtcctgccagtattctggtggataaggtctttggagtatttggttgcttgtcacaacattctccaagcagtgatatttctaaagaggagatacatgttgaaaacggttttaatttacacttccatttcctgattacatttggaaatactttgtgtaaaccatcccccttccacctccatttgtctgttgaaagattttaagttggaaacagttcctgtctgaaaactcttctgagaaccacaaaccttgtgtatggattcggcatggagccctcagctggcggctctgggtgctgacggccgctggagaggtgggctcccctcgtgcactttattgcctgggcagttttgcttgatcttttgtgactttgagccttttaagtagtttgaatgataagacttaaaatgtttcataattatgttttatgtaacagactttgacattatttaaacgagcatgtgtaatgtaacttttctctttgaatcatataaaacttgattttacattga

SEQ ID NO: 247449 - DNA, 394 bp, Homo Sapiens
tacggtgttacttcattattttatgaagtaacaccgtaatggtgaaggttgtggtgaggaaaagaaggttggggaagaaaggaatgcttctttttattttctacccactcgacctcacccaattactagggctcaattgagtccttagccaaccaaaccatccccaatgtattttatgccaatgaagctctttttagacccagtacctccctactgccgtgcttcccgcagcactcccagaagagtaattccaggataagcagatttctctcaagtctcagtggcgactagtgcctcactttgctaggtttcgattttacgctccgaatggccaatgaggccgggcgcctggttcacgcctgtatcccagccctttgggaggctggccgggcga

SEQ ID NO: 247450 - DNA, 1360 bp, Homo Sapiens
ttggctgtatctgttattggtctactattacaggatgattcttcttcctccattgatctcaactaaatatgaattagggtcatgcatgaaatctgaactgccgtgtcctgagttatggttaagaggtatgtgctgccaccccatgcatgtcttccccatccccataggattttaaagtgttcaggtaccaaacacagttctgtgtgaggttttatgcctacttcctcaacaccaattcagaggcaacacctgtgcatctgtcccaccaaaggtgctttaatacctaccttcactatttgagaaaggacactcacagttgcctgtgggttatgaaagaattggccctacgtcctgcatgtaagatgttacaggggacattgggccaggcattattatatagagaagtcttatttgccaagctctgactaacttctggatatgaaaataaggaacttgcccagcataggcctataggcagcagccttactagtaaatcttgccacagaatcacttgaagctagacagagaaagaagttccctttaaatatttgtcccattgtttgtgattaggatgtaagctttgtggaatgtaattaaccctgctttacgaagtcaccatattataataggaaaaacactgcctaggaggcaagagatctgaattccagttctgatgctgccactgtgtaaggaagtagttttataacccatgggcaaatcatctgagctttctcatctgtaaagttagggagaggaattaattagttgatctgtaaaataatcagcttcaaaacgttatggctaaatctgtagaatgtatgcccaattgctaaacggatgttgtgcccagaattttatctagtgactacctcaacatacaggccaagcgttacctacaccaacacccaagccattaatttgaggtgccatgagaataggtgaaccacagcctaacaccatttaggtttttgtgtttttttcaggcttgcctctacttaaatatatttagatgagagagttctcttagacttctttctttgtaaggaagggttatttggggaagtgttggaaaaaagattagggcagggtacccttagtttatatagggtacaaaagaatgggaaacatcttccctttcttctttaatctctgaagtcatgtttggaattacatataatgtagcaggtactggagaggacctgaatttcaagcttctgatttagctgtttgtaaacttccaagttttgcttgactaaagaatgctgatcttttttgggagtctgatctcctttctaatatcagaaagtgcttttttatattccagatttgcttgaattaaactgtttggattaaagaacat

SEQ ID NO: 247451 - DNA, 220 bp, Homo Sapiens
  misc_feature (55)..(63): n is a, c, g, or t
actacgcactgacttccctgtggtttttcatatttaaatgtttcaatttctgtannnnnnnnnctttgagagaatactgtgtgatttctgatgtgcaggggggtggctacagaaaagcccctttcttcctctgttggcaggggagtgtggccctgtggcctgggtggagcagtcatcctcccccttccccgtgcagggagcaggaaagtcagggcgtatg

SEQ ID NO: 247452 - DNA, 823 bp, Homo Sapiens
  misc_feature (314)..(366): n is a, c, g, or t
ttggctccctccaagaggggcccagcattgtatttccctgtgaccccttactctcctggccagaacttgagccagctgtgggatgttgctgcaggacagtaagccctcacctgggcaaacatgaagctctggcctcctttcctcagccccttgttcttccctgtcctccaccctggaccccagccggctgctggagcccagaggccaccttctccctgcatcctgaatgatgcttagtcagaagcctgtgttggaacatccctcgtttacggggcgctggcctacctcctgaggacctcagccacagatgatannnnnnnnnnnnnnnnnnnnnnnnnnnnnnnnnnnnnnnnnnnnnnnnnnnnngctgttgagtgttggttgctagagtatccggctggctgctgtgtgcctggtttcctcacatcctgcctcagcttcaccaccctggcttatgtggaacacctatcagggagcagaaaaggggtgcagtacactaagtgaacccagattctggattcttggtgtccacagcctagctgatacgagatagcccataggacacctggtttaggtagaaggagcctcctctaaggcagtgctgggcacccacgggtgtgctggatactggagtttgagaggagggaggtgctggggcctaaggagacactagaaaagtggtagatgggaccggtcagtggctgacggtgagggggtaagttagaatgtcccaggccgtcacttacggggtgagggaaggcgactcgggaccctaggagtagagtcggcccctgtcgtgcgccgttgaagcgttgcggcacgt

SEQ ID NO: 247453 - DNA, 255 bp, Homo Sapiens
cttatgttctgaaccaccgagaggtgaaagcataacatgggtacagaggggacaacaatgaatcagaacagatgctgagccataggtctaaataggatcctggaggctgcctgctgtgctgggaggtataggggtcctgggggcaggccagggcagttgacaggtacttggagggctcagggcagtggcttctttccagtatggaaggatttcaacattttaatagttggttagctacactgtcatactgcctgc

SEQ ID NO: 247454 - DNA, 326 bp, Homo Sapiens
cttatgttctgacccaccacaatcgggatggtcatatgtcccctgaagtcacagaaacagaactctcaactagcagactgttaacgtgtcctattatcctcaggttcttgggttattcgtagaatagcaaagcaaactacctgctttgtaacgatatcatttacacgtcaacatcaggaacatatacaaaccacaacctggccaaaccaggagaggtgcctggaccaggacaggcagacccaacgcctacgcttgcttctaaccagcctgggcaggtgggcagttacacacactcctactcaccagtggtcaacataaggtccgcg

SEQ ID NO: 247455 - DNA, 500 bp, Homo Sapiens
tcagccattctattcttagctacccaagagaaatgaaagtctatgtccatataaaaacatctatacaaatgtttgtagcagatttatttgtaatagccaaaaactggaaacaaaacaaattgtggtatatccatacaatgggatactactcagcaacaaaaggcaatgaactactgacacaagaaaaaatatggaggatgctcaaaataattatgctgagcaaaagccagactaaaaaggatacaaactgtataattccacttatatagatttctagaaaatgcaaactaacccatagtgacagcagatttagtggttgcctagggacaaatagggaaggccaggagggaaagattataaagaggctgaggaaacttctggggatgaggaatatgttcattatcttgactggtgatggtttcccgggtgtatatcaatgtcaaattacacactggacatatgggctatttattatgtcacttatatctctacaaaccagc

SEQ ID NO: 247456 - DNA, 945 bp, Homo Sapiens
  misc_feature (736)..(736): n is a, c, g, or t
  misc_feature (794)..(794): n is a, c, g, or t
  misc_feature (809)..(809): n is a, c, g, or t
tcggtgctcacttctgttatgttttctccctctagtaaaatgtttatcggtggactgagctggcagacctcaccagatagccttagagactattttagcaaatttggagaaattagagaatgtatggtcatgagagatcccactacgaaacgctccagaggcttcggtttcgtcacgttcgcagacccagcaagtgtagataaagtattaggtcagccccaccatgagttagattccaagacgattgaccccaaagttgcatttcctcgtcgagcgcaacccaagatggtcacaagaacaaagaaaatatttgtaggcgggttatctgcgaacacagtagtggaagatgtaaagcaatatttcgagcagtttggcaaggtggaagatgcaatgctgatgtttgataaaactaccaacaggcacagagggtttggctttgtcacttttgagaatgaagatgttgtggagaaagtctgtgagattcatttccatgaaatcaataataaaatggtagaatgtaagaaagctcagccgaaagaagtcatgttcccacctgggacaagaggccgggcccggggactgccttacaccatggacgcgttcatgcttggcatggggatgctgggatatcccaacttcgtggcgacctatggccgtggctaccccggatttgctcaagctatggctatcagttcccaggcttcccagcagcggcttatggaccagtggcagccangcggcggtggcggcagcaaagaggatcaggctccaacccggcggcggcccggaagggnttccccggggggccnacagccccaggaccctgtcgccggatctctacgggccctgcagccaggaaattcccccggagagggggggaatttaacttaaggggcgggccagccccacgggcccgggggttccgggcctccgggccaacggaaa

SEQ ID NO: 247457 - DNA, 1393 bp, Homo Sapiens
  misc_feature (449)..(459): n is a, c, g, or t
  misc_feature (630)..(650): n is a, c, g, or t
aaaaatatttttgattctctctttcttaatagttctatgtagttaatggaattgtatttacaacatttcttttttagaattcacaatttcaaaaaacgttataatatcacctctttcaacagaaaaaaagcacttatagaaaaggaggacactcaaaacactgtcgtccttacgttattgccgaaaatagatagactcagattaacaaagagacatcacaaaaagaactgctagaaagtctgttaattagcttactacatctcacttcttctacaacgcaaaatagaaagctcacgcccacctcccgccctgcacttcacaactttgcttcagtgtgtgctaaagttccacctgaaaattcatacagtctcagaattggtaccaaaatagggagagtcatattaccatctcagcatcctttaaaagtgagaacagaaccaaaacaagcnnnnnnnnnnntgttttaagaaaaaaataactccttaatataacaattatactatggttagctttgaactagatattaaagctatgtgactactggactaagtcaaaatcactaccaaatgtgattcaaagagatttaaaaggagaatgggaagagagggagggagagggaaaccatcaagnnnnnnnnnnnnnnnnnnnnncgaaatcatgggttatatacacatttaaaagctgttgtcttatattacagcagattcgtgagatgatgagatgtagtcaaccctcgatccgaagtgagccatctctggttgggatggggagtgaggctggtgggggtccaggtctgaggacatcacctaaacaaagggccactcagaaacttcgcccagtcttgcctggacatccaggtatgctctcagagtgagatggcaacgaaagcacctgctcaatggtatccatttgtaaaggccgttgcaatcaaaggtccagctatgccgtggccgaagcccgagcccggctgtgggctggccgcacttatgtaattccccactccggagtcctggctggcagggccgtagagatcggcgacaggtcctgggctgttggcccccgggaagcctccgggccgcgccgggttggagcctgccggggaagcgggcgcgccaaaagttcggttgagcactgtagctattcaggactgatcctcttgctgccgccaccgccgctgctgccactggtccataagccgctgctgggaagcctgggaactgatagccatagcttggagcaaatccggggtagccacggccataggtcgccacgaagttgggatatcccagcatccccatgccaagcatgaacgcgtccatggtgtaaggcagtccccgggcccggcctcttgtcccaggtgggaacatgacttctttcggctgagctttcttac

SEQ ID NO: 247458 - DNA, 534 bp, Homo Sapiens
  misc_feature (333)..(383): n is a, c, g, or t
tagaatctggctcagcctgagtccagtttctttctgtgttttgagctactacctagttactgtcatctgtgcctgggaacgttcatggctatggctcgggttcaagtctgcagaggaaattatacagttggcgaagtcacagagtggccaagggactctgtttctcagtcagcactgggaatgaaagtggaaaggggaagcaggggtacgtcacaacctccaatatcagggtgcccagcacgctgaggttctggtaaggggtttcttccagactgcagacttccttcccgctgccttcacacagtagtaagctgcactaagctcttggggtcnnnnnnnnnnnnnnnnnnnnnnnnnnnnnnnnnnnnnnnnnnnnnnnnnnngccttggggtgaggatttcacatgggagttagggtgcacattcagtttaacacggcagggataggaccagtgctctagagggtgtctgggtagctgctggttcatccagaagtttactgggtaatatcacgaaacttccacaaatcatcta

SEQ ID NO: 247459 - DNA, 384 bp, Homo Sapiens
  misc_feature (154)..(204): n is a, c, g, or t
aatgaaagtggaaaggggaagcaggggtacgtcacaacctccaaaatcagggtgcccagcacgctgaggttctggtaaggggtttcttccagactgcagacttccttcccgctgccttcacacagtagaaagctgcacaaagctcttggggtcnnnnnnnnnnnnnnnnnnnnnnnnnnnnnnnnnnnnnnnnnnnnnnnnnnngccttggggcgaggatttcacatgggagttagggtgcacattcagtttaacacggcagggataggaccagtgctctgagggtgtctgggtagctgctggttcatccagaagtttactgggtaatactcagaaattccacgaatcatcaaggtcattaccttggctcattgggttccgatg

SEQ ID NO: 247460 - DNA, 292 bp, Homo Sapiens
ttctgcagacagctctgtctactctcccatctgatctgtgcctcccctctccagctcctccttcttttcctaaactgcctgcccatttcactcgcccgtgcagcatgccaggcattaactctgtctgtaggatcaaaaagatgaactggaggatgtcccagcctcaggcagacaaacaagatcattgcagagaatttctgttgccatgggctgggcatcatcctagagccgagaagggggctctcaggggtgccaccctgccttgatccttcagctctgcaaggaacccacg

SEQ ID NO: 247461 - DNA, 498 bp, Homo Sapiens
ctacctgacggggtgggctggctgtcagagactgcgcaggcgatgacctgaaggtactgcagcagttcgcagcctgcttcctggagaccctgccggtcccaggatggagcagacgcccaaggcctccaagcgggagaggagagacgagcagatcctggcccagctgctgccgctcctgcacggcaatgtgaacgggagcaaggtcatcatccgggagttccaggagcactgccgccggggactgctcagcaaccacaccggcagcccgcggagcccctccaccacctacctgcacacccccacccccagcgaggatgccgccatcccctctaagtcccggctcaagcggctcatttccgagaactcagtgtatgagaagcggcctgacttcaggatgtgctggtacgtgcacccgcaggtgctacagagcttccagcaggagcacctgcccgtgccgtgccagtggaactatgtgacatcggtgccctcggcccccca

SEQ ID NO: 247462 - DNA, 333 bp, Homo Sapiens
ctccacccgacggggtggcggcacacagactgtgcacttacctcactgccggcctcataatagtaatcagtgtaaatggtgtttctctttcgttctgttatttcgtggcgtacgtgttaaagtgtgtgaaactacaaggccagctagtcctttcatcattccctttggtgcaggttttggagcagcaaccacagggcacacccctcgcacactctttatggggaatttttgcaccaggcaggcagaggagtcatcttggtcacaagtctcccttttccccctccccagcatcttcgatcctgtccccaccccatcgtgagcgtgatactcaag

SEQ ID NO: 247463 - DNA, 252 bp, Homo Sapiens
tgatagactaggtgagaggggggtctagtcctctaactggttcaggaaatcctcctggacgttgacccccggccacctgctcccagaagtcccatgtccttgtccctgcccctccctatcctggtcctctcctagcaggtctgctttctgtgctttctctccctgccctcctgcctgtgcgtcccctccatgaggaccaccctggaatctgactaaacctgtcccctggggtcgggcgcagtggctcacaca

SEQ ID NO: 247464 - DNA, 394 bp, Homo Sapiens
ctccacccgacggggtgtagtgggcttagaagtcagttctgccttggggacagtggcatgcgaggtgcaggcaaatgggacaggacactcaagtcctgggaggcaggaaagacacgtgtgtctgcggagtgtacacagtgccagcagtgcagctggacaggacaaaaaaggagatgggggtgggggcagccggggactaagctgatagctggacaaaggtgtttcatctgaggaagccatcggatctggcggacacaggaggttttacagaccgaagggcttggccagtcttgccatacagctcccgctccctctgattcgccgcggggtgacacgtgtggctggcagcttttgggctttgaagagcctcttccccatcccaccccgtcggagc

SEQ ID NO: 247465 - DNA, 343 bp, Homo Sapiens
gtgcggggtgttggagaggataaagaaggggatatggtgtttgcttctaggaaccacattctctgtgggatgggggcccccaggtcaagtttaaaggaaggcaggggcagggaacctggggaaggtttgtgaagcgcccaggaggtcgcgcctcagaagaggagcctgcaggctgcctccaaacggatggattccgtgatgccccagagggcagaagactagactttagaaagagagaaaggacagtggcctatggagcccagaacctgggatttgaggcctgacctatctctccctgactgtgtgactgtgagccatcacgtacccaccccgtcgggtggag

SEQ ID NO: 247466 - DNA, 860 bp, Homo Sapiens
  misc_feature (609)..(671): n is a, c, g, or t
gacatttggatagtgccgtttattgttccagcaccccttcctccaccacgcccaggcctgggacaaacgggcacccgcctcctgcggcgctgcctctcctacccggaatccaggaggggaaggaacgactcgagctctaaggatgggacccggaaggcagaaaaaaataatggattggggcgggcggggagtcaaaaggtgggctgattaaaagaaaattctaaaagagaaaagggcccctggttctcttccctctctgggatcctctaaagggcctggtttctccattcctcgcagcaccccccacccccgccccggacaactgaggaagggcagggaaaatggccttccgcttggggcctggtcgccactcggcctctgcagttctctccattgtctctccggctcgcaggccgataacttaggaagggcgggccaggctgagggggcagagtctcgaggcggagaagtgaacgggccctaatacgccccagtgcccccccacggacggcgcagggacagaggagggcggggagccggggatgccgcggggtccatcgcaccccgtccgcttctccctgggtctcttagtcttgcacgtcgtcgctnnnnnnnnnnnnnnnnnnnnnnnnnnnnnnnnnnnnnnnnnnnnnnnnnnnnnnnnnnnnnnngcgcggcactcggggcaccgcccgcccgcggcctcgtcgtcgtcgtcctcctcctccccgcccgcgcggtagtagctctgtccgcagctgctgcagaccgagggcgcgcccaccgcgtggatcttcttgtgtctccggagcgcggcgccctgcacgaagccctccccgcactccacgcagatgtgccaa

SEQ ID NO: 247467 - DNA, 517 bp, Homo Sapiens
cattttagaaggatgagggctaaggtttttatactcttaaaatgtatccttggctgtcggctaccacttacagatgagtaaaatatatgccacagtgagttgggaaatacgtttcttctcttatgctaatgatatgtttttaatatctgcaaccaggaacaatgaaaagaagaaactaagagagaaacggcatgtgtatttaactaccagaaaggactctttacaaactggatcaaaatgaaaactaccctccctagaagaagaactccattttgaaactgatttggtatcctgggattttatgttactgctgagttgtactggccagaataccaggaggctatggccgatcacaaccacactttctactggatttccctacagttgaagtgaacagcttggtgaaggcccatcttgaaccattttctaacccaaaatattcatttagaagggatccagcgcctgggagaactcaataaccggactaatggtactaaatttccttgaagccattgcc

SEQ ID NO: 247468 - DNA, 1281 bp, Homo Sapiens
  misc_feature (592)..(602): n is a, c, g, or t
ctcagatgaactgttctcccccttctttgataagaagtaggtggcagcagcctctggaaaagtcagggccctggaggttacctggcccagggctactacagccacaggccccagtggcaccatgccaccccttccatggctccactcaagggggccacacagccaccgcctcttcctcctttccttcatcccaaactgggacaaaagacttcaagttctggctaagatgtagcagcagcggatgcccgggcatccaaagtggaaagccagggccccgtgtcaccggtgtgggcaaacacacatgcacgtgcacacatgttctccctgaatcactcagcagcagacaggctgccgccgtgggggtctcagccttgctagggctcaccaggtggaagcctaggtggtctgacctcagtttaggagtgggtcatttacgtcatcttaccatttggggacgagacaggaatggtatcccttagggacccagagacactgcaaacagtgggtggccatgtagggctgcatgtccctgggtccaggggaatggagggagcaataacttgaagaaggggggaagggtttcttttatccnnnnnnnnnnngtgtgacttctatcaaaacacagaaatacagcacacgcacaaaccagcacaaaagcgcagcgctctatttacagctccggctggcacctgcccacctggccagccgcctgcagggaggggtgggagaggggtcagccacatcagcagggaaaggatacgaagcaggtaaagacagaaggaaaatgggcgggtgcggagaaaccaagagggaggtggagctccagcaatgcggacacgaggagacaggagcagaaggggctgggggagacctgacctgtccttcctctctccccccagattcccatccaggactccaaaagcatagctgaagggggtgtggcgggtgcatctggctgggctggctgttgctgatccctggcccggagccctgcggtggtggtggggggggcagcaggggccggtcgggcagcagctcgtcgtctgaggtggcgatggtcttgatggcattgtggtagagcggggtggagctgggcatggcgtacttggacatctgggtcatcatcagtgacagggggttctgggaaggtgtggggtctggggaggaagtgaatggtaggctggggttcatgaggccgctgggagggttggcgggaggtgctgaggagctgctccgggggccgctaggcgggagggtacctacagaaacggggagacccaa

SEQ ID NO: 247469 - DNA, 864 bp, Homo Sapiens
ctgatgttaggcagtgctgcatgttcgctgctgatctggcgttccgtcctctttccccgtctcccagttccctaccacgttggctcccattcgtctgccatgctagggtccccggagctctggtgcagtggccctgagcagcatgcacccattggtccctcctctagtctgacctggtgccgcatgatcctggagcgcaggctccacgcacacacaccccagccctgtcccaggggcctggccccctcagccatctcagggtgaggagctgccagtcatgtccagatggaatgactcccatcctctcctcatctcccctttgacgagcctcaaactgctcagctcatcaaagagccattgccaacttccgtatgtggttctgggtcccagggagccttggaacctggcaccctggggtggtttaattcatcattaagaagcattcctgcttctcaagggacacagtggcctgcatgggccagcatggaccctgggctgatcatgtgcattcctgcttctctggggacacagtgggcccacatgggccagcatggaccctgggctagagcaagcacatctccatctcttccacctcaggcagtgtggctccagatgtcaggagggactgacctcaggaccttccaggttcctctgtgccaggaatgagaggccaggcccgatcctaccacctcgccttgaccctgaagtcagagcaggccagccaagcaggaagcacactgtttactttttgcatgaaaagtaaatgtgtacttgatagagctaaaatatgatcttttttaatttctcaaccccataatttgagccattgccttgcttaattttggtttccaccatttcctttta

SEQ ID NO: 247470 - DNA, 1258 bp, Homo Sapiens
  misc_feature (1116)..(1169): n is a, c, g, or t
ggcctcttttgccctttaggctgttgctagggagagggaagagggagaccaaatgtcggggttggggtgggagggcgtcaggcagaggcaactgacttcatttgtgccacacgcatgggcatgcagccttgcgctgtcccaggcatgcagctgcctggggcccaagttgcagtgagcagggtggggtctgggagggggtgagaggcaggaatgggggtcagaagaagtgggagcagcttcttgggctgagtgcagccaaaggggagccagaaatgggcagttctcccaggagtgagcagctactgtaacttttttaaattaagacaaaaagccttgaagaaaatgactttatttttctaagtgtaacctcagtatttatgtaatttgtacaggggccatgccccacccccctcctccccctttggggttagaccttgagggtgggccagcataggggggagggtcttttaccctgtgtcagagcctaccttcaccacctatatccagaaggggagctttttcagaaacagggcagcagtggggtgaaattttcttaacccctaagactgccttcagtaggaacaagctggcttctgtgattaggtgaagggatgggggaagattttatgcacagcctagttatcaaggggatgatttgccgacatgtttgagaaccccctaacctctaaccctcattgctgtcttgccccagtttgggttgccaagatggaagtcacctttctgggctttctcctggagatagctggggcttatgggtggctttcaaggctggggcatggcaaatcaggggccagagagcaggggagcttgggactcaggtctgtaactgcccagccccttttctctgctcttgtttcactccaccatcactcactcactccccactcccccacccatggggaggagacctttgatgaattcttcctctccttcccacaaaagacagacccagtgagtgaatcaggcaaagtgcttataatgtgtgttgtgtgagcgtggccttgggaggacatgcgtgtgtcagggatgagttgaggtgatatttttatgtgcagcgacccttggtgtttcctttccgggtggcctctggggtannnnnnnnnnnnnnnnnnnnnnnnnnnnnnnnnnnnnnnnnnnnnnnnnnnnnntatgtcagtggtttctacttcccctgggatgctgacccaggaatagtggacatggtcacagtcctatgtacagagctttcttttgtatt

SEQ ID NO: 247471 - DNA, 705 bp, Homo Sapiens
tcaggttcctggaaagaactggtttgtgtgggtgacacagatgaaccatattcccatgcacattgatcatgaccggaacatggactgggtttccacccagctccaggccacatgcaatgtccacaagtctgccttcaatgactggttcagtggacacctcaacttccagattgagcaccatctttttcccacgatgcctcgacacaattaccacaaagtggctcccctggtgcagtccttgtgtgccaagcatggcatagagtaccagtccaagcccctgctgtcagccttcgccgacatcatccactcactaaaggagtcagggcagctctggctagatgcctatcttcaccaataacaacagccaccctgcccagtctggaagaagaggaggaagactctggagccaaggcagaggggagcttgagggacaatgccactatagtttaatactcagagggggttgggtttgggtacataaagcctctgactcaaactcctcccttttatcttctagccacagttctaagacccaaagtggggggtggacacagaagtccctaggagggaaggagctgttggggcaggggtgtaaattatttcctttttctagtttggcacatgcaggtagcttggtgaacaaagagaaccggagggtaacagaagaggaggacctaagttcagagtcagggtacgagctcgatt

SEQ ID NO: 247472 - DNA, 529 bp, Homo Sapiens
ccttataaacgccaactttgtacaaaaaagttggcagaaacaacccaaaaggcagctgggttgtcactgatgggcagcatttgagcctgccacactggcctggaagtttcccttccagtctggattttgtctgctccttccttccccctcaccccgttacctcttcacctcccatctcatttcactgtgtagctcagtctctcccacgcacataattggggacagtgggggctctcttaccagcctcctcagcaacgcacgtccatcaggcctggcctcagtggccagccacattgctgtcacactggaattgttaccccggacagggcgaagagataggctatctccccacctcccaccctactccccactgtattcccgttttgaccacctcagcccctcagctgccccctctcactttggccaatcccaggcaccaatccgacttcctcctccactctggagccgctagcatttccttgtcccctcttccccaaaacctctgtaatagtatgagaggacccctgcc

SEQ ID NO: 247473 - DNA, 1043 bp, Homo Sapiens
cgtcgacgaggaactgagcaggaggcagccaaaaacaagaaaagcccagagatacacaggagaatagacatttcccccagtacattcagaaaacatggtttggctcatgatgaaatgaaaagtccccgggaacctggctacaaggctgagggaaaatacaaagatgatcctgttgatctccgccttgatattgaacgtcgtaaaaaacataaggagagagatcttaaacgaggtaaatcgagagaatcagtggattcccgagactccagtcactcaagggaaaggtcagctgaaaaaacagagaaaactcataaaggatcaaagaaacagaagaagcatcggagagcaagagacaggtccagatcctcctcctcttcctcccagtcatctcactcctacaaagcagaagagtacactgaagagacagaggaaagagaggagagcaccacgggctttgacaaatcaagactggggaccaaagactttgtgggtccaagtgaaagaggaggtggcagagctcgaggaaccttttttcgagccagaggaagaggctggggcagaggcaactactctgggaacaataacaacaacagcaacaacgattttcaaaaaagaaaccgggaagaggagtgggacccagagtacacacccaaaagcaagaagtattacttgcatgatgaccgtgaaggcgaaggcagtgacaagtgggtgagccggggccggggccgaggagcctttcctcggggtcggggccggttcatgttccggaaatcaagtaccagcctcaagtgggcctatgacaagttcagtggggaggaaggggagattgaagacgacgagagtgggacagagaaccgagaagagaaggacaatatacagcccacaaccgagtaggggccacccttgacgggattcctgcccaggggagagaggcgctgggaagatggctggtgaggagcttaacagaggaacctcaagaagattctgtaaatcctacccccaccccccaccagccgcaagctgtacggcggggatcctctatg

SEQ ID NO: 247474 - DNA, 941 bp, Homo Sapiens
  misc_feature (851)..(851): n is a, c, g, or t
caccaagcaggtaaccggaacctttaattttattatgtggaatgcttaatgcagagttaataggggctagagtggctaggagaggggactactgagataaataacaggagacagtaatgagttacatgtggatttggggggctgcagaacaggaaaataggggcagatatagctacatactttattcaaataccactgggaggcaaggggtaagaggcaagggcagaatgtacaggtcaggattctagtgtcttcagcctgccgacagcaacctgggtgctgggccctgtgtctcctggagccaagggttagggcctgagcagctgtcactctctgggaagcccagggagtggggctgactgagcaggggccatagagcctagtaagggaagagggagctggcaaggagcccagggagggaggctctgtgaattgtctctgattcctttcctggagcccctgcctcgtcacctcctgggatgcgtctcaaggtcatggaggttgtagtggaggaggactgggggctgtttctcagacaaagaatgaggttattggcacagaattggatcagggggcctctgtgccaactccttcctgccttcagaaagggagggggcattgaagggatgagaactccactaagtccctcgaaccccccactccccaatgaggctcctcaaagctactctcagcccctgagtgggagacacggccagctctgggcacagtctctgggtggcctagcccttaggcactgtggcataggtggcatgggcatgtcagaccctcactatctgtgagagagaaaacaggagtcataggagtggtaaggcctccgatgccaccaaccntggtgcttcccctccccgaggagggtgagcaggcccttctcaggtcctgggatagagggtcattcctgggggaaggtgcagcccctcatc

SEQ ID NO: 247475 - DNA, 569 bp, Homo Sapiens
  misc_feature (507)..(507): n is a, c, g, or t
gttaccaatctgaagtgctggtgtaggagtacttgttgttactgcggttgtgcaggagcttcaccacgggcttggaggtgctggccaggagctgctgctcctcccggggagatgtcaccatggggatgaggcacagcggggacagcgtctcccttttttgctgaaccagcaatcacattcgtgccacagaatacctataactcttatcatctcttcaacattattacatgaaactatccgcaaagtcatgctttccattgttaacttgcagataaccagatgcaacgtgaagatctagactggaccctggtttgatgaaccagctgtaaaaacacatttctggaacaactggagaaaccggagtatgccctggactgcagcgccagctggcagtcctcaatcaggccctgcacccaggtagtagcgtcttcgcccagcagctcccccagttctctcgtactctccggcagtggcacagacccatcccgcaggtaattgaggattgtnccaaagtgacggccgctccggtcaatcagcacccaactccggcatcggtcagcacctccacg

SEQ ID NO: 247476 - DNA, 566 bp, Homo Sapiens
ttcgctcaacgaacatctatctttcacagggctatctcatcagttgcctctgtcgtggataacagtcacaccagctcctgttcagttacagtcttggtctcataaccggagagtttcatcaacaagaatttgatttacagctttatcatccatatgccactaaaattcacctgttttctttcaacctgcactcattttgattgcctggaactctggatttaattcttccatcccactttgtatcttgcattcacttcactctctctccagcttttattctttctttctctttccctaggtccaatgcacttgacccaactgacatgcgtggactccgggaaggtactgctccctccctccaaattctgagcagtaaaatgccgccccggggcactggggaacagaaaggaatgagaccccaacaggcagaagccaagagagcggggaggagccatggcgctctgccccaggatgcaccacgcctggacgtgctcccccgactcccagtgccaggtgcccatatgccacacctcagggttgtcctctgttcggtgagcaagaggcgt

SEQ ID NO: 247477 - DNA, 334 bp, Homo Sapiens
cctctcgctcagcgaacacacgctgtgagccaccaagacctggggcgacaggagaaccggtcctctctctgacggggtggcatttggccttgaacaaaaccaagtccactggggacagaggcaggggcaagtggctctccccattaccttctcaagacctcagtgggagcaccagccaatggtaccatcggctgggctgccaggtaccctgggcctggcgctgcagacctgagctggcttggacccatttgaggactgaactaggcaggcaatggctccagtgccctccctctgttccctattttacaccaacccctgttcggttgagcggaga

SEQ ID NO: 247478 - DNA, 531 bp, Homo Sapiens
  misc_feature (162)..(171): n is a, c, g, or t
acagctagagccgaaagctctgactccatgactttattaaatgtttcctctaacggttctggccattctgctgggcgatgaaaggctaccccagggcctcagatatgagcgtggtgtctgtatgtggtcctttcatggagggcaggaagcatcataattacnnnnnnnnnnaacggttttcaatttgtgttgacaaagagccttagtgaatctgttggaagaagagtgacttcaaaatgaacctgactccctgtatgttaggagtccatattctctgatacagttaacgttttccttccaacctcttcactgttcaagcaaagtggtatttaagctattcactgtttgacactttaataggagttttgatgagcaatttcaggatgtggaattgctacactgcaccaggttcctgcaggagcagcagcctcagcctgtggattggacgtgagatcttggtgctttctcctggaggaaacgctgtgctgctgtgttgatgacggggcgtgtgtggggttgatgagtgggtga

SEQ ID NO: 247479 - DNA, 838 bp, Homo Sapiens
cctataaaagccaactttgtacaaaaaagttggggctctaaggcccttcgaggttcgtaactttcgagaatagtgctgatgcagacagggccagggagaaattacacggcaccgtggtagagggccgtaaaatcgaggtgaataatgctacagcacgtgtaatgaccaataagaagatggtcacaccatatgcaaatggttggaaattaagcccagtagttggagctgtatatggtccggagttatatgcagcatccagctttcaagcagatgtgtccctaggcaatgatgcagcagtgcccctatcaggaagagggggtatcaacacttacattcctttaatcagtctccctttagttcctggcttcccttaccctactgcagccaccacggcagccgctttcagaggagcccatttgaggggcagagggcggacagtatatggtgcagtccgagcggtacctccaacagccatccccgcctatccaggtgtggtttaccaggacggattttacggtgctgacctctatggtggatatgcagcctacagatatgcacagcctgctactgcaaccgcagccaccgctgctgcagccgctgcagccgcttacagtgacggttatggcagggtgtacacagccgacccctaccatgcccttgcccctgccgctagctatggagttggcgctgtggcgagtttataccgaggtggctacagccgatttgccccctactgaagtgacgtgagacccctgcaaatgggacaggcccccagttcatgaggcctggctattgcaatatttactagtagaggaactctattgcaagatgacagagg

SEQ ID NO: 247480 - DNA, 919 bp, Homo Sapiens
ctttgaaagccaactttgtacaaaaaagttggctgcattgttgaagtcactcagcatgttgccatgcgtttatccacttaggtcaatgttaagggaagttcatcgcctctgcttcttcagtaactgatgtctggtgcatcaactgaatgcatttcaggcttttaagcagttcccacggatctatgggtaaaaaaaggctttcaccatgcccacctactcagtgagtgaccaatgtctcattgttagtgcatctgatgcacagagtttagtggtctgagggaggtcagtcgccaagcggagattgaaatcacatttgtatttacattattacttttctacagtttggtttgttgcaggctttcacactatttagtctggattgaatccttgaattactttactttgtctaccaaggctttcaaagaacttgataaacttgttctaattagccaacatattcatccatgatgtccgtataccaggtctaaaaataaaacatttcttaatgcacacaggacatggaaggcaatctacacattttcaagtgtagactttgcttgtgactcttttgtgaggaatagtcattgttactttaggaaaaccctgagtttatccaactcttgttagaattggataagtgtaaaaacctacaatagaatgcaagtgtgagagccaagtcctctggtaaaataaactcatattattctttatatatgtctggtcattgtattaaataaaatcagtttgttttggctgaaacacatggttggcctttacaatagatgtgaaaatgggcttatagatcattgctctttattgtgaatattaggttgtatttattgccaaactctttcaacagcttctaagcagtgaatttcagtgtgttgttggttgttctccaagcacaagcagctacttc

SEQ ID NO: 247481 - DNA, 301 bp, Homo Sapiens
taaattaaataaacttttattttggaatgatactagatttacagagaagttgcagagatagtacaaagagttcctgtatacccttcacccagcctaccccaaggtcaacatcttacatcaccatggtacatctgtcaaaaccaagagactgaaattggtatattaactaaaattcggacttttttcagatttccaattttcccactaatgtcctgtttttgttccaagacccaatccaggatgccacattgcactgaagacactctcccttttcaattctattactggtcacctcagtcaa

SEQ ID NO: 247482 - DNA, 1142 bp, Homo Sapiens
ttggctctctccccaccccctgctcccgggggttccgttatcttttcgctcggcgaggcgttcagagcatggcggacaccgacctgttcatggaatgtgaggaggaggagttggagccatggcagaaaatcagtgatgtcattgaggactctgtagttgaagattataattcagtggattaaacttaccacagtttctgtgagccagcagccagtctcggctccagtgcccatcgctgcccatgcttctgttgctgggcacctctctacatccaccaccgttagtagcagcggggcacagaacagcgacagtacaaagaagactcttgtcacactaattgccaacaacaatgctggcaatcctttggtccagcaaggtggacagccactcatcctgacccagaatccagccccaggtctgggcacaatggttactcaaccagtattgaggcctgttcaggtcatgcagaatgccaatcatgtgactagttcccctgtggcctcacaaccaatatttatcactacgcagggatttcctgtaaggaatgtccggcctgtacaaaatgcaatgaatcaggttgggattgtgctgaacgtacagcaaggccaaacggttagaccaattacactagttccagccccaggtacccagtttgttaagccgacagttggagttccacaagtgttctcccagatgacccctgtgaggccaggctccacaatgcctgtgaggcccaccaccaacaccttcaccaccgtcatcccggccactcttaccattcgaagcaccgtcccacagtcccagtcccagcagaccaagtccactcccagcacttctaccactcccactgttttttagccaacctcactggggcaactagctgttcagtctccaggccagtcaaaccagaccacgaatctcaagctaggtaaggcttctgaagaggagatggcagaaccaggttgggatggtgggtggagaacaaatgattatcacttggtcaccgtagctccctccttcccctctccacctgcaatgagcattgccagctttgtcactgtgaaacgacctggtgttacaggcgaaaataacaatgaagtggcaatttggtgaatacccttaacaccatccttccctgggcc

SEQ ID NO: 247483 - DNA, 138 bp, Homo Sapiens
tagcatcgtttactagccctattgattctggtgtggctaacgtttgagaaccactgtagaagattttaaattgggaagtctctctattccccagtttagaatcaattattatcatttttttgagatggggtctcactc

SEQ ID NO: 247484 - DNA, 481 bp, Homo Sapiens
caagagagaggcagcgctgtctgtgcttcccatgcagaagcacccccttcccacccctgtgcaggccggcctttcccggcagaccaccatacaccacgttccaagccacactgaggcctctctccaagcttgcggcccccatttccagaccccaccagggcaacctgcatatccacctccctaccctgcccccctcttccaggagtctgccctatgtggagtaagcacgtggttttcctcttcagcaactatttcctttttactcaagcaatggccccatttcccttggggaatccatctctcttgcaggcttagtcccagagcttcaggtggggctgcccacagagcttctcagtctaagccaagtggtgtgttatagtcccctggccccattaatggcttgctgggatagacatgaggaccaagccacggctgggatgggtgagtgtggcttctggaggaagcaggggacacgacagca

SEQ ID NO: 247485 - DNA, 1087 bp, Homo Sapiens
  misc_feature (286)..(338): n is a, c, g, or t
aattgatgagcaatgctttccttataatagcccactttgtacaaaaaagttggggcgcggcaccctgggaggtagcgcggcggctgcaggagcgcacagtcggccatggcccggcggcggcgccgcgcctgcatcgctctgttcctggtgctgctcttcgccttcggcaccctcatgggtctgcgcacgctcaaggctccggacggactcccggcgctgggcccgggcctggagctggcgccctttgagcgacgcccagagggggcccccgcgcccgctgccaggnnnnnnnnnnnnnnnnnnnnnnnnnnnnnnnnnnnnnnnnnnnnnnnnnnnnnggaccctggcggctcccctgggccggcacccgcggaggccgagcccgcccccgtgcagagcctgcgcgtctactcggacctgcacgccttctactactcgtggtacgggagcccgcggcgcgagggtcactacattcactgggaccacgtcatggtgccgcactgggaccccaagatctcggccagctacccccgcggccgccacagccccccagacgacttgggctccagcttctacccggagctggggccctacagctcccgggaccccgaagtgctgcgggagcatatgacccagctcaaggaagccgccatcggcgtcctggtcctgtcctggtacccacctggcatggctgatgataacggggagccctcagatgacctggtgcccgccattctggacaccgcccatcagtacagcatccaggtggccttccacatccaaccctacaaggggccgggatgacatcactgtacatgacaacatcaagtacatcatttgacacgtatggctcccatggtgcattttaccgctataagaacagcatgggcaagagcctcccactcttttatatctacgactcatacctgacgtcccctgaggcctgggccacctcctgacaccaaacgggccccattcgatccgcaacacgccctacgatggggtcttcatagcgctgctggtggaggagggccacacccacgatatcctggccgccggatttgacggcatgtacacctactttgcc

SEQ ID NO: 247486 - DNA, 365 bp, Homo Sapiens
atcttctgtttgttgatgctgcagaaatgcacaaagcagtctcagttaatgatattctgaagtaggagtgtcctgtgacttggggcaggggagtctagtagaggtttgatgttttagccatccttattacaagtagctgaaactcggaactgattttgcctataggaagtattagctaatcagaaccaaggtgccaggctgactcaccaagggtctaagattgctttacatagtagcctcaagcccaaggaactgattgtgaaaaccacctgaataaaccaggagggaggaagagctaataatgttaatctataaatatatccgcctatgttagggtcgcgctatctatcaagccccagcctgcg

SEQ ID NO: 247487 - DNA, 400 bp, Homo Sapiens
tgacttttcaaaccctctatctttccatcgcttagcagtgtgatcttttaaaatacaaatgaaattgtctttcccttgcgtaaaacattttaatagggtttatttggctcttggaataaagacagcattccttctatatagcctataaggcccacatgacccacctttatttctagccttctattaaactctgctttccttaatttttatactccactcacaatgccttcctttagtttcctctgtttccactgctcttttctaggggtctttgtgtggcctgttccttttgcttggaagtgtttttcttctgttccagcataggctcccataacatcatgtatacctccttcataaaacttgttatgattgcagtttagcatttgtgtatgtgtgatta

SEQ ID NO: 247488 - DNA, 229 bp, Homo Sapiens
acaagagcggaactccgtctcaaaaaatatatacatacatttttaaatcgtgcataaaatacaggcatccccaattaaaacaggtgattgttttatcttgttatcaaatagttgagctgctctatgtagtcctgggtctctgtgtaaatagacactacaattgtgggcaagtggcatagaaatcttactaggatttggaactgcttcacgttaaccaggttagtgcgaa

SEQ ID NO: 247489 - DNA, 343 bp, Homo Sapiens
aagggtgtgcctgtgaccacatgagcacgtgagtctgtgtccacacccacgggtgccgacatggggcgtgaacaagtgcacacacatgcacgtgagcaaagacgcatcagcagtgtgtggatgtgtggcaggcaggagcacacgtgcaccgatacatcagcagcagagtgtggatgtgtggcaggcagcagcacgcgtgcaccgatacagcagagtggaggtgcgggcaggcaggagcacacgtgtgcaccgatacatcagcagtgcgtggacgtgtggcaggcaggagcacgcacctgcactggacacgggtctggtgtgcagagtggaagtgggcacagac

SEQ ID NO: 247490 - DNA, 429 bp, Homo Sapiens
ggtccattcacctccagctcaacacatctaaagcttcgttattgacagacattgcaactggcgtgagcaccttaccagagcgcctcatacacacctggggcccaatcgagtgtggacagacgcagtacacggagaggttgcccaaaagcccccaaatttaggccccaacagggcagagaatcaccttactggtggctaccaggtttccaaaatcttgccctccttccactgggaccacacagcaccaaggggcagtggtgacaataagtcaaaagggagccctgtcagccgaggctgcagcttgtatttcggtgctgccgaaaggtagcagctaaggctgaagcgttcctcaaccgccaccctgctcccttccctcaaactcagacccccacagcacccaacttttttgtacaaaggtggcttttatgg

SEQ ID NO: 247491 - DNA, 943 bp, Homo Sapiens
  misc_feature (286)..(328): n is a, c, g, or t
ttggattttagctgttggttccggccgcaccgtgtgggctgtagtagcgggaggggtgggggtcctccagagttaagtggctgtcctcgactgtgcccatacagcagccagctttcttccttaataactgcccgttcgaagagtgcgaggatgtccaagcggcaccggttggacctaggggaggattacccctctggcaagaagcgtgcggggaccgatgggaaggatcgagatcgagaccgggatcgtgaagatcggtctaaagatcgagaccgagaacgtgatnnnnnnnnnnnnnnnnnnnnnnnnnnnnnnnnnnnnnnnnnnnagttgcgagcttcaacaaatgctatgcttatcagtgctggattaccacctttgaaagcttcccattcagctcactcaacccactcagcacattcaacgcattcaacacattctgctcattcaacgcatgccggacatgcaggtcacacgtcacttccacagtgcattaatccgttcaccaacttaccccatactcctcgatactatgatattctaaagaaacgtcttcagctccctgtttgggaatacaaggataggtttacagatattctggttagacatcagtcctttgtactggttggtgagactgggtctggtaaaacaacacagattccacagtggtgtgtggagtacatgcgatcattaccaggacccaagagaggagttgcctgtacccaacccaggagagtggctgcaatgagtgtggctcagagagttgctgatgagatggatgtgatgttgggccaggaagttggttactccattcgatttgaagactgcagtagtgcaaaaaccattcttaagtatatgactgatgggatgttacttcgtgaagctatgaatgatcccctcctggagcgttatggtgtaataattcttgatgaggctcatgaga

SEQ ID NO: 247492 - DNA, 339 bp, Homo Sapiens
atctgggcacgccccgctaggtcttaatacagtgtgtataatttctgaggtgaaggtatgcaaacttccacgctgaaatgagcatggcaatagacctgaaagcaggaaacattcccgagaaatagtggggcttggcacagaagcaagggatggacaagacagcctcctagtcatcctccttcatgaaagctctgtcctctctctaagtgactcttatttcatacctcccaagatgcttcagagaatcttccgagttctggcctatgaaccagcattccatttgggccagaccaaggcttcccctcaatgctccccaaccccacggtgcgttggcccaac

SEQ ID NO: 247493 - DNA, 901 bp, Homo Sapiens
ttggcccagtccccgcgacgctcctcgggaagccatagggcgcctcccagcccgtctccccgctccagtttagaacctaattcccaattcccggaccgggcccagccctgggctcttactgtccgcttttgctgggacctgttccacaaatgggcgtcttctgccttgggccgtgggggttgggccggaagctgcggacgcctgggaaggggccgctgcagctcttgagccgcctctgcggggaccacttgcaggccatcccagccaagaaggccccggctgggcaggaggagcctgggacgccgccctcctcgccgctgagtgccgagcagttggaccggatccagaggaacaaggccgcggccctgctcagactcgcggcccgcaacgtgcccgtgggctttggagagagctggaagaagcacctcagcggggagttcgggaaaccgtattttatcaagctaatgggatttgttgcagaagaaagaaagcattacactgtttatccacccccacaccaagtcttcacctggacccagatgtgtgacatagaagatgtgaaggttgtcatcctgggacaggatccatatcatggacctaatcaagctcacgggctctgctttagtgttcaaaggtctgttccgcctccgcccagtttggagaacatttataaagagttgtctacagacatagaggattttgtgtcatcctggccatggagatttatctgggtgggccaagcaaggtgttctccttctcaacgctgtcctcacggttcgtgcccatcaagccaactctcataaatgagcgaggctgggagcagttcactgatgcagttgtgtcctggctaaatcagaactcgaatggactttgttttcttgctctgggggctcttatgctc

SEQ ID NO: 247494 - DNA, 600 bp, Homo Sapiens
tttgtacaaaaaagttggctatccgccccctcaaacttccatccggcgccggctttcggcgcgacggtcgccgcgttccatcgtcgcgcggcccttcgggcgcccgagcccgcaatgtcgggccccaacggagacctggggatgccggtggaggcgggagcggaaggcgaggaggacggcttcggggaagcagaatacgctgccatcaactccatgctggaccatatcaactcctgtctggaccacctggaggagaagaatggccacctccacgcccgcctccaggagctgctggagtccaaccgggagacacgcctggatttctattttcagctcggggaggcccccagtgatgccatcccctaggctccacgagcccccaaccgggacccatccctgcctccctgggctaggctctggcctgggcactcaccccctggcttagacaccttctcaagggctggccttcagggacccctggtgggtctgcctgcctgggccacccttcctgcctgggcctccccttggcctacctgggccagcccccaccacctgcatgcatcctggggccaagagtggccattcacgtaaccgggccga

SEQ ID NO: 247495 - DNA, 311 bp, Homo Sapiens
tcgctattcatcggcaccggggaacgagcatttcaaacagagccatcgcgattcacggcttcatcagcccctgtgaacctgcaggtggcctgggagtgcaggaggagcctaatcagccggtgtggctcccagcctcatgcactatgatccatgaagaaagaggagacataaaccacaccaactcccgaggccggggcgggacagggagtgacccaagacagcccgatagcttaggccccgcctggctccataggaagccccacttaatatcccacacaatccttagccagagactctctgaccataaagag

SEQ ID NO: 247496 - DNA, 2140 bp, Homo Sapiens
ttgggtcctgaggtttacctgaagcgtccggcccattcagatgactggagactggacattatgctcaagaggaaggcggaggaaggtgtccgtgtgtctattctgctgtttaaagaagtggaattggccttgggcatcaacagtggctatagcaagagggcgctgatgctgctgcaccccaacataaaggtgatgcgtcacccagaccaagtgacgttgtgggcccatcatgagaagctcctggtggtggaccaagtggtagcattcctggggggactggaccttgcctatggccgctgggatgacctgcactaccgactgactgaccttggagactcctctgaatcagctgcctcccagcctcccaccccgcgcccagactcaccagccaccccagacctctctcacaaccaattcttctggctgggcaaggactacagcaatcttatcaccaaggactgggtgcagctggaccggcctttcgaagatttcattgacagtggagacgacccctcggatgccatggcgggacgttggggtggtcgtccatggcctactggcccgggaccttgcccggcacttcatccagcgctggaacttcaccaagaccaccaaggccaagtacaagactcccacatacccctacctgcttcccaagtctaccagcacggccaatcagctccccttcacacttccaggagggcagtgcaccaccgtacaggtcttgcgatcagtggaccgctggtcagcagggactctggagaactccatcctcaatgcctacctgcacaccatcagggagagccagcacttcctctacattgagaatcagttcttcattagctgctcagatgggcggacggttctgaacaaggtgggcgatgagattgtggacagaatcctgaaggcccacaatacaggggtggtgttaccgagtctacgtgcttttgcccttactccctggcttcgagggtgacatctccacgggcggtggcaactccatccaggccattctgcactttacttacaggaccctgtgtcgtggggagtattcaatcctgcatcgccttaaagcagccatggggacagcatggcgggactatatttccatctgcgggcttcgtacacacggagagctgggcgggcaccccgtctcggagctcatctacatccacagcaaggtgctcatcgcagatgaccggacagtcatcattggttctgcaaacatcaagtgaccggagcttgctggggaagcgggacagtgagctggccgtgctgatcgaggacacagagacggaaccatccctcatgaatggggcagagtatcaggcgggcaggtttgccttgagtctgcggaagcactgcttcggtgtgattcttggagcaaatacccggccagacttggatctccgagaccccatctgtgatgacttcttccagttgtggcaagacatggctgagagcaacgccaatatctatgagcagatcttccgctgcctgccatccaatgccacgcgttccctgcggactctccgggagtacgtggccgtggagcccttggccacggtcagtccccccttggctcggtctgagctcacccaggtccagggccacctggtccacttccccctcaagttcctagaggatgagtctttgctgcccccgctgggtagcaaggagggcatgatccccctagaagtgtggacatagttgaggcccccgtcagggagaggtcaccagctgctgtgccccaacacgtctggctccctgccccttaaacccaaggactgagggcagtgccctttgagatctggggaggcaggcattcctgaagggaactagaggtgttacagaggacccttacgtgagaaatagctgaaaagggcactcccaagcctgggctggggaggaggagagagtcccagagctcattccccctgctgcccagtgcaaaccacttctccatgctgcaaaggagaagcacagctcctgcctgggtgagcagggtcaagcctcttattccaggagaagggggctctgccccaggccctactacccattgttcccttcctcttcctgcccttgaaccccctccctgtcccagggccctcccatcccattgctgccaaggtggagggaa

SEQ ID NO: 247497 - DNA, 484 bp, Homo Sapiens
  misc_feature (14)..(14): n is a, c, g, or t
ggagacagaatttntttattgggatcactgggtggaggtggaggaagaactgagtggctgctgtcctggtctggggatggatcaggcaccaaggttaggggagggagcccatcaccatgttagtaaaataataaaacagtggttggacagagggaagacccactgcctgggatgaggctgctctgaggcaagaggtttacgtatcctacctggcccaacacacgcacttccccacttggctccttggcccgtgtcagcggagggagcgcgggacggtgggggaggcggagcggtagcagcggtacccctccagtgccgctggcaggagcagcaggccgctcagggggtctttgcggcagcggcccatggcctccttgtagctcagccgttccttggagatggggtctgtcaaatccttctcgtagctggactcgtcctgcaggagctgggacagctcttcactgatatacacggagaggaggac

SEQ ID NO: 247498 - DNA, 317 bp, Homo Sapiens
gtggatgactgatttcatattgatcagttgggcttcctgatgactgtctctcatgtgcaaaggtggtcccttggcttcagagttggttgtactgaggacaagagaggatattgatcaataggagtaacaaatacagaggcccagaaatgagagggcattagtcattcgggagagatgcaggagtccagttcctggtgtgttgcatgtgaagaggaaagggcgttgcaggggtacaggcagggctgccgagggagggcctgagtgccctactaaggaatgtggacttcagttcatgggtgatcgtggtagtaagggcc

SEQ ID NO: 247499 - DNA, 450 bp, Homo Sapiens
ccctgctgtccagagagagtctgccttgcttgtttttggagatggaaggaggtaccactagtcaaggattgcaagcagtctctagaacagggattccaacactccggacacagaccagtagtggtccatggcctattaggaagtggggtgcacagcaggttaggggccggcaagccagcgaagcttcatctgtatttatagccactccccgtcgctggcgttaccacccgagctccgcctcctgtcacatcagcggtgggcattagattctcatagcagcacgagccctattgtgaactgcacacacgagggatgtaggttgcacgctccttatgagaatctgatgcctgatgatctgtcactgtctcccgtcacccccagatggggctgtctagttgcaggaaaacaagctcagggctcccactgagtctctgtgatcgtgggtgataa

SEQ ID NO: 247500 - DNA, 326 bp, Homo Sapiens
ttacaaccccacgatcacactctcttatttattttttgtgtttctccttccatgagcaggtcagctatagagggcagggattcctgatctgctttctgaatcctaatcttagaacagtacccagaacatagtaggatttggtaaatatgtgcctttcctgactacattaaagaacaattgccagagctctctaatcccttcattctcctttctttctcttcatagcattgatcatgaactgatgttatcttttcttttcttcatttatttttctctcctcactagaatggaagcctcaggcgtcaggataagagggagtttgtatg

SEQ ID NO: 247501 - DNA, 441 bp, Homo Sapiens
gagctcggtacccttacaaccccacgatcacacatcccgtgccctcaaggcaggattcccgacaggtttgcccctctgctccgttacgtcgtcacctcctccccaaccaaatctctgcttacaaaatcgtactggctactctctcaggagaacctctctggggattcttaaagccccagcttttgctcgctagtctgtctagcaggtctgtagttttcccacgatctggggatgtttcgagctgcaaggaggtgatgaccaatccgccttcctccacctgccaccatccttcccattccttctaactgtcttactcaaggcagtacagtatggtaatgataactcaggttctagaaagctccttagggcaagggagggggaccaatcgaacatcccctgccagttttggaatattaataacatggtgatcgtggggtgtaa

SEQ ID NO: 247502 - DNA, 467 bp, Homo Sapiens
ttacatccccagatcaccacgggcatcttatctgtttttttcttgttctgggctctgctcctctggacctagccatgttcttgtaacggttttggagaaaggtgtgcgattgtgcctggaattggactggtgggctatgaggaagtgaggagagggtggtatccaggatgaggcctttctctttgacctgtgggagttgagtatagtgtggctttccctgagatggcaccatgggtagaggagtaggtttgtgggaagacagggaggcgctgtccagagcacatgggaggtgtccaggaggctgctggtcagccaggtctgacaatcaggatagagactgatcctggaaacagaagtgtgcctcactagtatgagatgcagggggaggcctgctggacagccagggctggatgtcaagagagaatcagggcggtagacaaggagttcgtgtgatcgtggggttgtaa

SEQ ID NO: 247503 - DNA, 930 bp, Homo Sapiens
ttggggtaaagaaaatggaacagagaacttaaagattgatagacctgaagatgctggggagaaagaacatgtcactaagagttctgttggccacaaaaatgagccaaagatggataactgccattctgtaagcagagttaaaacacagggacaagattccttggaagctcagctcagctcattggagtcaagccgcagagtccacacaagtaccccctccgacaaaaatttactggacacctataatactgagctcctgaaatcagattcagacaataacaacagtgatgactgtgggaatatcctgccttcatacattatggactttgtactaaagaatactccatccatgcaggctttgggtgagagcccagagtcatcttcatcagaactcctgaatcttggtgaaggattgggtcttgacagtaatcgtgaaaaagacatgggtctttttgaagtattttctcagcagctgcctacaacagaacctgtggatagtagtgtctcttcctctatctcagcagaggaacagtttgagttgcctctagagctacgatctgatctgtctgtcttgaccacccggagtcccactgtccccagccagaatcccagtagactagctgttatctcagactcaggggagaagagagtaaccatcacagaaaaatctgtagcctcctctgaaagtgacccagcactgctgagcccaggagtagatccaactcctgaaggccacatgactcctgatcattttatccaaggacacatggatgcagaccacatctctagccctccttgtggttcagtagagcaaggtcatggcaacaatcaggatttaactaggaacagtagcacccgtggccttcaggtacctgtttccccaactgttcccatccagaaccagaagtatgtgcccaattctactgatag

SEQ ID NO: 247504 - DNA, 887 bp, Homo Sapiens
tatcactggctgaactgggtgtctcagcagcactggttttagggccacttcctcctggacaggccctgttcccgcccttctcgggacacgaaacgcctccagcaggagggccaggtgacctcctgggggtgatctccagctcagttttgaagagcacggcgctcggccctgctgagtaatcctcgctgcagagcttgtcaaggtcaggcatgctcaaggctctcagctcctggagcttggagcgggacacgggcgagggctgcgtgtggcgtaccgaggacttgttcctcttaacaggagaagccagggtcatcgttggggtgggaattcccaaaggaccaagtgatttctttagttccgaatcagagcccttgctactggtctctggtgggttctgccgagagatggtcagtgtcatgattgagggagacttggccatctggggcaggagggtgccggcttcgctttggttttcgctgcaggaactcaagctgcgtctcaacaaccttgctgctgcgtcacctgggtggcccaggctcccggaaacaatgctgccggaagaccgcctcccaatgggaggcttggagctcaccgacaaaaatggggaagccccggacttggctacaggccggtcagcattggccaggttttcaaaagacttgatccgctgcttcacagagaaaaatgaggtagattcatggggccagttctgctcatagcagtagtgtcgtctggtgactttgattttgtctgtgactaggcagctcgtctcctggactgaaatgatatccccttcatctgtggctggaagattcctcgatgtgtccagcagcggctttacactatatatgccctgtccattagccaggctgggaagaccaccccaa

SEQ ID NO: 247505 - DNA, 753 bp, Homo Sapiens
  misc_feature (327)..(327): n is a, c, g, or t
  misc_feature (356)..(356): n is a, c, g, or t
tttgtacaaaaaagttgggaacctggtcctcaggacacaccagccagccaggtactcattgaccccagagggcctggagctggcccagaagttggccgagtcagaaggcctgagcttgctgaatgtgggcatcgggcccaaggagccccctggggaggagacagcagtgccaggagcagcttcagcagagcttgccagtgaagcaggggtccagcagcagccactggagctgaggcctggagagtacagggtgctgttgtgtgtggacattggcgagacccgggggggcgggcacaggccggagctgctccgagagctacagcggcntgcacgtgacccacacggtgcgcaagctngcacgttggagattttgtgtgggtggctcaggagaccaatcctagagacccagcaaaccctggggagttggtactggatcacattgtggagcgcaagcgattggtatgacctttgcagcagcatcatcgacggccgcttccgggagcagaagttccggctgaagcgctgtggtctggagcgccgggtatacctggttgaagagcatggttccgtccacaacctcagccttcctgagagcacactgctgcaggctgtcaccaacactcaggtcattgatggctttttttgtgaagcgcacagcagacattaaggagtcagccgcctacctggccctcttgacgcggggcctgcagagactctaccagggccacaccctacgcagctcgcccctgagtt

SEQ ID NO: 247506 - DNA, 667 bp, Homo Sapiens
aaaagtgaaagagctgccaaagctgggggtaagggctggcttggcggcccccggtggctgcccctcagcggccccaaatgcgggctgggggttggctcccggatatgatgggagcggggacttggcgcttgagccaaagggaatgttgaacgtgggggtgctcgtgttactgaacgtcagagtgggctggctgctggtggccggggcggaggtggcgagggtgctgccaaaaccactaaagtcggcagcgctgctgctggtggccgttggcacggcagtgggcagggactggctgaaggtggtgactgtggtggttgtgggcaaggcaggaggtttgccaaactggaatatggagcccatggccggggtgaagctggcagcagaggcctggggcgccccgaagaggaaaggctgtgaggcggcagtggcggtgctggtcgtggtactcacactgctgctgctcacactgtttatgccaaagccaaacgcaggcttcgaagcagagtctgtggatggactggcagaggtgatgggagccacagcagaggtggcgctggccaggccagtgaagagcggggcagttgtggtgggagcagtggcgggagtagttgtctgcttgaagaagggagcaggcaagggcacaatgcagctcgcccctagttgggcc

SEQ ID NO: 247507 - DNA, 632 bp, Homo Sapiens
tcttgcactgcaggccctggggccagcccgcacacaccatgcctcctgtctcaacactgacagctgtgcctagccccggatgccagcacctgccaggtgccgccccggggcaagggccccagcagccctatggtgaccgccacactgtgccttaatgtctgccgggggcccaggctgtgctgtccctgcagcacgcctccttgcagggatctgagccaccctccccgcacagccctgcaccccgcccctagggttggcagcctcagttggcccctggcagaggaacaaggacacagacattccctcagtgtggggggcaggggacacagggagaggatggttgtccctggggggggccctctggccccaggcaaccttagcccctcagaacagggagtcccaggacccagggagagtgtggggacaggacagcctgtctcttgtagcttcctggggtgggaggcacaggggcaaagcaataccccagggaaagtgggaggtggtgctggtgctctctccaggcccaccatgctgggagaggcggccagagcctgggcctccagcctgggactgctgtgatggggtatcacggtgatggtcccattaaacttccactctgcaaggaacccacg

SEQ ID NO: 247508 - DNA, 940 bp, Homo Sapiens
  misc_feature (48)..(108): n is a, c, g, or t
  misc_feature (379)..(415): n is a, c, g, or t
  misc_feature (561)..(571): n is a, c, g, or t
  misc_feature (833)..(863): n is a, c, g, or t
aaaaaatgacagcctgaagtgcttaaaatgtgtattgacatggtaccnnnnnnnnnnnnnnnnnnnnnnnnnnnnnnnnnnnnnnnnnnnnnnnnnnnnnnnnnnnnnagcatgtagttcccatgaatttgattgaaacttgatatccaaacagtgtacaactactgtacatcccagtatgaaatgtcctgtttcatggatgtaaaaggagtcaaaaaccaaacttctcaggtcttttaagcctgaacacaatccacactactcaaccttgaatcccaacccctgactcattgatggtgaatgataccaaccacagacagactgtttaaaggctcacacaaatgtctttggtgtatgtgtctattttttaaggtacaannnnnnnnnnnnnnnnnnnnnnnnnnnnnnnnnnnnngctattttgtgtgctgtagcagttcttttatagctcacattaagtgcagctcttaaaccccacccccacccccaaccaaagaaaatacttgttaaataaggattagacaggtcaaacaccattgtagtgcaaatagtaaacgattnnnnnnnnnnncaacaacaacatttacaaaatatagaaatgtttggatccaacagatggacaaacatattcctttcaagtatctctccttgaagaaaataaaaattaatcagattacttccaatacaaaaaagtctctctttttgttctctctcaggtaaacagtttcaaacctattaggttgcatagttctaagatcataagcaccttaacgaaatgtaacttggtattcttttttccttgatctttcattctttccatacttgttctcaannnnnnnnnnnnnnnnnnnnnnnnnnnnnnnaaaagtggtacagaaaaaggaagtgtgaccacctgcacacgattgttcttttaccagtatgtgtatatatgtaccaa

SEQ ID NO: 247509 - DNA, 959 bp, Homo Sapiens
  misc_feature (217)..(247): n is a, c, g, or t
  misc_feature (305)..(364): n is a, c, g, or t
  misc_feature (719)..(785): n is a, c, g, or t
gatggacaaacatattccttcaagtatctctcctgaagaaaataaaaattaatcagattacttccaatacaaaaaagtctctctttttgttctctctcaggtaaacagtttcaaacctattaggttgcatagttctaagatcataagcacattaacgaaatgtaacttggtattcttttttccttgatctttcattctttccatacttgttctcaannnnnnnnnnnnnnnnnnnnnnnnnnnnnnnaaaagtggtacagaaaaaggaagtgtgaccacctgcacacgattgttcttttaccagnnnnnnnnnnnnnnnnnnnnnnnnnnnnnnnnnnnnnnnnnnnnnnnnnnnnnnnnnnnnatgctgatatacacagagataagtgtcacacagacataccttatgacctgggtaattgggtaggaaagtgcctgtgatgggccctttcaaactcatggctttctagatgctatttgggttgttctagtccacactactgcagactagattggttgattcaaggctcacaagggaacctcaaggggggaaaggacaataccccgtttaaacaactgatgtcatcagtgtgatttcagaagaaataaagggtacaccattctccctttccctcccaattcctgtctctttcactgcttcatctctgagccctggctaaggattttttccacatcttccttcatctgtttcatcaggnnnnnnnnnnnnnnnnnnnnnnnnnnnnnnnnnnnnnnnnnnnnnnnnnnnnnnnnnnnnnnnnnnnctggttaactcagaaaccttaaaaatttcttcattttgccactgtcttctctggacaactcttgctccctttccccctgggctgggcaactctatgagcacccacactcctccacgatcatgttctgaatgtcctttttgatgatgttttgccaacttttttgtacaaagttgg

SEQ ID NO: 247510 - DNA, 565 bp, Homo Sapiens
cctcctagccctcttaccaataaaaacaggtgacattttgttgaatgtggatggggtcgaactgacagaggtcagccggagtgaggcagtggcattattgaaaagaacatcatcctcgatagtactcaaagctttggaagtcaaagagtatgagccccaggaagactgcagcagcccagcagccctggactccaaccacaacatggccccacccagtgactggtccccatcctgggtcatgtggctggaattaccacggtgcttgtataactgtaaagatattgtattacgaagaaacacagctggaagtctgggcttctgcattgtaggaggttatgaagaatacaatggaaacaaaccttttttcatcaaatccattgttgaaggaacaccagcatacaatgatggaagaattagatgtggtgatattcttcttgctgtcaatggtagaagtacatcaggaatgatacatgcttgcttggcaagactgctgaaagaacttaaaggaagaattactctaactattggttcttggcctggcacttttttatagaatcaatgatgg

SEQ ID NO: 247511 - DNA, 447 bp, Homo Sapiens
cctcctagccctcttacccattgcttatccccaacatgcaaatctggctgtgacggttcatctgacacctgtgtaaagctgaccagcctgctctgtacagtgacaatgaggagcccctctcttccttaagtaggaatctgtgaagcaaaatgtttgctgccaaagacaaatcagactgtcagtcattaaaaacagcattagcaggatgaggatagcaatggggaagggttgtgggcaatgcagtaacagggaaatggcttcagaaatggtttgagttggaagacaacattcttcatctctcaggacttctaattccttgatgctaaaagaagaggcatggattctatgagcttccaagtccctttccactttaaccttctacaaatctttcagaggactgcctagtagcaaaggttattcctggacacaggtaagagggctaggagg

SEQ ID NO: 247512 - DNA, 479 bp, Homo Sapiens
cctcctagccctcttacctatgtatggtcaatggacttctgcctcatcaagtccaggcccatcagctcctcccctccctgccacccatgcccatgcactgtcccggttctctccatcacacctgcagtaagcccttctcttcacagcttccctttaccacctagcgccctgaccttgctagctacctctgctgtcaaccacaccttcacaacattggtaccatcagcagccgagacgaaatacaggggcagggagaacttcttggcaaaattgaagctttttttgggtcacgtttatgtctgctgtagagagaaggtaggacattggtctgtctgtcaagggaagggaagaaggtttggaggggggggccactggaggccttcattccagaaagtgggataggcagggatgattgggaaacaggtcctagaaagagctcagttaatagggatctgtgtcttggtaagagggctaggagg

SEQ ID NO: 247513 - DNA, 328 bp, Homo Sapiens
cctactcatctgtgagaacagaagctttatctgtgatagaattgctgcttaaaaaacttgaagaatctaaacagtgggaatgtttgacatctgaatgcagagtgctcctaattgagtctttagctactatggagccagacagcagacctgaactgcaggagaaagcagcgttactgaagaaaacacttgaaaatctggaataaattagaaggggaagaaacaaacaagtgccatgttcattgggggttgaagtggtggtgttctttgaaaaaccaagtgggaaaaagtaaagattaatctgtagcatgcatcattccttggctgaaat

SEQ ID NO: 247514 - DNA, 776 bp, Homo Sapiens
tacctatccctctccctgctgtgaaataatttaaataatttattctagatgtaaaaataataatacaaaaaagtttgttcaaagacacctgtgtcctgtttgttaagtgtgcagtctgggtcccttggggtggagggagctggccaaggaatggcattgtgcagaggcataccgggaagctctctggatgcaaccccacctctaccgcttggcagtcaatgaccttggcatgatgtttcttcacttctctgaggctaggtctttgattctgaacatggggactgtaatgcctgcctgacctgtgttagaacagcatgtgtcactgagtggaggtgggaggaatttgtaaactgtgaagtgctagccacacaggtgggaaaggtaagcctatcctgtagagctctgctgccctgacaatgcctgggatttggccttcttttctggagcacactaaggcaatcttggctagtgcatcagacgggagtgagccccagtgactgagtaaatggagaataagacaaggaacacgagcatccggcctgtgcagacatacaagcagaataaaccacagctgggtaaggggcaaacaggggcactgaacccccatcgtgctgcagctgcggttcccagagatgttgagggagggcttggggcaacacttctggacttttaaggagccaccaggcaggacttaagagatctgggttgagtcccagctcctgtctggagcttgctgtcctcttcatctttattgcaaataggtacacatgcaccaa

SEQ ID NO: 247515 - DNA, 857 bp, Homo Sapiens
acaaaaaagttggctttgaaaaaaactaatgtttgagatttgtgtcttttcatctgaagcagttactccattaatagtaaagatgcctcgggaaagtcagtgaaccagaatagtgctcttgcaccactgagggtgctagactggctttgtgcatcttatttcctaagaatatcagtttttattatgaccttaattataaatacctatatataggagtaggattttctctcacccaaccctactttaatcattatcacttaagtgtaaacctccacctccccctctttccctttaccgaaaaaaaatgcactttaattcctaaggagagtggctgttcctggccctgaaaccagattacttcaggaggagagttaaggagggagagctcttaccagaccctgtgaaatgaaccaaatttcttaatgtaaacacacaagtaataacatccacttttaagtggcccccactcccatgccaaagggaaaaagaaccgccaaattgaaaaagggttctaaatacctgtcctgattttggaagtttcactggggaaaaactacctaagattattttcatagctaccaatttgtcagaaactttggtggtgttttgtgggaggctgagattttttaaattaaaaatcaagtgaaaacacaaagactctaagacacgatcctgatttgtgtcatttctaagtatcagatttgttctccctttcatttgacaggtgttctcagtctctcctcctgtaagattctgtccttcccctgatgccaagccaataatttcttggtggggttgcatgtctcctagagccccaggacccctgtcgtgtcggggaaggtaagagggctaggagg

SEQ ID NO: 247516 - DNA, 1571 bp, Homo Sapiens
  misc_feature (94)..(102): n is a, c, g, or t
  misc_feature (1449)..(1449): n is a, c, g, or t
ttggagtgaagcggccgggttgggcgattaacaggccgtggttaggaaggacggagaaggggcgttcgctcctttgggacttttcatgcctcgnnnnnnnnncagatgtggcttggtctgggcgcaaggtcccagcagccagcttaagcttactcttctgtgaaaggggaaagtatcccctgtggaaagcggttaaacttgtggagggggtgcgggacgtgagttcttccccatgccaggcgaatggtgtggccttgagctggtccaggagccggctcgacgtgtctgagggaggccccggagggggcggggaggtggcccacagaacgcgggttctgtaaagagacgttgggaagattcgattccgagaagaggaagaaccggattgaaagagagccaggccgctgagggggagggggctgctaagatggcgtcggcctcctccgggccgtcgtcttcggtcggtttttcatcctttgatcccgcggtcccttcctgtaccttgtcctcagcatctggaatcaagagacccatggcatctgaggtgccttatgcctctggcatgcccatcaagaaaataggccatagaagtgttgattcctcaggagagacaacatataaaaagacaacctcatcagccttgaaaggtgccatccagttaggcattacccacactgtggggagcctgagtaccaaaccagagcgtgatgtcctcatgcaagatttctacgtggttgagagtatcttctttcccagtgaagggagcaacctgacccctgctcatcactacaatgactttcgtttcaagacctatgcacctgttgccttccgctacttccgggagctatttggtatccggcccgatgattacttgtattccctctgcagtgagccgctgattgaactctgtagctctggagctagtggttccctattctatgtgtccagcgacgatgagttcattattaagacagtccaacataaagaggcggaatttctgcagaagctgcttccaggatactacatgaacctcaaccagaaccctcggactttgctgcctaaattctatggactgtactgtgtgcaggcaggtggcaagaacattcggattgtggtgatgaacaatcttttaccaagatcggtaaaaatgcatatcaaatatgacctcaaaggctcaacctacaaacggcgggcttcccagaaagagcgagagaagcctcttcccacatttaaagacctagacttcttacaagacatccctgatggtctttttttggatgctgaccatgtacaacgctctctgtaagaccctgcagcgtgactgtttggtgctgcagagcttcaagataatggattatagcctcttgatgtcaatccataatatagatcatgcacaacgagagcccttaagcagtgaaacacagtactcagttgatactcgaagaccgngcccccaaaaggctctgtattccacagccatggaatccatccaggagaggctcgacggggtggtaccatggagactgatgaccatatgggggtggcatcccttgccggaaatagtaaagggg

SEQ ID NO: 247517 - DNA, 226 bp, Homo Sapiens; identical to SEQ ID NO: 175209

SEQ ID NO: 247518 - DNA, 389 bp, Homo Sapiens
  misc_feature (335)..(335): n is a, c, g, or t
  misc_feature (379)..(379): n is a, c, g, or t
ctgaggctgggccaggcattgtcccctggaaacctgtgtggctaaagtctgctgagcaggcagcagctctgctctgtggctccattcaggctttttcatctacgaaggccctgaggttcccatcaacccccatttccctagggtcctggaggaaaaagctttttccaaaggggttgtctttgaaaaggaaagcaatcacttctcactttgcataattgcctgcagcaggaacatctcttcactgggctccatctgctcacccgcctgcagatctgggatccagcctgctctcaccgctgtagctgtggcggcttgggctgcagcttgcagggagnaagcaagaagcatcagttggacagagggtttgccgacaagtggntttttggctg

SEQ ID NO: 247519 - DNA, 883 bp, Homo Sapiens
gaggtggcgtcggacagtgatgagtcctctgagggtggtgagcgtggagacgcgctgtcccagaagaggtctgagaagccgcccgcaggctccatctgcagggctgaacctgaggctggtgaggagcaggcaggtgacgacagggacagtggcggccccgttctccagtttgactacgaggcagttgctaacaggctgtttgaaatggccagccgccagagcaccccttctcagaacagaaagcgtctctacaaagtgatccggaagctgcaggacctggcaggaggcattttccctgaagatgagatcccagagaaggcctgcaggcgcctgcttgaagggaggcggcagaagaagacgaagaagcagaagcgtctgctcaggttgcagcaggagagagggaaaggtgagaaggagcccccgagcccgggcatggagaggaagaggagcaggaggaggggtgtaggggccgaccccgaggcgcgggcagaggctggtgagcagccaggcacagctgagcgggccctgctccgagatcagcccaggggccgtggccagagaggggctcgccagagaaggaggacacctcggcccctgaccagtgcccgagcaaaggcggccaatgtccaggagccggagaagaagaagaaacgcagggagtgatgtggccgggccaaggacaggcagggagggaggccaggcctcgcttgcaccgcgggacgaggctgaccgggctgttctgtagactcaggaccgtggctccagaactcctgtgccaggcgggagggaaaggcggcactggagagatgggcccatcattaggggccagcatcccaggaactggacctttccccagagcctcgcgcctgtggctgtgatgacc

SEQ ID NO: 247520 - DNA, 622 bp, Homo Sapiens
  misc_feature (28)..(28): n is a, c, g, or t
aaggaatattgccaccttagccattttnaaaatgaaaggtgtccaaatacaaaaacggagggaatccactgccacacatctgttgaaatttgcctgaaaaaacaggctccctcaaggcccctggtcccactcggaaatgttcctcaaagcacagctgtaaaaaagcctagtgtaagctgcttgactttgctcagatcttagcattttagagacttgagaacacagggcactattggttccagaagatacactgaacgcaactgaagaaaactgaagggaggcaagaaagaaaaacatactctgcagcaaacgtgcagccaggatgcaggatgcgcaccctaggattcctcagttctcctcactcacacgggctgagcccactcgtgcctgtgccacctctcattcctctcagagttacagtatgatggctgattttgttttttgagcagttaggcaccttcaatttcatgttgcattattagtaatacaatggcagttagggcctctactatggaaatgagaaaatttcaaactacattctttgggggaggagagtaataaagctgcatggtttaaaaatttacctagtagtggatttgatagggtttatataatttctaca

SEQ ID NO: 247521 - DNA, 211 bp, Homo Sapiens
cttcactggggtgcggctttacttgccaccctccacaccagacttcagccgtctcagatgctactttgttgcattcgacggggacctggtacaggaatttgatatgacttcagccacgcacgtgctgggtagcagggacaagaaccctgcggcccagcatgtctccccagagtggatttgggcatgatccagaaacgaactgactctattt

SEQ ID NO: 247522 - DNA, 234 bp, Homo Sapiens
atttgcacggatgatcggatagagagctgtggacacatccttgtacatactgcccaaggaagacagggtaagtcttcagatggcagtaggcccattcctccacatcctagagagcaacctgctgaaagccatggactctgccactgcccccgacaagatcatgagagctgtatctctatgcggctcatgatgtgaccttcataccgctcttaatgaccctggggatttttgacc

SEQ ID NO: 247523 - DNA, 1401 bp, Homo Sapiens
  misc_feature (123)..(154): n is a, c, g, or t
ttggaaaagatcggtgagacggtcgtcgacctggagaacaggctgctgtccaagtttggggctcgctgtggactcccacagacctactgtgtctctggaccgaaccagtggcgggaccagctnnnnnnnnnnnnnnnnnnnnnnnnnnnnnnnnagcagcatagagtcaaggcacctgtgtaccggacagaccgtgtaatgtttcaggataaagaatattccattgaagagatagaggctggcaggatcccaaacccacacctgggcccagtggaggagcgtctggctctgcatgtgcttcagcagcagggcctggtcccggagcacgtggagtcacggcccctctacagccccctgcagccagacatcgagcaggggaagctgcagatgtgggtcgacctatttccgaaggccctggggcggcctggacctcccttcaacatcaccccacggagagccagaaggtttttcctgcgttgtattatctggaataccagagatgtgatcctggatgacctgagcctcacgggggagaagatgagcgacatttatgtgaaaggttggatgattggctttgaagaacacaagcaaaagacagacgtgcattatcgttccctgggaggtgaaggcaacttcaactggaggttcattttccccttcgactacctgccagctgagcaagtctgtaccattgccaagaaggatgccttctggaggctggacaagactgagagcaaaatcccagcacgagtggtgttccagatctgggacaatgacaagttctcctttgatgattttctgggctccctgcagctcgatctcaaccgcatgcccaagccagccaagacagccaagaagtgctccttggaccagctggatgatgctttccacccagaatggtttgtgtccctttttgagcagaaaacagtgaagggctggtggccctgtgtagcagaagagggtgagaagaaaatactggcgggcaagctggaaatgaccttggagattgtagcagagagtgagcatgaggagcggcctgctggccagggccgggatgagcccaacatgaaccctaagcttgaggacccaaggcgccccgacacctccttcctgtggtttacctccccatacaagaccatgaagttcatcctgtggcggcgtttccggtgggccatcatcctcttcatcatcctcttcatcctgctgctgttcctggccatcttcatctacgccttcccgaactatgctgccatgaagctggtgaagcccttcagctgaggactctcctgccctgtagaaggggccgtggggtcccctccagcatgggactggcctgcctcctccgcccaagctcggcgagctcctccagacctcctaggcctgattgtcctgccagggtgg

SEQ ID NO: 247524 - DNA, 1215 bp, Homo Sapiens
  misc_feature (706)..(724): n is a, c, g, or t
  misc_feature (972)..(981): n is a, c, g, or t
  misc_feature (1018)..(1027): n is a, c, g, or t
  misc_feature (1141)..(1151): n is a, c, g, or t
ttggcagaggccgtaccaaggcagggctcgagcactggagtaaagcagtccgacagctgccgtgctgctcgccgtgtactacggtctcatctgggtacccacgcggtctcccgcggcacccgccggcccacagcccagcgcgccgtcccctccgtgtgctgcccgcccgggcgtgccgcctgtcccggcgcccgccgctgcctccctctcctgcctcctgggagtccccggcgggccgcgaccccagctccagctgccgctgagccgccgccgccgctacagcgaccctgaccgccgtccgagccgccagacacccagagagacgccagaggccgcggaggggcgaagacccgggtaactctcccttccaccccaacccggatcgccagccctcgagagctctgtgctccacgccgaggatgcaccgtctctggattggtccggccttcttcctaatgacatcgctcagcgtctctggagccgtcatcccgcggaatgggggcccagggggtgtcagctcggggccttgcctcttgcagctactctgtggtcaggccgggtcctccaccatcaggaagatcccatcctgagctctgtctcctgcccctcctgctgtgggatgctgagcacagagcccacagcccatctgcctcttcacctccctgaatccgtgtccatctgcaataaacgacagcctcggctgccnnnnnnnnnnnnnnnnnnnctccaagcgatctatgtccgggtgcgggagaaagaggtaatggaaagggcacatgggtcatagcttgttttcctggaccccaccttttcttgtacaaagggggtaggatctgccgggtcctcccctataggggagtccggattaaattttccaataaaaccaagggttaaacctggcccattaatggaatccggcctggcagttacacccggggaaatttaaccccgcccttaaatggagccgggccnnnnnnnnnnggtgagaccccaagggatctttctgtggagaatcccnnnnnnnnnnccgccgaagaaaaacctggcgtgccttggccaaacaaaagaaaaaacccccggtgtatccagaggggtgtggtttgtgtttgcgccgggaactcagagaggttatccgacttcnnnnnnnnnnnccaaaaggggaacatgggggctttctcccccaaaagcgcgccaataatcacgccatatactggt

SEQ ID NO: 247525 - DNA, 334 bp, Homo Sapiens
  misc_feature (19)..(19): n is a, c, g, or t
  misc_feature (72)..(72): n is a, c, g, or t
  misc_feature (92)..(92): n is a, c, g, or t
aatgatttgtgaagccccnggaacaatttactatttttaaaatattttgctgcttctgttctgggtctgaantcccttttgtgccagatgcncagtactgtctgcccattggctcccaggggctgtatgggcagattcagtctccagagggtattcagatcatctgcttctttgaaggagtaaatgtgttttgttcctagggccagaggagcttgtcttccttgtcctctgttcccaccctcccctgaacagaacccagcccatcagagacattctcagatgaaactctgttttcttgccccagtcaggctcaagccctgtggttgtaggaata

SEQ ID NO: 247526 - DNA, 499 bp, Homo Sapiens
  misc_feature (480)..(480): n is a, c, g, or t
gattttgaggatcccgtcagatgctcagctcactgaaacccacaagatatggaatgaattcgtagaggaagaagaaaaatgtaaagctgatgggaataacctgcaggtggagaattcctccttacctcaagcagatgagattcaggtaattgaagaggcagatgaagaggaatagcgacagtttgagtaaaagaaaagtcatattgaagaagcccagagggttgtgcccaggggcagaaatcattgcctagtgttcaccggctgactctcaactgaccattcccatgtggacaggccttaatactgtgagaggatccttgctctgctggcagtttcccactccctatgcactttcacaggaactagaaaactattcttaaaccaaaaataccatccgtgttgacccatgttgcagagcccttacttaaatccttcactggtgtatgaatactttgtcataatgctgctttgctgggtagntgacgctggagcatctgga

SEQ ID NO: 247527 - DNA, 1069 bp, Homo Sapiens
ttggtgaagttcggatccagccttccctaaccaaagatggtgtcttttctgccctaaagatggcagagttggagtttccccagtttgaaacccttcatctaggatatgtagatgagtttttgctacagagcagaatggctaatgcggatctggtgaagtatggtttggctgatgtggtagaaaatcctggtatcatcactgatatagggatgaaagcagtcaatgaagttttttcctgtatcaaatatctggcaatttacaattgccctcatctacacaacccatacaattggatctcagaccactcaagatggactcgattggttgatatcaacctagtacggtgccatgctttgaagctggactcttttggccagtttattgaattattacccagcctagagtttatttcactggatcagatgtttcgtgaaccacccaagggttgtgctcgagttggtctgagtgcaggcacaggaattggtgtttcatcagctcttgttagcaaccagaactccaacaatgacgataataatgcccagaataacaatgccaacatccacgacaacaatcaccatcatccagatgactcagacgaggagaatgactttcggcaagatctgcagccaggagagcagcagtttgcagctgacgcattaaatgagatggaagacatcgtccaagaagatggagaggtggtggccgagagtggaaataatactccagctcacagccaggcaattattcctgtggatgttgatgaggaacaagcaggacccagtggtcttcagcgtgtagtaaaaccaacctcaattactgttcatgattcagagagtgatgatgaagaagatagtctagagctccaagaagtctggattcctaagaacggtactcggcgttactctgaacgtgaagaaaaaaactggagagtcagtgcagtccagagaattgtcagtaagtggaaaaggcaagactccacttcgaaagaggtacaactcccatcagatgggccagtcgaagcagtttcccctcgaggaaagcagctgtgagaaaggctgtcaggtcacca

SEQ ID NO: 247528 - DNA, 536 bp, Homo Sapiens
  misc_feature (39)..(39): n is a, c, g, or t
ctcgcttagtgctccctggggggttggacatgactgagnaggagtgggggccagcggtgatctcagctctgaaaagcaggaacagagtcccccacaacctcctaatgaccacagccaggattctgagtggtccaagagggagcagatccccctgcaagttggggcccagaacctctcactcagcgtggaactcacagaagcgaaactgcaccatggctttggggaggccgatgccctgctccaggtgctgcagagtgggacaggggaggcgcttgctgctgatgaacctgtgacatccacctggaaggagctctatgcacggcaaaaaaaggccattgagaccctcaggagagagcgggctgagcgacttgggaacttctgccggacgcgaagccttagccctcagaaacaactgagcctcctgcccaacaaagatctcttcatctgggatcttgacttgcccagcagacgccgagaatacctgcagcaactgaggaaggatgttgtggagaccaccagggagcaataagcgaggt

SEQ ID NO: 247529 - DNA, 396 bp, Homo Sapiens
cacctgagaacacggcaggcaatggtgaccaacccctcccaccaggccctggctgggggcgcggtcctccctgagtggctctggtgatgggcggcccccacctctgctgcagtggcctccccctcggctccctggaccaccccctgcatcgcctatccccacagagggtccccggacctcacggccccctggcccgggtctcctcagttctgagggccccagtggaaagtggagcctggggggccggaaggggctgggaggatctgacggggagccagcctcagggagccccaaaggaggtacccccaaatctcaggcgcctctagacctcagcctcagcctcagcctcagcctcagccccgatgtcagcactgaggcctcaccccccagagcttc

SEQ ID NO: 247530 - DNA, 1060 bp, Homo Sapiens
ttggcttgattctaaggactgaccctggatttatagcttttgattggttgggcagacaagttcagacttttctggagtacacagatgctggtgcttcatttgtctttggtgagaaatacaaagaccacttctttgcatttaaggtcctgccgatcgtggttttcttcagcactgtgatgtccatgctgtactacctgggactgatgcagtggattattagaaaggttggatggatcatgctagttactacgggatcatctcctattgaatctgtagttgcttctggcaatatatttgttggacaaacggagtctccactgctggtccgaccatatttaccttacatcaccaagtctgaactccacgccatcatgaccgccgggttctctaccattgctggaagcgtgctaggtgcatacatttcttttggggttccatcctcccacttgttaacagcgtcagttatgtcagcacctgcgtcattggctgctgctaaactcttttggcctgagacagaaaaacctaaaataaccctcaagaatgccatgaaaatggaaagtggtgattcagggaatcttctagaagctgcaacacagggagcatcctcctccatctccctggtggccaacatcgctgtgaatctgattgccttcctggccctgctgtcttttatgaattcagccctgtcctggtttggaaacatgtttgactacccacagctgagttttgagctaatctgctcctacatcttcatgcccttttccttcatgatgggagtggaatggcaggacagctttatggttgccagactcataggttataagaccttcttcaatgaatttgtggcttatgagcacctctcaaaatggatccacttgaggaaaggaggtggacccaaatttgtaaacggtgtgcagcaatatatatcaattcgttctgagataatcgccacttacgctctctgtggttttgccaatatcgggtccctaggaatcgtgatcggcggactcacatccatggctccttccagaaagcgtgatatcgcccagggagcactaag

SEQ ID NO: 247531 - DNA, 688 bp, Homo Sapiens
ttggcgtcttccctgcctccccaggggccaccctggtggggccccacggacccctggcctccggccagctagcagccttccacatcgctgccccgctccctgtcactgccacacgctgggacttcggagacggctcccccgaggtggatgccgctgggccggctgcctcgcatcgctatgtgctgcctgggcgctatcacgtgacggccgtgctggccctgggggccggctcagccctgctggggacagacgtgcaggtggaagcggcacctgccgccctggagctcgtgtgcccgtcctcggtgcagagtgacgagagcctcgacctcagcatccagaaccgcggtggttcaggcctggaggctgcctacagcatcgtggccctgggcgaggagccggcccgagcggtgcacccgctctgcccctcggacacggagatcttctctggcaatgggcactgctaccgcctggtggtggagaaggcggcctggctgcaggcgcaggagcagtgtcgggcctgggccggggccgccctggcaatggtggacagtcccgccgtgcagcgcttcctggtctcccgggtcaccaggagcctagacgtgtggatcggcttctcgactgtgcagggggtggaggtgggcccagcgcccgcagggcgaggccttagccagggagcactaaccgaggt

SEQ ID NO: 247532 - DNA, 919 bp, Homo Sapiens
gctgatccgcttaagcactgttggagcagttgaacatttcctggtgtgaccaagtaaccaaggatggcattcaagcactagtgaggggctgtgggggtctcaaggccttattcttaaaaggctgcacgcagctagaagattaagctctcaaagtacataggtgcacactgccctgaactggtgactttgaacttgcagacttgcttgcaaatcacagatgaaggtctcattactatatgcagagggtgccataagttacaatccctttgtgcctctggctgctccaacatcacagatgccatcctgaatgctctaggtcagaactgcccacggcttagaatattggaagtggcaagatgttctcaattaacagatgtgggctttaccactctagccaggaattgccatgaacttgaaaagatggacctggaagagtgtgttcagataacagatagcacattaatccaactttctatacactgtccctcgacttcaagtattgagtctgtctcactgtgagctgatcacagatgatggaattcgtcacctggggaatggggcctgcggccatgaccagctggaggtgattgagctggacaactgcccactaatcacagatgcatccctggagcacttgaagagctgtcatagccttgagcggatagaactctatgactgccagcaaatcacacgggctggaatcaagagactcaggacccatttacccaatattaaagtccacgcctacttcgcacctgtcactccacccccatcagtagggggcagcagacagcgcttctgcagatgctgcatcatcctatgacaatggaggtggtcaaccttggcgaactgagtatttaatgacacttctagagctaccgtggagtctctccagtggaagcaaccccagtgttctgag

SEQ ID NO: 247533 - DNA, 1070 bp, Homo Sapiens
ttggccgactgaggcacgagcgggtgacgctgggcctgcagcgcggagcagaaagcagaacccgcagagtcctccctgctgctgtgtggacgacacgtgggcacaggcagaagtgggccctgtgaccagctgcactggtttcgtggaaggaagctccaggactggcgggatgggctcagcctgtatcaaagtcaccaaatactttctcttcctcttcaacttgatcttctttatcctgggcgcagtgatcctgggcttcggggtgtggatcctggccgacaagagcagtttcatctctgtcctgcaaacctcctccagctcgcttaggatgggggcctatgtcttcatcggcgtgggggcagtcactatgctcatgggcttcctgggctgcatcggcgccgtcaacgaggtccgctgcctgctggggctgtactttgctttcctgctcctgatcctcattgcccaggtgacggccggggccctcttctacttcaacatgggcaagctgaagcaggaaatgggcggcatcgtgactgagctcattcgagactacaacagcagtcgcgaggacagcctgcaggatgcctgggactacgtgcaggctcaggtgaagtgctgcggctgggtcagcttctacaactggacagacaacgctgagctcatgaatcgccctgaggtcacctacccctgttcctgcgaagtcaagggggagaggacaacagcctttctgtgaggaagggcttctgcgaggcctccggcaacaggacccagagtggcaaccactctgaggactggcctgtgtaccaggagctcctggggatggtcctgtccatctgcttgtgccggcacgtccattccgaagactacagcagggtccccaagtactgaggcagctgctatccccatctccctgcctggcccccaacctcagggctcccaggggtctccctgggctccctcctccaggcctgcctcccacttcactgcgaggaccctcttgcccaccctgactgaaagtagggggctttctggggcctagcgatctctcctgggcctattccgctgccagc

SEQ ID NO: 247534 - DNA, 1802 bp, Homo Sapiens
  misc_feature (1615)..(1615): n is a, c, g, or t
ttgggttactcttcaaaaagagggacagaaagtcaagacctaattgtggaaactcttttctctgccacgcttggtaataggaggcaacctctattaaatggacgataaaggctacttcatctaaagtgctttgagctcaagaaagagctgtcttcagcacctcaccatgtgtctacattttgttgcttagaaaagcctaggcatttctgtaacatttgcattccatattggaagaagagatttctacacatgaaaaaaaatgcctttgtttagtaaatcacacaaaaatccagcagaaattgtgaaaatcctgaaagacaatttggccattttggaaaagcaagacaaaaagacagacaaggcttcagaagaagtgtctaaatcactgcaagcaatgaaagaaattctgtgtggtacaaacgagaaagaacccccgacagaagcagtggctcagctagcacaagaactctacagcagtggcctgctggtgacactgatagctgacctgcagctgatagactttgagggaaaaaaagatgtgacccagatatttaacaacatcttgagaagacagataggcactcggagtcctactgtggagtatattagtgctcatcctcatatcctgtttatgctcctcaaaggatatgaagccccacagattgccttacgttgtgggattatgctgagagaatgtattcgacatgaaccacttgccaaaatcatcctcttttctaatcaattcagagatttctttaagtacgtggagttgtcaacatttgatattgcttcagatgcctttgctactttcaaggatttactaaccagacataaagtgttggtagcagacttcttagaacaaaattacgacactatttttgagactatgagaaattgcttcagtctgagaattatgttactaagagacagtctttaaagctgctaggggagctgatcctggaccgtcacaactttgccatcatgacaaagtatatcagcaagccggagaacctgaaactcatgatgaacctccttcgggataaaagtcccaacatccagtttgaagcctttcatgtttttaaggtgtttgtggccagtcctcacaaaacacagcctattgtggagatcctgttaaaaaatcagcccaaactcattgagtttctgagcagcttccaaaaagaaaggacggatgatgagcagttcgctgacgagaagaactacttgattaaacagatccgagacttgaagaaaacggccccttgaagagctccccggcccctgtcacagtcagtcgtctcatttgtccagtttgtacagtgtgtcatttcagaaagtcatcattcttgggaagactttggaggtgcctattttttctgctgtaattgttctgggtagatggagtataaacatttgaatggaaaaaaattaacctagaataatatattcattttagtcaagtctgtgattatttatgtgaaatgagaaccattgtatcagatgttgataaaagcaattttaacttgcagatgtgagcctctgggcacaatgagccgctaaatgggagctcaattgacaggcatcaccaagtcttcaaggaggactgagttctcagggnagaactgggaatggggccagggtgcaaaaatgctttgcccatctgtaggtagacacacagatcgctcagggcactgagagatcccagaaggtaacgttaatgttttcagtcattgtgtgtcctttgttgctgccaatgtctttggactgtaatcagtgcatccacacctcccagggagcactaagcg

SEQ ID NO: 247535 - DNA, 203 bp, Homo Sapiens
  misc_feature (36)..(36): n is a, c, g, or t
  misc_feature (104)..(104): n is a, c, g, or t
  misc_feature (114)..(114): n is a, c, g, or t
  misc_feature (184)..(184): n is a, c, g, or t
gctgagttccgtggtgtgtctctcgatgccactccngcttctctgtgggcctctttctgtgcttctctttgtccccaaattgctacctctttgtcagtctgggntgtctcaggnttctattttgacaatttcctctaggtccccaggggtagggttgtttagagactcctggatgccctgaggngggctccagagcttgcctc

SEQ ID NO: 247536 - DNA, 269 bp, Homo Sapiens
gaatcctgaacctgaaggagttgcggcggcagcagcaggctggtgccaggaagaaggagctgctggagagactcgcgcagcaacagcagccggctgtacgctcccccacccccagcagagcaggaagagcaggcactgtcaccatcaccccccaacggtaacccactgttgcccttagccaggtgcacaggtcagacaaaatgtgaagaacagacttcttgttaaaaaccaggatgtcagtatttcaaaccctcatccgcttatccaag

SEQ ID NO: 247537 - DNA, 229 bp, Homo Sapiens
tagaaccataactaacttcccattaacaataagacaggaattaaagttgaatatgttgttttactatcatttagagtctctgtgctaagccaattctgggactgcttttccatctttcacattagaatcaatagtgtttacaaatctggacaaatgctatgagtttagtaatactaaattcaatgacgtattaatttttcgtaatcagccctcatccgcttatccaatg

SEQ ID NO: 247538 - DNA, 386 bp, Homo Sapiens
  misc_feature (12)..(12): n is a, c, g, or t
cagggcagttcnccaaacacagcggcttctgaaacagtcaatgaccagtaccccccaaacctgggctgtgcacaacagaccaagaaaaaggtgttccagtaagaaaacagatatatgcggtattttaaaaactgattttacaaaatccagcccatgagatgtacaactcattccctaggaaacagcccaggaatggccatcttctccagccccgtacgctctccccagtagcccagggcacccagcaaccatcccctaggagaacaggcaaggaccctcgtgggaagatcccaccacagcaacacctttcttcagggcgggcctcttccgcaatgtgtgagtcaagacaatccattccattcaagaccaatttactctcaaatttt

SEQ ID NO: 247539 - DNA, 1034 bp, Homo Sapiens
  misc_feature (912)..(912): n is a, c, g, or t
aactataaaagccaactttgtacaaaaaagttggctgagctcaaaacccaaagcccagaatttgaagctcaaagttccaaattccaggaaggtgcggagatgcttctgaaccccgacgaaaagagtcctttgaatatctccgtaggagttcaccccctggactccttcactcaggggtttggggagcagcccacaggggacctgcccatagggccaccttttgagatgcccacaggggccctgctgtctacaccgcagtttgagatgcttcagaatcccctgggtctcacaggagcccttcgaggtccaggtcggcggggtggccgggccaggggtgggcagggccctcggcctaacatctgcggcatctgcgggaagagcttcgggcggggctccaccctgatccagcaccagcgcatccacaccggtgagaagccctacaaatgtgaggtctgcagcaaggccttctcccagagctctgacctcatcaaacaccagcgcacccacactggcgagcggccctacaaatgtccccgttgcggcaaggccttcgccgacagctcttacctgcttcgccaccagcgcactcactctggccagaagccctacaagtgcccacattgtggcaaggccttcggcgacagctcctacctcctgcgacaccagcgcacccacagccacgagcggccctacagctgcacctagtgcggcaagtgctatagccagaactcgtccctgcgcagccatcagagggtgcacaccggtcagaggcccttcagctgtggcatctgcggcaagagcttctcccagcggtcggcccttatcccccatgcccgcagccacgcccgggagaagcccttcaagtgccctgagtgcggcaagcgctttggccagagctcggtgctggccatncacgcccgcacccacctgccaggccgcacctacagctgccccgactgcggcaagaccttcaatcgctcctccactctcatccagcaccagcgctcccacacgggggagcggcacatgcgttg

SEQ ID NO: 247540 - DNA, 1166 bp, Homo Sapiens
cctataaaagccaactttgtacaaaaaagttggccctgcgctctctttcctcacccttccccccgccaccgtgggttccagacttgggataagtaaacagcgggtggagcgaggcctacggacccaggccaggtgggagtctgcactcttcaaggggcctgggctgctgctcacgggtattaaagaactccgcgttgttcatggctgaggcgatgcattaggaagatcctggacctagagaacaagtcccccgaacgctgagttggaggcgggacttcgggtgcgcgttggcgggagcatgctggggctctgggggcagcggctccccgcggcgtgggtcctgcttctgttgcctttcctgccgctgctgctgcttgcagcccccgcgccccaccgcgcgtcctacaagccggtcatcgtggtgcatgggctcttcgacagctcgtacagcttccgccacctgctggaatacatcaatgagacacaccccgggactgtggtgacagtgctcgatctcttcgatgggagagagagcttgcgacccctgtgggaacaggtgcaagggttccgagaggctgtggtccccatcatggcaaaggcccctcaaggggtgcatctcatctgctactcgcaggggggccttgtgtgccgggctctgctttctgtcatggatgatcacaacgtggattctttcatctccctctcctctccacagatgggacagtatggagacacggactacttgaagtggctgttccccacctccatgcggtctaacctctatcggatctgctatagcccctggggccaggaattctccatctgcaactactggcatgatccccaccacgatgacttgtacctcaatgccagcagcttcctggccctgatcaatggggaaagagaccatcccaatgccacagtatggcggaagaactttctgcgtgtgggccacctggtgctgattgggggccctgatgatggtgttattactccctggcagtcccagcttctttggtttctatggatgccaatgagaccgtccctggagatggaggagcaactggtgagccccctgggattacttctcccttctagccgctgtcccaccttattccagagccctctctgtgactcctgagctgaagggttcaccccggtgggga

SEQ ID NO: 247541 - DNA, 450 bp, Homo Sapiens
  misc_feature (36)..(36): n is a, c, g, or t
acggatagcggatctgcattttcaagtgagcaaagnccgctatggagggcagccacttttctcagagaagttccccaccctttggtctggggcaaggagtacttacggagtgacaaagggaaaagtctgctttgaggcaaaggtaacccagaatctcccaatgaaagaaggctgcacagaggtctctctccttcgagttgggtggtctgttgatttttcccgtccacagcttggtgaagatgaattctcttacggtttcgatggacgaggactcaaggcagaaaatggacaatttgaggaatttggccagacttttggggagaatgatgttattggctgctttgctaattttgagactgaagaagtagaactttccttctccaagaatggagaagacctaggtgtggcattctggatcagcaaggattccctggcagatcggctatccgt

SEQ ID NO: 247542 - DNA, 1274 bp, Homo Sapiens
ttggaatcaaacagctggacattgagacccaggctggcatcgtggcccatatccaggaggtgactcacaaccaagagaacgtgtttgacctgcagtggctggagctgcccgacgtggctccggaggagctggaggccctgtcgaggagcatggtgctccacctgcggaggctcatcgaccagcgggacgagtgcaccgagctgatcgtggacctcactcaggaacgggactacctgcaggcacagcatccacccagccccatcaagtcctccagcgccgactccactcccagccccaccagcagcctctctagcgaagacaagcagcacctggccgtagagctggccgacaccaaggccaggctgcggcgcgtcaggcaggagctggaggataagacagagcagcttgtggacaccagacatgaggtggaccagctggtgctggaactgcagaaagttaagcaggagaacatccagctagcggcagacgcccggtctgctcgtgcctatcgagacgagctggattccctgcgggagaaggcgaaccgcgtggagaggctggagctggagctgacccgctgcaaggagaagctgcacgacgtggacttctacaaggcccgcatggaggagctgagagaagataatatcattttaattgaaaccaaggccatgctggaggaacagctgactgctgctcgggcccggggcgataaagtccatgagctggaaaaggagaacctgcagctgaaatccaagcttcacgacctggaattggaccgggacacagataagaaacgaattgaggagctgctggaagaaaacatggtccttgagattgcacagaagcagagcatgaacgaatctgcccaccttggctgggagctggagcagctgtccaagaacgcagacttgtcagacgcctccaggaagtcgtttgtgtttgagctgaacgaatgtgcgtccagccgcatcctgaagctggagaaggagaatcagagcctccagagcaccatccaggggccgcgggacgcgtccctggtgttggaggagagcggcctcaagtgcggggagctggagaaggagaaccaccagctcagcaagaagattgaaaagttacaaacccagctggagagagaaaagcagagcaaccaagatctggagaccctcagtgaggagctgatcagagagaaggagcaactgcagagtgacatggagaccctgaaggctgacaaagccaggcagatccgctatccgtcgacggatagcggatctgcc

SEQ ID NO: 247543 - DNA, 1096 bp, Homo Sapiens
  misc_feature (702)..(710): n is a, c, g, or t
ttggatgataagatcttttaggtggcttactctggatatatctggatccttctgcacatcctgtgttaaaaggaattggtcccatgatggaatatctgggttatgcctttttttgaaaattttctttaggaatttacaaactgtactggttaaattgtggagtaaatgatcagagagaacaataaaatgacgaacaaaagaataaaagccgaggaaaattgcaaattgatcagcaacaactaactcatcatcaacttaatggaaactatgttcatgggacacagtaaaaaaactgggaatgaataacacatccataactactattcttttttcactgttttctaaaatcaaaaagggtttgtaactttttactgcccaactcttagatccttcattgaactgcctaaaaatgtcttgtttgttttatgagccctcactagaaggctgagtttgacatgttgatattacgtagctatagtttgcagtttctgggaagcaattgaaacactattaaccctgtgtatagtgtcaacagttaaagcagacgaaacgaagtaagctatatttctggactgaacaaagctctgctgtttagagcatttaagtttgtttagtggatccatactcaacaggaaagcataagcaaattttcctttacaatgcaaacatgccactggtggcagcacatggtaatttgtggannnnnnnnncctactcaagtaatggaggctagaaatgaagagaaccttctttttctcttgactttgacagcacatgctaaaaatctcttccaagaagtatgctaaagcttttcatttggttcctgttaaagttgttctcactgaccagcatggactcaggcaactggtaatgataagctatgagctccagtgcttttgccaaaattctcttgacagcacacctcctctctttccatgttatacaaaggacttctggcaaaatgattgagtccttcaagtttaaactaacacttggcaacagcaaattacacgttttaaagatgtacagaaaggggttaccgcttgctaaggacttcagacaccatgtccgaaacctgttcctctcaagtgccctt

SEQ ID NO: 247544 - DNA, 946 bp, Homo Sapiens
gatttcagaacccaaacagcagggacggcatcttgttgctcaaatctatgaaggtcatcttgatggattcgagagaataaagtgccatgggcttactgttaggcctcttatcccatccactagctgccaagtatggattcagctgctctgtgctggatgaaaatccgtccaggagtcttttatatctgaggcgcttgtagcttttagccattggaagaagttcagagggacaccgtcggtatcttagcttctgagtcttcatggctggggccagtttggaggcaaggatggacagcttgtttagtaaggctgattctttggtagtcttcctaaaattcaggctcctcaagggatggcacggtgtagacatctgctttggtatgtgactaaccaagctcttggtaggtgctgtttcaggttctaatcgtgtaggtgcagacagagtacacaaactgagaagtctgtgcgcttttgtggggatgggattggaagaactctttaaaaaggcagaacttctgattttacctatttttctcccaacaatgatttgctcctgataggaaactttcttacaagttcgatggggctgcttctttaagggaagaactcctttcttcgcaaaggcaccatgtatttgatcacacccagcagaggaggggtcttgtgctttccgaggggcaccaagaaggcaaggacttgtgcatgactcagtgtccttccttaatggatgatgtaacctttcctccttctggtcttctaacttctgagtctgtgccacaatgctgtccttggccagctttgctagggtgatttcattgatcatggtggactcatctttgtcagccttcggttggttctgattttgtgcatcatctaacaacagactagatgatatgcactgttgcgatatcgtatgtgctttttgttgacgtatatatttctccaa

SEQ ID NO: 247545 - DNA, 546 bp, Homo Sapiens
taaaccattcaaatatccacccaggatgaacaaagatcaccaaggggaaagaaaacattttttatctttacagaaaacatgttaagattatatatagatgtattctttacattggatattgtattagagtcctccttacaagaaatgaaatagtttttagcactcttagcattagagttcctagattggtgttgatagctacagttttaaaatgtataacctgaaaatgaaggttaattttgcattgtaagagcacatttgatctatgtaaaaagtgtccatttggtgtatttttttaaaaaagagaaagcactttcatattaagtagcatgtgtatgaatttagattttcatatttgttgtgtctgtattcagtgaagtaaattgagcatttaaatgtttgttgatggcaacattaactattaaattaaagcaccttatactctgctgcttaacttgcttgtaattgcacctttgttacctgcacattttcatatagaatattgttgtaacattgcttcatgtggatatttgaatggtttagggt

SEQ ID NO: 247546 - DNA, 871 bp, Homo Sapiens
aggttgccgtgggaacggctggggcaaagccccacgcccgcgcatgctcaggagcgacgccgaccaatgacgtacttcgcaggcgcgcgggcgggcctggcagttggcgcccatggagcccagagctgctggttcggaaggtgtctgcattgcaggtgcgggggcgggcgcggggttcacaggatttttcctttagggaaatcatggggtctcgtacctggacctcccagcgagatgctaccacgttcagtcccctaactgcgcgccaacctctggagataccggctgtccccaaccgcgctgaggaaagctgggacccacggactccctgccctgcgcgtccccactcccaccacacgctcgcgccggatgagggaaacgggaagagccttaaggcgaggaggggcatccagtctggcatcgtccctcgagccccccggagccctagcgcacagcccacctatcctttccccgccgtcaggtcccctcttgcattcgccgggacgacctcttcaggacagtcctccgagatgccccctctcttaccgtgataagggacttctttcctctcgttctccataccaggcctgcgtccggggcttcttggtccgacgccagttccagagcctgcgagctgagtatgaggcgattgtacgagaggtcgagggcgacctgggcacgcttcagtggaccgagggccgcattcccaggccgcgattcctcccagaggtagaacacacctaggagagaagggaaggagggacttgggcagggtggaacccacccttcccagtgataagcttttctcactggaagaggcagtagactcacctcctcacaccccactccttaaccctcaccaacttgccaa

SEQ ID NO: 247547 - DNA, 597 bp, Homo Sapiens
ttggctttctccattcagtggcggcattgtgcggagaatgtgagtgaagggatgaaaatcgctcggcccgtgcctggcccctagtaagccacagagaaatgtgagccgctgccagtcaggctgagaggacgccactgaggaagtccaggccagggtgggacatgctgcgcacagtggggaaggagaggaggtggccagaggaggggatggtcctttccagtcatacacgcatgtctgcttgtgtgtgtacatgtgggggcctggtgcagggcgtgggggtgctgttcagagttggaccccccatcatccatcctgccagcctcctataccctgaggcctgacccaccctggcccccacaccaccccagcagcggagatgagggtgagtgagggctccttaggaagcagagaggaggccacagggccaaatgtgacactcagaagggccactggagaccacgcatggcgtttcctgccagcccactcagcatctagcccagggccagactggacactgccccgcaggacccagcaggcctaagcctcaggacctccatgtccacaccaggttcagcctcctcatccgcttatccaatg

SEQ ID NO: 247548 - DNA, 1069 bp, Homo Sapiens
  misc_feature (794)..(794): n is a, c, g, or t
ttggctcgctggatgaggacaatgaccggctgatggtgcgctcagggggcagccccctatcccccgtgatctatgattcggacatggacgatgtccccgagcggggtctcatcagtgacgcccagtccctctacgtggagctgctgtcagagacacctgccaatcccctgctgttaagccttcgatttgaagcctttgaggaggatcgctgcttcgcccccttcctggcacatggaaatgtcactaccacggaccctgagtatcgcccaggggcactggcaaccttctcgtgcctcccaggatatgccctggagccccctgggccccccaatgccatcgaatgtgtggatcccacagaaccccactggaacgacacatagccggcctgcaaagccatgtgtggaggggagctgtcggaaccagctggcgtggtcctctctcccgactggccccagagctatagcccgggccaagactgcgtgtggggcgtgcacgtccaggaagagaagcgcatcttgctccaagttgagatattgaatgtgcgggaaggggacatgctgacgctgttcgacggggacggtcccagcgcccgagtcttggcccagctgcggggacctcagccgcgccgccgccttctctcctctgggcccgacctcacactggagtcttcaagcaccgccccggccccccaaatccaggcctgggcccaggggcctccctatggccacttccaaaaaaggctccccaagggaatcgaaatcccttgccccccaaagctggccacccttcccggnagtggggggtcctggcacaaaacgggtaattccccaggccccggaccctgggtttcccgcgggggaccgcctggcgcccccccctctatccaacggcccgaacccctttggctccacaaaccccggctttaaggccctcccaaaacattcccacactttgtgcccagagaggaacaccttgccttccgatagaaagagacaagccttcgctgccccctgtccccggtgacgataaagacccctctctccgcgctcttgggagactagctccactg

SEQ ID NO: 247549 - DNA, 924 bp, Homo Sapiens
acccacagtgcttttgcatttctttatcagtgaaaaacaaactgagatctgaagtgtataaacagttccttagtaaagtctatttgagaaaaagaatcaaatgtgcatcaatatatcaaaactgacaaatacaagaaaagcattcagctagagataattcacagcattttattcaagttaatccatttcattcaataatcttccatattgttcccagcaccactattactgttattatttctctttggggaagaccaggtattaagaaatctggtttgaatttccatgatgcctaactctatggttaaaaatccttttccttaccaaaaaggaacttcttaatcaccagagaaacagagggaaagactgagatatgtttgcagaaatttatgtctactagagacaattcatagttcataatctttcagggttgtgctttacttggtgactctcttttggggaggggcttgtttcttataaatgtttgtctaatacaaatcacttgccccactgtaccatggaagggaaatgagggctagtccccaaagagcaagcaagcagtcctcctgggaagaagccctaatggctcctagtggtgacacagtcattctgccagggtgaggggacacagtcattctgccagggtgaggggacacagtcattctgcctccccaacctgtgagcaataataaaatataaccaagtgaacaggagaggtactaactagctggataatccatggtggactagaatctctaaacaggaatgtttatgtgttttgaataaatcagagctggaaagagacacttttggagaagtgatggagaatagaaaagtatgaaaaagataaaggtttctcaccaaggaacccacaaaaaaggtagtaccagtcaaaggtagtcttggggttttcttttgagccaa

SEQ ID NO: 247550 - DNA, 1073 bp, Homo Sapiens
  misc_feature (268)..(320): n is a, c, g, or t
  misc_feature (464)..(494): n is a, c, g, or t
ttggcttttccttggtttttaaacttctgaaaagcagcttgacctggatataaaaagctgtcattttcattttaggaaaatagattttaaaatcctttctgacgagatgaacattgtaacaagcagggtaccagataatctttgtaatgtcactttgacatctaattggttatagagtactagcattttcgtgaagcccaaatataagagattttttgatccaaattctcagaccgcttctgaagttcttcagcaagttttgagggannnnnnnnnnnnnnnnnnnnnnnnnnnnnnnnnnnnnnnnnnnnnnnnnnnnngcaataaaagctgttttctgcagttagaggagtgaggaagatcaagtaaaagtacagaaacacattttcataactgttcccaagaaatagcaacaaagggttgagagaaccgctaagaatgtggcaagtactatctgtgacccnnnnnnnnnnnnnnnnnnnnnnnnnnnnnnngtgagctttttcatgggtgatagggaaaataacaggcaagaaaatcttataaataaggtaaaattaccaaaagaaagttgcctttaggaccaaagcgaaaaggagaaaactctattaagctcagtgatatagttctttgtccctgacatttgtctgtaagcctagggggaagtctcctctctcctgcccttacgtaaacaggcttttcggcttttatgggacattcatttactctatttcccattagatattaaagtcccctagtgcacaaacaaatcaacaacaaaaagagataacgtagttaggcatgctgaactagtcttgggttcttaaatgctttttcattttctgtaaatgtttcagaactacatgtactgtgcctctaatagattacatagatgggaatgattattccattgaaccacagcaaggtggggatgaagatggttttgccagaggggcctgggactggagtttactatggaaacgtattcctctaagccacaaggaaaaggccaaaagaaaacataaaactgaaccctatcggtccccagccatggctgggggattatttgccat

SEQ ID NO: 247551 - DNA, 950 bp, Homo Sapiens
  misc_feature (540)..(553): n is a, c, g, or t
ggattcggcacgaggccgccttgccgagagcccccgcccgcgaaggatgctggtgagtaagccgtcgggagccgccgccgccatctgagggaggtaccctggaaaccaccttttatcggtggggaagtgcagtcgcggtgggcggctctgggggccagcgaaacgggaggcctctaaatctttaggttggggctgcattgccctggagccgcactcttgagtccgaggccatcttttgttggagaaggcgtcggcgttggcgttttcccgaggttgtgctgtacagtgtctccgtccgcggaaaaagaagcctctgaacccgcgccggcccgcagcccccgtggcttccggccgctgctcgccgtcgccagaggctaggccacgtttcccccagtgccgaggtgtttctgtgaccctccctccactcccattcccttctgaaagggcacctgctcttggtgagaaaagaaattatagcacgaagagccagtatcagaagagtatccatcacccgcagcaaccgctcagggaacaccatcnnnnnnnnnnnnnngggaatatctggatttcttgggcgaggaggagcgagtctgctcgggagctgttccagcaggcgatttttaaatactgctttctacgccctatacaacttggcttcacatacttttacactaactttatatgatttttaaaaactggtctgatcggacttctcgtcctgggacactgtttactggagtctggccggctctccgtgctcctcttggtacctcattttggggagaaccttaaacccactcgagcagataatctccgccttgaccggtgccaccaaagaagccttggaaccatgtggacttttctgggcattgccactttcacctatttttataagaagttcggggacttcatcactttggccaacagggaggtcctgttgtgcgtgctgg

SEQ ID NO: 247552 - DNA, 308 bp, Homo Sapiens
caacgcatgtgccgctcccagtctctctgcctcaccttctgggtgtggagaacttggtcagccactgcggaagcctgagctccctgcaaccaccagttcctctcttccctgaaacacgagcactgatctcagcactttacctctattcatctgtgaaatcctcccagtagccctctgaagtgagtactgtaatatcctcatttcagagatgaggagacataagcccagagaaggtatgtgactcctccaaggatacacagccagtaagtgatggagccaggatttgaacccaggcagtctgaccccaa

SEQ ID NO: 247553 - DNA, 738 bp, Homo Sapiens
  misc_feature (624)..(624): n is a, c, g, or t
  misc_feature (726)..(726): n is a, c, g, or t
agattaatgatggggcgaaacgattacagttctcatgtttcctttcccagtggcagcatgtctaatgtccctattctcccagcttctttcctgcatttcttagatgctcctgttccatacctgatgggtttgcattccaatggcctggatgaccggtcaaagctggagctgcctcaagaggctaacctctgctttgtggacattgacaaccacttcattgagttgccagaggacttgccacagttccccaacaaattggagtttgtccaggaagtctctgagattctcatggcatttggaattccccctgaagggaatcttcattgcagtgagagtgcctccaagctgaagaggctgcgggcctctgagcttgtctcggacaagaggaatgggaacattgctggctcccctttgcattcctacgagcttcttaaggagaatgaaactattgcccggctgcaagccttggtcaagagaactggggtgagcctggaaaagttggaagtgcgtgaagaccccagcagcaataaggatctcaaaattcagtgtgatgaagaagaactcaggatttaccagctaaacattcagatccgggaagtttttgcaaatcgtttcactcagatntttgcagattatgaggtgtttgtcatccaacccagccaggataaggaatcctggtttaccaacagggagcggcacatgcgttgggggtcctctagatcgacngcaggcagcaag

SEQ ID NO: 247554 - DNA, 716 bp, Homo Sapiens
  misc_feature (83)..(83): n is a, c, g, or t
  misc_feature (114)..(114): n is a, c, g, or t
  misc_feature (123)..(123): n is a, c, g, or t
ggccaaggtggctgcaccaactgaaagggccatatggtctgccgggcggggaagtacagcgaccccatgagatcccggcaacnaaggcacacgtttccgccaacctgaagaccntgacccagncagcatcccagaaatcaaccaccgcttgaaaagctacatgaagttcctgtttgtccgggagccctttcgagaggctagtgtccgcctaccgcaacaagttcacccagaagtacaacatctccttccacaagcggtacggcaccaagatcatcaaacgccagcggaagaacgcccacccaggaggccctgcgcaaaggggacgatgtcaaattcgaggagtttgtggcctatctcatcgacccacacacccagcgggaggagcctttcaacgaacgctggcaaaccgtctactcactctgccatccctgccacatccactatgacctcgtgggcaagtacgagacactggaagaggattctaattacgtcctgcagctggcaggagtgggcagctacctgaagttccccacctatgcaaagtctacgagaactactgatgaaatgaccacagaattcttccagaacatcagctcagagcaccaaacgcagctgtacgaagtctacaaactcgattttttaatgttcaattactcagtgccaagctacctgaaattggaataaagggggtggggagagggagcggcactgcgttg

SEQ ID NO: 247555 - DNA, 175 bp, Homo Sapiens
atcattaaagacttatagcatcacttcactgtagtgatgcacaaacggctgtgcgggtgctccggagtcctgttatgagacacaggactcccattaacctgtcctgctcaccaggcccctccagaggctccctggcccccagtgcgtctcccttttccctgcacaagaagtggga

SEQ ID NO: 247556 - DNA, 370 bp, Homo Sapiens
aggttctgctctcatgaatttattgcttattgcatgcactcgactctttggatcccccaacccatgtgccgctccccaactctgcatctggagcctgcatctgtttatgcctctcctcatgttgctgctcgtctcctggtgaatgtctcctcccttcctttccagccatctcaatcctgcgtgtctttgaaggtccagccagaaagttttcttcccctatgaaatcatcctggagtaatcgaatccatttctaaattctaaatgctatttgttactgacctatgctccaccctgcccctcttccaggtaaatgaatggctgtttgctataggcaaaaactgggttttgtgataaatcattcagattttac

SEQ ID NO: 247557 - DNA, 967 bp, Homo Sapiens
  misc_feature (16)..(16): n is a, c, g, or t
  misc_feature (50)..(50): n is a, c, g, or t
  misc_feature (832)..(845): n is a, c, g, or t
agggttcgcgttcaangagtttagcctcatgatgtatgcacttcgactcnatcggatcacccacccatgtgccgctcccagaccttaggagttactgggaaatacaagttatcaggccgctgtggagtgcggtttctaaaagtaggattaatacagaagaggcggccccaaccctgcttctgggaagcaaacccaaaaagagccccagccacagcagagaattcagaaaagccacctgcacaaaaggccagagcagccaagggaagctgggggcccaggccagtgagccctggggccaggtatcaggcccctcaaagagcagaaaacagattttttaggtgaagccgacggtctgaggaaatgagatgagctcacacacctgatgacagcttccctcagcaattccacccgcctccacaggactcagaccaagtcctggtgttagaataaatcactaggctacaagaaagctcaaacccccacaggttctagcactcctagccaccaacacaactctgttcaagatccacctatcaacaggggtggggtgggaaggcggtccccatcctcaggccattcttcctccgtgggttgcagccagggtttcctgtgggtcgtcttgtgcacgtcacggccctgcccacagcataaaaacatacaggtgtgagggagatgagcaagacagctagcttttcacaagagcaggaaaggctgggtgctgcgactcacgcctgtaatcacacagcgttgggaggcagaggaggaaggactgcttaaggccaggagttccaggccagtctgagcaacatagcaagatcctgttgtaccaaannnnnnnnnnnnnngaaaactggttgtcgtgttactaaaagtaaccattacaacactgaagtttagaatacagtattactagggagcggcacggtgatccaaagagtctgctcatgcatcagcagctgatcaacaa

SEQ ID NO: 247558 - DNA, 341 bp, Homo Sapiens
catcgaagacgcttgcaagcagcacgactctataggatccaccgatgtgcgctccctactccctgtctcccgtcagcaacaagagccagaagctgctccggtccccccggaaacccacccgcaagatctccaagatccccttcaaggtgctggacgcgcccgagctgcaggacgacttctacctcaatctggtggactggtcgtccctcaatgtgctcagcgtggggctaggcacctgcgtgtacctgtggagtgcctgtaccagcccaggtgacgcggctctgtgacctctcagtggaagggactcagtgacctccgtgggctggtctgagcgggggaac

SEQ ID NO: 247559 - DNA, 476 bp, Homo Sapiens
tctgatgcctgttgcacgcacctcgactcttaggatcccccatcggatgtgccgctccgggcagctgctgatgcaaggaatcccctgtgctcccgtccactccactgctgaccagcccattcgcctgtgctgagtcttcctgcaggcctttccttgcctctgtgggaccctgtgggggtccatccggctggagaagaaaagcctctcatgctaacgttgcagaccccagagggtcctgtgtgggtgtggagatggccaatgagaatcacggcagcccccgggaggaagcgtccctgctgagtcactccccaggtacctccaatcagagccagccctgttctccaaagccaatccgcctggttcaggacctcccagaggagctggtgcatgcaggctgggagaagtgctggagcggggagcggcacatgggttgggggatcctcagagtcgaggtgcatgccacggcatcagcggga

SEQ ID NO: 247560 - DNA, 511 bp, Homo Sapiens
  misc_feature (14)..(14): n is a, c, g, or t
aggtgctgctccgnagagggctgcagatccccaccctctcccctgcacctgactgcagccagcccctggacgtgatccttctcctggatggctcctccagtttcccagcttcttattttgatgaaatgaagagtttcgccaaggctttcatttcaaaagccaatatagggcctcgtctcactcaggtgtcagtgctgcagtatggaagcatcaccaccattgacgtgccatggaacgtggtcccggagaaagcccatttgctgagccttgtggacgtcatgcagcgggagggaggccccagccaaatcggggatgccttgggctttgctgtgcgatacttgacttcagaaatgcatggtgccaggccgggagcctcaaaggcggtggtcatcctggtcacggacgtctctgtggattcagtggatgcagcagctgatgccgccaggtccaacagagtgacagtgttccctattggaattggagatcgctacgatgcagatccgctatccgt

SEQ ID NO: 247561 - DNA, 911 bp, Homo Sapiens
aaagaccaactgtactctccagattccacaccccaccccccaactctttagataagaaaaattatggctttcaaaataaagttttcaaaaatatatcattctcatacatagacgtggttaaaaaaccaacaaaagcctgtcatcactaaatttaaaagattattttgacacaaaaattgatctaccacatgaaatttgatttggcaaaacataccgaacttgatattttttgaggctatgcttttgttggctgagggaaagggggaacaacccacaggggtttaggaataagtggataatcaccttttaaggtgattttaattgacactagtgggaaaacagctccctataaagtaatgtatgtatttttaaaaatcactccaaggagacaaagtcctggagggaggatttttgcaaaaactgtgctcactaggtaaaatatgaactagccttgttcctgcagatccctcctggggtgctttctagaatagctttggggaacacagttctggccaatgttaagatgatggctcactcactcactttcagaattcagctggtccttgaaggctttctggtttcactgagttaatctggcggacccagctgagggcaagatggaattgtggaagagcttcagccaactgtgttcacctgccttcccccatgtacgcaacctactccatcctgcacaggtgaggctagtgcggggctggcaaagcttgtggtcgggaggagggaagggtctggccttaggtgtcagagaggcagagggcttcacatttacccagtttcttcctacagggccatgagcagccctgtgtggcaaatcaaaccaggggtcagcaactttttctacaaagggcctgacagtaagtacctcaggctttgtgggccacatgaattcccaa

SEQ ID NO: 247562 - DNA, 218 bp, Homo Sapiens
tctaattgattggtaggttttcataagcattgtttctttaaggcatggaaagggaagaatgctcaagcaagtcatgtttgttttcagtgggatgggcccgcgttctcactgctgggggcttccccttcatgtggcacctttgtgccaggccaccaggcagactcttcccaccttctcccactgaagcaccaaggggcttgaaccgtaatttggctaat

SEQ ID NO: 247563 - DNA, 750 bp, Homo Sapiens
  misc_feature (126)..(126): n is a, c, g, or t
  misc_feature (286)..(296): n is a, c, g, or t
  misc_feature (485)..(485): n is a, c, g, or t
  misc_feature (655)..(655): n is a, c, g, or t
tcctagtatctttcacacttgtccaaccgtcttatttttttaaaagttctgttgcttgtattaacacgaaactagagagaaatagtttctgaagccagtttattgtgaagatccccaagggggagngttcggtagagaaaaatagtaagctggtttagaaactgacgagggcaaacagccaggacgcattggagaggaatttgccaaagatctaccctgagataacgcctgtccagtgtcttcaccacgtgaataaccagcgctccaaagtgtttttctgctttgnnnnnnnnnnnttccacaagcttttaaaggtgcatttaagaatccatgtgactttagaatggaactgccggccctggcaactgtcacgtgtgctagaaggttcgatgcctctggaatgcatgtgatactcatctccattttgtttccttgattgcatttttgttcttttagcagatctgtccctgtgggtggtgtctaanaagtcggacaccttggtttttgtgttagattgagctgggcagctgcaatcagcttctttatatgcaaattaggcacgacccatctgtggttccctggttggtggctaatgaagtgaggggagggagggatgtcaccccaaaagtaggccctcccattggctttggccggnccagacacttcacatcgtttacatggttctgtgtaattttaaagtttatgtgtataaagcgaaggctgtttctgtgaaactgtatattttgtaaa

SEQ ID NO: 247564 - DNA, 211 bp, Homo Sapiens
caaacaaaaaaccatgtttctttttcttgtataactttttgttttcagcaacataaattgatttttagctggcagacaagaatatccatataagatttgttaaccatttcagagagtttggcaatttttaaaagataataaggtatcatttttaagtatgaaaattaacaatatccctgttgcgcacactaattttgcatgagtaggttta

SEQ ID NO: 247565 - DNA, 937 bp, Homo Sapiens
  misc_feature (17)..(17): n is a, c, g, or t
  misc_feature (692)..(759): n is a, c, g, or t
  misc_feature (855)..(855): n is a, c, g, or t
  misc_feature (877)..(877): n is a, c, g, or t
  misc_feature (906)..(906): n is a, c, g, or t
  misc_feature (918)..(918): n is a, c, g, or t
gcaacatccaacgcccnatgtctttgaatatgaatgtatttgtaaaataccacgtttcatgtgtgaatatgtgcttttactgtacatagtgctattgtgcaataggtcttatgctgttttcactcaatgtgtgctaagatctagccccattgactcttctagaaatgcagtattgctttgacctgccatgtggcactccacaatgtcaattgcagtttacacacattgcctaaattgggggacacctgggtgcccctgaccccttggcaccggatacaggccacgataaacatcctttcgtgtgttcccttctgtgcttgtgtggcatgtgtacccaggatgggcctataggtcacagaggtcaagtttctctttggttttccagattttctttagaacggtgactgaccctcctacttgagggccgcccttttctccttatccttgccagcacttgtattggcagactacctaatttttgccagtctcatgggtagatagtggtgcagtgctttaacatacattcatctgatcagcattaatttggggaattttttcacttagcctttctggtttcccttcctgtgcattgcccattttctcatggagtttcttatcttttttggtttattctcaggagttgcttgtacattcttgggcaattgcagataattccaagaatgcatatttannnnnnnnnnnnnnnnnnnnnnnnnnnnnnnnnnnnnnnnnnnnnnnnnnnnnnnnnnnnnnnnnnnnatgagccaccgtgcctgggctgatgctggagcttttatgtgacatgggtgactcttaaaactgggggagggacgtaggagatgaggagttttcacncaccagccccatagggtggggntgtcaagacccctccggaagttttcgttnggcttaaggagnaggggcactttattttttt

SEQ ID NO: 247566 - DNA, 278 bp, Homo Sapiens
ccaatcaacatccaacctactgcctatgctagtttctaaagcataaatataaaaaaagccttttaactatttcctttggcactcagtccaaaccctttaaaatgactttcaaggcccgttttaatctgagggagctttcttatcttatcaggcacaaactattaccattgatcccatcccattcaaatcttcaaatccacagaaattatttacagtttagccaaacttgaccaattgtttcttctccaacccttaattaagggttggatgttgattgg

SEQ ID NO: 247567 - DNA, 1211 bp, Homo Sapiens
  misc_feature (759)..(759): n is a, c, g, or t
ttggcttcaattaaatcaaattggacttagaatttttttcttcttatattacccaaaggaaggccccattcacctaattttaaattatacaaattatacaaataaatatacaattgtaaattacagtggatatttaatcctttaaaggcattaatttagcagagaagaataaaattatcccttttcttacctctaaaatctctaggttgatcaaacactgaccattattagtaccatttcaagtttcttccctttactttcatcaaactgggttatttatgtatgttcaagtgaaatggctgtgctttcatggtaattcttgttgctattgacaaccaaagcagccatgcaagaagaaaatgctgtggaagggaagaaaaaaattatatttcctccccaaagttggagagagaagggaacatacagtatgtaagaaacaggtaagtaaaaatatatcaattttaaaactattagcctttcttactaattgatcaaaagtttaaattttttcagatgtgttttccaactccaatttaaataaaaggatactgtctctaggaatcagaaattaatattctggaaatgaaaaattggatttgaaaatacagcatcacaaaaggtctgaaatatttaaatttagaatttggactatagaagaatagcataacttcaattattggttaatatttttgttatgaaatgtttttttataacaaaatggtgactaaaatattactattttaaacatgtcctagattnttttttgtttcagaaaagcactgaaagttgaatatgtgtaagtctccgggaatgtaacaagttgataaatacccaagtccagcctccttacagagaaaagatctggaatttctttttttggacatttgttttgcagctttctacgtcttaaggcagagaatagccaggataaggtgccagctcaaagctgtgtgccaaccacgatgcaaacatggtgaatgtatcgggccaaacaagtgcaagtgtcatcctggttatgctggaaaaacctgtaatcaagatctaaatgagtgtggcctgaagccccggccctgtaagcacaggtgcatgaacacttacggcagctacaagtgctactgtctcaacggatatatgctcatgccggatggttcctgctcaagtgccctgacctgctccatggcaaactgtcagtatggttggatgttgattgg

SEQ ID NO: 247568 - DNA, 862 bp, Homo Sapiens
  misc_feature (764)..(819): n is a, c, g, or t
aataatatccggcctatccaatttttaatgtcttttaagaaaccagtactcagtatccagtaagggtgaattaccttcgggcaggtaaatgggaaccacctttctgggaccagctgggtattttgtgccaaagcctcaaaaacactcaaaccctttcaccagaaattcaacttttaattaattaatttaaagttttaataatcgccagtacttattgaagtgcttgtatgcaccaggctctgaactaaacgcgctttcatattacccccatttaaattcttaccattattcctgtcttacagaaagaaaaaaggcatggtgagtcacacagttcacaaatgagggctagaaccaaacccaggcactgtgacctgctacacaggataggcagaatagaagatttcttcaagggtgcttattacagcatcttttataatagcaaataaagtacccaaaaaaatcaacaaagggggggattcattcagttatgatttgtccacataagtcagtctttaaaaatttggttaaagaaaacttgtttccgatccagccaggggttgagacaggcagaactttccagagcttctccttggaagctcccagctgctgtgatttcctatttcttgatccaggtggtaatccagaggtgtgctcacgttgggatcattcatcaagtggtacacctaggatttgtggacttttgtgtgtgtgtatgctatactcatgtttttaaaagttatttttggccgggcacggtggctcannnnnnnnnnnnnnnnnnnnnnnnnnnnnnnnnnnnnnnnnnnnnnnnnnnnnnnnatcaagaccatcctggctaacatggtgaaatcctttttcccct

SEQ ID NO: 247569 - DNA, 865 bp, Homo Sapiens
  misc_feature (107)..(116): n is a, c, g, or t
  misc_feature (146)..(227): n is a, c, g, or t
  misc_feature (742)..(742): n is a, c, g, or t
  misc_feature (798)..(798): n is a, c, g, or t
  misc_feature (823)..(823): n is a, c, g, or t
  misc_feature (828)..(828): n is a, c, g, or t
  misc_feature (844)..(844): n is a, c, g, or t
ttgggttttgtttgtttttttaagctctctgccctttttctcttctgggactcggtaatacctatattggtctgcttggtatagtcagatatcttaagctagttacnnnnnnnnnnctcttcagacttttaaaatttaatttaatnnnnnnnnnnnnnnnnnnnnnnnnnnnnnnnnnnnnnnnnnnnnnnnnnnnnnnnnnnnnnnnnnnnnnnnnnnnnnnnnnnagattacaggcatgagccaccatgtccggcctgctcttcagacttgataacttcaaatgatctgtcttgaagtttcctgattctttcctctgcctgagtctgctgttaaatccctctagtgattccgaccccttctccccccattcagttactacatttttcagctccacagtgtgtttggtttttagaaataattttctctttgtttatattctcacttgtttatatattgtttatctaattttgcttagttgtccacactctcctttagctcattgagcattttttagatagttgttcttaaggttttatagagtaagtcagcagcctctgtttctttagggttggtttgtggagatttctttctttcaatcgtcccgtgtttccctatttctttatgtgccttgtgatcttttgtgaaattcaggcatttgcaaaacccagctacctgtccctttgcagactggctccatgcatggaaagggcttcactggttagcgcaccataaaggcttnggtgtcctctcaaactttttcttggggatgccatcttccctgggcccggggcatangcataagtttaagttcctcctaacncaggngccttttaagtttttntaaatttcctgggttgccccc

SEQ ID NO: 247570 - DNA, 479 bp, Homo Sapiens
aatatatccggcctatccaattggattttctaagtattaacacccaagacaaatgcagtggaacatattctgaaactctgttattgtagaaagcaacacttttaccacatatcaagagcctcaaaatattcaaacactttgacccagtcaccggctctagaaatctaccctaaggaaacagtgacagatacatttaaagatgtttgtttatggcattactcagaatagcaaaaaaccagtgtctaaatatttgacaataacagattaaataattatggtacaactagagcatggaacattcaatatcatggtttcaaaagacacgaggaaatgctcatggtataatgttaggttaaaaaaacaggataaaaagctatagttacagcattccaaatttattagcttaaataactatgtaactgaaaggaaacacatcagaaagttaacaatgatcatctatgaggataggccggatatat

SEQ ID NO: 247571 - DNA, 451 bp, Homo Sapiens
cccagagaaatgaatcctgtctttttctttctcacttttctaatcgagaattccaccacttcttaacaacctccaatactacaatcctgatctaatcatctcacctgaactacttcaattacctcctaattgattttctcttttactcttacactttattatctacactgtagccagaataattcattaaaaacctaattcagatgacatcactcctcagcacccatctcagcataaaacccaaagtccttacatgatctagcaccttaatatctctctccctttctctcctacaattctcctgcttttccactctgctccaggtatactgcctttattgctacttcttgaacatgccaagcactttcacagccttgatgtctttgtacttgcctttcctccacctggaaaactccacatttatctccggaaggcggatatatggggatcg

SEQ ID NO: 247572 - DNA, 429 bp, Homo Sapiens
tgctttgctgaataccgtcctgtcagttctggtcctgtctctgcctctgccatggccttcattgaggagggttaggggatttggtggcagcaggagcacactgctgatcccagaagcatagggttaagaactaactgccttgaatacgatcttagtgattttcagtggagccaaggagtttgaaatgcataggcaatgtaacttcatcaaacttcaaagagccaagcttgataatctttcagggttgtgagaaaaggatgagaaaggattgtagaggacatgggttagagagagcgagctggtttagcagaattgttgtgaggattaaagataaatattggtgggcatgtttgtatctatctctagaagaaactagagtccattctctgtttaccatattgtcaggcctaactaacatttttcactttt

SEQ ID NO: 247573 - DNA, 972 bp, Homo Sapiens
  misc_feature (893)..(893): n is a, c, g, or t
ttgggttggtgtttgcgaattctctgcggcaccttcttcgctgaactccaccgtcagttccataggcgcgcgcccgcgtcacgtgggccgaggttccggcgcggctgctggccggcggctgagccgggagaaaggagctgcggccaccgttcgccctacttctgcgcctcggggcgggcgcgccggtaaaaatggcgaaatgggggtaggcggcgctggacctgaagagatggggcgcgcaggtggggcggttgtcagagccccctgacgtgggcgccgggcttttatcggcgatttgatctggcgacctcgggccggcgcctaagaggtcagactgcggagcctgcgggtcgccagcggccccgccgagagccggaggcaatggatgaacagagcgtggagagcattgctgaggttttccgatgtttcatttgtatggagaaattgcgggatgcacgcctgtgtcctcattgctccaaactgtgttgtttcagctgtattaggcgctggctgacagagcagagagctcaatgtcctcattgccgtgctccactccagctacgagaactagtaaattgtcgttgggcagaagaagtaacacaacagcttgatactcttcaactctgcagtctcaccaaacatgaagaaaatgaaaaggacaaatgtgaaaatcaccatgaaaaacttagtgtattttgctggacttgtaagaagtgtatctgccatcagtgtgcactttggggaggaatgcatggcggacatacctttaaacctttggcagaaatttatgagcaacacgtcactaaagtgaatgaagaggtagccaaacttcgtcggcgtctcatggaactgatcagcttagttcaagaagtggaaaggaatgtagaagctgntacgaaatgcaaaagatgagcgtgttcgggaaattaggaatgcagtggagatgatgattgcacggtattcagcaaagca

SEQ ID NO: 247574 - DNA, 440 bp, Homo Sapiens
  misc_feature (29)..(29): n is a, c, g, or t
  misc_feature (420)..(420): n is a, c, g, or t
gaacccctttgccagcaccccgactcttnaggatcccctgctttgctgaataccgcattaccttcagaagctctctgttgaattccaaattgtgaccccaacactaaacctagggacagctacaaaggaaagacaactggggaaagaagacctaggactgggggaccccaaacagcctgtcctgcaagtgacatcactcacccacacgaaggagggggactgcaccttagaagcctgctctgcatccatttacccccctccaagggctttgtttcactgtttatgttcacgtgatctcaacagggaaattgtcattttcattaattttttaaaaaattcgtctttcaaatgtagaactaattttttgcccctgaggagtgggcagaagaaggaggtagtgtaatacgcagaggccttttnttcccggtttcagcaaagca

SEQ ID NO: 247575 - DNA, 408 bp, Homo Sapiens
cccgaatccagcaaaccattccaaaccaaaccaaaccaaaccagggaagacatgcaggcatttcctcataaaagaggagaaggtggaaaagagataccccaggatggcagctagttaccatatttttaaaaatccagtacaaaattatagctagataaggaggagtaagttctggtgttttataccactgtaagatgactgtagttaacaataatatattacatactttcaaataactaaaaggagggtaatgaatgttcccaacacaaagaaatgatgcttgagatgatggatgggctaattaccctgatctgatcattatgcattatatgtatcaaaacatcactgtgtactctataaatatgtacacagtaatgttttgctggattcggggatcctctagagtcg

SEQ ID NO: 247576 - DNA, 644 bp, Homo Sapiens
tgagcaatgctttttctattatgccaactttgtacaaaaaagttggcgccgtcctcctggtggtggtcgttttggttctgtgtggtgtttcaccaacttcggcctatggctctgtctgacgtcaccgaagtgacggaacggaaaagcgcgagaagcggctcggttcccaccacggagaggcgggagtgagtcaactgacaagggctggggacggtggtgtccttgtcttgcctttgtctctcccgcccctctcttccctggctgggcttgcggagtccttgctgatgaacctgactgagggtcccctggcgatggcagaaatggaccctgcacagggtcgtgtggtttttgaggacgtggccatatatttctcccaggaggagtgggggcatcttgatgaggctcagagattgctgtaccgtgatgtgatgctggagaatttggcccttttgtcctcactaggttgttggcatggagctgaggatgaggaggcaccttcacagcaaggtttttctgtaggagtgtcagaggttacaacttcaaagccctgtctgtccagccagaaggtccaccctagtgagacatgtggcccacccttgaattccattgtgctcaaccaggcacagaatgtctttcaagggtgg

SEQ ID NO: 247577 - DNA, 756 bp, Homo Sapiens
tgtattggtggtgctctcttaaggcctgaaggtggccaggtaagtcacaaggcccctcatgtccaaggccacagtgcacaggggcagtgaaggccccaagaaggccaagagcttaagaggaggcagggccgcagtgtcccctgggcggcgctgagcaggaatggagcgggaggcatcaccatggggcctcaagccccaggatatgcagcaaaaatgatatacttaatttatcttccagtttcccttccctcagaactaaaagacttttagttctaggtaccacccctagaatttccagtacaccagcaccagcctgaaaaccacgtcctcatcaaaagacagaaagaaaaaacttgagccagcctgggaagaaccctattttatgctgttaaccactgagactgccatccgcagagccaagaaaaaaacgaccacactccagtcaagaaaacatctttctctcagaatcatggatgactgtactaggaccatcctactaagttaaagttaaagaaagcttaattttcctgtaccttcatattgcttcctttccttattgttactagcgcctttgttattactgtaactaactcacctcagaccaccgccttgaatgcttgttctgtcataccttgcggaaatgtaaaagatcaacacagctagccttttcacacaatgcttacgtcccagccctctgatggacatggttacccctagctctcattatcgtaatgacctgcagccaagatgccaatg

SEQ ID NO: 247578 - DNA, 1162 bp, Homo Sapiens
  misc_feature (18)..(18): n is a, c, g, or t
  misc_feature (691)..(691): n is a, c, g, or t
  misc_feature (717)..(740): n is a, c, g, or t
  misc_feature (968)..(968): n is a, c, g, or t
tgtattggtggtgctctngtggtcctgccagcacccagcaacttggcaaagcaaccagggtaggggagaaccacgagagaagcattaagtgactttcaaagactttcagagtacagccacttggttcctttttgtttgttttccttctcctctcctgcattttcctccatctccaggtacagttcggggtgtggatgcctcttcctccacaagggcacagtgttgtggagggctaagttggttctgtgactcattcctcataccctaactccatctcctttctttaaagtcaaatctcacctacctgtttgggtcagagagatgtgttttaaaagcccccaaggaaggaggctgggactgtgccctgacatgattcttggtgatggaataggtttgtgctctgattctagtttaagagaacgttgctgtatctcagtccaggagaggcagcccatcttggccctggatgaagaaggaaacccacagaggcccagggcttgtcattgggctgccagtgtctgcccagccagcattgagctaatcctgtgggaggatgagagctactgggccgttgtatgataggttggtaggggcttgttgatctgtcaaattccaggtgacaagatctatgcaccccatgcgtcctttgaggggcttcttccccgcaggctctggctggccgcaggctggnttctggtgtgaaaggttatactgccnnnnnnnnnnnnnnnnnnnnnnnnctctaaaaacaaacagcaaaagacagctgaaaacaagaacttcaccggtgggcaggcaagaattctcttctggaaaatgacgtttgtggctctttcccaagttggccttcaaagagcctgcctgccgttgagccagaagatgtctcgtgtgaaggctggggtggcggctgtcttggaacctctgtgagcaggaggccctaagccgcagcagtgggatagaggtgcagnctctctgcctctctgccctttggtctatgtttacaggtgacccgtgtcagcctgcatcgcaagcacaccccctgcgggccctcaagtctcactgtttccgtatgaacgaaaccgacagcggacctgtaggaagcgcatggtcccccctaaaaaaaggggccccctcgcttaccccgggccttcctcacaccacc

SEQ ID NO: 247579 - DNA, 832 bp, Homo Sapiens
ttcctgttttatggctggcctggtttgttcctggagtccgcacggtggctgatagtgaagcggcagattgaggaggctcagtctgtgctgaggatcctggctgagcgaaaccggccccatgggcagatgctgggggaggaggcccaggaggccctgcaggacctggagaatacctgccctctccctgcaacatcctccttttcctttgcttccctcctcaactaccgcaacatctggaaaaatctgcttatcctgggcttcaccaacttcattgcccatgccattcgccactgctaccagcctgtgggaggaggagggagcccatcggacttctacctgtgctctctgctggccagcggcaccgcagccctggcctgtgtcttcctgggggtcaccgtggaccgatttggccgccggggcatccttcttctctccatgacccttaccggcattgcttccctggtcctgctgggcctgtgggattatctgaacgaggctgccatcaccactttctctgtccttgggctcttctcctcccaagctgccgccatcctcagcaccctccttgctgctgaggtcatccccaccactgtccggggccgtggcctgggcctgatcatggctctaggggcgcttggaggactgagcgggcccggcccagcgccttcacatgggccatggaagccttcctgcagcacgtgggtgctgggcggcctgcgcccctccctcttgcattctccagcatttattgcttgctgcccgggaaacccaagacgccaaactccctggccccaagggtgccttccggggaacaggggggaaccttggtgtc

SEQ ID NO: 247580 - DNA, 169 bp, Homo Sapiens
acttacccgatccccgtcagcgccctggcgccctgacatgcactcaggaggcttcctgggcctcagcattcctcatttgcgcgcctctggtcaagctagtacctctgaatgccctttcccatccccttctcagagttcacctcacacattccgaagccagctcagggcg

SEQ ID NO: 247581 - DNA, 1141 bp, Homo Sapiens
  misc_feature (65)..(92): n is a, c, g, or t
tgaggccctgattggggatgagagcagcgctcctgactcccagagatctcagactgaacctgccnnnnnnnnnnnnnnnnnnnnnnnnnnnntaatgaaggcaccagcagcagaagcagtggcagaaggagcatcaggaagacatggacaagggagatcccttgaggctgaggataagatgactcaccggatactgagggcagcccaggagggggacctgccagaacttaggagactgctggaaccgcatgaggcaggaggagctggggggaatatcaacgcccgggatgccttctggtggaccccactgatgtgtgctgctcgagcgggccagggggcagctgtgagctatctcctgggccgtggggctgcctgggtgggggtctgtgagctgagtggcagggatgcggctcagctcgctgaagaagctggcttccctgaggtagcccgcatggtcagggagagccatggagagacaaggagcccggaaaaccggtctcctactccctccctccagtactgcgagaactgtgacacccacttccaagattccaaccaccgcacatccactgctcacctgctgtcactgtcgcagggtcctcagcctcccaaccttccacttggggtgcccatctccagcccgggcttcaaactgctgctgagggggggctgggagccaggaatggggctgggaccccggggtgagggccgtgccaatcccatccccactgtcctcaagagggaccaggaaggactaggctacagatcagcaccccagccccgagtgacacatttcccagcttgggatacccgagctgtggctgggagggagagaccccctcgggtggccacactgagctggagggaggagagaaggagggaggagaaagacagggcttgggagcgggatctaaggacttacatgaacctcgagttctgactttggtaaagtctgaccctagtctgctgctgaagtctgaacttgggcctctgacctggggcctttgacttccccttccttgggatctgctcagatgcagatcctgaagtttttggtcaataaggctctgtcttcgtgagagacgggctgagagtcagaaataaatcaaccatttgtggtttattcacttttctggaagct

SEQ ID NO: 247582 - DNA, 424 bp, Homo Sapiens
gggaaggatttcctgggctcctctgaggagtcagagaagaacctgaggaacctggcagaagacgaggcccacgcctgtgccatcctgatcaaatgaggaaggccagaactatcccgacctccacctgccctgctcggagctggagtgctggatccctggcacctgcctggccccttaacatagaaccacgcctgctaacctgtaagctccactgggacctgctgtcctgtcccgcctgacccagggccctggagcatcaccagccccagggtgtgggcctgggacctgggccagaactgagccctcctgcaggcatttggctgccctgggggcccactgcctagggaagaggacaggtggggcccagcacctgtgccacctccccccctccacacaccatccttccccctcactttgcagagta

SEQ ID NO: 247583 - DNA, 1040 bp, Homo Sapiens
  misc_feature (950)..(950): n is a, c, g, or t
  misc_feature (978)..(978): n is a, c, g, or t
  misc_feature (1001)..(1001): n is a, c, g, or t
  misc_feature (1026)..(1026): n is a, c, g, or t
ggacccagatagctccaggacaaggcagaaagtgctcagtaccgtgagagggagcagagaaaggccactgaggcccagagggggaaagagggcagcgagagctatgtggaggtggcagtgtctcggctaaaccttgaggaacgaggacacggagatgggggagaagggcatgccgggaggaggaaagagcatgagccaaggcacagagtggggaggcttgggagggtcagtaaagaccagcgctcatccatgagaacacagatgcgaacgagaggcccaggtaccctcatctgaacaggctgatgctcaggaggggcggctggtgtgggcacgctcacatggggtttgaatccttctgcatttgggagctctctggggatggagtagagccttgtgcatccctgcccacccagcctagcatctgcctgcacgctgcagccccacctgtttcagcatgtccctcttgtcttccctggggcagcctttccatggggtctcctgttgctcccaggtccttccttcctcccaggtccatgtccaagtcctcaagtcaaccaaactcaactcctccagcctccagagacagctgggagggtgtggtggggtccctggagggattgagagggagacagctctagcaaaggggaaaattctggagcagttgtctctctccacctcactagaatcacttcccgccatcagaagtaaatctgctctttcctgagaagagtctgggtttggtgtgtgtaaaacacagttccttagaactcagagaaaatcctgaccaaaagcttcagcatttgagcttcccccgctcttcacaatctttatagacttcgagtgactggaaacccaccagcttctatcccttctccctgaaaaacattgcccactttcttcttgctatgggctgtggagctgaagtgttctggaggtaccgtgttttggangcccgggacccatttgttcgaggggganggggaggggcggagtcttttcangcagtattttccaccttagctcctntgacacccattcaa

SEQ ID NO: 247584 - DNA, 670 bp, Homo Sapiens
cttaaaaaagccaactttgtacaaaaaagttggggaagtacctccagcttgagtccctgggacaaggccaccctcagcatggggcgtctggttctctccaacaagatggcgcgcaccatcggcttcttctacacactgttcctgcactgcctggtcttcctggtgctctacaagctggcatggagcgagagcatggagagggactgtgccaccttctgcgccaagaagttcgctgaccacctgcacaagttccacgagaatgacaacggggctgcggctggtgacttgtggcattgataccccggggcctcccccgtgacagtgacggctgcgcctccatttcgacagctcagtgcatctaatcacttagactcccctgaagaatcccccatggaaactgcccttatctgctgtccagcagctgccagaggccccaggtcacctcgggtcccctttaaggaatgtctcggtcacatcaggcccgctaggtccagagagcgagcccccaatgcccggccatgctaagccgcagagaccctctcagcccccacctcaggttagggctctgcccgcagcctgacctctagccctggtggcagaggtccctcagctgcgaggctaattgggtgaccaccgattccagctgcggttaatccagcttgggcctgtc

SEQ ID NO: 247585 - DNA, 1094 bp, Homo Sapiens
ttggtataaacttccctagggatgcatttttgaggatagatatgtatgccatgggattagtcctatgggaactggcttctcgctgtactgctgcagatggacctgtatatgaatacatgttgccatttgaggaggaaattggccagcatccatctcttgaagacatgcaggaagttgttgtgcataaaaaaaagaggcctgttttaagagattattggcagaaacatgctggaatggcaatgctctgtgaaaccattgaagaatgttgggatcacgacgcagaagccaggttatcagctggatgtgtaggtgaaagaattacccagatgcagagactaacaaatattattaccacagaggacattgtaacagtggtcacaatggtgacaaatgttgactttcctcccaaagaatctagtctatgatggttgcgccatctgtgcacactaagaaatgggactctgaactggagctgctaagctaaagaaactgcttacagtttattttctgtgtaaaatgagtaggatgtctcttggaaatgttaagaaagaagacccgttgttgaaaaatgttgctctgggagacttactgcattgccgacagcacagatgtgaaggacatgagactaagagaaaccttgcaaactctataaagaaacttttgaaaaagtgtacatgaagaatgtagccctctccaaatcaaggatcttttggacctggctaatggagtgtttgaaaactgacatcagatttcttaatgtctgtcagaagacactaattccttaaatgatctactgctattttttttaaatcaaaaacttttcatttcagattttaaaaagggtaacttgtttttattgcatttgctgttgtttctataaatgactattgtaatgccaatatgacacagcttgtgaatgtttagtgtgctgctgttctgtgtacataaagtcatcaaagtggggtacagtaaagaggcttccaagcattactttaacctcccttaacaaggtatacctcagttccacggttgctaaattataaaattgaaaacactaacaaaatttgaataataaatcgatccatgttttgtaa

SEQ ID NO: 247586 - DNA, 640 bp, Homo Sapiens
attcccattgggtagacttgggaaatggcataccatattaaagatcctgtctaaagatttttataaaagtttgatttaagcattaaataaaaaagcataccaaatactgtgaagtacactggaaggagagtgagtttaatattcagacagaagaactttttagccgtaatactgaaattcatcgttgttctaatgatttgtcatctctgctctgaacttttcgcccaagataacaatcataaatattaatttgacaactaaaacaagaaatctgatggtaatgtggtgtgatttcattattcatagtctacagcacgttgcagcagaaacaagctccaatgacacagatccttcctcacaatcaagatatcaactcgaacaaggcttacctataactaggtgaccatataatttaacatccaaatgaagaggtttgaaagtgaaaggggacatgcagaaagaaaccaggtgggatgcagaaaaatgggagcaatttggcagtctccagaaaaccagagcacatggtcccaataactacagctaaaaggtgaatgtcagtatttggaagtttccttatagcagtaaactctgaacacttcacatataaactatgccttgctttagtttagtggcggtgagt

SEQ ID NO: 247587 - DNA, 579 bp, Homo Sapiens
  misc_feature (22)..(22): n is a, c, g, or t
  misc_feature (26)..(26): n is a, c, g, or t
  misc_feature (45)..(45): n is a, c, g, or t
  misc_feature (47)..(47): n is a, c, g, or t
  misc_feature (57)..(58): n is a, c, g, or t
  misc_feature (62)..(62): n is a, c, g, or t
  misc_feature (74)..(75): n is a, c, g, or t
  misc_feature (81)..(81): n is a, c, g, or t
  misc_feature (90)..(90): n is a, c, g, or t
  misc_feature (93)..(93): n is a, c, g, or t
  misc_feature (107)..(107): n is a, c, g, or t
  misc_feature (127)..(127): n is a, c, g, or t
  misc_feature (133)..(133): n is a, c, g, or t
  misc_feature (137)..(137): n is a, c, g, or t
tggctccaaagggaataagtcnattnttaaatggcctggaagccncnacccaagttnnttgntttccttggccnnccaagnggcattggnccntgtttgtggggttntggaaccccccgaacaaaanattaangccntcccagggccgaagtcgtggaagatatggagggtgtttcacaggccaaccaagcgggcggcatgaatgcagacccgttggaaggtgatgctgctcaacatgggctaccgggatcacgggcctgagcagtgggggtgccggggcctctgatgatgaggacagctctgagggccaggtgcagtgccggcccagctagaccctccagccctggtccccagcccctgctactggctggaccctctgccctgggcaggaggtcaggggattctgttttggtttgtcttccccaccacccttttttttcatttcccctgttttgtttgttagtttggcgttaggggtggaggttgctacaacttgctggctttcggactctgggctgattgtcccctgactatccccagccctgaaaaaaagagcaggaggggacacccctccatatg

SEQ ID NO: 247588 - DNA, 838 bp, Homo Sapiens
  misc_feature (400)..(400): n is a, c, g, or t
ccacgtgataccgaaaggaggagggaacagcgtggagcaattcatctggaattacctcggtgtgcagaggctgtcccttggctccacttgggataaacattgtgaaacatcgtgggcctctttcttctcaagctcctcctgacagcctcctggcaacactagaggcctcaagactatggagatcagaattgcaatggctttgtcatctcagcattgaccactcctgagacccaaggttcctcctgggagcaggagacaaggagtttgtgatgttggatggaaaataggatatatgaatgcagaagggctgtgctggacccctcttttcgcttctctccctgctgtcagcagtgtttttggcatggaggcgaatctgttgtgggtgaaaacagaagccccntggggtaggaccagaccccaggcctgaaaaggatgcaaagcctgcttgtttcaggcttgtcaggaagaatcgtgggtaccgagtgattatgatgaaatgccacccagagaggaaatgaatgggccctcactaaagaagtgggtctgacatgtctctggcagcccaccggcaagagcacgacattgccctgcagccccaccatttccacttacttgatgtgggagggcttgtctgttcattcttaccctggggacccaagcctgctctgaggagtgagtcacagccctgacgtgcgccttgcattactgtttcctgagatgtgcccggagactcaagcttgctcatttctgtcctgacacagctcactgttccttaggtggtcatagtcctcccgtgctgtgtcagctcctacatagcattagtctttcggtatcacgt

SEQ ID NO: 247589 - DNA, 338 bp, Homo Sapiens
cagtctagtgattttaggcgaaaatgagaggatttccttcctcgcaggagacagagggggagtatttattaggggtgaaggtcggcacctctgctcctattttccaatagtgcaacgtacaaacatgttatactcacagagcaaaatacaaggcaatggtaaccgtggctgattctaggtggtgggtatatagatgtgccttgtactcttctgtcagatttcttagaataaggcgctttggattctttactacaaatacatgtattaagaataaattcggtgtcccaccgcctaaaatcactagactggggtaccgagcggttttgcaacgggtcaaa

SEQ ID NO: 247590 - DNA, 935 bp, Homo Sapiens
  misc_feature (135)..(150): n is a, c, g, or t
ccccccacggccccaaaaatcccccaccccgggatgcccagaggagtgccctgggggcaagtggcacacccccctcaccggggtggctcccacctggagtgacggggggagcttgacaagggagcactggctgcnnnnnnnnnnnnnnnntgtggagctgggatgttctcgctgctgggggcggggcttaagctctggcaaccgccttggggtgtggccggcactgcgctggggcggggtcgcccatctctcccctccctgtgcctcccaggtcgcccaagtccagcgtcaggatgcccaggccctgccatgtccctagcccggcctgggtggcagggcccagctcctgggcggcaggacccagctcctgggcttcctcctgctgggtccgcccttggggaagtgtgccccataccctccaggccagaggcttcccctgatccctttgggccctacccccctggtgctcttgtgccccagccggggtccccaggtaagtaggggctgaatgcggctgaagaggccgctggacaggcgtggccaggaaggaaatgggactggattccagagcaccacatctggccgccagaactggccgtctccatccaaggcactgggaccatgggtgccggagccacgtgtggccgagggctggcagagcctgccccccagggatcactgagtcctggaggtggtcgtttttgaggagggggctgtggggctcgtcccacctgccgccttctgtccagcacttgcatgacacttccctctattttcactcttggcggctgcccacactttgcatttctcttcctttcttctcgctgtcctccatcctccattccgtccaactcctagcccagtcccgggggcgcctacttcaggtctgagagtctgaactccgagatgctctgggtgtgtggatttcattccaa

SEQ ID NO: 247591 - DNA, 405 bp, Homo Sapiens
cataaaggcaactttgtacaaaaaagttggctcagggctcactggagcccgggtggcctgggcccagcggaacctgtacgggatgctacaggagttcatgctagagaatgagaggctcaggaaagaaaagagccagctgcagaatagccgagacctggcccagaatgagcagcgcatcctggcccagcaggtccatgcactagagaggcgtctcctctctgcctgctaccatcaccagcagggtcctggcctgaccccaccgtgtccctgcttgatggccccagctcccccttgccatgcactgccacccctctactcctgcccctgctgccacatctgcccactgtgtcgagtgcccctggcccactgggcctgcctgccaggggagccagaggctgtgcccat

SEQ ID NO: 247592 - DNA, 528 bp, Homo Sapiens
atgtttcaatataaaaatagagaattactcttacaactgaagactgaacaataacacaaacaacctctttgtgggttttaggttcggtaaaattagttgggatcttaatggctgtctaaagcaggaagagacagaattttagtctttctgaagacttctgggaactcctttgaaagtgatttgttacattatcagagttttatgagctatcatttggtaaggacacaaggaagggattcccaaggcagttgttagtctttggcctgggacaacagatatggccatggcctttgccacttcacccacgtggctaaaggtcaccactaagatgtagtattctcagctctacctactcccaccccaccccatcccccaagaaaaacaacacatacaaaaatctggacacctagttctcccctaagtgggctccttggctgatatcttggatcgtagcacattgctgtgaaccatggcaagtcctttgttttactgataagagggggctaggtaagaaaaagactcaaccaa

SEQ ID NO: 247593 - DNA, 894 bp, Homo Sapiens
ttggcgagctcatccagaagcgaggcccggccacgcccctcatcaccgtgtccaatcaccagtcctgcatggacgaccctcatctctgggggatcctgaaactccgccacatctggaacctgaagttgatgcgttggtgaggaggaatgggcccctcgaagtgggccgggccggccccacctgcctctgcccagatttgccctcctcctgctctgcccaggaggtggcgtccagcagtccaggacccctgcagctgcagacatctgcttcaccaaggagctacactcccacttcttcagcttgggcaagtgtgtgcctgtgtgccgaggagatggcgtctaccagaaggggatggacttcattttggagaagctcaaccatggggactgggtgcatatcttcccagaagggaaagtgaacatgagttccgaattcctgcgtttcaagtggggaatcgggcgcctgattgctgagtgtcatctcaaccccatcatcctgcccctgtggcatgtcggaatgaatgacgtccttcctaacagtccgccctacttcccccgctttggacagaaaatcactgtgctgatcgggaagcccttcagtgccctgcctgtactcgagcggctccgggcggagaacaagtcggctgtggagatgcggaaagccctgacggacttcattcaagaggaattccagcatctgaagactcaggcagagcagctccacaaccacctccagcctgggagataggccttgcttgctgccttctggattcttggcccgcacagagctggggctgagggatggactgatgcttttagctcaaacgtggcttttagacagatttgttcatagaccctctcaagtgccctctccgagctggtaggcattccagct

SEQ ID NO: 247594 - DNA, 395 bp, Homo Sapiens
tacggcactgttagagcctgtgtcttcaatgccagccccgtggatgcctacgagccttctcggcagccgtgcgagtgccttccggaggtagccttcatggggccgcgactgctgtccaggagctctgccaaaagcgtgctttcctcccaccgtcacagcagtgctgggacgtaggtgtagcatccgtgtgagaacacgaggcctcgctgtgccagtaagaggccaggctgggatttgaaccagattgtctatcttcagagccccggcctcgaaaatttcacttcttatgggaaattccaaatgtgcacggtaggaagaaaagagcgctccaccttgagcttgtcaccacatcatgtggtggcctcgcccacgccgtagctctaacaagtgccgta

SEQ ID NO: 247595 - DNA, 456 bp, Homo Sapiens
cgttttgatgtgagagaggagccatgcctagagtgggatgggccattgttcatcttctggcccctgttgtctgcatgtaacttaataccacaaccaggcataggggaaagattggaggaaagatgagtgagagcatcaacttctctgacaacctaggccagtgtgtggtgatgccaggcatgcccttccctagcatcaggtctccagagctgcagaagacgacggccgacttggatcacactcttgtgagtgtccccagtgttgcagaggtgagaggagagtagacagtgagtgggagtggcgtcgcccctagggctctactggaccagcgtctcctgtctcctggagaggcttcgatgcccctccacaccctcttgatcttccctgtgatgtcatctggagccctgctgcttgcggtggcctataaagcctcctggtctggctccaagcctggca

SEQ ID NO: 247596 - DNA, 613 bp, Homo Sapiens
  misc_feature (502)..(502): n is a, c, g, or t
  misc_feature (522)..(522): n is a, c, g, or t
  misc_feature (546)..(546): n is a, c, g, or t
  misc_feature (568)..(568): n is a, c, g, or t
  misc_feature (585)..(585): n is a, c, g, or t
  misc_feature (601)..(601): n is a, c, g, or t
tggtctcaatctgctcgacgttacccgaccacttcatcaacaacatcggcatcgttggggttgccctgctcgcatgcctcgtgattttctgtgcgctgcggaagctgccggtgttgcgcgatcacctcaacgagtactcctcgttccaggtcaacaaggtgtggatggccctggtcagtgttgtcgccccgctggtcttgctgagcctgtggatcacggagatcatcactgtcgcgagtaagggatatggcgaaatgcccagaaacttcgttgggatcttcggctggggaatgtccatcctcgtcgtcgttctggcgatagtgctgtcactcatcccgtggccacatcgctcggcgattcatcatgagcttacccacgaggaggagctggcctgcgaaaacttccaagaaaccgaggaaggagccctgtcatgagcacttcagcgatcatcatgatgatcagtgcgatggtcacggtgtggggcggactaacttgcgtcggncatctcgctctttcgacatnctgaacaggactgacgtgaaagangccatgaacccgagtcgattantgggacgacaaatccanttgatggagaaatganatgtttggaaag

SEQ ID NO: 247597 - DNA, 580 bp, Homo Sapiens
  misc_feature (25)..(25): n is a, c, g, or t
  misc_feature (491)..(491): n is a, c, g, or t
  misc_feature (564)..(564): n is a, c, g, or t
tcatcccaaaaaaacccttgagtgnatggtgtgtgaaaacatttcactgaacgatcatcccttacggtgcatcaggtcattcacactggagagaagccttatgagtgcaatgaatgtggaaaggcattcagccagagtgcttaccttattgaacatcaaagaattcatactggtgagaaaccctatgaatgtgatcagtgtggaaaagccttcattaagaattcatcccttacagtgcatcagagaactcatacaggagagaaaccctatcagtgtaatgaatgcggaaaagccttcagccggagtacaaaccttacacgacatcaaagaactcatacgtgaggaatgttttcactggcccttacctcatgattaactcttcagtaataatcatatgagacatacaatgtagaaacctaataaatgtaatgattgtgggaatctttcagttgaagtacaatatgtcatatcagataataccactgcagagncatccatctaaaagtagagaaatcttgattcagaatgtataatttcctttatatcagaaggtttattctgggngaggggatcctaaaga

SEQ ID NO: 247598 - DNA, 352 bp, Homo Sapiens
aaaccaactttgtacaaaaaagttgggatgttttgcctttaaaatttttatggcttagtgtgtaatttaatttttgtctggacatgcttgagatagaagaggtactggatatatgaggatattttccatgctttatttttcctgtggctactagttagcattccataggggttgtgaatttttaattatttgaatattttgtgtacatatacatatttgaagggttttgggggggtcttatttgtttaaaggtgtcttctgtttgcctatttcaagtgtacttcagctttgcaaagattatagggctgtatgttacagaaataggaaatgctggccctgtactggggaccac

SEQ ID NO: 247599 - DNA, 1275 bp, Homo Sapiens
  misc_feature (1066)..(1066): n is a, c, g, or t
  misc_feature (1143)..(1143): n is a, c, g, or t
  misc_feature (1219)..(1219): n is a, c, g, or t
ctttgtacaaaaaagttggttctcttttatctcttgggaaactagaaattacttatatgaaatcttctaatttgaatgtgttggttcatcattaaaaattggtagcattatgtgagttttaaaacaaagaaaacacccacatctgtgggctaggtttgcctcctgacctctgttttatcattatgccagtggctgggaactgggagatccaggcagatgtcctggaagtcacagccttcaagaccaggtctggttgaaaggacaggtcttgagtaggtggagagggtggcagggagtggacctgccctctggccccacgatctcttcattccttcccccatctttgcctggggaattcccccagccttccagcctccatctccgtcactgcctccaggcagccctccctgaccccagctatataagctgcttctctcttccttttcccctctccagcagcctctacgctctcccagctctcggacagcgggcagactctaagcgaggacagtggtgtggatgctggcgaggcagaggccagcgccccaggccgaggaaggcagtcggtgtccataaagagcaggagtagcaaggagctgcctcggaacgagaggcccacagatggggccaacaaaccgcctggacttctggagcccacgtccactctggtccgtgtgaagaaaagtgcggccaccctgggcatcgccatcgagggtggcgccaacacccgccagcccctgcctaggattgtcactattcagagaggcggctcagctcacaactgtgggcagctcaaggtgggccacgtgattctggaagtgaatgggctgacgcttcggggcaaggagcaccgggaggccgcccgcattatcgccgaggccttcaagactaaggaccgtgactacattgactttctggtcactgatttcaatgtgatgctctagaggccaaggcctgagggcctcccaccactgcccagcccctggtcccagtccctttccaccgttggcttcatcaagctccttgcggggttggggctgcatggccagggtggcaggaagacatnccccctccatcccagcccactggaccagaactgggagaggaagagagcaggacaaggcagacagaaggtcaggtcangaactggtgcttgtactgggtacacaagtaggcgcccaggacaagtgggttgcaaggacaaggaagaaaggaaaanggaagggcagagtgctggtttcttcaggtttgggttgggggcacttgttgtcccct

SEQ ID NO: 247600 - DNA, 2453 bp, Homo Sapiens
  misc_feature (185)..(188): n is a, c, g, or t
  misc_feature (1030)..(1039): n is a, c, g, or t
  misc_feature (1697)..(1739): n is a, c, g, or t
  misc_feature (2025)..(2033): n is a, c, g, or t
ccacggtgtccatatataacattttattaagaaaatgaacaaaatacattctttctccatatgtacattacatacaacataattctacaattgccatttttagcagatcactcatttatttattcacaaagtagaattaacacatttaccaaagctgggatctgaaaattatttgtactataagnnnntatcaatcctaaaaagtccatacagattggataaaagataagccagagatcatgaggggaatggggaagattgcagaacacgacagagcccaacaatgatttgaaacaattgatgtcagaagagatctgatacccataaagcacttctgtttaaaagctccaaccagctcatgccagctttccagagtcccatgatttccatttaagaccatgtggatactttaggatacggccctgaccccacattgccacagaagagggggtaagagtagaaccaaacaagttagcagttttctccacacattgagtctcatctgaaatactactgaggtgcaaaatgtgtgaatctcagctaatgtgcacagaaatacaattttttttgagagacatttgcttaaacgtggtaaagaactcttgttttatggactccttgcttcatgttcattttgtctgtttttcttttggcttttgacaatagctcatcctttttgagtgtgagtttaattatggccatattaaaaagtccatcataaacaaagactcctcctcatggtatgaatatgctccatatgcccataatggtgcataacggacttagaaattccaatgagtcttagggttgaaatttccaatgacctgagcaaggcagctccctatagcttctggataacattttacacccagagttcaggcttaaacagacctatcaacacaattattttcggattgtctgtctagaaaacggcaatgctcaaaggaatataaataagggtggggggacatatgcttccagcctggtcctttctccatgtggtaaaaaacaatggaatggctgtgttaannnnnnnnnnaatcttttctggcctttactatgtttggtaatggaaataagtcagggaaaacaaaatgaacaggtctcatcacttaattaatactggtttttcttctttatacttagtaatttcctagttttttaaatgataaacctattttgacaatcactaacatcaatacattttatcgtaagtcccatataagatatttaacattctccaactttcggatcagctggttacagcaccacatttccagtccaggagatgttttcacaaacagaaggagcgattcacagcattaataagcagacttggaaagacagattttattggctatggaggaagttgtatctttcttctcaatctaattttcagtccaattttggttttgagaatctatctctatcagaggggatcttaatttctgacctactgagtacttccaatttataaaagagctgacttttaaaaaattctaacatctttcccaaactgtttagaaatatgccatatttgaaagacggaatactgtttgttcccaagaccaacacaagaaaaggaggtcctcatcttcgctttcctgtactcttcctctgaggctaataactcaactgtacatagcttttggagtgggagcaagataagaatctctttaaaaagagcattttaaaannnnnnnnnnnnnnnnnnnnnnnnnnnnnnnnnnnnnnnnnnngcataaaggaatctgttcacaggaaaatgttacattattttcaactctaaattatgcagaagactatacaaagtagttaattaatactatactatctactttcttttcaaaagacatttcacacaaatccaaaaagtaagccggcttaaagaataagacaatcataacacctcttgcccaggctaattgtaatgcttaggaaaggaagtccacttttatttttctgaacggatgatttgtaagtaaggaagaaaattgtttacaattgatcagtcaccaaaataannnnnnnnnctgggaaaggaaaaaaaatcccaagaaaaagatcagtacatgactctttaataaatttatcttcccccacggaagactactcctaagtaaccttttggactttgatatcttattaaatttgggagtgagttgataattacttggtattatttataacttggtattatttgaggcaacacactacagctgtcacttgcaaacacctgatggcatggctctaatggtgtaggatcctctcctttgttgtaactgaatttataaagatttataaagctctgccagttgcaatgggattgggatttattctacacgcctcctctaatttaatcaatcactttacagatgtggaggaaacctaaataaaaaaccaaaattatgaaatacttctaatgccaaacccagatctcattattgctccaa

SEQ ID NO: 247601 - DNA, 914 bp, Homo Sapiens
gactttattccgtgtgtcctccaggggcactgtggagaaaagggcagtatgctaagtgctgggagaggaaacaaacctttacattcacctgtgcttccgaacacacgcacgcgcctctctctgtacctgactttgaatggaacaaaccagactttaactaacaggaacttgagcttgttcactcaaaatctgtctaggactttgtgttgatcagtcagtgtgttgcccagaacattccttagactagttttctcaaaaaattttgactacaatccacagtaaaactcattttacatttcatctcagtacacatatttatacaataaaaactaaagtttaatgaaatgatcttgccattccatcccattctcttcatctgatttcctgttttagttttgatccactaaggtgactttacagcccacgagtgggttctgacctatagtttagaaacctgcttagacactgttgggtgtgcaagctcacccctggctgtgagcccagcgacgccagggcaaaggtgacatggctgtggggaaatgggagactcctgatgagacagaggggagggcatccggggcgactttgaacatgacttcaacctggctgttcaccttcacagctctggcaagaactcatgaggatgtgtgagcagagtgtttgtcatgacagggacgtgtggaattgggtacattcaatctgatgagacttctgtgcagctgggctggcaggggagggttgaggcagggagctgagcagagaaaggactgctgtcctcacttttcagtggcttgggaaggcccgtggtgcaggagtcagtgccatgagagtggggacctctccactctgatgtcccctgtgcctcgcgctgtcctgcctacagcaggcaggcttaggtgcagaaaggatgccaa

SEQ ID NO: 247602 - DNA, 522 bp, Homo Sapiens
cattttcgtaatgatgtatcaagtggcacttaccatccacccctttaacacccaaaccattctaatccatgtatacagaccatcatctgttttgttattgtgttctataatgcagctttgcgagttatgcagttttggtcctcatgatatttttctgattggtttttaatgtattttgttctaacgagccaacattgttatacatgtaatttgtttatttgctagattgtactctttcccaaagatgggctatgaactagcatctactttcattttacctatttacctgtaaacattgaaaaaactgaatcaaatgcagtgatatcggacctagttttattgttatgccttataatgaatttaacttcacagttttctaaatgagagcatttcccaaagtgctggtattataggcgtgaaccaccgtgcccagcctcccccttgtcttttctaacatttatggggcacttattatgtgccagatatgctttaaattctttacatacatcattacgaaaatgc

SEQ ID NO: 247603 - DNA, 793 bp, Homo Sapiens
cattttcgtaatgatgtatgtctatttgtattactaatacctaaaagactgtaagctttaaaacatatttttctttgttttaagccgcttgatggcattgaaacgaatgggaattgtaagcgactatgagaaaatccgtacctttgccgtagcaatagtaggtgttggtggagtaggtagtgtgactgctgaaatgctgacaagatgtggcattggtaagttgctactctttgattatgacaaggtggaactagccaatatgaatagacttttcttccaccctcatcaagcaggattaagtaaagttcaagcagcagaacatactctgaggaacattaatcctgatgttctttttgaagtacacaactataatataaccacagtggaaaactttcaacatttcatggatagaataagtaatggtgggttaggagaaggaaaacctgttgatctagttcttagctgtgtggacaattttgaagctcgaatgacaataaatacagcttgtaatgaacttggacaaacatggatggaatctggggtcagtgaaaatgcagtttcagggcatatacagcttataattcctggagaatctgcttgttttgcgtgtgctccaccacttgtagttgctgcaaatattgatgaaaagactctgaaacgagaaggtgtttgtgcagccagtcttcctaccactatgggtgtggttgctgggatcttagtacaaaacgtgttaaagtttctgttaaattttggtactgttagtttttaccttggatacatcattacgaaaatg

SEQ ID NO: 247604 - DNA, 126 bp, Homo Sapiens
ctggctttttctctgacccagaagttttgtgtgttgtgtaagagtgtgtgctctgtgtaggcacacatacacagagcatacacagtatcagcacacgcacctactctctgttcggaatgggtgcat

SEQ ID NO: 247605 - DNA, 777 bp, Homo Sapiens
ttggtaaatgagttacatattttgtttggaccacgtcacctgtacattttcaaagcctcggattgtttatcttgcaaggagagaaggggcctcttctccacaaatgcagctcaaattagcaaaactgaactgtagagtttcaggcctttcccttccttaaaatgctgatagatttctagaccagactttgatatttattggcttcttggtcttgctgtttaaacacacccattgccctttctttcttaggccctgtaagcaaagctggagtagcgtcttgggaaaaggccaactgaccaccctaattttgtcgttccaagtctgcatagcgcacatattaagtagttgttaactgacatctttaggctccgtgtgtgaaatgcagcaagcctgcccccagcagcctgtgggctaatcctgagctgttccttcgtttaggtacacaggtgaccctgaggttcccactcggccctctgttttctgagtcctgtctcctctgtagcacagtggggattgttctgaaccgtggcacgccttcttggcgaggcaggctttcttatggaaccatagtctgttacctcatttcttccaactgctctgtcccctaaatgtgtgttcccagatgcattgcatcaagggtgctcgctgtgagcctttgatagtggaggtggctgtatcgggagtgtgctcaccctaatttttccctagccccgagtggcagctcttatcctctctgttgccggatgctgtctacggcctgtacttgctatttccttg

SEQ ID NO: 247606 - DNA, 606 bp, Homo Sapiens
aagggactttgtacaaaaaagttgggtgtagttcaaaaaaatctcctctggtaatactgaaacaactaatttttcttattttgtttgttcctctttattattaaatactatgtgaattaactctttagtagttggcctggttgaagctctgtgaggagcaaagcagccctctccaggtgaactgcttgactttaccacctgaaggagtatttactgcaagaattaacaaagcaggtgttcctgatccaagcagaaccctgttatttgaagagcctgagaaatcttatcccgtttacaaatgtcctgggagtgcatccaaagtgaaacttgggtatcctcaatactaagaaatctctgagaatgactgggtcttggctctttgatcttacctctactcctctgaaaaacatgattatctaaaattgtgttaggtggatgaaccgcatcaaagacttccagaagccactccagtgaccataagataaatgtcagaatcgcataacccccaggatcaggcaagtgttatcctctcttaaaactctttgtttacaaccatgatctccttttgggaatcattaaatttgacttactgcttatttttgttga

SEQ ID NO: 247607 - DNA, 256 bp, Homo Sapiens
ccccaattaaccctcactaaagcctcccaggcccgggctcagagaggctgacagaggagggaaaaaggagtctgcggcgcatgtggggtttcgccccggcccgtcgcttattgcttggcctaatgtacagcgtcatcacctcattcgtcggccgacacactgcggctcacctgcaggctcgccctgcaagccgcttgcctcactcaagaaggaatctttagtgagggttaattgcggcgggtaccgagctcattgt

SEQ ID NO: 247608 - DNA, 266 bp, Homo Sapiens
cgcccaattaaccctcactaaagctgaagagaaatcagaagttttatgaagccgcaggtctgtagatgggacacgcaggtgatcacctctgccctcgccccgacctcgtggctttacttggagaacaaagatgaggagggtgaagcgagtgatctcagctccaaaagcacaggctgtgtgtctggagccagtgtgagaggtggcacagaggtgccaacggcttagagggaaggatgccaaggtctttagtgagggttaattgcggg

SEQ ID NO: 247609 - DNA, 322 bp, Homo Sapiens
cccgaattaaccctcactaaagttcttaccttggttgggggtgggcagatggtacaggtggattggaagtgaccgcctgattatcatttgggattgagtctgttgtgtgctgtgtaaatttaatttacccctttgctctttgtgtcagttgagaccaactgaaaagtgattgctttcagtaagtaaccttatgataacacgacgcttcattttgtgtgattgagttttgggacccagtttataggatcaaggaagggttttactgggcattttatgttcaggggttatatccctggctttagtgaggttaattgggtaccga

SEQ ID NO: 247610 - DNA, 189 bp, Homo Sapiens
ccaattcctgcactttgccgatttggcactggtgctagtgagcatcaggtgagatacaatttggaacacaacaggaaaggggtagaagtacagaaggacttgtttagacattggtcctttttgaggataccacactcccttgcccttgcttccatcccccatcccaaatcggcaaagtgcaggaattgg

SEQ ID NO: 247611 - DNA, 439 bp, Homo Sapiens
  misc_feature (388)..(388): n is a, c, g, or t
  misc_feature (405)..(405): n is a, c, g, or t
  misc_feature (413)..(414): n is a, c, g, or t
taggatcgcattcatcggcggcggcaatatggcacgcagcatgatcgcaggcatgattcgccaaggcgcccccagcacgtcaatatgcgtcatcgaaccaatcgccgcactgcgcgacgcacttatcgccgacttcaacatcaaggccgtcaccacagccacagaagcggccaccgacaccagcacctgggtgctggccgtgaaaccccaagtgatgcctgacgtgtgtgccaccctgccacttccagtgcaacccaacacaccactggttatctcaatcgctgcaggcatcaccacctgcaaactcaaacactggcttggcgacacctgtgcgattgtgcgcgctatgcctgaatactccagccccttgcttaggttgcctcgggcnttgtacttgtgtacttntccgcctnnactttctaactatctagtcaggctc

SEQ ID NO: 247612 - DNA, 237 bp, Homo Sapiens
cgttttgatgtgagagaacacagatacaagttttcatacaaacaaaccaaaacatggacaaagggaacataatgtggagtcctaacagggatcctctgggtgaaattcaccatgaaaaattatttgggtgccatcacattttttccaaattgtgaagggtaacgtctttagatggcacttcctgtctctcacatcaaaacgcgcgttttgatgtgagagagcaatctcaaaacgtaa

SEQ ID NO: 247613 - DNA, 248 bp, Homo Sapiens
cgttttgatgtgagagaagtttgttttccttctcccaaatccttttatatttttttcatgacacgatgtggactttgaggtgccctctcaggcccgcaaggatatcctgtgaaccaaagtaacactctccgtttaaggagacccccgctgctttttcatgttatctttgaggcattctccatggagtctgaccatcattcttgttcagagacagctctgaggaatcctcggtctctcacatcaaaacg

SEQ ID NO: 247614 - DNA, 1698 bp, Homo Sapiens
  misc_feature (1512)..(1534): n is a, c, g, or t
atcaagaaccatgagtttatcgccaccttctttgggcaacccaccttctgttctgtgtgcaaagactttgtctggggcctcaacaagcaaggctacaaatgcaggcaatgtaacgctgccatccacaagaaatgcatcgacaagatcatcggcagatgcactggcaccgcggccaacagccgggacactatattccagaaagaacgcttcaacatcgacatgccgcaccgcttcaaggttcacaactacatgagccccaccttctgtgaccactgcggcagcctgctctggggactggtgaagcagggattaaagtgtgaagactgcggcatgaatgtgcaccataaatgccgggagaaggtggccaacctctgcggcatcaaccagaagcttttggctgaggccttgaaccaagtcacccagagagcctcccggagatcagactcagcctcctcagagcctgttgggatatatcagggtttcgagaagaagaccggagttgctggggaggacatgcaagacaacagtgggacctacggcaagatctgggagggcagcagcaagtgcaacatcaacaacttcatcttccacaaggtcctgggcaaaggcagcttcgggaaggtgctgcttggagagctgaagggcagaggagagtactttgccatcaagggccctcaagaaggatgtggtcctgatcgacgacgacgtggagtgcaccatggttgagaagcgggtgctgacacttgccgcagagaatccctttctcacccacctcatctgcaccttccagaccaaggtgcccgggcctcctgccgtcaccaccccatgccacagccatgtcccacagctcctcagcccccctcagtcagggctgtgtctccccctcaggccacttaaggcagggccatgctttccccccctcatgcctcccagggcagagtcgtccacctcagccagggcctgtccctgctgtttcctgttggggcttggccccagtggccctcagtgagggagcctcctgcctattcctcacccctgctcaccacccttcccaccccaggaccacctgttctttgtgatggagttcctcaacgggggggacctgatgtaccacatccaggacaaaggccgctttgaactctaccgtgccacgtacgtaagggccatggtggggaagggcccagtgtggaggaagggctactggctcagagcccacttccagtctgccctccatgccttcttccctctccctagaaaagccagcctgggctagagcggcaactggggagatgtgggggtagcctgggtcggcaccacacaggaagccatgggtggcaagtgaactgcggctgggtgcgcagcgcaaatactctgggtcctggccgctccgtgggccacagccagggcagccttgcaaatggtggtcctgcatgacacaggacacaggaccctggtgcgtggcccccagacctgcttctccccattcacatgccccttaccccaaactaaccnnnnnnnnnnnnnnnnnnnnnnncgtgcatgcaaacacatatgtacatgcatgtaaatgcatacactcttagagaattggctcactgagagctttcccttcagaactttctgcctgggctgccagcccccacttgcctgatacaagatgtacttgatcatgctcagtggtccatggagttatttgca

SEQ ID NO: 247615 - DNA, 1221 bp, Homo Sapiens
  misc_feature (303)..(370): n is a, c, g, or t
  misc_feature (965)..(965): n is a, c, g, or t
ttggccagctacaggtgcctgagcaccccttcctcaccccgtcccctgagtcccctgaccagtggtccagctcgtccccgcattccaacgtctccgactggtccgagggcgtctccagccctcccaccagcatgcagtcccagatcgcccgcattccggaggccttcaagtaaacggcgcgccccacgagaccccggcttcctttcccaagccttcgggcgtctgtgtgcgctctgtggatgccagggccgaccagaggagcctttttaaaacacatgtttttatacaaaataagaacaaggnnnnnnnnnnnnnnnnnnnnnnnnnnnnnnnnnnnnnnnnnnnnnnnnnnnnnnnnnnnnnnnnnnnnatgtactgttttatctggccccaggtagaaacttttatctattctgagaaaacaagcaagttctgagagccagggttttcctacgtaggatgaaaagattcttctgtgtttataaaatataaacaaagattcatgatttataaatgccatttatttattgattccttttttcaaaatccaaaaagaaatgatgttggagaagggaagttgaacgagcatagtccaaaaagctcctggggcgtccaggccgcgccctttccccgacgcccacccaaccccaagccagcccggccgctccaccagcatcacctgcctgttaggagaagctgcatccagaggcaaacggaggcaaagctggctcaccttccgcacgcggattaatttgcatctgaaataggaaacaagtgaaagcatatgggttagatgttgccatgtgttttagatggtttcttgcaagcatgcttgtgaaaatgtgttctcggagtgtgtatgccaagagtgcacccatggtaccaatcatgaatctttgtttcaggttcagtattatgtagttgttcgttggttatacaagttcttggtccctccagaaccaccnccggccccctgcccgttcttgaaatgtaggcatcatgcatgtcgaacatgagatgtgtggactgtggcacttgcctgggtcacacacggaggcatcctacccttttctggggaaagacactgcctgggctgaccccggtgggcggccccagcacctcagcctgcacagtgtcctccaggttccgaagaagatgctccagcaacacagcctgggccccagctcgcgggacccgaccccccgtgggctcccgtgtttt

SEQ ID NO: 247616 - DNA, 322 bp, Homo Sapiens
gagcacagcttttcaccttttaatttgttgggtatttttctcttaataagagaaatattggccatcgatttttacatataatacaagtgtgtttttccagtacattggttcctgtcccctctctgtgaactgtttgagtattggaacagtatgtcttcaataattcaatgttactttgagatacatgtgttaatatacccttagttattcttgaaataaaaccagtctcttacgcttgcagtggagaaaggctgtgagtctgaggtgtgtgttctctatatattatcaccttcatgaactgtctgacctgggtgcggggccc

SEQ ID NO: 247617 - DNA, 271 bp, Homo Sapiens
tctcaagtttgggtttttaaagacagcaagtctggtcattcagtttaaatgaatggttatactgtttttaatgaaataagccattttcttgttgttttcagtactacatagttggatttgtttgttctagtttctccagtttttgtcaacttattgtatggtaaaacatagatttttttccccccaaacttctgttttataatatgtaatttttcatgaaaagaaagggctcagaaaaattaggatgtgattttggttggatgttgattgg

SEQ ID NO: 247618 - DNA, 435 bp, Homo Sapiens
cagtctaacaaaagatgttgatatgccagtaaactaacgttttcctcctgaacctttgagagtacattgttgatatgatgccgtcccattctgaatatttcagtattttctataaaaaggacattctctactaaccacaacactcaacatcaaaaaatttgatatagataaattactgctatctaatgtttgaataccattagagattttccagttgcccccaaaacatattttaaaacccaaggttccagttcagaatggtactttgtattttgttgtcagatctctttaagtttccatcaatctccaatagttccttagcctttccatgattttaatgatttgtatacttttggaaattgcaggctagtttttttaatagaatgtttcttaatgtggctagatcattaaaatcatggataggccggatatatt

SEQ ID NO: 247619 - DNA, 383 bp, Homo Sapiens
gaatcaatgaattgggtacctctagattcactgaacattgtattacatattttggggtctattagccattggaagtcccaaattacatagaaatttctctctacattctcaaccttcacatttcactgtgccatcattaaagtgtttcgggggtgttacgacataaaagtccatcatactctaacgtagagcaacttctgtttggaaaacactttttaaagaaaggttccagaatctgtaagtatccaacaaacaccaggaatattttaaagaatgctttacctaggttaagatttaatatttcaaaatgacttcagtaaggtcaatacatctttactgagaactgaatcaagagaatatgcaatggataggccggatatatt

SEQ ID NO: 247620 - DNA, 797 bp, Homo Sapiens
  misc_feature (60)..(69): n is a, c, g, or t
  misc_feature (304)..(343): n is a, c, g, or t
  misc_feature (494)..(524): n is a, c, g, or t
  misc_feature (725)..(734): n is a, c, g, or t
ggctacagtctttagactaagcatgcaagacatacgactaagtgcaactgagtgaaatgnnnnnnnnnnaaattttaatcattccctaaaggtttgaactgaggtatgcgtactaacagtttctcatgctgttatctttactcatgtctagctacacatgctgagaatgaactaatttaccagatttttatcctcttttgaataccaaactaaccagcaaccactcagtttagaagcacagggcccccttcccatgaccctgtttgggtactgcctgcacatcatgaaggtgcctggaaaaggnnnnnnnnnnnnnnnnnnnnnnnnnnnnnnnnnnnnnnnnaaagtcttgcgtgaccacagactgccctttatacagaaagcagagtgaagcttcaaaagtaactgccagagaagtttttgtaccaagcttatgagtggatgggagtgttacttttctttaaatgaaaaatgctgaccaaagcctaatcggnnnnnnnnnnnnnnnnnnnnnnnnnnnnnnnctgaaggatatatgccaagataaaccaaaattaatacagtgatcacagcacagttcttaaacaaaagtggcatacaatctaaaaatatctctttttctagaaatactattatgtaatctagttcaattatggaagcttttctgtcctgactctaaactgtctcctttattggatactctaattgcagtggcatacattcannnnnnnnnngagatgggactcccttccttctgtagctcctttaatattgtgtcctatttttatctgcaccaa

SEQ ID NO: 247621 - DNA, 742 bp, Homo Sapiens
  misc_feature (670)..(670): n is a, c, g, or t
ccataatagggaactttgtacaaaaaagttggcatgacactgcctttgaccttagaagtggatccagggacccagcaaagagcgggggtgggttcccagggacaggcagtcctccgggggcttacatgctttttgctacctttcctattagcagcttcagtttatatcacccagagtgcgtgggataatgttgaagtcgctgaagttacgggttattttatgtttttacatgggatttttctgtttttgattggaagaaggagacagaaattggaggaaatgggattattatcctagggaagggccgttggcaaggagttgagccggcccctctgagccctgggggctatctgacctgaagcctggacactgggcccttcaggtcgcaagaaaaagttccctcctaaattctattaggattttggagaatttttgcacagtaagaagctctgggttgctccttgggcttctcaaaagggaaaagttcaattcaaagattgtaaactacgaagtattccagccgtgttgctgatctagttggatagttgtacctcaaaaaagtaggtgagaactggcttcctcattgtcccagggatgtcaaatactaatgacataagagctcacttacgtgccaaaattcactttttatactagttttttcagtgctttnaatattttgtaactttaaatttttaaaactcgtatttacaaacactactgttaacttcagtggaaaccggat

SEQ ID NO: 247622 - DNA, 663 bp, Homo Sapiens
ctcacaacatctggcctatattgtctgtcaggaagccatggctccaatgtaaagtacatagttcttacatacttcaactgcagctggtccctgacctcaccaggtttcagagatgttcttaaagacggccagctgtggcaggtcacagattcatgggaaatggaaagaaccaaggaatatagctcttgcctcacctttctacccactgcagatatagttcaagccagagtaatggaagatctttatcttcctagcctctcaggctgctcctatccctacctcccagtgtacagcccctccccatctctttagtcccctttccctcacttccccttttataatgtcacacaaatcagggacagtaggatcacattataacctactttgtcatagggattcgatttttcttatatcaaatcatgtttcctgaaacccagctggggcatatgcactcaatgtctaatacatacttattaatgtaccggatattggccttgcccctggatatcagcaatatattataaaaggttccagtagatgagacgattgagtctgaatacaattgcagtaaattgtgccaataaagatattgtactgttacggtcttagagttaaagccgcttgaatgcagcatgcacattcatgtcgacagggtttctagca

SEQ ID NO: 247623 - DNA, 126 bp, Homo Sapiens
tacagcagcaacacaggagatcatctgtccattttagaaccattaatctctttatccattgctgaacgactgtgactattcagtaacgaagtaatagtaattaattagtatggttgggactagtcg

SEQ ID NO: 247624 - DNA, 496 bp, Homo Sapiens
  misc_feature (72)..(72): n is a, c, g, or t
cgcacgaggctacagatggaaaaatatcttcattctagcagaatgtaggagacaaatcatcttgtctcattntgaggacaaacaagtacaaaaagcctcctgggaattatgggagctgaaaaatgctgtgataattgcaggtccagattggatcattgctattccatggatgactcagaggatacatcctgggactttggtccacaagcatttaagcttttgtctgctgtggacatcttaggcgaaaaatttggaatggggcttccagttttatttctccgaggatctaattctcagcgtcttgccgatcaatatcgcaggcacagtttatttggcactggcaaggatcaaacagagagtcggtggaaggctttttcccgtcagctgatcactgagggattcttggtagaagtttctcggtataacaaatttatgaagatttgcgcccttacgaaaaagggtagaaattggcttcataaagctaatacagaatctt

SEQ ID NO: 247625 - DNA, 642 bp, Homo Sapiens
tgacactataatggctacagaaagtgaagtcactgcttttgctgtcttggatcaagaccagaaagaaattattgataccaatggagctggagatgcatttgttggaggttttctgtctcaactggtctctgacaagcctctgactgaatgtatccgtgctggccactatgcagcaagcatcataattagacggactggctgcacctttcctgagaagccagacttccactgatggaagagctgaaaacacaagcccaggagtgcagacactgccctaattgcttcctgagaattcccatattaataaagaagaaaattatctgccattttttcctactataataatgctgaatcttaatttagagggtacaagggtatggtaatgcttgtagaatctttattatctcaacaatctaaaaaatgatgtttatttccatagtttgatagtgccacttaaatgccaattaaacaagaatataacatttcaatagaaatttttatttcattttcaattactttgtaaattcgtgtgtatttagtacactgatttgtttttttacatttctgctttgaaagcagatgcaatttaatataatagattttttaatgaattaatcttaacatagtaatctttagcctcgt

SEQ ID NO: 247626 - DNA, 893 bp, Homo Sapiens
gccaatcaaagcacacaactttattgatgatacacacagatgcggacttgggtggaagaggttaagtcggtacaatagacagaagagcagtgcacttttttgatgaataggttcactatccatcaggcgcgtgtagaagaaagagcaaacgaaaaataattcaacctaagctgcaacaaatgcattttcagctcaagccgcgatatgcctctggtctctgcaaagcggtcccgcttggacagggagaccaccacaggcaacaatagcactcgtgatgctgtaatttgatgttctttgtccacagcaggcagctgaagtgatcccctcaccacatgaaggaggctgcaagggaggaatttacaatgccaacattgcctgcagactgcacaaccaagaagttactcaaagctctgtgggagcccctgcctggccaataagagtgtggtcctggattgagccctggaactttcacccaatgaggtggtgattggctaaggctggatcttcagtagcaccctctgcagattctttgacatctgcaaaccaagcgcgttgtgggtggattccgtcccattgtgttcgagagggccgtttatggggcaggggtttccaggagaatctctctgtttccatttctgattgaagaggtctctcaggtccagggtgagtaaggatggagggtagcagtcttcagcttcttccaggctcttgtagctctcttgtgatgaatctgcaaggttccaaccaaggcagttttctccttctctcgctgaaacttgtgccgaaacctacaggccaacagacctacaaacctgcacggtccgagctagtttccttctttcttcacacgcctgcagagtaatagggggctggtacccagacggaggcgccaa

SEQ ID NO: 247627 - DNA, 1390 bp, Homo Sapiens
ttggctctcctgcaggcagtgcccaggcccagggtagacaaagggttttcatgccacagacggggcagctgctggagctccctacacagcgggacacgcgaagggcacctgctgtgtgacctggggcccacgacagtcactggttgcctctgcagaagcagttgactgcctccactctagaagattctactgaggcctggctcagtgcctggcttgtggtcacccttggtgccctgtacttcactgtggtcctgaactgaagagctgtgtttttcaggaagacttggccaggccgtgttccgtgtctctggattcaagtcccaggagtcctgaccagagagcaggcatcattgtttttctgaccgaagttctcatttcctgacaatggaaatggaacaagaaaaaatgaccatgaataaggaattgagtccagacgcggctgcttactgctgctcggcctgccacggcgatgagacctggagttacaattaccccatccggggccgggccaagtctcgcagcctgtctgcctcgcccgccctggggagcaccaaggagttcaggaggacacgctctcttcatgggccatgcccggtgaccacttttggaccaaaggcctgtgtgctgcagaacccccagaccatcatgcacattcaggaccccgcgagccagcggctgacgtggaacaagtccccaaagagcgtccttgtcatcaagaagatgagagatgccagcctactgcagccgttcaaggagctctgcacgcacctcatggaggagaacatgatcgtgtatgtggaacagaaaggtgctagaaagaccctgccatcggccagggatgaaagctttggggcagtgaagaagaaattctgtacctttcgagaagattatgatgacatttccaatcaggatagagttcatcatctgcctggggggagacggggacggctgctgtacgcttcctcgcttttccagggcagcgtccctcgggtcatggccttccacctgggctccctgggcttcattgaccccattcagctttgagaactttcagtcccaagttactcaggtgatagaggggaacgcagctgttgttctccggagtcggctgaaggtcagggtggtgaaggagctccgggggaagaagacggccgtgcacaatgggctgggtgagaaaggctcgcaggctgcaggcctggacatggatgtcgggaaacaaggcatgcagtaccaggtcctgaatgaagtggggaatgaccgagggcccctcctccctactgtccaatgtgggatggtctacctgggacggaaccccctctttccccacgggtgcagggcccaccggaagtgaattcgtgttccacccccctacggggaaggcactggcgtc

SEQ ID NO: 247628 - DNA, 419 bp, Homo Sapiens
cgcggccgcgtggacctgggggagtcaatgagatggcaggcaaggaacagtctccatttgatgctgatgtttgtgcagaatgactactttataccgtacagaaggagcacactctcttcttgtggtaggtcccagaaacttctacttgggggtacatgaggcccagctgggattgggcacagaaggtcatggctctgcacctgaccctcaccttaggggtcaggagagagccaaggacacgagtgatgggttagggaggactcaggcaccatggaatactgtggccatccttccatagaggagaggtacaggtggcaaggcaggcaccaggcagccgccgacagggtcaggaaccaagacaggtccagggcagaggaccgacgtcgacgcggccgcgaatttagtagtagtagtcgacc

SEQ ID NO: 247629 - DNA, 644 bp, Homo Sapiens
  misc_feature (34)..(34): n is a, c, g, or t
tcaggagctgactccacagagtcagttatgattnatggaaatattgctgtcccaagatatacttcaaccaccgttgcttctcaggcgcatatcttaacaaaggaagaattgctgagctgcctcaatgtgtaggacctgggaactgtgttctggtccttagagaggtcctcactttacttatcaatgcagcctacaaacccagccgtgtccttcgggagctccagctggacaaagactctgtgtggcacggatgtggggaagtcctaaaagccaaatataaaggaaagagttatcgggctactgttgagatagtgaaaacagcagatcgggtgactgaattctgccggcaaacctgtatcaaactggaatgctgtcctaacctcttcggtccacggatggttctggataagtgttctgagaactgttctgtacttacaaagaccaaatacacacactattacggaaagaagaaaaataaaagaattgggaggccacctggtgggcatagtaacttagcttgtgccctgaaaaaagccagtaagaggagaaagaggcggaaaaatgtttttgttcataagaagaaacgctcctctgcatctgttgataataccccagcgggctctccccaggtatgtgagggcatg

SEQ ID NO: 247630 - DNA, 1616 bp, Homo Sapiens
  misc_feature (1397)..(1435): n is a, c, g, or t
ctccagactcgagggaagccagcttccaagaactggaatgcgtacgtcttttgtgccaccttgtacaaagccggctgcccagccccagcctcaccaccgcatcccacctcctgccctccatacctctagttgtgtctgatgctccgtgctgttcgggaattgttttatgtacacttgtcaggcagaaaaggtagtgaccggcccggcgtgtgcacacagacagcccgctttgttctttcatttcctccagcactttctttccgcctgagtccagcccaaggccttttattttgcgctgtgtaactgctgccagcttctcttggccctgctcccagatggcggtctcctggcagcctcccctcagtcttcctccacccgctcttccttcccagcctgcctgcatgcatgtgcacccttggtcttcgctccatcgccttgaaagctctgaagaggccctgggttgccgcggcagcagtggtctgtttgatgctgccgtttgccgctgccggcccctcctcagactccgcctttgggagcacacctgctttgccttgttgcctgtgcaaatgttggacaagcagacacactcacactcgtccccagcttagcacagagctggagcgcccatttctggaattttccgtttgggaatctccacttctggggtttacctgttcggcctcctgcctatcagtgaggcatctctgactgtttcttctactgcttttcagttcccttccctgctgttctatttcctttgagtgtaaagactcacaggtgacctgctatcgagatagccagagggtcaggagagaatgggggaggaggcggtcaggctgctgaggaaacaccacaggctgaacgggggaggaatgcacatgccacgctgggtgtcccggtcgcggggaggcagctcagctcttaggagcaagttgtgggggcttttcaagaggggccaggcttcctggagggtgactgatgtggccgaagcaggtgtccaggcaggtaggctgcagccaggagctccctggcaccgcaggacctcgtggtactcttgccttagattttacacacactccacagccaagcactgccacggtcctccaggacctgggaagcaaaggcacaggcccacggtggccagccattgtggtgccgccccagcttctggatacagccttttgggtaaacactgggaactccagaagttgtggggagagtggggaatcagacagccgcctctaggggctgggttctgctggggcctccttgttggtgctgtatgcacccgccagggagcagggacccgacttgcagacgcattgcccggtactaggaaggagtgaggtgtgttcccaccgtacacttcccacacgagctgcggctgccagcctcgnnnnnnnnnnnnnnnnnnnnnnnnnnnnnnnnnnnnnnncgacttatagccagttacagctccccggctcttctgtgtggcagagcgtcgtttccgggccctcagggctggggagctcagttcccattgcttgtgctcagggctgagtcttaaagaagggtttgccggccctaacgctgcagcgcgtgcgcggtgagaggccctttttgagcctgtttac

SEQ ID NO: 247631 - DNA, 1205 bp, Homo Sapiens
ttggaaaaggtcctgttgtttttgggagcagggagtaatggcggatgagacgctgtgtggaggcggcagctcctggtatggggtaacgccctgtcccctcattggcaggtggtttgcatgaagcatcaggccagagggtgtgagtgccaagccctcaccccacatgctgctcctgttaaaagcaaactccactgacccccccgggaagtcaggatttgggatttacttcctggaatgcttgcctctggctgctgggaattggggcctttccccaaagcctgaaccaggcctcacagtggccatcaggcacagaatggatgggcacagctgagtggctccactggctttaatctgccccacctcttccacaccaacctccaccctctggttccgatgtgcttggttacaaagcacctgattatttaagagaacgaaaaaccaccaccagttcctgtaaagaataagtcacaggtgcacaggtgaagggctgagttgtggtccagccccagggagtgtgggctgtgaggcaggagcgagctaaacctgtaggagcagcgccacggctgccaggatccacttcgctgccttctctttggtcttcaagttaaaggtccagacataggtggggccgcggatgcgtgttttgtacacgggacactcatagatgttcttggtctccatgcggtccacaggaatggccttgatgaagatgacaggcatggccggggtcagctctttcagccgctcttcagcgatgactccagtctggggtgtcccagcgagcccctgcagggacagtatggctgagggtcaggtgtgctgccagtaagtgagggaggggctggcaggaagggtggggtcctcacactccccgccctctgcagagctgggctctaccccaaaaggcttcaggccagctgccacagctggaagcagaggccttcgtaggtgatggcctgcatgttgtaactaccccgtcccgctgggctcaaggaacagctcagctaaagccctcgggttccatccgtttaaaatctgtggcattttcagagcctcatctgtcagccttaatgtcagtggcaggaagtcataactccagctaaaaaattacagagtaaagttccctgattcttaatgtgtaatgtctgccctatgtgtacatacccaatataattatacatccgtgcatataaatattgccttta

SEQ ID NO: 247632 - DNA, 1400 bp, Homo Sapiens
  misc_feature (216)..(323): n is a, c, g, or t
  misc_feature (828)..(879): n is a, c, g, or t
  misc_feature (907)..(919): n is a, c, g, or t
  misc_feature (980)..(1045): n is a, c, g, or t
ttggcttaagatggcggcgtttgcacggagtgcaatcactgcgtccttacgggggttgcaaggcgtccgaagtatgagtccactaacaaaagtccagaaactcgccagttaatagtattgtgtctcttcaaaatatcggagaataatttctttctcgctgatcgcctaacttctactgacgaagctaggaagttgcagaagatggagttcgctctnnnnnnnnnnnnnnnnnnnnnnnnnnnnnnnnnnnnnnnnnnnnnnnnnnnnnnnnnnnnnnnnnnnnnnnnnnnnnnnnnnnnnnnnnnnnnnnnnnnnnnnnnnnntttcttcaaaggaaagaagcaactggaacacacatataacactaacccttccagctgcattatgagggaccagtacctgtctcaaggcaaaattatgacttagttcatcctcacctctggaggccagtaaaagtgggttatagaagaacaaagaggcatctagatctttcactgggttatttggagagaaacatctcctaccgaaggccagtttaacaagactggtagaggaggttatcttatctaattcacagaaatcaacacattgagtcaagaaaaatgaaacacagaaacactctaaataaaagaagataagtcttcagaaaccaaccctaatgaaatgaagatatgtgattaacctgacaggaaattaaaaagagcaaccataaagagtctcatgggagcaatgcatgaacaaactgagaattttcataaagaaataaaagataacaaaaagtataaagttgaagaatacaataactggactcaaaaatttaatgtgtcnnnnnnnnnnnnnnnnnnnnnnnnnnnnnnnnnnnnnnnnnnnnnnnnnnnnccattggaaatcatgtaatgtgaggagnnnnnnnnnnnnngattgaagatagtttaagagacttttgagacatcctcaaaggggaataatttatacattannnnnnnnnnnnnnnnnnnnnnnnnnnnnnnnnnnnnnnnnnnnnnnnnnnnnnnnnnnnnnnnnnataattctggcaaggaaatagaaatttagatctaagaatctcgaacatcaggtatgatgaatccaaggagactcacaccaaaccatattgtaattaaataaaggttaaagacaatcttcagagcagcaagggaatagtctcttcttacatacaaaatgatccacggaagactgtcagcagacttcaccagaaaactttcacgccagaagcagtcgtgatatatacaaaaagctgaaaggaaaacactgccatccaggaatactatctccaactatcctgtgtttcaaaaattaagagaaatataaagttctcaaacaaagatgtgggagtttacaccactagacctgcacgggaa

SEQ ID NO: 247633 - DNA, 837 bp, Homo Sapiens
atcttgaggatcccccagccctcacatacctatgccattcagagctccaacgaagcctccagttggacccaaaacttctcccttgacagataacccgtcacctgaacctcagtgtggatgacatcaaaagagagctgagggctgaagttgacattattgaacaaatgagcagcagcagtgggagcagctcttcagactctgagagctcttcgggaagtgatgacgatagctccagcagtggaggcgaggacaatggcccagcctctcctccgcagccttcacaccagcagccctacaacagtaggcctgccgttgccaatggaaccagccggccacaaggaagcaaccagctcatgaacaccctcagaaatgacttgcagttgagtgagtctggcagtgacagtgatgactagtgctggatctttcgaaacctactttttggtgcacaaacatgccgcaagactgagctactttggcgtggagtccattgcaagaggaaaatgttatggatcagtgactgtagtaggagtttgaggctctggaactctcacatattcaagtctttaacttagtggtgatgggtgattttctcgtgtcatttttgaaccatctcatctttcaaagtttaagtagacctgtagaagagctaacagaattatatttctatttagttaaaattgttaatgaaaaacagataaatgtgccctggtctaagttactcaaaggccatatcttcaccaggccagagattcagttttaaacctcagcagccatcagtttgccaagtggttgtacagtggaatgaggtatgtgagggtctggggggtcctctagaat

SEQ ID NO: 247634 - DNA, 240 bp, Homo Sapiens
  misc_feature (199)..(199): n is a, c, g, or t
aagtaacactaaagaagctgtaaagaacattgaaggtggtcattccttcaaaactgtgttttgaaccacacaaggtgggcattaacaaaaccaaatttcaacttaagtctgtttgtattatattcgggggtgctgcgagactggagattttatttaacaagcatttttatttccatttataatttctattcaatattgnctagatatagtaactgaaggtatgtgagggctgggggatac

SEQ ID NO: 247635 - DNA, 563 bp, Homo Sapiens
ttggcggctgggctgtttggtttgagcgctcgccgtcttttggcggcagcggcgacgcgagggctcccggccgcccgcgtccgctgggaatctagcttctccaggactgtggtcgccccgtcctgctgtggggggaaagcggcccccagaaccgaccacaccgtggcaagaggacccagaacccgaggacgaaaacttgtatgagaagaacccagactcccatggttatgacaaggaccccgttttggacgtctggaacatgcgacttgtcttcttctttggcgtctccatcatcctggtccttggcagcacctttgtggcctatctgcctgactacaggatgaaagagtggtcccgccgcgaagctgagaggcttgtgaaataccgagaggccaatggccttcccatcatggaatccaactgcttcgaccccagcaagatccagctgccagaggatgagtgaccagttgctaagtggggctcaagaagcaccgccttccccaccccctgcctgccattctgacctcttctcagagcacctaattaaaggggctgaaagtctg

SEQ ID NO: 247636 - DNA, 1169 bp, Homo Sapiens
  misc_feature (999)..(999): n is a, c, g, or t
  misc_feature (1010)..(1010): n is a, c, g, or t
ttggcacggggcccaccaagaagtgccccctggggaggtgacagcgtcttccagaaatgccgccgcccacaaggaggactggcctgtgccggaagctggagatggtggggtcctgatggcacctggtaggtgagggtgccccagagaaacagagccaaggcggcggcctggagacagattctgtggaatctgcccactctgttgtggggcctgccaagctcagcatctgcagggtggaccgaaccccggggaaagagtcagtgctggattctcaagagtccagaggccatccagggcagagtgctcccctcagaggacctcagtcttttcttagtccttcacctgattggatgaggcccacccactcatggcgatcagctgatttactcagagctgactgatttaaatgttaatttcatctaaagaagtaactatacagaaacatccagattaatggttgaccaaaatctgggcactgtggctcagccaggctggcacataacattacccatcgcatgttagttggaagcttggcctttggaattaactcagcctggtcagccgttagcagccagcagtctctgttctgcccacacacctctgtggactgacccaggacacagccgcggcgagtcctttgcacatgttggcaacacacgcatccgcatcggcctccctgcccacaaagcgccacaacggtgaccagccggagcagctggagctgaagcggatcaagacagaagacggcgagggcatcgtcattgccctgagcgtggacacgccaccggcagccgtaagggaaaagggtgtccagaactagcgaccgggagagcttttctttaacgatatcaactctgtggtgccaaaaggagacgcggcctcccgccagcactcgggggtgcagggccctgtggttggacttcacctctcagcactgaaaacccaaaacccagctggccttaacactccttaaagacagaagtcacacttgaacaaaanccaaacacaanaaaacctgatttgggagacggtgtctccactgagcaacctgctgggctgagcttctacctacgagtgaaactctgtcctcccgcgaggaccaggcatcgctgtgtgaggacggcacggccagcgcctgctgtgagtgggtctcccaagactacggctca

SEQ ID NO: 247637 - DNA, 1530 bp, Homo Sapiens
  misc_feature (1286)..(1295): n is a, c, g, or t
ttccttgacctcagcattgtcacaaagcagagactgatggatctgtgctccagccgccactcgaacaccctgccacaggtaggtctggtccagcaccacgttatcacgtgaggagaacagatgctgatatgacaatccagtaaatcatatcgaacctccactccatcactactgccctgaaacaggctcagaggaaatgcaaaacgccggagaccctgggtcttctgaaaatggagaaccctgtttgtggtactatccacagccactaccacattgtcttcgtggcaacgagttgggtggctgggggatgactccttgaagatcatcgtcatcacagaaacatttttttctagcttccgtctcaacctgtgttcctcaagggctctggtgatattgatgtttgagatgacatccccatacaccagaagaaagtcagagcgcaccaaagccttggcatcaacatcacggaggacatctcccagtgatcgatagagctctgatgtaattattcgaaccacattgagagatgtagggcggcaccactttgacttcagtaaatgttctttgatttgagcagctttccagcaacaaaagacaaatgtttcctgtacacctgtggcagtcaggaattccagagtgtagtcaatttaatgccacattggccaggggcaagaggactgaaggatacaagatgaaaaaaaacttgaggtctcgaatccctttgggtaccccactgcaacaattttcactcctctatttcgtatttccaaacagtgtaattttgctgtatctttccaattcaaagataaacaggttcctgcctttgatgttcatgccatgctctaagcctgagtctgagacattgcaatttggggatggtaagtacagaatctatgtgccttgtatcagacacagagctgtgacagaatggcagttcactgctggcaaaggataatactggaaatcaatcatatttccataaatttaagcattgctaaggccttcttccccataagatttccttccttgatccctttctaagtgtcagaggttagccatctcccgtcacttgtcaaaaatgaacagccattaggctttttcgagggaattagagaggattttccttaaatccaatgcagttccctctttctgaactgactgctgaacgacccagctgagtccaataccccattgtctagacaactcgggggctgatggcaatcaaccactaaacccattttgtcctttcgacagatagcaccggctatcattagaacctggaaggnnnnnnnnnntacactgcctgagatctagcccgctctttttaaggcatattaccgccctttcagaggcaaaaggtcgtttcttttcacctaagcaaccgtcatcggcaaggttaaaagcggcgcagcctcttctaggggcactgaatccccgcgtgaaggcttctctcaagcgctgtttctacatttagctctcttcattcctttcaaacccgaggtggacagcattacccaactattttgtaca

SEQ ID NO: 247638 - DNA, 709 bp, Homo Sapiens
  misc_feature (217)..(407): n is a, c, g, or t
tatgatctagacacacaagcagacttcccgtgcatcgtactccgatactccagcactacctcctacggaggagatatgggttgaaaatataactccagatgggaaggtttattattataatgctcggacacgtgaatctgcatggaccaagccagatggagttaaggttattcagcaatcagaactgacacctatgcttgcagcccaggcacaggtnnnnnnnnnnnnnnnnnnnnnnnnnnnnnnnnnnnnnnnnnnnnnnnnnnnnnnnnnnnnnnnnnnnnnnnnnnnnnnnnnnnnnnnnnnnnnnnnnnnnnnnnnnnnnnnnnnnnnnnnnnnnnnnnnnnnnnnnnnnnnnnnnnnnnnnnnnnnnnnnnnnnnnnnnnnnnnnnnnnnnnnnnnnnnnntccaggcacaagtgcaagcacaagcagttggagcttccacccctacgaccagtagcccagcacctgcagtatccacttcaacatcatcatccaccccttcctctaccacttctaccacaacaactgctacttcagttgcgcagacagtatcaacacccacaacacaagatcagaccccaagttctgctgtttcagttgccacgcctacagttagtgtttcaactcctgctcctacagccacacctgtgcaaaccgttccccagccgcacccttcagacgttaccttcctgctgttcctcatt

SEQ ID NO: 247639 - DNA, 711 bp, Homo Sapiens
cggacccaggctccccgcccgaggaggaagatgcagacctttctgaaagggaagagagttggctactggctgagcgagaagaaaatcaagaagctgaatttccaggccttcgccgagctgtgcaggaagcgagggatggaggttgtgcagctgaaccttagccggccgatcgaggagcagggccccctggacgtcatcatccacaagctgactgacgtcatccttgaagccgaccagaatgatagccagtccctggagctggtgcacaggttccaggagtacatcgatgcccaccctgagaccatcgtcctggacccgctccctgccatcagaaccctgcttgacggctccaagtcctatgagctcatccggaagattgaggcctacatggaagacgacaggatctgctcgccacccttcatggagctcacgagcctgtgcggggatgacaccatgcggctgctggagaagaacggcttgactttcccattcatttgcaaaaccagagtggctcatggcacccaactctcacgagatggctatcgtgttcaaccaggagggcttgaacgccatccagccaccctgcgtggtccagaatttcatcaaccacaacgccgtcctgtaccaggtgttcgtggttggcgagtcctaacaccgtggtccagaggccctcactcaagaacttctccgcaggcacatcagaccgtgagt

SEQ ID NO: 247640 - DNA, 1563 bp, Homo Sapiens
  misc_feature (1423)..(1423): n is a, c, g, or t
ttggcgttgtcccgcgagccgccgaccaggcctcgaacgggatggcagaggaggtgaggagggaggaagcgtccggagtggggcgggcccggactccgacccccggggcgcttcgagccccccagctggtcaccgaggcaccgccgcttcacccaggccagtagccgccccctcgcgcaccccggccccgcctcacacgcgcgcccgagcgagccccgggctcccctcgggcccagcgtggcgcaggggtcagtggttctctcgggtctcgggacaggtgagcaccctgatgaaggccacggtcctgatgcggcagcctgggcgggtgcaggagatcgtgggcgccctccgcaagggcggcggagaccggttacaggtgatttctgattttgacatgaccttgagcaggtttgcatataatggacaagcgatgcccttcttcttacaatattctggataatagcaagatcatcagtgaggagtgtcggaaagagctcacagcgctccttcaccactattacccaattgagatcgacccacaccggaccgtcaaggagaagctacctcatatggtggaatggtggaccaaagcgcacaatctcctatgtcagcagaagattcagaagtttcagatagcccaggtggttagagagtccaatgcaatgctcagggagggatataagaccttcttcaacacactctaccataacaacattccccttttcatcttttctgcgggcattggtgatatcctggaagaaattatccgacagatgaaagtgttccaccccaacatccacatcgtgtctaactacatggattttaatgaagatggttttctccagggatttaagggccagctcatacacacatacaacaagaacagctctgcgtgtgagaactctggttacttccagcaacttgagggcaaaaccaatgtcatcctgctgggagactctatcggggacctcaccatggccgatggggttcctggtgtgcagaacattctcaaaattggcttcctgaatgacaaggtggaggagcggcgggagcgctacatggactcctatgacatcgtgctggagaaggacgagactctggatgtggtcaacgggctactgcagcacatcctgtgccagggggtccagctggagatgcaaggcccctgaaggcgcaggctccagcccggcctgcaggccgtggtgaggaggggcgcctccccagagtctgctcccccgtgaacacagagcagaggccagggtggccagcagtggctgggtccttccgcgcccctccgtcctcctttccctgagcaccttcatcaccagaggcttgaaggaaaccccgccatgtggcagggcacaggcactgttcctggtgaaccttggaccacagcatgtcagtgctctagggattgtctacntccagggattttcttcacaattctacacatgggaagtccaacaaatatattgtgtgaacagatcacaaatttaaatgaaacaaaaacacaagaacaaggggggcgccaaaaaatccccagggggccaattgtaggatacg

SEQ ID NO: 247641 - DNA, 676 bp, Homo Sapiens
  misc_feature (388)..(408): n is a, c, g, or t
aaccaactcattgtttaaaaaaccaaaaccataaaaacctaatctgtgaaatcagcgtagcatgcctggagcatcaggaatggcagaaaagtctgatgcgctctagacagcttcaccactcatttgggcaggcagtaaacacacatataatttattagctgggagctgaactggctgtgaaatctatgatttgctttgaacatttgggttttgttgcctttttcttaattgataacacagaaaagaaagtaccatcaaagactgtggagtcattgagggtctgtgtgtcctcaccgagagggacctggtgtgcccgccgggtctatcttcccacgtgttagggtttatttttatacaacacatcttttgacactttaaggtgggtggnnnnnnnnnnnnnnnnnnnnncgcgcgtgcgcgcgcgcatgtgtaaggttttatgttgctgttatttatttccgaccttcgtatacgtttttatgtatttttcattcttctggagcttcctaaaaattgataagcatctgcactgaaatataatttaacagctaaagtaaaaaaggattgaaagttgtaaattcctcatatcactacagtggcgattattctagaaatcgttgcttgtgtagcaaagaccaaataaatagatttcagacacaaccttgagcacagttga

SEQ ID NO: 247642 - DNA, 458 bp, Homo Sapiens
tcggagtcttcccactgcccatgtacgcccttcccacccattgaagagcttcgccgtgccagcaatcccgcctccaggacctcccacctatgatcctgcattgccaagcacaccattactgtcccagcaagctctgaaccatcacattcactcagtgaagacagcctccatcgggactctaggaaggagccggccttctatgccagtggttgttcccagtgcccctgaagtgcaggagaccacaaggatgttggaagactccgagagtagctatgaaccagatgagctgaccaaagagatggcccacctggaaggactaatgaaggacctaaacgctatcacaacagcatgacgaccttcaccaggacctgacttcaaacctgagtctggaagtcttggaacttacccttgaaaacaaggaattgtacagagtacgagaggagagcaccaccaataca

SEQ ID NO: 247643 - DNA, 315 bp, Homo Sapiens
gtatcttcctaaactgcatttcacaaataccactttggcagcatcaaggatcgatttgaggaggcaagactggaggcaggaagactggttaaaaaaatgcatattaggaagatacgagagaaaaatgatagtggccttatcaaagacaacaataatgttccttgcaataggaatgaacagaagtcaacaggaaatattaagagatgggatcaaaaggacatgactgcagattggctgtttagaagttatgggaaaaagtagaatccaaaggttaatctcagatttcttgagtggtgggagagcaccaacaataca

SEQ ID NO: 247644 - DNA, 1358 bp, Homo Sapiens
  misc_feature (1286)..(1295): n is a, c, g, or t
atagatgtggctaaatctctgctggcatgggtagcagccaaaaataatggtatgtaagttacgatttactggtcaagtattgtatctctgtgtctttcatatgcagacatctgaagttattgatgtctttgaaattatgaaagccagatataagactttagaacctagaggttacagtcttctcatccggggattgatccattcagacagatggagagaagcattgttgctgttagaggacatcaaaaaagttataactccttcaaaaaagaactataatgactgtatccaggagctctccttcatcaagatgtaaacacagcttggaatttatatcaggaattgctaggtcatgatattgttcctatgttggaaactttaaaagctttctttgattttggaaaagacataaaggatgataactattcaaataaactactagatattctttcatatctaagaaataatcagctgtatccaggggagtcatttgcacacagtataaaaacatggtttgagagtgttcctggaaaacaatggaaaggacaattcaccacagtccgaaaaagtggccagtgttcgggctgtggaaaaaccatagagtctattcagctgagtccagaagaatatgaatgtcttaagggaaaaatcatgagggatgtgatagatggaggtgaccagtacagaaagacaacacctcaggaacttaagagatttgagaacttcctaaaatctcgtcctccttttgatgttgtcattgatggtctcaatgttgccaaaatgtttcctaacagttcgtgaatctccatttctcttgagtgtccgtctctcaactagccaaacggaatctgcgactgctggtcctaggccggaagcacatgctaagacggagttcccagtggagtcgggatgagatggaagaggtgcaaaagcaagccagctgtttttttgctgatgacatctcggaggatgatccattccttctgtatgccacactgcactccgggaatcactgcaggtttatcacaagagacctgatgcggggacacaaggcctgtctgcctgatgccaagacccaacgcctgttttttaagtggcagcagggacatcagctggcaatttgtaaataggttcccaggatcaaaacctaaccttttcagcgtattctcagctatgacccagtgggtgcaaacaactggaaaacttctgggcacattccctttgtatgaaagactttggtaaaaaagaaagttcccggggaaagtacccaaccaaatggctttttnnnnnnnnnnaaagaacttagaaaattccttacctcccaatgcttaaatttggggggtttgggtacccctttg

SEQ ID NO: 247645 - DNA, 998 bp, Homo Sapiens
gtggaggcggaatatgtgagtacctcgattacgtagaatgggccgagattatgaggcggtacagtcgattttgccggcaacccgcagattcggttttatgacagtcggccaagggggcatttgtcgttggacctgacacctgggaggttagttagcaggatgttgtgggtaggtagactggggatcattggtcaagagactttttatggtccttcctgtcccttttgttgcagggctgtgtggtctttgaggatgtgtttgtaatacttctctcgggaagaatgggagcttcttgatgatgctcagagacttttgtaccatgatgtgatgctggagaactttgcacttttagcctcactgggaattgcattttccagatcacgtgcagtcatgaaactagagcgaggagaagagccctgggtgtatgaccaggtggatatgacttcagccacagaaagagaggcccagaggggacttagacctggttgttggcatggagtggaggatgaagaggtatcttctgagcagagcatttttgtagcaggagtgtcaggggtcaggactctcatggcagagttggagtctcacccatgtgacatatgtggcccaatattgaaagataccttacacctggctaaataccatgggggaaaagccaggcagaaaccatacttgtgtggggcatgtggaaagcaattctggttcagtacagactttgaccagcaccagaaccagcccaatggagggaaacttttcccaaggaaggagggcagagactctgtgaaaagctgcagagtccatgtgccagagaagaccctcacatgtgggaaaggtaggagagacttttcagccacatctggccttcttcagcatcaggcctctctcagcagcatgaagccccacaagagcactaagcttgtgagtggctttctcatgggacagaggtatcacaggtgtggtgaatgtgggaaagccttcacccgcaaagacacacttgc

SEQ ID NO: 247646 - DNA, 126 bp, Homo Sapiens
cacgtatcgggaaaagtaaccacgggttggcagttcacccacgctgagcgagacccactgcggggagaatgggtacagtcggcgggaaatcagggcaggcacataggcggtgacaagcccggtatg

SEQ ID NO: 247647 - DNA, 135 bp, Homo Sapiens
atgaaatacgtcttttcaaaggtgctggggatcgaaactgtggctttggttccgctggcggtcgtgttgccacgggtgccatcaccaatgcccgcgtcgatgggttgcgctggttgtggtccttcctgctgtact

SEQ ID NO: 247648 - DNA, 1105 bp, Homo Sapiens
ccaactttgtacaaaaaagttggcctccaccaaggcgagaagggctgcaggtccagatcaccagcgtttgtagacagtagtgtggcgcttggagtttacctgagggccagtggagctccagggacctatcaggacggggacctgtggggactgggaaggcctgtggggctgcgtggagcccggtactggaggccgacgggggtgacggggacgctgagggcacagagcggaggggcatgatggctgctgggcgtggaggtgtcgagagtgactgtgctggggctgctccatcgttgtctgagcctcccggtgctgccgctgtggccgtttctttgatgaggctctcagaggccgagtcattcactgccggcctgaagctgcccatgcgcatattcgggctggagcctctgaggccacacaaacgccggctggggaggcgaagtgtggggctgagcaccagaactccaggagcgtctgggctggagacagaactgggtgggcaggtggggagggcctgcagatctgagtgggcagccgaggaggaacccagaagacgccagcgatggagctctgccggggcggaatgtggccaggaggggcgggagcagtgacggcctgtccggcgctagaacgagggaccgtgctctcaggacctctggatgttcccgagtatcctgatgttccacccagaagccgccagggccatcctggagtaccgcatccgcacgctggacggggccctggagaacgcccagaacctgggctaccagggagccaagtttgccctgggagagtgcagactccggcctagaggtttgccctgaggacattttcggagtccaggaggtccacgtcgacggggccgtggtgttggccttcgagctgtactaccataccacccaggacctgcagctatttcgagaggctggtggctgggacgtggtcaggggctgtggccgagttttggtgcagtcgtgttgagtggagccccagggaggaaaagtaccaccctgaggggagtcatgtcctccgacgagtaccactcaggggtcaacaactctgtgtacaccaacgtcctgggtccagaacagggtcagacacaaga

SEQ ID NO: 247649 - DNA, 1185 bp, Homo Sapiens
  misc_feature (913)..(977): n is a, c, g, or t
taattttttcatatgatgtatggctctatcatccaaccaaaagctttaaggggagagggattgggaatcttaagtacagggataaccacatgcctgagactggtagaatatgggataaaactgagccaagatcaagaattccaccttccagtgagtcagctgattctgcagagggaaacgcggttccaaccccacgtcatacataacttttgggttgcataagtcatctgtgtacaagagctgaatggctcaagtgacactcactgacactctggggtaaacatgaccattcatttataaggcactttatagttgaaacagaatttttcacacattatcccactaagacttttaagtggcaagaaaagaagagccagatcaaggaaagtcatgcgtgaactaaccactttctggtattatccactgtattgagtggagtttctccccatttgtcttgcttgtagaggacatgtatctgctagctctatgttgctagatgccccaaaaagtatatatctgaatagatgcaatgcatatatgaacccagcatatacaaaatagaaaattatcaaagattgtgggggtttgtaatttctaataattaagagagagggtttacctatatataaggatttcagaatccaccagactggccaggaattttagtattcctgggtggaataatatatggccaactctttactgaatgtggctcgtgagcagaaaaattttaatttggaaaagcttctccaaatgcctagaacgatttaataaacataaatataggacttattatgtgtcaggttctattctagaagtgttagaaatggtaactaaccttaattcttatacctcaggaggtaagaactattactgttctgttacagatgaggaaattacttgttgaatcctnnnnnnnnnnnnnnnnnnnnnnnnnnnnnnnnnnnnnnnnnnnnnnnnnnnnnnnnnnnnnnnnntgtccctggcggtgctgcctgtcagtgctgctggattcctccagcccgagctggcacctgtgcccacaagcagtaggaactcagtaaattacaatgataaacactggctcaagtgaaacgtatccaaggtagtttttgttcattctttccgaagtaaacaatcaaattaattctggattgattaatttttggattgcttattttccaa

SEQ ID NO: 247650 - DNA, 908 bp, Homo Sapiens
aaaacagggaattgcttttaaataacaatctgttacgggttttgccttatgaacttggtcggctcttccggctacaaactctaggtttgaaaggcaatcctttatcacaggatattctcaacttataccaggacccagatggaacccgaaagctactgaacttcatgcttgacaatctcgcagttcatccagagcagcttcctccgaggccatggattacattaaaagaacgagaccaaattctgccgtcagcatcattcacggttatgtgttacaatgtgttatgtgataaatacgctacccggcagctatatggctattgcccatcctgggcattaaactgggaatacaggaaaaagggaattatggaagaaattgttaactgtgacgcagatatcattagtcttcaggaagtggaaacagagcaatacttcactctctttctgccagcattgaaggagcgtggatatgatggatttttttctccaaagtcacgtgccaaaatcatgtctgagcaggagagaaagcatgtagatggttgtgcaatattcttcaaaacagaaaaatttacattggtgcagaagcatacagtggaatttaaccaagtggcgatggctaattcagatggatccgaagctatgctgaacagagtgatgacaaaagataacattggtgtcgctgtggtattagaggtccacaaagaactatttggagcacgtatgaagcctattcatgctgcagacaaacagctgcttatagtggcaaatgcccacatgcattgggacccagagtattctgatgtgaagctcatccagaccatgatgtttgtctcagaggttaaaaacattctggagaaagcctctagtagcctggaagcccaactgcagatcctaattccatcccgctgg

SEQ ID NO: 247651 - DNA, 486 bp, Homo Sapiens
  misc_feature (400)..(445): n is a, c, g, or t
gggaatgtggcctttttagtgtgttttttattgttgttgttttgtaattatcaaacccaggtaagatattggtatcctgcactggattttcaaatgaagttcagcagaagacagttaagattaaagtactatacaaaaatttcaaaagggtccatactacgctatctgtatgacgacacttaggctggggatctctttcagaaactcggactttaaaagcaacttggagcagttgatccacctccacattcaagtaatttatgaatatgcagaatagggatctgttcatctagaaatttttaccatttgtcttctgtgtagctgcaaggaacactaatgtttatacaactgtcagtccacccagtggtgcaactggttctgattcagtcttccgattccnnnnnnnnnnnnnnnnnnnnnnnnnnnnnnnnnnnnnnnnnnnnnngtgatcttgattttgatgaggggttggggagtggtgttgtt

SEQ ID NO: 247652 - DNA, 986 bp, Homo Sapiens
ttggcttatttctgatggtcccttctcagtaaatgaacaacaggatctaccacttttggcagaagtcatcccagatccctatgtaatgagtcttcagaatctgatgaaaaagtcaaaggaatatatagaaagagaacaatctagacgcagtctgagaggtagtatgaacagaattgttaatgagagtcatttagacaaagaacatgatgctgttgaagtggctgactgtgtaaaagagaaaggccagttgacaggcaaacactgtgtctcagttattcctgacaaaccaagccttaataaatcaaatgttcttctccaaggtgcttccactcaagcaagcagcatgagtatgccagttttagctagcttttcgaaagtggacatacctatacgaactggccatcccactgttctagagtctaattctgattttaaagttattcccacttttgttaccgaaaataatgttatcaaaagtcttacaggttcatatgccaaattacctagtccagagtcaagtatgagtcctaaaatgcaccgaagacgttccaggacatcatcagcgtgtcatatacttataaatagcccaataaatgcctgtgaattaagccctaaaggaaaagaacaggcaatggacttaattattcaagatactgatgaaaacacaaatgtgcccgaaattatgccaaagttaccaactgatttagcgggagtttgttcaagcaaggtttatgtgggcaaaaatacatctgaagtcaaagaagatgtggttttaggtaaatcaaatcaaggtatgtcaatcttcaggaaatcatttagaaaataaagttactcatggacttgttactgtggaaggtcagttaacatccgatgagagaggcgcacacataatgaacagtacctgtgctgcgatgccagagctgcatgaaccatatgccagcagtcagtgtatagcaagtccaaactttggaactgtgagtggactc

SEQ ID NO: 247653 - DNA, 1108 bp, Homo Sapiens
ttggcaagagagggggcgagcgaccgagcgccgcgacgcggaagtgaggtgcgtgcgggctgcagcgcagaccccggcccggcccctccgagagcgtcctgggcgctccctcacgccttgccttcaagccttctgcctttccaccctcgtgagcggagaactgggagtggccattcgacgacagtgtggtgtaaaggaattcattagccatggatgtattcatgaaaggactttcaaaggccaaggagggagttgtggctgctgctgagaaaaccaaacagggtgtggcagaagcagcaggaaagacaaaagagggtgttctctatgtaggctccaaaaccaaggagggagtggtgcatggtgtggcaacagtggctgagaagaccaaagagcaagtgacaaatgttggaggagcagtggtgacgggtgtgacagcagtagcccagaagacagtggagggagcagggagcattgcagcagccactggctttgtcaaaaaggaccagttgggcaagaatgaagaaggagccccacaggaaggaattctggaagatatgcctgtggatcctgacaatgaggcttatgaaatgccttctgaggaagggtatcaagactacgaacctgaagcctaagaaatatctttgctcccagtttcttgagatctgctgacagatgttccatcctgtacaagtgctcagttccaatgtgcccagtcatgacatttctcaaagtttttacagtgtatctcgaagtcttccatcagcagtgattgaagtatctgtacctgcccccactcagcatttcggtgcttccctttcactgaagtgaatacatggtagcagggtctttgtgtgctgtggattttgtggcttcaatctacgatgttaaaacaaattaaaaacacctaagtgactaccacttatttcttaatcctcactatttttttgttgctgtgttcagaagttgttagtgatttgctatcattatattatacagacttttaggtgtcttaaattgatactgttcttacgaataatgaccgtatcgtgaaactttgttaagctatatttatacttaagaatttgtggagctgaaactatacacctat

SEQ ID NO: 247654 - DNA, 894 bp, Homo Sapiens
  misc_feature (251)..(272): n is a, c, g, or t
ccaaccccggcccgccaaccaacgaagcaacacacggccgtaagtaaacgagcgctggcgtggcgtttttccgcacgaggtttttttcttagccttgagtgaccaagaagaatttgcttgaggcaaattgtggcaaatattttcccagacaggggaagagtcctgcagattacagattactggtgttttcatgccttgaggattcttttatttttacataggggtctaagtgaccaatggattgttcatannnnnnnnnnnnnnnnnnnnnntattattcagaagtgaccttagtattacttcactattctaaacacattgaagacactcacttcatgtggacttggagctacagaccttttacatccatcacagattggctggacgggttgcaattgctatgcacagcctgattggcactgcaggtttttagagccattttgagtttgtgttgtttaggaggtactgagtcaatgatgagggaggtatgcctgaccagagtgggactctcagtcatagatccacctgcaagtctctgtttcctttttgtgttttgttgcttttgaacataaaaccaaccatacataagcagcgccaagtggattaactgggcttagagcattcaacatattgacttaaccacctgacattcacagtgtcttgtttcctagcaacagatgcaaagtgataaaatcaaaattagtctgaggctacagattttacagggtatttgttctatagcacaaagtatttccccactcttgcgtcacagcacaaactaccaaattttaattattggattccagcaataatttttaatggttttcaaactggcggaattttgacagtgctagttcgagtttgaagcttttgaattagatctctaaatgctga

SEQ ID NO: 247655 - DNA, 1062 bp, Homo Sapiens
ttgggatcaagctgccgcagtcggcctgcaacaactacagcatcgcgccagatgagcaatttggggcctggttccgggccgtggagcggctcagcgagactgagagctacaacctgtcgtgcgagctggagcccccatccgagtcagccagcaacaccctcaggaccaagaagaacacagccattgtcaagcgctggagcgaccgccaggcccccagcactgagctcagtaccagtggcagctcccactccaagtcctgtgaccagctcaggtgtggcccctacctcagcagcggggacatcgctgacgcgctcagcgtgcactcggccggctcctctagctccgacgtggaggagatcaacatcagcttcgtcccggagtctcctgatggccaggaaaagaagttctgggaatcagcctcacagtcatccccggagacctccggcatcagctcagcctccagcagcacctcgtcctcctcagcctccaccacgcccgtggctgccacacgcacccacaagcgctctgtctcagggctctgcaactccagctccgcgctgccgctctacaaccagcaggtgggcgactgctgtatcatccgcgtcagcctggacgtggacaatggcaacatgtacaagagcatcctggtgaccagccaagataaggctccggctgtaatccgcaaggccatggacaaacacaacctggaggaggaggagccggaggactatgagctgctgcagattctctcagatgaccggaagctgaagatccctgaaaacgccaacgtcttctatgccatgaactctaccgccaactatgactttgtcctgaagaagcggaccttcaccaagggagtgaaggtcaagcacggagccagctccaccctccctcgcatgaagcagaaaggactcaagattgccaagggcatcttctgagggcatcctcccagggtctggctggctggtagccaagcacttatggaccagagtggcccaggccagctgggcgccttcctcccacctgccagcccagggtaccccagactccagtttcatccgt

SEQ ID NO: 247656 - DNA, 866 bp, Homo Sapiens
aggcccccgaccccccaccgaattgtcccagccccttcctggggacaaaaccagagccctaggctggcaggacccccctgaccaggtggacccgcccgtccgctcacagcctgccaggccaaggagagttgagacactgtcaaggtgccggagaaggcccaccagtccccagcatgcaggtggcaaatgccactccaggcacttctgtggccccggctggcccccggcagctccaggacccgaagccatgggcctctgcccgccctgggctgctgccctaacccagccactcaggacaggatggtaccttttctccacactggtcacagggtcagccccacttctgctggccggcgtcctccttcgtgacagcttcctggcactggcgctatgctcgggctgtgcatcctccctgtgcggactgcccccgccggcgctgctgaggccccggagcacgctataattgatcttgctggagatcttcttctgctccagcatcttctcgatggcctccctggcggtactggcctgaattggctcccgtcgcttgcaagacttcttgggcttgagggaaacaagcaagaatgcctcccgtgagtcacgcccactgcactccaccatcaggggctccacgtgaggccaggagtgcaggcgggtgaggcctggctcaggccctcagaagggccgctcctgcctcctccccccagaatgtgggccagcctggtgctctctgggcctgcccacgtcaaatcctgccctcccaggtgagtggggcacgtggcctggcatgggtgctggcagggcctccagacagcaacagcagcaaacatgccacaggtgctcagggccctgctgcccctgggtcc

SEQ ID NO: 247657 - DNA, 929 bp, Homo Sapiens
ttgggactgttaccccaaaaaagtttactattaaagctcaatatgaagccagcgaggtgaaattttagggattttagatgtatctgaagctacttctcagcaatatctccccagcctcattcttttcctgttgtctctttatttccagaaggcactggtgttattaaaattgtgtgttggaaggtgtttttctgttttctgaatcttctttctctggaaaatcatatgtaattgctttgtgaagtcttactttgttttctctcagagactggtgaactagagaatgctgagtctggaggagacggaggcaggagaggagggaagcaggataacgttgcctggtggaggcggatgcagaaggggggacttcccctgggatgacgaggatttccgcagtctggcccttttgggggcaggcgttgccatgggatttttctacctctattttcgagatcctggaagagaaatcacgtggaagcactttgtacagtattacctggccagaggtctggtggaccggctggaagtcgtgaacaaacaatctgtgcgtgttattcctgcccctgggacctcttctgaagtgaggggtgaatttaagacgtagctgggtgcgaagaatcaaattggaaattatggaatttgtgaatttcctgaagaatcccaagcagtatcaggacttaggagcaaaaattccaaagggagccatgctcactggtcctcctggtaccggcaagacccttcttgccaaagcaactgcaggggaggccactgtgcccttcatcactgtgaacgggtctgagttcctggaaatgtttattggcgttgggccagcaaggggttcaactctgccaccaacgtcgtggtgttggctggcaccaaccgccctgacgtcctggacccggccctcatgcggcctggccggtttcatc

SEQ ID NO: 247658 - DNA, 228 bp, Homo Sapiens
  misc_feature (88)..(88): n is a, c, g, or t
tgagggtcgcccacccacctgtgtgttgccctctgtcctggcggggaaacatacaccccttgtctcaccaccaaccttgcttgtgtangtcagcagggctggccctgccccaaggactcactgcatgtacccggacccctaggcctggcctttgcagcatagttgggagcttctggattccatctgcacctgtgagccccatgctggctgtgcactgcgcgggcctga

SEQ ID NO: 247659 - DNA, 1219 bp, Homo Sapiens
aaacgttttctatatagtaaagtgctttaggcgggatgtgcaggggatgatgataaccattgttattactattattatggaagaagtagtgggagcttggggggtctggtgaggctagaagcaggggacattctagataggaggggagagggagaaagagcctggacgctgggtgggccagaggagaagaggctgggtgatgaaaccataaaagtgcatgcgggtggacatgatggaaccatgtcagcaagggtgtaagagggtcaagtctttgggcccttggccttgtcacatcggaagccaaccggtagacgagtgcacctggggacacctagaggtgggacccatcttgagttcatagaaagcaagacctcttagaggtcagcctttggtgggaaataaactgggggaaagggctggcacagggtcagaggattggattctgatgtctcgtgtgtgcaggcctaagagccactgatgcaccaaaatgacttgatttgcattccaatgaagtcatcattccaaaaggggctgatttggctctggaaagaggtgagacataagaaacatgaggtttcccagtttagggccatcatgccaactggtcccccatttccgccaaccaactgatgccaaccccatggacccaagccaagtggtctatgggggattgagccccgagggttccttgggactttggttgaagagagagtggagatgtggaaaacagaaagaaggataaaggaggagaagaagggcatagcagtaaaaggcagagaggcaggaggaagggggagaacgggggatctggtgaggctagaagcaggggacattctagataggaggggagagggagaaagagcacgtgggctttctccccagctggcccaggtatgaagcagaaggggaaggggaacatgtttctgcttctctctcacccattcataccaggcattagcaccttaaaattatgtcctgaagaaaaatgcttctacaaatatgtgctgctgtggcatgtttaatctcatagcagattttatttcatgaataaaaaactttcacaactgaatataaatatttcttcttgtctatagtcatttacaagtagaaatattatagtttctattaaataagatacttgttaattcaagttgcctcacttacaaaaacattcataatgtcactcaacaagaaatgctcactagcccattaggtgcca

SEQ ID NO: 247660 - DNA, 408 bp, Homo Sapiens
  misc_feature (65)..(74): n is a, c, g, or t
caggaggcccagaaggagcccgttggggtgtgcctgtatggtgggagcaaagcttttctcatttnnnnnnnnnntggctagtgtggttaatttcagctgtgtccagaactttccagaaatagcctaaggagctgggctgagcactaggcttctggcttcctacttttagggcctctgaaactgacagttgggttcgatgatgatttcaggtcactgaacctaggctcactggcgcaggatttgagggatggcctgcaggtgtctttagtctgttacaaacattgaactttgttgaagaggcggctttgagatcacatttctcaaaataagtggccttcagacattgtgtgaacatggccgactgtagtctcccattaacccacccccgcttaccaaaggaacggaaat

SEQ ID NO: 247661 - DNA, 397 bp, Homo Sapiens
  misc_feature (252)..(252): n is a, c, g, or t
  misc_feature (272)..(272): n is a, c, g, or t
  misc_feature (318)..(318): n is a, c, g, or t
  misc_feature (322)..(322): n is a, c, g, or t
  misc_feature (358)..(358): n is a, c, g, or t
  misc_feature (365)..(365): n is a, c, g, or t
  misc_feature (381)..(381): n is a, c, g, or t
tgtcgggggagtgtgaaagagttctatgcgagcgttgaatgggaggatgacgtgagtcaggaccgacgcgatgttgttcgaggactaccgctctacaagcaaggggcatgtcacggcgagaacgctgtgaagctgtcatccaacgagaaccctttcgaaccactgccgagtgtggtcgaggccgtcacccgcacactgccgaggttcatccgttacccattaatgagtgccgaggaagtacgctcgaccatngccggtcacttcggcgtttnacgtgagccaggtggcggtgggggctggatcgacggaggtagccantcanctcatgcatgccttggctggtgccggtgactagatnatctttncgttggcggtccttcnaggcctacccgatcct

SEQ ID NO: 247662 - DNA, 396 bp, Homo Sapiens
cccttctctggtctgaagaagggggtccttgtaaaccccgtgtttgtggtagtcgcctctttgttagtgtacgttgttcccggggtggagaccggggtggccgtggatccagtgaatgcagtcgtagtggctgttgtggtcagctctgtgaggatccaggtcgtccccggagtgaaggagggcatggccgtagagctggtggccgggccaccacacccacagccaccagttccaaagccacttcctcctccagtccaaggcctgcaaccacccttccagtgctgacaagcacagccaccaaatccacagctaccagcgttacacccatcccctcctccacccttgggaccaccgggatcagggtttcatcactataccatatttaaggcgttctgg

SEQ ID NO: 247663 - DNA, 942 bp, Homo Sapiens
  misc_feature (917)..(917): n is a, c, g, or t
ttggccatgccctacgtgaagtggatgatgggggccgaggagctcaccaaggaggatgagatgccagttggccgcaacgtcctggagctcagcaatgtcgtacgctctgccaactacacctgtgtggccatctcctcgctgggcatgatcgaggccacagcccaggtcacagtgaaagctcttccaaagcctccgattgatcttgtggtgacagagacaactgccaccagtgtcaccctcacctgggactctgggaactcggagcctgtaacctactatggcatccagtaccgcgcagcgggcacggagggcccctttcaggaggtggatggtgtggccaccacccgctacagcattggcggcctcagccctttctcggaatatgccttccgcgtgctggcggtgaacagcatcgggcgagggccgcccagcgaggcagtgcgggcacgcacgggagaacaggcgccctccagcccaccgcgccgcgtgcaggcacgcatgctgagcgccagcaccatgctggtgcagtgggagcctcccgaggagcccaacggcctggtgcggggataccgcgtctactatactccggactcccgccgccccccgaacgcctggcacaagcacaacaccgacgcggggttcctcacgaccgtgggcagcctgctgcctggcatcacctacagcctgcgcgtgcttgccttcaccgccgtgggcgatggccctcccagccccaccatccaggtcaagacgcggcagggagtgcctgcccagcccgcggacttccaggccgaggtggagtcggacaccaggatccagctctcgtggctgctgccctcctcaggagcggatcatcatgtatgaactggtgtactgggcggcagaggacgaagtccaacagcacaaagtaaaatcgaccnccctgcagggttttccatgtctcgg

SEQ ID NO: 247664 - DNA, 940 bp, Homo Sapiens
ccgcgattccttcctctactcccgtgctcccgtcgcccgccatcctgagccatcccccctgcaaccttctgtcttttgcccctccttgacctcagagggtcctgccttaagcttctcaccagaatctcctagatttctatctcttccctgcttgccagctcttgactcccaaattccagctgacgtttgaccacttgacatttgaccctgacacccttgactgcaaatctaaattcttatcttctgcaacctgtactgctgaaacaggccttccccctgtcttccaaccccgctttctgacacccatttttactttcttactcttgggtcagttcctgctacagctatcccaccatggacttcttgatgagtggcctggcagcctgcggggcctgtgtattcaccaatcccctggaggtggtgaagaccaggatgcagttgcaaggagaactgcaggcccctggcacataccagcggcactaccgaaatgtcttccatgccttcatcaccatcggcaaggtggatggccttgctgccctgcagaaaggcctggcccccgccctcttgtaccagttcctgatgaatggcatccgactgggcacctatgggctggctgaggctgggggctacctgcacacagccgaaggcacccacagtcctgcccgcagcgcagcagctggggccatggctggggtcatgggagcctacttggggagccccatctacatggtgaagacacacctgcaggcacaggcagcctcagaaattgctgtagggcaccagtataagcatcagggcatgtttcgacgctaaccgagattggccagaaacatgggtctggtggggttatggcgtggggctctgggcggcctgccccgagttatcgtcggttcctccacccagctgtgcaccttctcatccaccaaggacctcctgagcc

SEQ ID NO: 247665 - DNA, 355 bp, Homo Sapiens
tacaaaaaagttggcgacccagttcctcctccctgtaaagccctgctgcagtctgtaagcaaggctgcctcctctgcctgtcaaggaacagcctggcaggacaaataaaaattgcttgcctgtctttgggtctactcgtcgtttctcttggctaaccttttattttggtgccaaaacccaggaaggtggtagagttcggcctccctttttctctctttcctaaccaccacccccacttcccttggctgaactcccccttcccaaacctgccaaagacccagaggacttctgggaccctcccattgttggtgacttcatccatcactatagtctgcaaagggacggagtcttgctg

SEQ ID NO: 247666 - DNA, 1027 bp, Homo Sapiens
cctattatagccaactttgtacaaaaaagttgggtggaactgagcacctcccggcccccccagcatctaggaggggtgaaaaaaccaacctatgaccctgtgagcgaggaccaagaccccttgtccagcgacttcaagaggctgggcctgcggaagccaggcctgccccgagggctgtggctggcgaagccctcggcgcgggtgccgggcaccaaggccagccgaggcagcggggctgaggtcacgctcatcgacttcggtgaggagcccgtggtcccggccctacggccctgcgcgccctccctggcgcagctggccatggacgcctgctccctgctggacgagaccccgcctcagagccccacgcgggcactgccccggcccctgcaccccacgcctgtggtggactgggacgcacgcccgctgccccccccgcccgcctatgacgacgtggcccaggatgaggatgactttgagatctgctccatcaacagcaccctcgtgggcgcgggggtccctgccgggcccagccagggccagaccaactacgcctttgtgcctgagcaggcgcggccgccccctcccctggaggacaacctgttcctcccgccccagggtgggggcaagccgcccagctccgcacagaccgcagagatcttccaggcgctacagcaggagtgcatgaggcaactgcaggctccggccggctccctggccccctctcccagcccggggggtgacgacaagccccaggtgcctcctcgggtacccatcccccctcggcccacgcgcccacacgtccagctgtctccagcccccccgggcgaggaggagaccagccagtggcctggacctgcttcccctccccgggtgcctccgcgggagcccctgtcccctcaaggctcgaggacacccagccccctggtaccacctggcagctccccgctgccaccccggctctcaagctcacctgggaagaccatgcccaccacccagagctttgcctcagaccccaagtacgccaccc

SEQ ID NO: 247667 - DNA, 578 bp, Homo Sapiens
cgtcatcgaggtaaaagatggatcaggaaggtgggggagatgggcagaaggccccgagcttccagtggcggaactacaagctcatctgtggatcctgccttggaccctgccctgcgcaggccttctcagaaggtgtaccgctatgatggagtccacttcagtgtcaaggattcaaagtatataccagtcgaagacctccaagacccccgttgccatgtcaggtccaaaaacagagacttttccctcccagtccctaagtttaagctggacgagttctatattggacagattccactgaaggaagtgacttttgcaaggttgaatgacaacgtgcgggagaccttcctgaaggatatgtgccgtaagtacggtgaggtggaagaggtagagatcctccttcacccccgtacgcgcaagcaactgtgcctggcccgtgtgctcttcaccagcactcgcggccggccaggaaacgggtcaaaaacttccaccttacctctgtcatgggcaacatcatccatgcccaaggtttgcatcaaaggacaccaacgaatgaatactatgactaattgtcaatggct

SEQ ID NO: 247668 - DNA, 884 bp, Homo Sapiens
  misc_feature (290)..(290): n is a, c, g, or t
  misc_feature (293)..(293): n is a, c, g, or t
  misc_feature (323)..(323): n is a, c, g, or t
  misc_feature (604)..(604): n is a, c, g, or t
  misc_feature (856)..(856): n is a, c, g, or t
agaccgaccccagcaacgagctcaccatcacggcggacgagccagctcctgatggtccacctcaggaagttcacctggagcctatatcatctcagagcatcagggttacatggaaaggctccccaagaaacatttgcaaaaatgggattatcccgtgcctaccaaataggttaccgagagtacagccactgggggtaacttccaattcaacattatcagtgtcgacaccagcggggacagtgagttttacaccctggacaacctgaataagttcactcagtacggcctgntgntgcaggcctgtaaccgggccggcacgggcncttcttctcaggaaatcatcaccaccactctcgaggatgtgcccagttacccccccgaaaatgtccaagccatagcaacatcaccagaaagcatatcaactatcctggtccacacttgtccaaggaagccttgaatggaattctccaggggttcagagtcatttactgggccaacctcatggacggagagctgggtgagattaaaaacatcaccaccacacagccttcactggagctggacgggctggaaaagtacaccaactacagcatccaggtgctgnccttcacccgcgcaggagacggggtcaggagtgagcagatcttcacccggaccaaagaggatgttccaggtcctcccgcgggtgtgaaggcagcggcggcttcagcttctaatggtctttgtgtcctggcttccccctctcaagctgaacggcatcatccgaaagtacactgtattctgctcccacccctatcccacagtgatcagcgagtttgaggcctctcccgactcgttttcctacagaattcccaanctgagtaggaatcgtcagtacagcgtct

SEQ ID NO: 247669 - DNA, 643 bp, Homo Sapiens
  misc_feature (494)..(509): n is a, c, g, or t
acggcacacacaggacttgagatggagatacaaggatagcctccacacatcatttttacaaagttcaaagtagattacatttatgtgcttgtcattcattacaccatgtacagacatgatccgtttaatgacttaggctcctcacatggttaaacagtgaggatttcctatggaagactagacatagaagtttttagaagcagagactgttttctgcctaaacccacctcaggcatacatttgtgtttacatatattccttgagaatactacagtagcagtgcataagttcattctgtaaaaagatctgaaagatgatgtttcaagagactcgatacattgtgctttcaggtaaaaatccttagacaaaagatcagttactatgaaaataacagttaaaactgcatatgtgttagagatcagaagaggctataaagaaatgtaaatagttgtgcttaggggacttttttggcaaagttgtcttaataataaatnnnnnnnnnnnnnnnngtctcagtgactgatataaaatagacatagctatcaagagtttcttacacttggcttagagtttaaaggtgaaaaatcatctccacataaatcacctggtatctggtaatcccagtctgggtaagtcagtactg

SEQ ID NO: 247670 - DNA, 567 bp, Homo Sapiens
gctcgtacccccgcccctcactacctccacccctcacacacctatggtcctagaatccttaagagaagcaccctgtaaccttttatgtggtttgcctttaagaggcccaggtgcttctcctttatgatttgagttggcctcttcataaattagtgctgtttactttcagaggaagcagagaagttgctgttatgtttttgcatccgtttaccctatgcaaagttgctgtatgatgccaactaaactgctctttaggcagccttctgaggagaaaagcaaccctgtttcaaatccactgccaattcagctcctctggagtggagctttctgatttcttggagcaggaattttagagattgaaatgaatgatcatttagtcagatttatcctgtaatttcatgcagctttgtggcctttgcagtactatttataaaatggaccctgatggtgatgaactctttagaacgcattactgttaagcctgtgttgagacattgatgctgtctatctcattttttagacagtttttgtagctttctattgagagtcaggtatgtgaggggctgg

SEQ ID NO: 247671 - DNA, 1480 bp, Homo Sapiens
  misc_feature (60)..(60): n is a, c, g, or t
ctactgatttttaccacacccaagattttttggaatggaggagacggctcaagagtttanccttgcgactggcccagtatccaggtcgaggttctgcagaaggttgtgactttagtatacaatgtggagaagtctgaggctaattcccccaataggatatgcatccctcatgcatgaataaataagagtgatcacaggctgtcattgattaagactactagacattttaaaggaagcggaagaaagacagtctcaggaataggtcgaactgaagagacaatatacctgcagcaaacagctacaggactgtttaaagccaagcaagtgcagaattcagtttttcttctttcggggacgtggcctgcatggctatctgctcctgccagtgtccagcagccatggccttctgcttcctggagaccctgtggtgggaattcacagcttcctatgacactacctgcattggcctagcctccaggccatacgcttttcttgagtttgacagcatcattcagaaagtgaagtggcattttaactatgtaagttcctctcagatggagtgcagcttggaaaaaattcaggaggagctcaagttgcagcctccagcggttctcactctggaggacacagatgtggcaaatggggtgatgaatggtcacacaccgatgcacttggagcctgctcctaatttccgaatggaaccagtgacagccctgggtatcctctccctcattctcaacatcatgtgtgctgccctgaatctcattcgaggagttcatcttgcagaacattctttacaggttgcccatgaggaaattggaaacattctggcttttcttgttcctttcgtagcctgcattttccagtgttatttgtacctgttctacagtccagccaggactatgaaggtggtgcttatgctgctctttatttgcctgggcaacatgtacctgcacggggctgaggaacctctggcaaatccttttccacataggagtggcttttctgtcttcatatcagatactaacaaggcagcttcatgagaagcagtctgactgtggagtatgaggatgacactgtgatgaatggattctttgattttcttttgaggatcaatctatgtttctctttctgcttctctactttacactccagtttccatccttttcagccaactggactgaaaaaccaggaatcggggatgttaaacagttgcagtggaagtcatgaggttgcttgatacccagccttggttctgtgccaagcattactgcaggatctccagccagttcagcacgtttaccctaggacagctggatctgggggctcatccaggaaagagctttattcggaagagagcaacaggacatatttgggtcttccacgttggaatgatccagtaaaccacttggatcaataacactggttataaggccattggagaagttggctccaaagggaaccacttttacaattccga

SEQ ID NO: 247672 - DNA, 615 bp, Homo Sapiens
gtgtgcggagatgaggtctcgggccatggctgaagtggggaccatcgtgggacaaagtgaaagaagtcctccttccaggcacagtggctttcagcagagtttgacctgggatttctgtcatgggtgtccctctgtactcagaattgggttcaggccaagtcggtgaagatggatgtttgcaaaaataggaggataccctcatttgctgaatggggggacctgctctgagcctgcccaggggccaggcctgctccaggttaaactggacggaaaggcccaggtctcagtttctttcaaccaggagaggccgctgcctagagcccctccgcacctgtttcctggatgggttgatgcaagccaggaggagcaagcagtgttgtcctcacgggaggaggactgagcgactgggaaaactcggctctacatctcacccagaacggcttttagaaacaccacagctggagagtcctggctgagccttgggagtttcagctctttgggcggggtgcccaggtgccatgcgatcagcgaagcctgcgagttggcaggactctgaggtttcctgcagaccatgccatgagattgaaggtatgtgagggctcggggatcctctaa

SEQ ID NO: 247673 - DNA, 364 bp, Homo Sapiens
  misc_feature (82)..(82): n is a, c, g, or t
gggttctgtgacccatctgtagtaatttattgtctgtctacatttctgcagatcttccgtggtcagagtgccactgcgggantctgtatggtcaggatgtaggggttaacttggtcagagccactctatgagttggacttcagtcttgcctaggcgattttgtctaccatttgtgttttgaaagcccaaggtgctgatgtcaaagtgtaacagatatcagtgtctccccgtgtcctctccctgccaagtctcagaagaggttggggcttccatgcctgtagctttcctgggtccctcacccccatgggccccaggcccacagcgtgggagacttcatttttcccttgtgtcaagacatttctct

SEQ ID NO: 247674 - DNA, 982 bp, Homo Sapiens
ttggctccttttataattattcactgctttttgtcagtgaaatagacatcttgcctcctgaagtagcttcatcacagagtgtcatgaagacagacagtcaggctgaaatggacagttctttgtggactctacccttcccttcaaggagtatgtcatatatcacaaaagaaattgccttacactggttcacgtttgcagttactgttgtacattgcatagatgtacacacgaatttaaatgtgatgtctttgtatatatctgtataatgttgagattacttacgaaatatgtctgagtgacacttttcacccttgtacagccaaaataatgtatatatggaaagtgacagacaaattctctaatctctttggtatctataacttattagaatcctctggatgagggttagaagagactttttccaaacttctacatgtagaagtatcataaatgtgctacacatttatgtttgtggatttaattaaagtattttaatatggttttcagtgctaaaattggagtcagatacttcttggttttaagctgtctacctaattgctgtctcccagcagactggtggcatgcccagtggctttgggggcaaggatagaaatgccatcaggaaatagctgaattcattgtgaaacatgaattcagtcatggtgataattggaaactcctttcaggtttttgcaagtagattttgtaatgtttgtgtatgcagccttgctgttgagtcagtccaaggggttttacttaggacaagttgtaccttgccctctctccagctctgctcccacattttcacatacctagctgtttctacctcattgggtaagtcatttaccactctgtgcctcagtttactctgtagtttaccattagactgtgagctccttgagggactttgtcataatcactgttacatcccagtgcctcacaccatgcctggcccttaagaagtgctcaataaatgtctgaa

SEQ ID NO: 247675 - DNA, 1743 bp, Homo Sapiens
  misc_feature (639)..(680): n is a, c, g, or t
  misc_feature (1453)..(1453): n is a, c, g, or t
ttgggttagcagttgcgtaaagaaggactggggcagatgaggattcaggaagcttgaggtttaggaaggaagatattgagagggaaaggtggaaatgaaggagagtgaagtgatggaatgatcctagtaaagggataatgggagtggaggaagagaagagggggtggaaaactagatacatggctaccaaattaaggaggcacgcgcattccagaggaatcggcattcttcctcactttttatttttctagaaagcacccctgaagccaaatttccattggaagaaaagatgtacccatattgtatgttgtgagaaggggttgtctcagcttgggcaagtaaggagactgatacgaaggaagtaggaaagaaaaggtacagaggtaaaagagcatggaaaaggaaagggtcagggataaggccaaagagatctcttctctttaaaggccagagaaggcaggtggaggggggagctggactgctgggagatagtgagggacaaagggcaaaggaaaccagaccagaggactggagagtgagatggagtgagatggagtcctggagagaaacagaagagaggtgaaacttaaatgcttgtcatatggtgggcagaatggatttgtggccaggggcatggannnnnnnnnnnnnnnnnnnnnnnnnnnnnnnnnnnnnnnnnnccaccctgtggttctgcagccccagtgccaagtacttcttcaagatggccttctacaatgggctggatcctcttcctggctgtgctcgccatccctgtgtgtgccgtgcgaggacgcaacgtcgagaacatgaagatcttgcgtctaatgctgctccacatcaaatacctgtacgggatccgagtggaggtgcgaggggctcaccacttccctccctcgcagccctatgttgttgtctccaaccaccagagctctctcgatctgcttgggatgatggaggtactgccaggccgctgtgtgcccattgccaagcgcgagctactgtgggctggctctgccgggctggcctgctggctggcaggagtcatcttcatcgaccggaagcgcacgggggatgccatcagtgtcatgtctgaggtcgcccagactctgctcacccaggacgtgagggtctgggtgtttcctgagggaacgagaaaccacaatggctccatgctgcccttcaaacgtggcgccttccatcttgcagtgcaggcccaggttcccattgtccccatagtcatgtcctcctaccaagacttctactgcaagaaggagcgtcgcttcacctcgggacaatgtcaggtgcgggtgctgcccccagtgcccacggaagggctgacaccagatgacgtcccagctctggctgacagagtccggcactccatgctcactgttttccgggaaatctccactgatggccggggtggtggtgactatctgaagaagcctgngggcggtgggtgaaccctggctctgagctctcctccatctgtccccatcttcctccccacacctacccacccagtgggcccctgaagcagggccaaaccctccttccttgtctcccctctccccacttattctcctctttggaatcttcaactttctgaaatgaaatgtggataccagcgccactcctgcccccctcttgggccccatccatggaactctttggcctccggggcaatcctcccactctttggacccccaccctccctaatgggtcttgggcctgtgggga

SEQ ID NO: 247676 - DNA, 821 bp, Homo Sapiens
  misc_feature (453)..(461): n is a, c, g, or t
tatcccgtacggtgtccagaaattatggggcaaggtggtgggacaaaaaatgtggggcccggctccttggggccggaggtgagccagagggaatgtggcaggtgtaaaagatcatgtttgggggggtgaaaggccagggtttccccccaggaagaagggggagggtaattggggcccctggggaaatgctttagaagatgagggcttggggcccccagcctgtaaggtccggcccctttcgttttttcgtttagcccctttaagtccttaggtaatgggctttggtgggagaaagggggatagaaaggcccagtggactttcaagacaggagcttttttcttggcaagatggcagggcggggccctcctccccaggctgctccaggacaggggggtttggggaatggggggccgccttgcagccccttcctgttggggctccctccttgtagnnnnnnnnnttggcgggttgcaggttttggtttcttctcccaggctcacccaggctctgctcaggctgggaggcagagggcacaaaccttataattttttaaatgaaaaaccgctgctgctggctgtggctagagccccctggggctgctggagctgctgcctctgttctggaggacgagccttctccttatctgctgcccatctttccaggaagtcaggatggagtcagaacaactacagtcatcccccgtggtgtctgcacatcactccagccccataaagagtgtcatgttagctgagtcaccatttggcttcggcctggaaatagtgtgattagaacactgatcgtgtgcgaggccaggagatca

SEQ ID NO: 247677 - DNA, 1074 bp, Homo Sapiens
  misc_feature (460)..(472): n is a, c, g, or t
acccacgcgtccgggtttgaattttctcggagaaagacaggccggccacgaggaaaacagaaacaagccgcagcaacatctaagcccttgaaaggatcctgagagaggggggaaagggaaaacagcagccaccagcccaaccacttgtgtcttctgccccttcccacctatcttgcccaccccaccagcccacgctgcttgggacttgaaatctgtggccgaaggaccgtcactacataacttcaaaaataatcaaccaccctcccttcccaaaccacccaaattcactcatccagcgtttacttttttgaatccactcagaacttttttctgcgacccccctccctaaatggagttgggtgggggggaaatgaatactgagttggcctttattttttaaaagactttttgatccaatgaggccccctaaataattgagttttgggtcctggttggttgnnnnnnnnnnnnncctccaaaattttaccccctcccccctgagcccgaggtgctgacgtcgcaaaaaaattggataaaaccaccatcatgggttcgggtcccatagaccccaaagaacttctcaagggcctggacagcttccttaaccgagatggggaagtcaaaagtgtggatgggatttccaagatcttcagtttgatgaaggaagcacgaaagatggtgagtcgatgcacttacttgaacattctcctgcagacccgttcaccagaaatattggtcaaatttattgacgttggcggctacaaacttcttaacaattggctgacgtattcaaagacaaccaacaacattcccctcctccagcaaattctactgaccctgcagcatctaccgctcactgtagaccatctcaagcagaacaacacagctaaactggtgaagcagctgagcaagtcaagtgaggatgaagagctccggaaattggcctcagtccttgtcagcgactggatggctgtcatccgctctcagagcagtacccagcctgctgagaaagataagaagaaacgtaaaaaatgaaggaaaaagtcgaactacccttcctgagcgacctttgac

SEQ ID NO: 247678 - DNA, 1151 bp, Homo Sapiens
  misc_feature (444)..(489): n is a, c, g, or t
  misc_feature (602)..(622): n is a, c, g, or t
  misc_feature (1032)..(1109): n is a, c, g, or t
atcccccccttggtttcttttaagccgaaatttgggaccaatcccttatatttcctttttttaaccggaagggaaattaagccaaacaaaacccgtttttttcccattcctttctcgggtccagtcccccttcttattttaatttatttattgaattgccatatacgggccagttaaaactgctgccgaccagtaacatatcccggatgagggtttcgatgggggttttacctgccaaacgggcgaaaaacaattgctctatgactgaggaggagacggtgcggagggaagggaggcgaagcaaaagctttccgaatctcgtcggctggttggggtactggctcctaacgtattcttccaaagcacactgagacttttcgtgcaagctttccacatgggctacatcagagagaccacaggcatctggaagaaagtttaaaaacnnnnnnnnnnnnnnnnnnnnnnnnnnnnnnnnnnnnnnnnnnnnnnttcagtcatcagattaagaggtttgaattgggtcacatgaggtgtgtgcacagagctctgtcaaactgccccaaccggagttggagcaaatgtctatgtactgaaaacttaannnnnnnnnnnnnnnnnnnnnaagaaagagcaagagatggtcctgaggaagtgtttgctttaaaataaaacatagctcagtgtgctacaggctttcactgcccgagtccttagcctgggtcattgagaggcccaagcaaaagtgcattgggtctgtctggcccaagtcagtaaacagaagaaaccaaaactaccagcactctctcccctcctcctctgtaaataatagtttggcttataattatataggggttgggggttgggggtggacaacctggcccagtcccgagtaatggcgtccacgatccagcctcagattccccccaaagagggcgactcatttttctccagtctttgaaactgatttaagtggccctttaaaactgatcttgtcagtttagcctattgaagggcagccatgcaaaccgtgannnnnnnnnnnnnnnnnnnnnnnnnnnnnnnnnnnnnnnnnnnnnnnnnnnnnnnnnnnnnnnnnnnnnnnnnnnnnnaaaacccaggtccctccgagaagcatcccccctccctgccaa

SEQ ID NO: 247679 - DNA, 658 bp, Homo Sapiens
ttggccttggaggaagctggggaaagtggttagggagggagaggaggaagactgagaaatctctgcatccccagaactcagcaacccagctcttttatcatgaggagaggtagccatgctgactcatgaacaggtggaggaaaggggttgcaggtgaccagcatcttcaatctagttaccaccagcttggctagaattttattgaacgcaacttgctagttatgacagagaggaccagggtgagaactaatgctcaagagagcaagattctgtaatcctcttgccctctcacatcacaaattctgatatgccaaacatttggcccaatgagaatgactgatagacttgctgatgtgcatgtggggggatgaggtgtgtatatgcctttctcctgactggccattcagtgttcaggctgtcattcaaattggataggagaaagttggtgaggaaggaatggagagagcaggatccctggactccctggtccccaaactccttgactgtcacttgtaattgtatataatttttgtgtttcttgctccatttcctcatgctgtcatccttaaagtccatctgggaaggggaaaatgctgaacaccattgtatagtttcttcaactgtcccagccatgttgtacatagatatgtcatgttat

SEQ ID NO: 247680 - DNA, 1030 bp, Homo Sapiens
ttggctaaagttgtacttgtttctagcaaactagaaggaaaagataggaaagcctggcactactaacctcacctctcatacacctctttgaaggccccagctcttttgttcaggcctctcttctcccctagactcactcagcttggtatccatcatcttgagcattcttcagtagattcatctagggttcagattccagactctcagctgaagacagggagccaatttcccccaggtccctgcaggtaatccagggaccccatagggagaacaggctgactggggcattaggaatgtttgtacctctctgcttccctggcagcctggggaagggtgcagggctcagtgcgctaaaccatggtaaacatcttcaatagaactaccctagaatttagtgagtgtgagactgagatattgctcagaataaatttattccatagccatttaggattgcatgttctggaccaaccttgtccagtatgttttctgtttgagctttttcattcttttgttaagccaacaagttgagaatttggccctgctgggatccatgtagtgggcactagctgctctttggccaaggccttcataaatgattcagtctctcattatctgtcctctagccccacaccctgatttagaccgtggcaaaggaagaacttgaggtcaagaccaaccaaatctgtgaattaaagctgttatttttttctctgcaagggcgctttgcttcaggtctgggctatgtgcagaacctaagcaggctgtgagagttagaagaggcagtattacatgttaggcccagaacaccatgggaaaaggtttatgtagtgtatcttagtggcctgcctagctgcctctgggccaggctgacttctgatgtccacattagctcgtacctgaaccctgttgctgaatgccagccctgttctcctgtaactattatatacgccatggcctggggggcattgaaggaagtaagctctcagagatcctaacactggctgggaacctctgactcagagcatgtctt

SEQ ID NO: 247681 - DNA, 409 bp, Homo Sapiens
  misc_feature (258)..(266): n is a, c, g, or t
  misc_feature (347)..(347): n is a, c, g, or t
  misc_feature (355)..(355): n is a, c, g, or t
  misc_feature (379)..(379): n is a, c, g, or t
  misc_feature (384)..(384): n is a, c, g, or t
  misc_feature (394)..(394): n is a, c, g, or t
taaagcagttgcacaaaaagcaaaggtgttttgacaaacaggtgtatgcatttattcctttttaggaacaatatctaaaaaaagaaccgccctctgccctcccccaaaaaagacaaagattcacacagacacatcgggatatatgtacaacgtaataaaccccatcctaaagaagcaactgggataacccccagggggttacagaatcaggaattgtaaaaatcatagtgaagtttgcttgctgtaaagcctgagaannnnnnnnncagttggttcttctgcaaggctgtgaagagccggccttccatgtctcccaggcagggtatcttgaggcctttaggggtccncttgattntgggcacacaaatcgtggcttttncttgnattgataggnagggggcaattagcc

SEQ ID NO: 247682 - DNA, 1316 bp, Homo Sapiens
tttttgggataaaatttttgaatttatgttcaacatgtttcctgcagatttagtggaggaaaaatccacacatacccccatcccaatcccccagattttcttcaacatgccgcttctgttcttggaagagttaactgcctcgattctgcataagagtcccaaacactgagaactagggtgtcttccccttcctttccttccaaaaaggccagcagcctcaagcaagccaaagtcctttcctcttgaatgcgtagtcttgtgaactccactgtcttcacaaactcagcagctggtggaagctctctgaagaactgagacaggaggtggcactgctctgacaccatcctttgaaggtgacagagcatctcagggcttgggggacgccagccggactttgagaggagacagaagaggtgcttgcagaggtatttcacaaagatcagggtctcggcccaaaagttgacttctgctttttcaaacaggtagtcttcttccaactaaatcagatgaaaaagccgaaagtcagtcttacagggaatggtgacaagccccagtccagaccaagcagtaccctgccagatgcaagagggtttcccttcccccacgtgacagagggtgcactcttgcctgtcaacatccatgtacacacaccacttgcagccttgaaggtcaccttctattttcactcactgtatttctccaccagagaggaattttttccccagacttaacatgaccttggataaagatgtgtttgtggttcaaagtcaagatactttgggggatggatgctgaaaaggggacttcaacaagggagtgggctctagagtttaaggtgcagctggaaattggagaggagggaggaaaggtcatctctgcagcaggccagagaggaaggaatctccaaacacaggacactaggctgtgtcctgtttctataacactgtgattctcaaggtccttttgtcagacacttaccatgtctccaaatttctcataaagagggacaatgcgttttgaacccttggcctgctggggatgccaagaaggccagctgagtcagatgctggtggcgatcaatttcagttctcaggatgcttttgctgcttgtctttgtcctcagtttccctatctgtgactgcacccaccctggagggggctaataatagttttcttcaagcaggaagttcccagcaaagatcctaattctctgaaaatgcttcaccctcagacctaactttgggaagccccaggctaactccaatactgactaacaagcagtctccataataaaactctccgcatccaggggcttc

SEQ ID NO: 247683 - DNA, 941 bp, Homo Sapiens
  misc_feature (667)..(697): n is a, c, g, or t
acattggtaaaaattcaagattttaataacattcctttgcaagacatttggtataaggtggttaataaatattaggaaacaaacactgtaccaaaatggatatgacttgtgaataaaccctaaataaagtggcttttggaagaactggattttgcagcaaccaactttataaagaggtccatccgctctcaatggaaaacacccaagcataccattcactaggttcggatatcaccataatataatgaattcttagagtatggggtttgatttatgggcaaccccagtacaatctaggagcccaacatgatgaaaaatactgaaagaatgcttcaccatccctcaggccattacatttccaccttatcctactcttgtattaggatatatgtatacaaatgtcaactactaatgtagttaaatttcaggagaagcatgcttaaagatacacaaggaatgtttagccttagtttttgatagtattatccaaagtgtgagttgaaagaaattaagcaaataatgttaacaaacgaaagacagatacacagcattagtgggggtataaaaacctcacctttcaattaacttgaataatgttctattttctattctacaactgagcgctagggagctaaactatttgtgaattacatcttctttaagaagnnnnnnnnnnnnnnnnnnnnnnnnnnnnnnntattcaacccctctatgcagccaaaaaccaatacaagtccttttctaaaagactttaaaggtgattaatattcatttaatgctcttaatgtatttggaaatcagaaaattatttttcaccacagattccaaagaacttcaaatagagctcaatttagtagaaagaattggtgtacctgaaagcatttaacccacacattttcaataaaccctacatcttacctgcaagattcatatcatgccaa

SEQ ID NO: 247684 - DNA, 2158 bp, Homo Sapiens
  misc_feature (677)..(693): n is a, c, g, or t
ttggccaccttcctagagagctgcggggtggccgacctgatcaccacctgttacggagggcggaaccgcagggtggccgaggccttcgccagaactgggaagaccattgaagagttggagaaggagatgctgaatgggcaaaagctccaaggaccgcagacttctgctgaagtgtaccgcatcctcaaacagaagggactactggacaagtttccattgtttactgcagtgtatcagatctgctacgaaagcagaccagttcaagagatgttgtcttgtcttcagagccatccagagcatacataaagtgaatcatgcaacgtgttgggggaagttctgcctttctgatcaatcttttgggttcacgtggaaaccaggacttggcaacatgatgtttgactgtaatctcatcacggatatgtatgaatttttacaggttcgtttttgaattgtgagaggcagttcattagcaaagatgtactgggcagtaactaaacacacatgcaaacatgtgaatggtggtttattcctcattctgtggatgtttctatgagccaaaatttgatgtctttttttcaaaattgcttatgaaatttccacacaatcgtagcttataagattggaacgatctcagccaaatattttaggtgtaattcatatgtatttgagtggaggannnnnnnnnnnnnnnnnctagtgttaaattttaaccagcattaacatggtagagtggaggagtgagtgtgttcaaagatcaacatatttaacttttaaacactatctcaaagccagcataattaactactttgattgtgggctgacctttgtttttttaacaatcaggcatttttaattagataatccactcatgtatttccccctcactgcagttgtctgcatttttagcctcttttctcttcgttagttgtcagaatatgcctttgtcaaggctcagaggtaacaagacagaaaattcatctgggattttcctgctgtggctggcacattcttctgattaacagacccttgtatgatgctttaggctagttagtgcattttttagcaaacatttatcttaaacatcacagatccactggggggtgcaaggggctactgttagtcctcttgttagatgcagtcactcctcctggtcacctagtgagcagggacagagccaggagtcaagtgcagtgccaaggtgcatgaccctctgagaagtcactgggctgatttgacctccgactcattggttgtgcaaatgccatgtgcagcctttcctgaggccataggagggcttcctgcagctgagatctatgcaggccatcctctcaacaagtgccactccaagggcggtcctcggtgcagcagcatcagcttcacttgtggggggttgggggaaggggcggtctcagaaatgcaggttcccaggtcccaccctggacttctgaaggggtgtggcatctgtgtttctgatgcttactacaatatgtgaaccactactttagaaaatctgctttaacttggtattcctctaattgtgttccctaggaaatgactgtcccaagagccagtgattattccaggtgttccctggaaaggtcaagtgagtctgggaaacactatgtctgtacacctcttgaaggtgtcgaatgtatgtttatacatcagtggaacccatttttctagcctagcaagtcccaaacacattacactgaagagattttggtgaggaaacttgctggagttttcagggaacactgttctaggcttacgtgaccttaggatcactcaagtagacccttcactccctgcgagaaattaggatgaataactacctgtggcattgttggttctgaaacttttacagttcaggcctgctgtgaatcttttgatgaaactttaaggtgacactggtgtacaaaaatgtcacctttgcctgaaaccgcacattacctgggaataagggcttttaattgtagaattagaatggggatcttactggaactgtttttaaaatgaaactgggcttccagaattcctttacaggttaaccttacctagcaacttggatacgtggttaaatggaaactatggaatggtaattttatacaattccccacaaatttcaagatcactctcggtgcgagattttggcgcc

SEQ ID NO: 247685 - DNA, 651 bp, Homo Sapiens
  misc_feature (112)..(112): n is a, c, g, or t
atagcatgatctacctctgacagcaaaccaagtgctgttcttggaaggaattgtagatgtgccaggaattcaagtaaagaggcatccagtgtcgttcatcgatctgttccgnacatagaaggacaaaatgataaactgtttttagagtctaagcccaaacaggaattcctgttgaatcttcattcagaggaaaatattcaaaagccattcagtgctggttttaagagaacctctactttgactgttcaagaccaagaggagttgtgtaatgggaaatgcaagtcaaaacagctttgtaggtctcagagtttgcttttaagaagtattacaagacggaatcgttatatcaatagacccgtggctgaaattatcctgaatccaaatgttggacaaggcagcacaagtgtgcaaacagctatggaaagtgaactcggagagtctagtgccacaatcaataaaagactctgcaaaagtacaatagaactttcagaaaattctttacttccagcttcttctatgttgactggcacacaaagcttgctgcaacctcatttagagagggttgccatcgatgctctacagttatgttgtttgttacttcccccatttcctttgtaccccatttcctattcctaggatcctctataacct

SEQ ID NO: 247686 - DNA, 549 bp, Homo Sapiens; identical to SEQ ID NO: 175946
  misc_feature (16)..(16): n is a, c, g, or t

SEQ ID NO: 247687 - DNA, 629 bp, Homo Sapiens
  misc_feature (174)..(174): n is a, c, g, or t
ggattttgctctgctgtctccatggaaaaagtcaggtctctctgctccctggtgtgtaagtggacatattcagcagagaaaggctgggacgacagtttctggaaaatgattggtttggaagactttgttgcagataattacagcaaaataggaaaccaagtgctacctcctggnagcttctcttggaaatgggctcacaccagaggcagcaagagaccttggccttctccctgggattgcggtcgcagcttcactcattgatgcccatgcaggaggactaggagtgattggggcagatgtgagagggcacggccttcatctgtgagggggcagccagtgacgtcacggctggctgtcatctgtggaacgtcttcttgtcacatggggatcagcaaagacccgatttttgtaccaggcgtctgggggccttatttctcagccatggtacctgggttctggctgaatgaaggtggtcagagcgttactggaaaattgttccgggatacaagtgcagaacctgcagatagaccacatggtacaaggccatgctgcttttccagaactacaagtaaaggccacagccagatgccagagtatatatgcatatttgaacagtcacctggatctga

SEQ ID NO: 247688 - DNA, 1190 bp, Homo Sapiens
ttggctctttttcccccttgcctggctcctgtggtggcaggctgggcacgaggaccatgctgggccggagcctccgagaagtttctgcggcactgaaacaaggccaaattacaccaacagagctctgtcaaaaatgtctctctcttatcaagaagaccaagtttctaaatgcctacattactgtgtcagaagaggtggccttaaaacaagctgaagaatcagaaaagagatataagaatggacagtcacttggggatttagatggaattcctattgcagtaaaagacaatttcagcacttctggcattgagacaacatgtgcatcaaatatgctgaaaggttatataccaccttataatgctacagtagttcagaagttgttggatcagggagctctactaatgggaaaaacaaatttagatgagtttgctatgggatctgggagcacagatggtgtatttggaccagttaaaaacccctggagttattcaaaacaatatagagaaaagaggaagcagaatccccacagcgagaatgaagattcagactggctgataactggaggaagctcaggtgggagtgcagctgctgtatcggcgttcacatgctacgcggctttaggatcagatacaggaggatcgaccagaaatcctgctgcccactgtgggcttgttggtttcaaaccaagctatggcttagtttcccgtcatggtctcattcccctggtgaattcgatggatgtgccaggaatcttaaccagatgtgtggatgatgcagcaattgtgttgggtgcactggccggacctgaccccagggactctaccacagtacatgaacctatttaataaaccattcatgcttcccagtttggcagatgtgagcaaactatgtataggaattccaaaggaatatcttgtaccggaattatcaagtgaagtacagtctctttggtccaaagcttgctgacctccttgagtcctgagggggccaaaagtaattgaagttatccctttctcacaccagttatcaattgtctgctaccatggttttgtgccccttcagaaagtggcatcgaatatggcaagattgatgggctacaatatggtcacagatgtgaccattgatgtgtccactgaagccatgtatgcctgaacagaacgagaagggtttatgatgtggtgagaggaaga

SEQ ID NO: 247689 - DNA, 853 bp, Homo Sapiens
  misc_feature (479)..(796): n is a, c, g, or t
gagggtttatgctctatagtaataaaatttaccagtaacacccaatcagaaaattttggttccttagtatttagggaagacttttgtttaaatctcttatggaattttacatgttttgatttagaaaagtagatgcaatataatatatttcaagttttatacatattagatgaattgcatggtattttaggcaacttaactataaacaaatttattcatagaagcattgttgccaacaatttagatgacctcgatgaaaaaacacaccaattgacaaaactggctcaaaaggaaataaaaaatccaaacagacctgtaacaagtaaagagattgaaccagtaatcaaaaatctcccaacaaagaaagtccaggactaaatgagtttactggcaaactatgccaaacatataaagaagaattaacactaatccttcttgaactctcccaaaaaatggaagagaaaggagcaccctgtgannnnnnnnnnnnnnnnnnnnnnnnnnnnnnnnnnnnnnnnnnnnnnnnnnnnnnnnnnnnnnnnnnnnnnnnnnnnnnnnnnnnnnnnnnnnnnnnnnnnnnnnnnnnnnnnnnnnnnnnnnnnnnnnnnnnnnnnnnnnnnnnnnnnnnnnnnnnnnnnnnnnnnnnnnnnnnnnnnnnnnnnnnnnnnnnnnnnnnnnnnnnnnnnnnnnnnnnnnnnnnnnnnnnnnnnnnnnnnnnnnnnnnnnnnnnnnnnnnnnnnnnnnnnnnnnnnnnnnnnnnnnnnnnnnnnnnnnnnnnnnnnnnnnnnnnnnnnnnaacactctgcaaactaggaagaaaagggaactttcttaacctgataaagacatccat

SEQ ID NO: 247690 - DNA, 1025 bp, Homo Sapiens
  misc_feature (966)..(966): n is a, c, g, or t
  misc_feature (1012)..(1012): n is a, c, g, or t
ttgggcagtccattgagggacttatgactctgtgccaggagcagacatccagtcagccggtcatcgccaaagctttgcagcagctgaagaatgatgcattggagctatgcaacaggataagcaatgccattgaccgcgtggaccacatgttcacatcagaatttgatgctgaggttgatgaatctgaatctgtcaccttgcaacagtactaccgagaagcaatgattcaggggtacaattttggatttgagtatcataaagaagttgttcgtttgatgtctggggagtttagacagaagataggagacaaatatataagctttgcccggaagtggatgaattatgtcctgactaaatgtgagagtggtagaggtacaagacccaggtgggcgactcaaggatttgattttctacaagcaattgaacctgcctttatttcagctttaccagaagatgacttcttgagtttacaagccttgatgaatgaatgcattggccatgtcataggaaaaccacacagtcctgttacagccattcatcggaacagcccccgtcctatgaaggtacctcgatgccatagtgaccctcctaacccacacctcattatccccactccagagggattcaggggttccagcgttcctgaaaatgatcgattggcttccatagctgctgaattgcagtttaggtccctgagtcgtcactcaagccccacggaggagcgagatgaaccagcatatcccagaggagattcaagtgggtccacaagaagaagttgggaacttcggacactaatcagccagagtaaagatactgcttctaaactaggacccatagaagctatccagaagtcagtcccgattgtttgaagaaaagaggtacccgagaaatgaggagaaagaatatcattggtcaagtttgtgatacgcctaagtcctatgataatggtatgcacgttggcttgangaaggtgaccttcaaatggcaaagaggaaccaaattggagaaggcngtatgggaagtgt

SEQ ID NO: 247691 - DNA, 674 bp, Homo Sapiens
gcttttttataatggccaactttgtacaaaaaagttggcgggcagcagacagtggtcagtcctttcttggctctgctgacactcgagcccacattccgtcacctgctcagaatcatgcaggtctccactgctgcccttgctgtcctcctctgcaccatggctctctgcaaccagttctctgcatcacttgctgctgacacgccgaccgcctgctgcttcagctacacctcccggcagattccacagaatttcatagctgactactttgagacgagcagccagtgctccaagcccggtgtcatcttcctaaccaagcgaggccgggaggtctgtgctgaccccagtgaggagtgggtccagaaatatgtcagtgacctggagctgagtgcctgagggggccaaaactttccaaggccaacggacctcagggggcccacgggggggaggagaaggaaccccgaacccttgggaaacctggcgggggcccctccaccaggcttcccctcctcttataagctccctaatttggccccaacaaccaccacctgggggaaatccctctcttaacgctaaaagttctaatttacattcaaaccattcccacgtctttaaaaacatttaatttttcgcacactcacaccaagggcggtcccgcaaatatgggtggtgctcac

SEQ ID NO: 247692 - DNA, 582 bp, Homo Sapiens
  misc_feature (568)..(568): n is a, c, g, or t
agcaatgcttttcctataatagccaactttgtacaaaaaagttggcgaggacccccgcggctgagggtgggcccccatcccagtcccgggaggctgccgcgccagctgcgccgagcgagcccctccccggctccagcccggtccggggccgcgcccggaccccagcccgccgtccagcgctggcggtgcaactgcggccgcgcggtggaggggaggtggccccggtccgccgaaggctagcgccccgccacccgcagagcgggcccagagggaccatgaccttgggctcccccaggaaaggccttctgatgctgctgatggccttggtgacccagggagaccctgtgaagccgtctcggggcccgctggtgacctgcacgtgtgagagcccacattgcaaggggcctacctgccggggggcctgggtgcacagtagtgctgggtgcgggaggaggggaggcacccccaggaacatcggggctgcgggaactttgcacagggagctctgcaagggggcgccccaccgagtttcgtcaaccactactttcttgcgacaagcaaccttttngcaaaccacaaacg

SEQ ID NO: 247693 - DNA, 1285 bp, Homo Sapiens
  misc_feature (980)..(1077): n is a, c, g, or t
  misc_feature (1145)..(1226): n is a, c, g, or t
ttggcgagggactaggacgcggctggagcggcgccgggagacgaggggctgagagacggcggcggccgaaagcggagagatgctgggcgtggcggccgggatgacccacagcaacatggccaacgccctgtgccagcgccacttgcgagcgctgcaagggcggctttgcgcccgctgagaagatcgtgaacagtaatggggagctgtaccatgagcagtgtttcgtgtgcgctcagtgcttccagcagttcccagaaggactcttctatgagtttgaaggaagaaagtactgtgaacatgactttcagatgctctttgccccttgctgtcatcagtgtggtgaattcatcattggccgagttatcaaagccatgaataacagctggcatccggagtgcttccgctgtgacctctgccaggaagttctggcagatatcgggtttgtcaagaatgctgggagacacctgtgtcgcccctgtcataatcgtgagaaagccagaggccttgggaaatacatctgccagaaatgccatgctatcatcgatgagcagcctctgatattcaagaacgacccctaccatccagaccatttcaactgcgccaactgcgggaaggagctgactgccgatgcacgggagctgaaaggggagctatactggctcccatgccatgataaaatgggggtccccatctgtggtgcttgccgactggccatcgatcgggcgcgtgttgaacgctatgggcaaggcagtggcatgtggagcattttgtttgtgccaagtgtgagaaaccctttcttggacatcgccattatgagaggaaaggcctggcattattgtgaaactcactataaccaggtattgaccttagtcactggatgctagatagacttttatgaacctaagcttatcagtagtttagctacaaggaaatctcttggaagatgtacattgttcagtagagatttgtttttaactttnnnnnnnnnnnnnnnnnnnnnnnnnnnnnnnnnnnnnnnnnnnnnnnnnnnnnnnnnnnnnnnnnnnnnnnnnnnnnnnnnnnnnnnnnnnnnnnnnncccaagctcagtcttcctgtgtaaaacacatagttacgtaaatattatatacaagtacgatggctgtnnnnnnnnnnnnnnnnnnnnnnnnnnnnnnnnnnnnnnnnnnnnnnnnnnnnnnnnnnnnnnnnnnnnnnnnnnnnnnnnnnttgtagttatcaatattgataccgtactctaaccatttattccagctcaacttttttgt

SEQ ID NO: 247694 - DNA, 876 bp, Homo Sapiens
  misc_feature (628)..(628): n is a, c, g, or t
  misc_feature (640)..(640): n is a, c, g, or t
  misc_feature (686)..(686): n is a, c, g, or t
  misc_feature (760)..(760): n is a, c, g, or t
tttgtacaaaaaagttggcgtctctcaccattatgaaaaattattgagaagtgggtggactttgccagacgcctgtgtgagcacaagtatggcaatgcgccccgtgtccgcatcaatggccatgtggctgcccggttccccttcatccctatgccactggactacatcctgccggagctgctcaagaatgccatgagagccacaatggagagtcacctagacactccctacaatgtcccagatgtggtcatcaccatcgccaacaatgatgtcgatctgatcatcaggatctcagaccgtggtggaggaatcgctcacaaagatctggaccggttcatggactaccacttcactactgctgaggccagcacacaggacccccggatcagccccctctttggccatctggacatgcatagtggcgcccagtcaggacccatgcacggctttggcttcgggttgcccacgtcacgggcctacgcggagtacctcggtgggtctctgcaagctgcaagtccctgcagggcattggcacggacgttctaaccttgggctccgccacatcgatggccgggaggaaagcttccggatctgaccccaaaagctttggcctgctcacccgaaccancctgggccgcantccctgcaggacctcccgggtcaggcagggcggccccctgctccanaaactgctgcatccttgggtctcagggacccagacagatggacttacatggagctggcactgccctgcctcaanagggtccattgcctcctcgcctccagaacttggagcagggaagtgggcaccctgaggcctccagcaccagttccgtcattctcgttcctgggaacccccactctgacctgttatta

SEQ ID NO: 247695 - DNA, 450 bp, Homo Sapiens
  misc_feature (28)..(28): n is a, c, g, or t
  misc_feature (343)..(343): n is a, c, g, or t
  misc_feature (346)..(346): n is a, c, g, or t
  misc_feature (398)..(398): n is a, c, g, or t
  misc_feature (406)..(406): n is a, c, g, or t
  misc_feature (438)..(438): n is a, c, g, or t
gaagatggtcgcctgcgcattccggganacttgatgggcacctatgtcgccagtgtgctctgcaagagtgtgctagaggcaggcttcctctatggccagtgggcctgtacggctggaccatggagcccgtgtttgtgtgccagcgagcaccctgcccctacctcgtggactgctttgtctctcgccccacggagaagaccatcttcatcatcttcatgttggtggttggactcatctccctggtgcttaacctgctggagttggtgcacctgctgtgtcgctgcctcagccgggggatgagggcacggcaaggccaagacgcacccccgacccagggcacctnctnagacccttacacggaccaggtcttcttctacctccccgtgggccaggggctncattcccnaccatgccccacctacaatgggctctcatccngtgagcagaact

SEQ ID NO: 247696 - DNA, 905 bp, Homo Sapiens
ggggagctgcgcctgcgcaactcattggcgccaagatggcgatggagatgaggcttccagtggctcgcaagcctcttagcgagagactgggccgcgacactaagaaacatctagtggtgccgggggatacaatcactacggacacaggattcatgcggggccatggaacgtatatgggagaagagaagctcattgcatctgttgctggctctgtggagagagtaaacaagttgatctgtgtgaaagctttgaaaaccagatacattggtgaagtaggagacatcgtagtgggacgaatcacagaggttcaacagaagaggtggaaggtggagaccaactccaggctggattcggtcttgctgctctcgtccatgaaccttcctggaggagagctgaggagaagatctgcagaagatgagcttgcaatgagaggtttcttacaggaaggggaccttatcagtgctgaggtccaggcagtgttctctgacggagctgtctctttgcacacgaggagcctgaaatatggaaaactaggtcagggggttttggtccaggtttccccctccctggtgaaacggcagaagacccactttcatgatttgccatgtggtgcctcagtgattctcggtaacaacggcttcatctggatttacccaacacctgagcacaaagaagaggaagcagggggcttcattgcaaacctggagcctgtctctcttgctgatcgagaggtgatatcccggcttcggaactgcatcatctcgctggtaactcagaggatgatgctgtatgataccagcatcctgtactgctatgaagcatcccttccacatcagatcaaagacatctttaaagccagaaataatggaggagattgtgatgggaaacacgcccgaggccttttg

SEQ ID NO: 247697 - DNA, 1276 bp, Homo Sapiens
  misc_feature (622)..(626): n is a, c, g, or t
  misc_feature (628)..(629): n is a, c, g, or t
  misc_feature (631)..(632): n is a, c, g, or t
  misc_feature (634)..(634): n is a, c, g, or t
  misc_feature (637)..(639): n is a, c, g, or t
  misc_feature (689)..(689): n is a, c, g, or t
  misc_feature (894)..(1022): n is a, c, g, or t
  misc_feature (1088)..(1119): n is a, c, g, or t
ttgggtccatccgagttcctgggaagggaaatagaggacatgggcgtgaggcttcaagggtgggttggtttgatctgagcacatcaggtagctcttttgacaatggcccttcaagtgcctctgagttggcatcccttgggggtgggggcagcggaggcctcactggctttaaaacagcaccatacaaggaacgggcacctcaatttcaggagagtgtcggcagctttcgttccaacagtttcaactcaacatttgagcatcatcttcccccatccccctcctggggaacatagcagcagtggtgggagtggtgtccccttttctactccaccccctcctccaccccctgttgaccactctggagttgtacccttcccagccccaccactggcagagcacggagtggcaggggctgtggcagtatttcccaaggaccatagttccctccttcaagggaccctggctgagcattttggggtactcccaggacccagggaccacgggggccccacccaacgggacctcaacggccctggccttagccgtgtacgagagagcctcaccctaccctcccattctctggaacacctgggcccaccccatggaggaggaggtgggggannnnncnncnncngcnnnggcccccccttgggccccccgcgcggagagcccatcagcccggcacggcngcggccgccggcgcccccgggccgactgccggcccagggcaccggttctgcccagacagccctgcccccgcttaccgagccccccgccccctcgggcccgccgccattcgggctttgggccccaacggcagctctccacgccacggcgcccacgggaccgccgcgcaccggatctgcgaacatccgcccctatcctcgcagccannnnnnnnnnnnnnnnnnnnnnnnnnnnnnnnnnnnnnnnnnnnnnnnnnnnnnnnnnnnnnnnnnnnnnnnnnnnnnnnnnnnnnnnnnnnnnnnnnnnnnnnnnnnnnnnnnnnnnnnnnnnnnnnntcgctgctcatcctgcgccctccattgctccgcgccccaccccccgttccgctattttatccgctnnnnnnnnnnnnnnnnnnnnnnnnnnnnnnnngccggttcgccctcgtgcgtgcgcgcgggtccatgcggtcccgcccgcccccatcccgactacagatgcgccgcgcgccgggcgcggcgatattcgcccccctgatcggcccgcgcgcagtctgcaacccccacacacataatcatcggtcagttcc

SEQ ID NO: 247698 - DNA, 409 bp, Homo Sapiens
  misc_feature (25)..(25): n is a, c, g, or t
  misc_feature (48)..(48): n is a, c, g, or t
  misc_feature (54)..(54): n is a, c, g, or t
  misc_feature (62)..(62): n is a, c, g, or t
  misc_feature (88)..(88): n is a, c, g, or t
  misc_feature (140)..(140): n is a, c, g, or t
  misc_feature (154)..(154): n is a, c, g, or t
  misc_feature (192)..(192): n is a, c, g, or t
  misc_feature (258)..(258): n is a, c, g, or t
  misc_feature (362)..(362): n is a, c, g, or t
ctggaaccaaaaggccagggccatncaaaatggaggcctctgggagcnacctcnaaaccctnacccactcactcaaccagtggcaaantgtccttgtgccccaaactgagccagcaaatcctgctgtccaaacccaaaanctacctggaggganaggacccacctcccatcttcggaaggccttcctggaancccatcttgcctccgccctcggttccgccccgcccctctccccccgaccttggggcttgtgtcgancccttgggtggggccaggaggaggtgatggcgtcagaggaggtgtggtcagaggtgacttgttcccacctccagggaggacgcttcgtcttcggccagcgcagncctggtgtttgtttgttgcggtcacgcttgcacaatgaaggcttaaa

SEQ ID NO: 247699 - DNA, 403 bp, Homo Sapiens
  misc_feature (277)..(277): n is a, c, g, or t
  misc_feature (290)..(290): n is a, c, g, or t
  misc_feature (371)..(371): n is a, c, g, or t
  misc_feature (377)..(377): n is a, c, g, or t
gcaggagctggggagtgggagcctatgaccccacgtctgacagccatgtccacctgtgcccacagcttccgcccacagacctccagggacaggagcaaattgcaccacagctccccgcctggcctggccctccccaggcggctcagtggctcatgctgtcctgtgagagcccctgccccagagcggccccactaagcgcatgtggctcctggggctacccacagccagggcagcctgctgggagccacagggccagggcatgcagatgggaagcctnttggagccacctncaattccttaccatttacttaaaccagttggcacagtgttctttgttgcccacaatttaggccagcaagttcttgttgttncacaanccacaaagttaattgggaggggataa

SEQ ID NO: 247700 - DNA, 837 bp, Homo Sapiens
  misc_feature (764)..(764): n is a, c, g, or t
acactgtcccctacatggtcggaattaacaagcaggagtttggctggttgattccaatgttgatgagctatccactctccgaagggcaactggaccagaagacagccatgtcactcctgtggaagtcctatccccttgtttgcattgctaaggaactgattccagaagccactgagaaatacttaggaggaacagacgacactgtcaaaaagaaagacctgttcctggacttgatagcagatgtgatgtttggtgtcccatctgtgattgtggcccggaaccacagagatgctggagcacccacctacatgtatgagtttcagtaccgtccaagcttctcatcagacatgaaacccaagacggtgataggagaccacggggatgagctcttctccgtctttggggccccatttttaaaggagggtgccttcagaaggggagatcagacttggcaagatggtgatgaaattctgggccaactttgctcgcaatggaaaccccaatggggaagggctgccccactggccagagtacaaccagaaggaagggtatctgcagattggtgccaacacccaggcggcccagaagctgaaggacaaagaagtagctttctggaccaacctctttgccaagaaggcagtggagaagccaccccagacagaacacatagagctgtgaatgaagatccagccggccttgggagcctggaggagcaaagactggggtcttttgcgaaagggattgcaggttcagaaggcatcttnccatggctggggaattgtctggtggtggggggcaggggacagaggccatgaaggagcaagttttgtatttgtg

SEQ ID NO: 247701 - DNA, 757 bp, Homo Sapiens
ttggctaaagaagcacgcatttgtgcacacgggccacaagccctttctttgcactgagtgtggcaagagctatagctcagaggagagcttcaaagcccatatgctgggccaccgtggggtgcggcccttcccctgtccacaatgcgacaaggcctatggcacccagcgagacctcaaagagcaccaggtggtacattcaggtgcccggccctttgcttgtgaccagtgtggcaaggcctttgcccgccggccctccctgcggctgcatcgcaagacccaccaggtgccagctgcccctgccccttgcccatgccctgtgtgtgggcggcccctggccaaccagggctccctgcggaaccatatgaggctccatacaggagaaaagcctttcctgtgcccgcactgtggccgggcgtttcgtcagcggggcaacctgcgtgggcatttgcggctccacaccggggagcgtccttaccgctgcccacactgtgccgatgccttcccccagctgcctgaactgcggcgccatctcatctcacacaccggggaggcccacttgtgcccggtgtgtggcaaggccctccgagacccaacacgctccgagctcacgagcgcctgcactccggagagaggccctttccctgtccccagtgtggccgtgcttacacgctggcaccaagctgcggcgccacctcaaatctcacttggaggacaagccctaccgtgccccacctgtggcatgggctacaccctcccg

SEQ ID NO: 247702 - DNA, 643 bp, Homo Sapiens
ggatagcaccgtttattaagaaaaatcaagacaaagaccacaggagggtcccttctaggacacagaggccaggcgtcccaaccccacagtctgggggccactggcaggatggcacttgagctggatcttcaggctcctgcagatggggcagggtggtcatatccccctcctctctctctcagtcgtgagtcctgccttcccccacctaaggcactagctcttcctgagcaccagcggcatccgtccgtccgttgtcttttggaggagtccctgggccttcacttccagatgggtggggatgtggcctggggtgggcggggcccggtgggcggggccctatcagtgctgggctctgcctgtagcagctcctggtaagagttggggtgggccttcccttacagcccctgagggagggaccccaggctgtgtgctggcaggagggggtgggaatgcaggccaggaggacgtggtaggagggggagtctgccagaggaggtgccaggggctgggtggaggtgggtgggggtgctgaaaaacgagctggtggggatggggaccgcctgcccaggggtgagctgccttttgctccacagccggcactaaagacaattcccaatcctgagtgggtgcagagactcctgcg

SEQ ID NO: 247703 - DNA, 616 bp, Homo Sapiens
  misc_feature (20)..(20): n is a, c, g, or t
  misc_feature (59)..(59): n is a, c, g, or t
  misc_feature (63)..(63): n is a, c, g, or t
atcctgaattgtcacaaatnccccaccaagtaatttcagcataaagcaaaccaaatggncagnacgcaaatgatgttagtaccttgtagtttacttcataatacataacctctaatccatgtccatcttcttgtttctgcttttaattctgccatttcctcttaaaatttagggtttaacaaagacaacagggctgtttgccaaatcgcagctattaattcacagcatagaaaagtcaaagctatagcaaaaaattgctaatctgcacaactttaaaaaatagttcagtacatttttgttataaaattcatttacaggaggttattcacatgtacttgtcaaatttactcctgataattcacaaaaacatacaactcaacaaactgtgcacaataaatccaaggcaaattatatacaaagagacaaaacaagcttttaagtagcacatattcatttgaaataactaatattgaaagaagacagggaactttcttttaatgccatggcaaagacgaagcgaagagccacacttcacaccttgtaaaaagaatagccctgttcaacaacgctgcgctgacagccacatcaggaggggccacggtgaacataggaaatg

SEQ ID NO: 247704 - DNA, 932 bp, Homo Sapiens
  misc_feature (693)..(737): n is a, c, g, or t
ggaagtggtgatctttattttagggattgtgcatcttcagtgtaaccctcaccctggcaagacattaaacagcgtaaacacattcctcagcacgccagtcacattccaggagcctcttggagcttgacttatacacacgcacacaggcgcaatatctgcatttaacagccctttgctggcagcacacacaggaaaagcacgacttcagtcaccctcaaaccacccagttatgagtaagaccagaacaatccctttcctccgacagtcccacgtttgcttcccaggaatcaaagagcatgccagtggcagctatctgtggcagttttgggaaagtgaaaggagatgctattccagcactgctctgtcaccttagatgatgggtttaggaagccagaggcagggatttcaggggaaaagaaacaggcctggtttattctttaattctttaaaaatgggataggagcaaaaggttaaaatatgtgggtttcacacaggaaaggccttttgaagaagaaaaatgggtgaattcactggagttggcccagctaggggttgggtctcaggtgacagaggccggggattcagactcaaaggggccagtccataaaggtggcagtggggtcttcaaaccactgtttttattccagaagcctactgaaaatcattgtatatttgctttccataagactaggnnnnnnnnnnnnnnnnnnnnnnnnnnnnnnnnnnnnnnnnnnnnnggctagaattgcatcgtaacagtgtggtcacactggtaagaaatgcagattggcaatcatgtacatctctgattaaaacaacactcacataaccaacacaatttgctaggccaaagtcttcacgggcaatccctggggtgggagtctgggatggggtggataatgaaggatacctggggttgcagaagtggggtg

SEQ ID NO: 247705 - DNA, 346 bp, Homo Sapiens
  misc_feature (198)..(198): n is a, c, g, or t
cagagttgccctttatttttagattcttaaatattctagaatgaggtaaaacgagcctgccagtacaaagtgaaaattctacatggtgcatctttggcgcttcatgcatgattatttcaatgaacctcttcctggtcactcttaagatagatctgagtttttgactcgccagtcaagggctttggcgacactcaatgnacataatattcttggaaaaagcagtagcatttctgacttttcatattcagctcggaggtgtattgtctcggggctcctgtgcagtcgagcgccacggctgctcattggatgaaccaggatgggtccttggcaattttcgggttctcgg

SEQ ID NO: 247706 - DNA, 810 bp, Homo Sapiens
ttgggtgatcttctctccccgatcctctacgtcattcagaacgaggtggatgctttctggtgtttctgtggcttcatggagctcgtgcaagggaactttgaagagagccaggagaccatgaagcggcaactcgggcgactgctgctgctcctgagggtgctggaccccctgctctgcgacttcctggattcccaggactccggctctctcttcttctgtttccggttgctgctcatctggttcaagagggaattccccttcccggatgtccttcggctgtgggaggttctgtggacagggctccctggccccaatctgcacctgctggtggcctgcgccatcctggacatggagagggacaccctcatgctgtccggcttcggctccaatgagatcctcaagcacatcaacgagctgactatgaagctgagcgtggaggacgtgctgacccgcgccgaggccctgcaccgccagctaaccgcctgccccgagctgccccacaacgtgcaggagatcctggggctggccccgcccgcagagccccacagcccctcgcccaccgcctccccgctgcctctgtcgcccacccgggccccgcccaccccgccgccctccacggacacagccccgcagcccgacagcagcctggagatcctgcccgaggaggaggacgagggcgccgactcctaaccccgccaggcagcctcgttctgcacaggcactttagcccgagccaggcacacctgcgagggggcaggtgtgctccgccgccctgctgataagctggcttcattaaactgacacttctca

SEQ ID NO: 247707 - DNA, 421 bp, Homo Sapiens
  misc_feature (375)..(375): n is a, c, g, or t
gaataaaacatctgttttaattggccagtaaaatacattgcaaatcattagtattttataaacagaaacattaagttataaatccatgttaaaaattgcagctcagtgcagccccaacagctgtgtgtccaaaagtctatttttacaacattttcctccagtatttttgtgacaagaaagttcctatctgtcatctagatcaagagcctgaactacagtattttcaaacaagaaccgggagaagtcggtacaaggatacgtcgtgctgtgtatttaaacggcgcttcccacacacctgccgtctgcatcccgggaggacgccctttgggaaaggcctcctcggcagtgtgaggtctgggaggggtctgcctgggnccccatttttagggtgctcccctccccaattaaaacagcagccccc

SEQ ID NO: 247708 - DNA, 418 bp, Homo Sapiens
  misc_feature (151)..(151): n is a, c, g, or t
  misc_feature (173)..(173): n is a, c, g, or t
  misc_feature (243)..(243): n is a, c, g, or t
gcctaccctcctacccaggagcaaattcctccctgccctaagccccccccaagtagctggaacctaccaggcctcatgcccactgcgccccagcctaaattttgtaatttcccgtagagaacggggtttcacccacattcgtcaggttggngtcaaactcctgactttgtgancccacccgcctcggcctccccaaagtgcctgggattaccaggcatgagcccatcacaccctggtcaactntcttttgattagtgtttttgtggtatatctttttccatcatgttactttaaatatatctatattattgtatttaaaatgtgtttcttacagactgcatgtagttgggtataatttttatccagtctaaaaatatctgtcttttaattggtgtttagacaatttatatttaataaa

SEQ ID NO: 247709 - DNA, 492 bp, Homo Sapiens
tcagtgcagtgtgttatcctttaatgaaaagctgggtcaatggagtcaccactctccccaagacccccctgcagcagatagccctcaccatggctacctatgaggcagggcagccctgtggcagccagccctgctgaggggtcagtttgtagtggcctaggagaggcgttcaactcttagacctaggatgtggcagcagcaacaaggccagaggcagctcaactgaggtcagggatggtggaggaggcagacaggaagcatggggctctcctccttcctctccgaatcccagtgtggccaaggccagtgttcaggaacagtacagtctccccaggggcctggagtctcttccagccactctctggaagcccttagtccccaactccctgcagaccggtgtcacagggtcgctggactcggggagcaggctgggtactaccccatgagccttgaggccccgggtctagccaacttttttgtacaaagttcttt

SEQ ID NO: 247710 - DNA, 720 bp, Homo Sapiens
tcgcccatttatatggaaactttcatactgatatctaaaggtatagaaatagtaattggatagtctagcacttcatttcttatacctttagataatcagtatgaaaagttcccatttataatggaaatgaaaattcttaactaaactatatatgtaatatgtatttctagaagagaataaaaacccaagtcagttattagatttaaatcaccttctgaaatgctgctatagggctggtatctgtaaaagaatatcctgatgcatctgtttcaccattttgatttttaaagtatgctgtagcatttcttaataacatcgttgtgatgttcttaaggcagatctttcttcataaaaaggaaagtaatggcaatttctctcctgtggaaatcccaattgcttgaattactgatattttagaatagactttttaaaatgccatatgtaattttatgcaagttgactatatatcttgtacttaataaattataggctcattttgttctctgctagtttaaagtaattcgtttaataatagatgtgtttttagaggaaatgctgttacttggaattaattttccagttatacagtcttctataacttactaataatattctatatgtactttatgtaatttccctaaaaagaatgaactaccactacactatggtgttaaaccaaaatatagggaaaataaacactaactgctgcctctggaacct

SEQ ID NO: 247711 - DNA, 705 bp, Homo Sapiens
ggacgcgtggggtctcctaacacaaagtaccaggtcacctggtacacatcttggagcccttgcccagactgtgcaggggaggtggccgagttcctggccaggcacagcaacgtgaatctcaccatcttcaccgcccgcctctactacttccagtatccatgttaccaggaggggctccgcagcctgagtcaggaaggggtcgctgtggagatcatggactatgaagattttaaatattgttgggaaaactttgtgtacaatgataatgagccattcaagccttggaagggattaaaaaccaactttcgacttctgaaaagaaggctacgggagagtctccagtgaggggtctccctgggcctcatggtctgtctcctctagcctcctgctcatgctgcacgggcctcccctccaccctggacccgctgtgtttttgcctggtcatcctgagcccctcctggcctcagggccattccatagtgctcccctgcctcaccagttcctcttcgctcttccaggttcttcctgcagaggcttctttctggcctccatggctatccatccacccaccaaaaccatgtttgcccaagttgaatctgatgatgaggaagcaaagaatgagccagaatggaaaaaacgtaaaatttgaagaatctcatttgagagctgtttgcatgagtgggaggggtatgggacaggtttggg

SEQ ID NO: 247712 - DNA, 938 bp, Homo Sapiens
ttggctcaactgcaaggacgctgtaagcaggaagagaagccacagcgcttcagaaaagagtgggacagggacaagcatatctaagaggctgaacatgaatccacagatcagaaacccgatgaaggcaatgtatccaggcacattctacttccaatttaaaaacctatgggaagccaacgatcggaacgaaacttggctgtgcttcaccgtggaaggtataaagcgccgctcagttgtctcctggaagacgggcgtcttccgaaaccaggtggattctgagacccattgtcatgcagaaaggtgcttcctctcttggttctgcgacgacatactgtctcctaacacaaagtaccaggtcacctggtacacatcttggagcccttgcccagactgtgcaggggaggtggccgagttcctggccaggcacagcaacgtgaatctcaccatcttcaccgcccgcctctactacttccagtatccatgttaccaggaggggctccgcagcctgagtcaggaaggggtcgctgtggagatcatggactatgaagattttaaatattgttgggaaaactttgtgtacaatgataatgagccattcaagccttggaagggattaaaaaccaactttcgacttctgaaaagaaggctacgggagagtctccagtgaggggtctccctgggcctcatggtctgtctcctctagcctcctgctcatgctgcacgggcctcccctccaccctggacccgctctgtttctgcctggtcatcctgagcccctcctggcctcagggccattcacagtgctcccctgcctcaccgcttcctcctcgctcttccagacttcttcctgcagaggctcctttctggctcatgggtattcattcacccaaaggacccgtgctccagcttggttgccctaacctggctttccatttccc

SEQ ID NO: 247713 - DNA, 398 bp, Homo Sapiens
  misc_feature (195)..(224): n is a, c, g, or t
  misc_feature (355)..(355): n is a, c, g, or t
  misc_feature (380)..(380): n is a, c, g, or t
caaatttatattttttaatatcggggggtggaccacgccgccctccatccgtgctgcatgaaaaacattccacgtgccccttgtcgcgcgtctcccatcctgatcccagacccattccttagctatttatccctttcctggtttccgaaaggcaattatatctattatgtataagtaaatatattatatatggannnnnnnnnnnnnnnnnnnnnnnnnnnnnnagcgcttctgcagcctcggcctaggtcacgttggccctcaaagcgagccgttgaattgggaaactgcttctaggaaactctggctcagcctgtctcgggctgacccttttctgatcgtctcggcccctctngattgttccccgatgggtctctctncctctgtcttttcttcct

SEQ ID NO: 247714 - DNA, 953 bp, Homo Sapiens
  misc_feature (40)..(40): n is a, c, g, or t
  misc_feature (265)..(265): n is a, c, g, or t
  misc_feature (272)..(272): n is a, c, g, or t
ctgtgacatttttccggagaagatttcagagctgagggantggtacccccaaccccccaatatttttggactggcagactcaaggggctggaatctcatgattccatgcccgagtccgcccatccctgaccatggttttggctctcccaccccgccgttccctgcgcttcatctcatgaggatttctttatgaggcaaatttatattttttaatatcggggggtggaccacgccgccctccatccgtgctgcatgaaaaacattncacgtgncccttgtcgcgcgtctcccatcctgatcccagacccatttccttaggttatttatccctttcctgggtttccgaaaggcaattatatctattatgtataagtaaatatattattatatgggatgtgtgtgtgttgcgtgcgcgtgagtgtgtgagcgcttctgcagcctcggcctaggtcacgttggccctcaaagcgagccgttgaattggaaactgcttctagaaactctggctcagcctgtctcgggctgacccttttctgatcgtctcggcccctctgattgttcccgatggtctctctccctctgtcttttctcctccgcctgtgtccatctgaccgttttcacttgtctcctttctgactgtccctgccaatgctccagctgtcgtctgactctgggttcgttggggacatgagattttattttttgtgagtgagactgagggatcgtagatttttacaatctgtatctttgacaattctgggtgcgagtgtgagagtgtgagcagggcttgctcctgccaaccacaattcaatgaatccccgacccccctaccccatgctgtacttgtggttctctttttgtattttgcatctgaccccggggggctgggacagattggcgatgggccgtcccctctccccttggttctgcactgttgccaataaaaagctctt

SEQ ID NO: 247715 - DNA, 265 bp, Homo Sapiens
gcagcttttctctcccctccctgtacgtgtcgcagctgcagtgacatgtatttagaaagtgctgtgcaccagctgtgccatgttctatacctgaggctggctcaagccggctgccttcaccgggagccacgccgtgcatggcagccttccctggacgagtgctcggtgttcacactgaactgtggggtcgacgggaggggtgccttttacatgttctattttgtatcctaatgacagaatgaataaacctctttatatttgcaaa

SEQ ID NO: 247716 - DNA, 443 bp, Homo Sapiens
  misc_feature (68)..(68): n is a, c, g, or t
  misc_feature (76)..(76): n is a, c, g, or t
  misc_feature (120)..(120): n is a, c, g, or t
  misc_feature (178)..(178): n is a, c, g, or t
  misc_feature (266)..(266): n is a, c, g, or t
aggtcaggaccaagccctggcctctccccaaatcccccaacctcctccctgggtggctgcctgaatanccctcagncagggcctctcaatccttgtgggtctgtgtcacctccatctcantcttggcctggctatgaggggaggaggaatgggagagggggctcaggggccaataaantctgccttgagtcctcctagcctgtgtgcaaaccacccaagcccaccctgaggcccagagccccacagccccactgtggccgcttgancccccacgccaaccccctggcccattgacccgcctcatctgttcattcacttatctaagctgagggtgtagcaggtaagatgccgcagcccctgcctccaatgtgctggttcagccggggcagtgcccatgtgaatctggcaaggtgtttaacagtgtgggcttgaaagtccaaacc

SEQ ID NO: 247717 - DNA, 722 bp, Homo Sapiens
  misc_feature (700)..(700): n is a, c, g, or t
ttggcatgaccccgctccgggattatggccgggactgggctgctggcgctgcggacgctgccagggcccagctgggtgcgaggctcgggcccttccgtgctgagccgcctgcaggacgcggccgtggtgcggcctggcttcctgagcacggcagaggaggagacgctgagccgagaactggagcccgagctgcgccgccgccgctacaaatacgatcactgggacgcggccatccacggcttccgagagacagagaagtcgcgctggtcagaagccagccgggccatcctgcagcgcgtgcaggcggccgcctttggccccgggcagaccctgctctcctccgtgcacgtgctggacctggaagcccgcggctacatcaagccccacgtggacagcatcaagttctgcggggccaccatcgccggcctgtctctcctgtctcccagcgttatgcggctggtgcacacccaggagccgggggagtggctggaactcttgctggagccgggctccctctacatccttaggggctcagcccgttatgacttctcccatgagatccttcgggatgaagagtccttctttggggaacgccggattccccggggccggcgcatctccgtgatctgccgctccctccctgagggcatggggccaggggagtctggacagccgcccccagcctgctgacccccagctntctacagacaccagatttgtga

SEQ ID NO: 247718 - DNA, 329 bp, Homo Sapiens
aacctgtttctgagccacggagacagggaggaaggagcgcgacagtgccacctgttgggcatcataaatgcccctgcagcccatgggggaggagatggggaagtggagccaccctgcctctgcagggcaaggcagggcactcgccagtggggcttgggaccatctcgaaccaccagcgtggagaagcagaagcaaaagcactcgccatgctgcagcctcaggcactggcaggggctggtgcggccccactcccctcccccgctcccatttgtgcccatcctgttgtgaccaaccccgttttaaacatgtttcaatagatccagattctc

SEQ ID NO: 247719 - DNA, 846 bp, Homo Sapiens
  misc_feature (740)..(740): n is a, c, g, or t
  misc_feature (746)..(746): n is a, c, g, or t
  misc_feature (751)..(751): n is a, c, g, or t
  misc_feature (754)..(754): n is a, c, g, or t
  misc_feature (761)..(761): n is a, c, g, or t
  misc_feature (797)..(797): n is a, c, g, or t
  misc_feature (816)..(816): n is a, c, g, or t
tgaagtttctacctaaaatcatttttggtatatcctgataatctctataatactagaattgtctgcaaaatatagtaagaagaattggagcctaatagctgattcctcccaatttatctgttatgttttgtcactattcacattttagtcttttctacgataaaaattgtatgtgtactttcatgccagtataggaaacctcaatctttgttttttttcgcctttaagaaggttttcagtgattatacctcaggtatttctgagtgtcctattgtctaataggagaaatatcttcccgagctcagaattaaaagttctcctaaattatgaagatcccaaatcttatgtaaataaccttaggcatgagtccttagggagaagttaatgaccatggttaaagtgcttttttagaaaatgtggtgctgtatgtctggattggacataaatgaatagacttgggcaagggaggaaataagttaaaaggcagcttacaagagcctattccctataaagggtataattttacacagtactcaaagctggttatcttttctgaccattttagtacagaattagtacttggtggttactaacatcaactgtgtgacatctagaactagggctcttagtgtttagtgggccacttctctgatgtcagatgcatgcagaccgtgtactccacatgcaacccaacagcagtgcaggtgtgataactgagcggtcgcatggcagaggacatncccctnagagngancaaagtncctctagggcagccaggggaatactattgttcgatncctgggatttgactttgtnaaacagctctttgtgcccctatctttgttt

SEQ ID NO: 247720 - DNA, 545 bp, Homo Sapiens
  misc_feature (168)..(168): n is a, c, g, or t
  misc_feature (171)..(172): n is a, c, g, or t
  misc_feature (177)..(177): n is a, c, g, or t
  misc_feature (187)..(187): n is a, c, g, or t
tttttcgtttatttgggcaaatgtgtctcgttagggtcattctgaaaagaagcccagtgtgcagtcattagcccctggggtagcgttgctactaagtggttggggagaagtcagggaagaggaagaggtggcgttccccagcctcacccgtggagaccccagcgaagnggnnagggncaggcactgntggaggagcgaaggccaggtggacacgaggacagattccagaggcttggttttattgtgcagttttctttgtcctcaatgagatgccataagctgtggtggcactatacacagtcacagaacaggaagaaccaccgggtgggggctgggggttgggaaaagccatttcctgagaagtgtccggctcctgggtctcactccatggcttgcctcaggccccgcagaagtccctgagaaggcaggcctgcggggcagggggctgtctgaggggctcaggcaccagccagcaggggctggcacttgatggggcgaggggaggaagtgcctcccttaggaaacttggggccaaaccctgttgc

SEQ ID NO: 247721 - DNA, 1088 bp, Homo Sapiens
  misc_feature (563)..(577): n is a, c, g, or t
  misc_feature (999)..(999): n is a, c, g, or t
  misc_feature (1045)..(1045): n is a, c, g, or t
  misc_feature (1066)..(1066): n is a, c, g, or t
  misc_feature (1074)..(1074): n is a, c, g, or t
cttttaaaaccaactttgtacaaaaaagttggctctgagtcacctgaaaccctccccgcaatccctcaaaccttgaggagaagtggggaccccacccctcatcaggagttccagtgctgcatgcgattatctacccacgtccacgcggccacctcaccctctccgcacacctctggctgtctttttgtactttttgttccagagctgcttctgtctggtttatttaggttttatccttccttttctttgagagttcgtgaagagggaagccaggattggggacctgatggagagtgagagcatgtgaggggtagtgggatggtggggtaccagccattgtaggggtcatccttgcccatcgggaccagaaacctgggagagacttggatgaggagtggttgggctgtgcctgggcctagcacggacatggtctgtcctgacagcactcctcggcaggcatggctggtgcctgaagaccccagatgtgagggcaccaccaagaatttgtggcctaccttgtgagggagagaactgagcatctccagcattctcagccacaaccnnnnnnnnnnnnnnngggcagccctccttaccactgtggaagtccctcagaggccttggggcatgacccagtgaagatgcaggtttgaccaggaaagcagcgctagtggagggttggagaaggaggtaaaggatgagggttcatcatccctccctgcctaaggaagctaaaagcatggccctgctgcccctccctgcctccacccacagtggagagggctacaaaggaggacaagaccctctcaggctgtcccaagctcccaagagcttccagagctctgacccacagcctccaagtcaggtggggtggagtcccagagctgcacagggtttggcccaagtttctaagggaggcacttcctcccctcgcccatcagtgccagcccctgctggtttggttgccttgaggcccttcagacagccccttgccccgcagcncttgcctttcttcagggatttcttgcggggcctgaggcaagtcatngagttgaggacccaggagccngacaattnttcaggaaatgggt

SEQ ID NO: 247722 - DNA, 801 bp, Homo Sapiens
cacggaggaggcgagagggttgggtgtggcccacctggcacgggccagctcggatatcgtgtccctggcagggcccagtgctgggccgggcagctctgaagggggctgctcccgccgcagctcggtgactgttgaggagcgggcccgggagcgcgttccctatggcgtgtcggtggtggagcgcaatgcccgcgtgatcaagtggttgtatgggctaaggcaggctcgggagagcccagcagctgaaggctaggcgccactgggcctggaattcgccacaggacggatcttacagaggcaagtggtccctggacctctcttgcatccattctctagacggccgtgtcagaggctccaccctgttgtgaacttggtatggaggcaaaggcttagaggctggaccagcattcttgggcaaggactgactctccaagggttttgttcttggctttggacacctgagaaccccctcctcccctcccccaatacaaggtttttgacatgagtgtactcctgcttagttcctcttgtggggctgcatttgcggtgctttgccctccccactgtgagtgaggggccaagggatctcctcaatcctgtctccccagcggctctgtttcctccttctttccttggcctctgtcctttgctgacttcctcttccttacccagcagaactcaccctggggtcggggcagtggggaggggcctatccactgctcttcctagtccttggcagctggcctaggtgggcagactataggagggactggttaggagtctgcattgctttgacttccc

SEQ ID NO: 247723 - DNA, 436 bp, Homo Sapiens
  misc_feature (18)..(18): n is a, c, g, or t
  misc_feature (293)..(293): n is a, c, g, or t
  misc_feature (323)..(323): n is a, c, g, or t
  misc_feature (355)..(355): n is a, c, g, or t
  misc_feature (362)..(362): n is a, c, g, or t
  misc_feature (388)..(388): n is a, c, g, or t
  misc_feature (405)..(405): n is a, c, g, or t
  misc_feature (416)..(416): n is a, c, g, or t
  misc_feature (423)..(423): n is a, c, g, or t
gtttagagtaaaatttgngtttatatatttataaatgccaaataaataccagaggccacccaacgccccctcccagacagggctgtctcccccagccctaggcttctagggtgtgagacatcttggccccaagctatagcccaagagcagctgtcagtctgtgctaccagggaactgagtgaggatgatctgtccagccaagtttcactccccctgtgtgaggggcccccatagccacaggcctgggtccctgtataggaccctaagggtgaaagactcagggggagaaggtngccatctcgagtgagacccgctgccacagntccttggtctgtttgctgcgcttgaggttctntaggatntcgttgaactgcatcatgccctgggngttcagggcagaaggcncttgcgggcantccggtncgcattcacaaag

SEQ ID NO: 247724 - DNA, 378 bp, Homo Sapiens
tttgtgctgtccttttaaattttaataaaatagattaatttcatatgacatagagagcaagtccatccattcatccgtgataaaattttagaaatcttttgtataaaatgtttagtatttaattggaaatgaatccagtataacatgacttccacagatacagcattcccatcctcactcccattcctattttgagaaattttaaaaatacagaaaagtacaaaaaataagacaagatatccctataccacaatccagaatcaatcagtatcttcttatatttacttgaagtcttttgaaagagaagtggatgtttatataaaaagctgaagtcccctttaaccaatacccatcccacctcccacactcattattttc

SEQ ID NO: 247725 - DNA, 221 bp, Homo Sapiens
  misc_feature (74)..(114): n is a, c, g, or t
tgcacacagatgtgaaatgaatgtaatctaatagaagcctaatcagcccaccatgttctaaaatgaaaaatccnnnnnnnnnnnnnnnnnnnnnnnnnnnnnnnnnnnnnnnnnactggacggtgacgtcagccatgtacaggatccacaaggggtggtgtcaaatgctattgaaattgtgttgaattgtatgctttttcacttttgataaataaacatgt

SEQ ID NO: 247726 - DNA, 413 bp, Homo Sapiens
  misc_feature (358)..(358): n is a, c, g, or t
aatgataataaacaagacattaatttttcatactcttttgggggaaaggaaaaaaatcagtttgccctacccaatgatggtctttctgaaagattctccattcattccatagaactggataggttgcttcatctcagaggattttgtactcttaattcataaagagaacttctcttcaggaaagtggtcaaagggtgagcctctgtgagcagcttcgctggttgcacagccagactccctctctgggtgaagctttttccacactggccgcacagataggggtgtctctcctgtgtgggattttgccatgcaggaatacaattccccctgggggtgggaaactcttcctgcactgggnacaggcataggggcttcagggctgtgtgggactctgatgtgaacaattaaggttc

SEQ ID NO: 247727 - DNA, 833 bp, Homo Sapiens
ttggcacagctcccctaactggctccaccctggggccttgcccctagtaccccctggcaggagcaacccaccccatggtcgaggttcccctacccctggatcctggactgaagccatttcctacagagaagcgttcccaccccctctcaggcacaaaagccggtgtccagggactcaagacctgtacctggggttgcaggggctcctgccctgctgtatcccaccaggagggggccccactgcccttccggcccttaaaactgggctgggagtgaagacggggaagtgtgtgagacaaaacaaagccggcttgtttcctccccttggcaggctaagctctcccggcagcccgggctctggggcggaaggagaacagtgtcatctcttcctttgttgataaattgccaaagagtgggaacaggtggggtcaggggcccagagtgcaggggagggggcaatggtggaggtggcggggggaagcagaagggaggtgggctgaggcctcggtggggccagtgcgacgctggcttaaggagctggaggggttcctaatacacatttaattcagtttctcttccctaagaggctgccggagttggggcctcctccagcagagaccctcggacccctgcagggcctggacttggggtgaacagggcttcagtcagcgcaagtattccatttgcatttggtaatttttcatgccacctatttatgaatatataaatctttataccaaatctattttttaaaacatggaaaagttgcctttatggaaaacttcgcagagccagagtgtacacattcctaaaccattaaacagatttctataa

SEQ ID NO: 247728 - DNA, 816 bp, Homo Sapiens
  misc_feature (712)..(712): n is a, c, g, or t
  misc_feature (767)..(767): n is a, c, g, or t
  misc_feature (789)..(789): n is a, c, g, or t
agcaatgctttttccctaatagccaactttgtacaaaaaagttggagcgagttcagcgaactgaagcagatgctggtgcagcagaggaactgcacggaggggatcgtgatcaagacagaggaacaagacgaggaggaagaagaggaggaggaggatgagctgccgcagcacttgcaatcccttgggcagctgtccgggagatatgaggccagtatgtaccagaccccgctgcccggggagatgtcccccgagggcgaggagagccccccgcccctgcagctaggaaaccccgcagtgaaaaggctggcgccctccgtgcacggtgagcggcacctgagcgagaaccgcggggcctcgagccagcagcagcggaaccggcgcggcgagcggcccttcacatgcatggagtgcggcaagagcttccgcctgaagatcaacctcatcatccaccagcgcaaccacatcaaggaggggccctacgagtgcgccgaatgcgagatcagcttccggcacaagcaacagctcacgctgcaccagcgcatccaccgcgtgcgcgagggctgcgtctcacccgaacgcgggcccacgttcaaccccaagcacgcgctcaagccgcgtcccaagtcacccagctctggtagcggcggcggtggcccttaagcccttacaagtgccccgagtgcgacagaggctttcagcccacaagtccagnctgaccaaacaccagattcacggcacacgggtgagcgggccttacaagttgcccngagttgcaagaagagtttccgnttgcacttcagtttggttgtttccttc

SEQ ID NO: 247729 - DNA, 412 bp, Homo Sapiens
  misc_feature (19)..(19): n is a, c, g, or t
  misc_feature (37)..(37): n is a, c, g, or t
  misc_feature (50)..(50): n is a, c, g, or t
  misc_feature (62)..(62): n is a, c, g, or t
  misc_feature (232)..(232): n is a, c, g, or t
  misc_feature (267)..(267): n is a, c, g, or t
  misc_feature (344)..(344): n is a, c, g, or t
gtgcgcggaggctgcgttntcaccgaaagcgggcccnacgttcaaccccnaagcaagggctnaaagccgcgtccccaagtcaccccagctctggtagcggcggcggtggcccctaagcccctacaagtgccccgagtgcgacagcagcttcagcccacaagtccagcctgaccaaacaccagatcacgcacacgggtgagcggccctacacgtgccccgagtgcaagaaganttccgcctgcacatcagcttggtgatccattcagncgtgcacgcgggcaagcatgaggtctccttcatctgcagcctgtgcggcaagagcttcagccgcccctcgcaccctntgcgccaccagcggactcacacaggcgagcggcccttcaagtgccccgagtgcgagaagagcttcagc

SEQ ID NO: 247730 - DNA, 497 bp, Homo Sapiens
  misc_feature (245)..(245): n is a, c, g, or t
cgttaaagggcaactttgtacaaaaaagttggagaagggaggccgtacaaacatggcttcagccaggctcggtggacaccctggccctctcggggcagagccgccagtgtttctcagggatgtgactgaggcccaggagggacctgtgaagggtctgtttacagaggctgggcaaggggccgcttggctgtggggtgtgcgctgccccggcacctgcttgccctccgcgctcatctggggccgcnagcatgcctatggttccgcttccggccgggagccctgaacacgggtgtgcagactcaccctaaagggcggcccaggccccacgctagaaggctggcgagatttattgtagcatgtgaggcctctcttgggagtgggggttgtgtttcccaccgtggcctcagctgcgcccccgctcatgtgagcccgaaggcaggagccgggaggcactcctcccaaacactccactcagaccataaagcactcctgtttcc

SEQ ID NO: 247731 - DNA, 272 bp, Homo Sapiens
tggtatttgctggacaaagggttgggccccttttatttttacctgccacccagcatctcccccacctgccccctctgggtgacacagccggtaaacggaatcacgtatggttctttctgtgggtctgtggcacagcaggaagagcttcgtgccgccagcaccttgtggaagaccacacatgggtggtcccacagcatgggaccaggctggcctgagggatgcccagttgtaacaatgctgctgtcactgtctcattaaatatacatccttta

SEQ ID NO: 247732 - DNA, 1963 bp, Homo Sapiens
  misc_feature (69)..(138): n is a, c, g, or t
  misc_feature (169)..(198): n is a, c, g, or t
tttttaaaatgttttaaaatgtcagtatctgactttctttactaaggaatgatgtagagcactttgtgnnnnnnnnnnnnnnnnnnnnnnnnnnnnnnnnnnnnnnnnnnnnnnnnnnnnnnnnnnnnnnnnnnnnnnagcctgggcgacagagagagactccgtctcnnnnnnnnnnnnnnnnnnnnnnnnnnnnnnccaacccacatatgtatataccctaggaaatacgatatttttttcatatactgtattattgttctccaacttgtttcttccattcaacagcatgtgaaagcaagcttagaagcaaaaagcaaaggagaactgactgaaacacagcatggtgatgtgaagactggggaagcttgtgggcaaaggattactcaggtgccgaggcaagagactgaaggcacaaacggtttcagtataatgaagaaaatagctagaataagaatagttataatacaaattcgatacagagattatcatggacattatcagtcattagtataaacattattaatcattggcttttaacattactctttattgtactattaatataatcaaggaataaccagcaggtatagggtcaggtgctgaagggacattgtgagaagtaaccaaggcggcaagaggtaagccttctgtcacgcctgcataatggccagttgagggctccttggtcaagtggtaacgccagtgtctgggaaggcacccgttacttagcagaccgcgaaagggagtctccctttccttggaggagtcagggaacactctgctccaccagcttcttgtgggaggctggatattatccaggcctgcccgcagtcatccggaggcctaaacccctccctgtggtgctgtgcttcaatggtcacgctccttgtccactttcatgttcctcctgtactcctggttcctctttgaagtttgtagtagacagtggtagaaggaatagtgaaagtcttaaagtctttgatctttcttataagtgcatagaagaaaacgctgacgtatgctgccttctctctccctgcttcggctacctaagagggaagggccccctgttctgtgatcacgtgacttgcttcaccttgtcaatcacttagaagattcaccctccttaccctgcccccttgtcttgcatgcaataaatatcagcgggcgcagctgtttggggccactaccggtctccgcgtcttggtggtagtggttccctgggcccagctgttttctctttatctctttgtcttgtgtctttatttcttacaatctctcgtctctgcacacggggagaacactcactaagtcctgtagggctggaccctataggtcccctggccctggtgtcagcgagctccctggcaatcccctcgccagtgctgccaggcttgactggtgctcttggcagaactcctgtctgatctgagggaggagtgagcctacctgggccaccttctgttcaaggttgtgggtgagaagacacctggcccgggtcacttgggctgtgggtggggagttgtaaggcatcctgctactggggtgctcctccagtctggggtcccttacacgtctgccttcctctttccacttttcagagttcccctttgtctttcctgactgcctcatctgcacttgattgcaccatccgatttcaattatctccatagcattgatcaattacctgatattttaatacttaaccaattgtatttgtctctcctcctaaagtatatgcataagatagctgagacctgtaagaactgttcttgaatcagggcttatgtgtaagctttatttgcgtcagtattctcagctcctagagtaggggtgggcgcagggcaggccaatcctggtgagggtgagccaagtgagtgcgtgaaaaccaaaggaaaaaacaagagtgaatgcagatgtcttcacccccaaacaacatgttgagtcaccctaattccaa

SEQ ID NO: 247733 - DNA, 1195 bp, Homo Sapiens
acttgaatgtaaataccaatcaagatacattgaaataagaaggtcctacagtgtaggggaagcaatggaagaacttctacctgatggacaaatatgggctaatatggatccagaagaacgaatgttggcagctgctacagcttttacccacatctgtgcagggcagggtgaaggagatgtcaggagagaagcccaatctatccaatatgatccctacagtaaagcttcagtagccccagggaagcgacctgctcttcctgtgcaactacagtacccacatgtagaaagtaatgtcccttcagaaacagtctctgaggcctcccaaagactccgaaagccagtgatgaagagaaaggtgctgcgcagaaagccagatggggaagtattagtaacagatgagtcgattatcagtgaatcagaatctggtacagaaaatgatcaggatctctgggacttaagacaaaggctgatgaatgtacagttccaggaagacaaggaatcttcatttgatgtttcacaaaaatttaacctaccacatgaataccaaggaatttctcaagatcagctcatttgctctctacaaagagaaggaatgggctctccagcttacgaacaagacctgattgttgccagcagacccaagtcctttattctcccaaagctggaccagttaagccgaaaccggggcaagacagaccgggtagcccggtattttgagtacaaacgggactgggactcaatacgtttacctggtgaagatcatagaaaggaattacgctggggtgtccgagagcagatgctttgtcgagcagaaccccaatccaaacctcagcatatatatgtcccaaacaattatctagtaccaacagagaagaaaaggtctgactccgttggggtgttcgttgtgaccttgcaaatggtgtcatacccaggaagcttcccttccctctttctccttcttaaatctttttaaacttctttcacaggactgttgagataacctagctctttatatctttccctttttaaattaggtatacaaacggtcttggagaaggctcttcgaaaacatttaagggtaagggactttcacctattcatggtctttcctagctaatgtattaccatgggtttccgatggatacttccagattggcacttcaaatcaggcatggaggataactcttcagcgaag

SEQ ID NO: 247734 - DNA, 389 bp, Homo Sapiens
  misc_feature (16)..(16): n is a, c, g, or t
  misc_feature (219)..(219): n is a, c, g, or t
aattatgagttttagnaaaatgggatatgcatgtacacatatgcatatacatacaggtttatttaaatgattggttctacacttttggaggctattttgaagtatcttatcaaaataaaacgcattttaagcaagaagttaaaaaagcttttcagacccgaaggccatttaatacagtaaatcttacttgggtagtttagcaaacattttttaaaaccncacatccaacagattggttagtattagatacacagatttggtttcaaagctgaaatacccctgggtgggaataaatcttctcatgaaattcagttatattatgccacaaaacaggggacacttatctattgacaacttaaatattaactcagtggggctacccgggggat

SEQ ID NO: 247735 - DNA, 658 bp, Homo Sapiens; identical to SEQ ID NO: 176317

SEQ ID NO: 247736 - DNA, 452 bp, Homo Sapiens
ccaaaaatggtattgctttattttttaaaaatatatttcttttttgaaatatcaatggaatcaattttattctcacaacaatcctgagtaaatatttttaaaaaatatattttttggggaaacagattaaaagctttaaaaaatgtgattcactgaaaatcaaatagtgaatacatgatagagtcagcactaaaaaggcagatatatcaaagagagactgaaataagcaactcattttttgcatcgacttcgaaacacctctttaccatcagtgtttgtaataatcattcttgatctttatacttcacatttcttggtaatccaaatgcttcataaattctcttacacatcctgaatctcttgcttcattcagcgagataattcctggtgagcaggaatgcatatggttttcagatgtagaaactgggatctccagagacaaacaagttggc

SEQ ID NO: 247737 - DNA, 862 bp, Homo Sapiens
ttggcaaaggttcgagagacatgaggcccttgacctgctggaccggatgttaacctttaaccccaataaacggatcacagtggaggaagcgctggctcacccctacctggagcagtactatgacccgacggatgagccagtggccgaggagcccttcaccttcgccatggagctggatgacctacctaaggagcggctgaaggagctcatcttccaggagacagcacgcttccagcccggagtgctggaggccccctagcccagacagacatctctgcaccctggggcctggacctgcctcctgcctgcccctctcccgccagactgttagaaaatggacactgtgcccagcccggaccttggcagcccaggccggggtggagcatgggcctggccacctctctcctttgctgaggcctccagcttcaggcaggccaagggcttttcctccccacccgcccttcccacggggccttgggagcttaggtggccccagttcaatctcccgctgctgctgctgcgcccttacctttcccagcgtcccagtctctggcagttctggaatggaagggttctggctgtcccaacctgctgaagggcagaggtggagggtggggggcgctgagtagggactcagggccatgcctgcccccctcatctcattcaaaccccaccctagtttccctgaaggaacattccttagtctcaagggctagcatccctgaggagccaggccgggctgaatcccctccctgtcaaagctgtcacttcgcgtgccctcgctgcttctgtgtgtggtgagcagaagtggagctggggggcgtggagagcccggcgcccctgccacctccctgacccgtct

SEQ ID NO: 247738 - DNA, 355 bp, Homo Sapiens
gcaaggtgctctaagtaatattcgataaaatatatttaatagaaatttgcgtttgatattcatgaacatgaatacatgtatttttttaagaaataagtattgtgtaacactatggcattgcttctatagccaaagtataaaaatttctggaatactgacatgtaaagactacagttaattctgacactgtatcttattaaaataggatgatttgcattttgtaaaattatcctgcacatcaagctgccatgcccttaaagcgggaaactctagggactgtgttcatggggagagccagttccatctgttccaggaaccagtgagggcaaggtctgtaggtgcttctttaactacc

SEQ ID NO: 247739 - DNA, 1516 bp, Homo Sapiens
  misc_feature (546)..(587): n is a, c, g, or t
ttggctcagtccactttgtctcccacagcagcagccactgcttccacatggcctccatgaccccccagtctccgtggtcttgcccaggaggctctgaggtttcaccccagtggcccgtgcctgagggtccccatggcctctgcccccatggtctctgggtttggggcccctgttttgtcccctgtaatctcaggtgacccccatgtccccaggtctcctgtatcttcaacacccctgaatgtccagttgtgctggtccccgtatctggtggtctcagctcctccctagagccccgcgtggcctaagtcccctcctccccagactctcatgggacctccagccccatgtctgcagcacctctccctccctagagccccacgtgcctgggacatcctgtgctcaccccaagagccggaagcagaaccacctgcccaaagtgctccaccccagcaaccctcacattagcagtggctccactgtggccacctgcttgagccagggtggcctcctggaagacctggacaacctcatcctggaggacctgannnnnnnnnnnnnnnnnnnnnnnnnnnnnnnnnnnnnnnnnngcgggcccagggagtgacccctgccaggtgcagatacaaaccagacacggtctgtggctactttgtgttattataagatatgagctccaacccgagatatgaatgaccttggggagccatctgaggccaagatattgacgggggggattcctgggtcccattttcagcgcccagggtcacagatccacagtgggaagttctgtgggacacattggcactgagccacaaagaaggtgtggccagaacaacttgggctcctgctgaccaatgtcctctagggcctaggggacagaggaacacagagtcacagcttcaggggccgaatgagcatggcggccttcctgagagaatatgccccaccacgaaactcagcccagtagacaccatcctggtagcggcttcggtagtggccgccgtggtgccacacaccgttgaggttggagtgggcacaggcatggtaccaccagcctccccgctggtacagggcacagttacctgaggggagagagagagtccatgtcctctcaccagaataaaagcctctacctgcacctcacagtgcaaggcttttgccaggcatcccctggcccctcccattcttattgaatacaagccctgatcttccatctcctcagcaaaaaaataggagccctggccccccaactttcttcagagtaatagccttaattccttccctatctccttaccaaagtacaagtcacatctttcccaccttttctgcaaactaggagtctaccgttcattcctttatcaaagaaaagtatctacttcctttctagaataagagtactagctctcaccctctgccctttacttgaacagggagtcttgattctttttttgcctcatcagagaaaggaatctgggactccccatccccccaccaggataaagtcctgacctttgtt

SEQ ID NO: 247740 - DNA, 319 bp, Homo Sapiens
  misc_feature (17)..(17): n is a, c, g, or t
  misc_feature (30)..(30): n is a, c, g, or t
  misc_feature (71)..(71): n is a, c, g, or t
  misc_feature (100)..(100): n is a, c, g, or t
  misc_feature (134)..(134): n is a, c, g, or t
  misc_feature (140)..(140): n is a, c, g, or t
  misc_feature (148)..(148): n is a, c, g, or t
  misc_feature (181)..(181): n is a, c, g, or t
  misc_feature (183)..(183): n is a, c, g, or t
  misc_feature (221)..(221): n is a, c, g, or t
  misc_feature (244)..(244): n is a, c, g, or t
  misc_feature (303)..(303): n is a, c, g, or t
ttttcccaatgttttantggggaattaaanagtgtgatgtttggattgatatcgtgaaatcctcagccganaaattgggctggattgtgctttggttaanacatctttctctaaagaaggagcacaaaaaatcnatcccnggtagctnggcaccaactaagaaaaaaagcacaaagttctnanagctctcgaggaaagtggttgtccccgtaccaccatgnactgtaaatatccctcccctctntccctggtcccctcccccatccccaccactgatatcatggggagtaataggaccagagnggtatctctggcacca

SEQ ID NO: 247741 - DNA, 422 bp, Homo Sapiens
  misc_feature (12)..(12): n is a, c, g, or t
attggttttggncgggatgatgggattaatccatttaaaaaggattagaagggccagtttcctggctagaaatatggattttatttgaccaaaatttgttgaaattatgtatgtttaccatatcaccctcatggccctattatattaaaatatggcctataaatatataaaaaggaaagataaagatgatctactcagaaatttttatttttctaaggttctcataggaaaagtacatttaatacagcagtgtcatcagaagataacttgagcaccgtcatggcttaatgtttattcctgataataattgatcaaattcatttttttcactggagttacattaatgttaattcagcactgatttcacaacagatcaatttgtaattgcttacatttttacaataaataatctgtacgtaaaa

SEQ ID NO: 247742 - DNA, 1071 bp, Homo Sapiens
ttggcgagtctgtgctccatcagctgccgcacccgccgcctcccgcccccaaaccccatccccgcggttgagccacgatgagcggcagagtcggcgatctgagccccaggcagaaggaggcattggccaagtttcgggagaatgtccaggatgtgctgccggccctgccgaatccagatgactattttctcctgcgttggctccgagccagaagcttcgacctgcagaagtcggaggccatgctccggaagcatgtggagttccgaaagcaaaaggacattgacaacatcattagctggcagcctccagaggtgatccaacagtatctgtcagggggtatgtgtggctatgacctggatggctgcccagtctggtacgacataattggacctctggatgccaagggtctgctgttctcagcctccaaacaggacctgctgaggaccaagatgcgggagtgtgagctgcttctgcaagagtgtgcccaccagaccacaaagttggggaggaaggtggagaccatcaccataatttatgactgcgaggggcttggcctcaagcatctctggaagcctgctgtggaggcctatggagagtttctctgcatgtttgaggaaaattatcccgaaacactgaagcgtctttttgttgttaaagcccccaaactgtttcctgtggcctataacctcatcaaacccttcctgagtgaggacactcgtaagaagatcatggtcctgggagcaaattggaaggaggttttactgaaacatatcagccctgaccaggtgcctgtggagtatgggggcaccatgactgaccctgatggaaaccccaagtgcaaatccaagatcaactacgggggtgacatccccaggaagtattatgtgcgagaccaggtgaaacagcagtatgaacacagcagatgttgtcctgacacttgtggcatcaaatgcctggatcctgttgacaccccaaacccaacaaggaggaagcctgggaagtgcccagtgacttatggccaatgtttgatgctttaacccccccaattttctgtggagatggatgggccat

SEQ ID NO: 247743 - DNA, 702 bp, Homo Sapiens
aattctattggttttaatctttacttccaatcccaaacaatcttgtttcttttcattataaaagtactaaacaaacacggacaggagaggaaactgacatttgcaaacgatgtaccttcaacaggcatctcaacagccccatcaccaacacctgtgtgcaaggcatagccatcacgcggaaaagtctcaggactcagaactacaccataaatgcaggatctttttatttcatataaaaatgatcaatgtgaaaaaagccaaactgtatgctggttttacagactccgacccttcctgacagtcttcttgtctggccaggctgggggcccagcattcctggaagggagagacagcccagcatctcagtatttcattgggacaacaagctggatgtggcagggaaagctgagagcgccaaggtccccttgctttatcccaagctcggagggacgcagcctggcatggctctggcctagcagccaggtgacatggccaggcaccttcctgtacaggcactgtgggctcctggcccaggctcactagaaggtcttctctgtggtgcctacctagggagctgtgatcaagccgagcagccgtgcaaggcgtttcagtctgaccttttcatcagatccccgctccagcccctcggagaaggaaacatcagtccacagtgccattgtaggatttgttgaaccctcgtgc

SEQ ID NO: 247744 - DNA, 191 bp, Homo Sapiens
attcggggtccaagcgtccaggtttattgacccggctgggtctcactcctccttctcctccccgtgggtgatcacgtagctgagcgccttgtagtccaggttgcccgccacatcgatggaggcgaactggaacatctggtccaccccttctgtcgtcttctcgcagccgtatagtagtagtaggcggccga

SEQ ID NO: 247745 - DNA, 124 bp, Homo Sapiens
gcaaaacattcacatacatttaatctctttctcctcctctggttacatcttttctctattcccttctttgtctttacttaattattccaacatcttatcttcttctcccttctgtcgtcttctc

SEQ ID NO: 247746 - DNA, 1804 bp, Homo Sapiens
ttgggaagacgctgctggtggctgctgtgtgggcctcttgtgttagtgttcaggctggggacatgggtgccacctccatcaggcctcccataaggatgcccaagtccctgcactcataagtgcctcccatctccctgagggctctgctttcgggggtgtcacctttcagaggaagccactcgatacaggggagagcttttactttccttagcatgtgaggagtgggagcagatattctctgaccccctgcacacccccacgtgcacaggcctggctgctgcctggtgaagcggggaccccagcgctccacccgcttcctaccctcaggccctgcttctctcacctcgtggggaagcccaagcctcgtggcccaactggggctcagttaaactttgctttctgatttttctcttgtgccaggcgaccacctccatcggctcccgcacgacctttcttctgagcttcgtgggaggcccctcccacctgtctggctgccccctcgggggccggtctgtcctggctggtgtccctgagccccaatcagcaggctcttgtgattttctgaccataatttattgactccaatgcccaggccacaccaccctttgttataggaggcttctgcctagactttggccgggccatccctcatgcctgtgtggggcccctgcaggagaggggccggggcaggtggtcttccaggcccccttcctggcattctgttaccagacctcaacctggcttggagggcccaggtttccttgttaggccctgccccgcaccaggcaacgctaacacaggatgggaggcttaggctaaggcacatttacagtagaggggccaggaaatccgaggctcacgttccaacgctgcagtgcccaccatgtgagatttccaggaccgtcggtgcagccactgagccgtcccttctacaagccagaggtgttccctgcccgctgaggacggaaaggagactcatggggccagaccgcaggccctgactgcacactcccgttttggcaggaaactaaaattggggagggacccccaagtctcatatgcacacaccctgctgcccctcctttgtcccgttcttccttccatggcaggggctacgtgggcaccgggcgcttgtcctggaagaagcgcttgagcgtgcagacctgcagcacagccaccagcagcagcaccgccacgttgacagctgaccagaagttgacccgctccaagttgccctcttgcaggttgcggtcacgtgcctcgaaggcccgcagtagcgtgagcatctggatgctgcgctccagccgggtccgcatggtctcaatggactccttgatgtcctccattttaacatccagcatctcctcgggctccacagcctctgcccatccttcgacctcctcgtcatcctggaggctgtcaaagatcagttcaaagaacaccagcttctcggagatggtgctgaaggagttgtcaaagcacagcttgtagtccccggcctccgttggctccaccgtgtgtaccccatcagccttgcgggactcgctgaccaacagcacgccctgagggctctccagcgtgaagtccacgtccagtccagcacctccgatcacctggtattcggtctcgaggcttgcgttggccggcgcggactggtagaaacactgcttcctccccgccggcaacaggaacgtgaactcaccgtcctggattggcgggggccccgcccctcccacctccactggtggcattagtagccacaaggccagggctagggccgcgccggccgccatcatccggccaa

SEQ ID NO: 247747 - DNA, 122 bp, Homo Sapiens
tatacggctgcgagaagacgacagaagggtgttcataaccatgaagtgctatgtagactctaaataaggaagcagtagatacctgtgtacccaggtggaagggagcccagggcatggtaact

SEQ ID NO: 247748 - DNA, 179 bp, Homo Sapiens
ggtaccaggatcattttaatggtctttggcttcagatgggccatttaaactactcaacaagacctttgtctgcctctggtcagtttcctctgccattcaccccagaaggatcatggattttaactgctctgatcaagtttcttattccaccccttctgtcgtcttctcgcagccgtata

SEQ ID NO: 247749 - DNA, 443 bp, Homo Sapiens
aaaaaagttggggcatcggcctgttttcaggctacttgcaggccctgggttacgcaggtgtggtggctgttcgggccctgggggctcccgccccccagggttgcgctgtggctctggcttctgatcgctgctccatccacctgcagcttcaggggctggtggaccctgcacgggagctgggcaagctgcaagccaagcgagttgaggcccagcggcaggcccagcgtctgcgggaacgccgtgctgcctcgggctatcctgtcaaggtgccgctcgaagtccaggaggcagatgaagccaagctccaacagacagaagcagagctcaggaaggtggatgaggccatcgccctattccagaagatgctgtgatccaccacccagcttcacccctcacccccagcggctcaccatggggatggcagcaataaaatattttcccac

SEQ ID NO: 247750 - DNA, 565 bp, Homo Sapiens
gcggccgcctactactactaaattcgcggccgcgtcgaccaagcatagaaaatggacccaaggacaaacatttacttgggagggaaataacacaaagaagcatatcaatcgatgtctttgtcagtcattctgtgaccaaccaggagcggggatggctttgctctagattctggcagccagtagaaaccatctctagaaaccatctcatctttatccataatggtaatagagcacagtgttctctagacatgtagatctgccacatggcaaagctatatcatgatttcttcttgcagagtgggcagtttcagcaggacctgtaagtttgcttaggttttctgaagatatcggcattaaagacttacacattccttttgtcctcctaacgtatttcgtaaccacactctcaacattccaataagttttgaacttggaggcacttagaacataattacatttctaattttgtttcagtttgatatgtgtcccttccttcctttttttggtagagacagtgtctcactatgtgtcgacgcggccgcgaatttagtagtagtagtcgacc

SEQ ID NO: 247751 - DNA, 469 bp, Homo Sapiens
  misc_feature (248)..(256): n is a, c, g, or t
ggtcgactactactactaaattcgcggccgcgtcgaccttcttcccaggtgatctctttcttctggatttccttttccacatctttgttttgatcttcattgttctgctttgcttcagatgtgtctgctcttgcctggttacaggagatggccagttcaggatccatatctgccattgctaggagtcttagctaaggtcaccctgggaatttcccctacattcggttgctagcttgtcctggcaatgnnnnnnnnnaattccagttgtctctctttccatcccccccaatatgatccctcctttttctatttgttcactctccactttctcaataaatccattctgccacccccatctactcacagtgtctgttttatttctccttcccagtgagattcaaacatcagtccttaagtcctcctcgttatgcagtcgacgcggccgcgaatttagtagtagtagtcgacc

SEQ ID NO: 247752 - DNA, 437 bp, Homo Sapiens
gcggccgcctactactactaaattcgcggccgcgtcgaccccacctggattgggcccaggacagcagctgctttgtcaccaactccggggactatgagattctgtactgggacccggctacctgtaagcagatcaccagtgcggatgctgtgaggaacatggaatgggccacagctacttgtgtcctagggtttggggtgtttgggatctggtctgagggggcggacggcactgatatcaacgctgtggcccgctctcatgatgggaagttgctggcttcagctgatgactttggcaaagttcacctgtttagctacccctgctgtcagcctcgagccctcagccacaagtacggtggacacagcagccatgtgacaaatgtggccttcttgtgggatgacagcatggccctgaccacagggggcagggacgtcgac

SEQ ID NO: 247753 - DNA, 369 bp, Homo Sapiens
actactactactaaattcgcggccgcgtcgacgggacccatgttttaataatgctttatttttctccaaagaatatcttcattattttaccaagatgcataatagggaaaaattatcttatttaattgacatactgtgcctacagtgatgtgtgaggctacaaagattcaacaacctggttcagctatgttattactattgctcctcttgattagtgttaattggaatattttaattgatgcaatgtttcactgctttcacagcttgagtgagatgaagtacagagaacaatttttcaataatgaaaactaacaaaagctaccctgatattactgtcgacgcggccgcgaatttagtagtagtaggcgg

SEQ ID NO: 247754 - DNA, 390 bp, Homo Sapiens
attcgcggccgcgtcgcctgatcaaattccaatcaccctatgaggaacagttggaacagcagagactggcagtgcagcaggtggaggaggcccagcagctgcgggaacaccaggaagctttgcaccagcagaggctgcaggggcacttactacggcagcaggaacagcagcagcagcaggtggcaagagagatggccctgcagaggcaggctgagcttgaggagggccggccgcagcaccaggagcagctccggcagcaagctcattatgatgctatggataatgatatcgttcagggagcagaggaccagggaatccaaggagaggaaggagcctatgaaagagacaatccagcagcccaggaggtcgacgcggccgcgaatttagtag

SEQ ID NO: 247755 - DNA, 418 bp, Homo Sapiens
ggtcgactactactaaattcgcggccgcgtcgacatttagtaactgggtaaagtctgaactatttatcttttcagctggaccagagtgggtttgaatctgatgtgtccaaaatatttataataaatgacttgaggctggacaccacagcacttgggcattcaaactccagttgacatcaacaggcatttacctgtgcaagacccagctgccttttgcctgtaggctataaagaagagtttaaatgaaacataggttcagggcttccagaactatggatgatcataggcaaaacacttaggtaggaggacatagaaatctaaaattggatgactatctgagaacttaaactgacaaatgtaacctgacccactaacaagttttgtcgacgcggccgcgaatttagtagtagtaggcggc

SEQ ID NO: 247756 - DNA, 332 bp, Homo Sapiens
gtcgacacctgcttcacctataccctctccatttgctccatccccgagtcaacgcccctccatatccagacacttcatccccctcacatactctcatgggagtcacatatgccactagtacagagtcctcagaatatcccaataatgttttgcctttccatgaggtgacaaatggaaacttgggaacaattcaagtcatgtccctttcacaaatttaatccaagttgggttcatttagccaggatccctttaagctcattaaagaattgtgggcttttgactattgcctttgatttaacctggcaagacatgtttgtggtattaacgtcgac

SEQ ID NO: 247757 - DNA, 457 bp, Homo Sapiens
gcaggtgtggatgtaggtgtgggagtaggtacaggtgtagatgcagctgtgggtgtggatgtaggtacaggtgtagatgcagttgtgggtgtgggagtagggtcaggtgtagatgcagatgtgggtgtaggagtaggcacaggtgtagatgcaggtgtgggtgtgggagtaggtacaggtgtagatgcaggtgtgggtgtgcatgtaggtacaggtgtagatgcaggtgtgggtgtggatgtaggtacaggtgtagatgcaggtgtgggtgtggatgtaggtacaggtgtagatgcagatgtgggtgtgggagtaggcacaggtgtagatgcaggtgtgggtgtggatgtaggtacaggtgtagatgcaggtgtgggtgtggatgtaggtacaggtgacgcagaagtgagtgtggatagtcgacgcggccgcgaatttagtagtagtaggcggccgc

SEQ ID NO: 247758 - DNA, 751 bp, Homo Sapiens
aatgattaaacctttagtagaattatactaattactttaaactgtggtctacttgtacggacttttcaaaggtgggtgggtcgtagaggctgtaatggtaacattgacatgcccacaggagccttgtaaggttccaaaggactggatcaccataaccaaacagctacccccacattctttctatcctacataagcattcctgccccccaccctctaccttaaccaccctctgtaatgccttgttcgactgtttttctcagtgatcaaaaaaagttaatgtgacttggccaatgatgtcagaaatcaagatggagacaaaaatcaaatgtcactagccaaagcgagtaccaattcttgggctttaaagtctacccaaagtcctactggctcagaatgaaaatgatgcaagtgagcagaagtttgtcaggcctggtccagaccagactggactggtcactgactaagtaagagtaggagttataagctgatcccaagacacaccagcagaaataaaaaactgcaagtccttggggatcagtgactatacacaaccagtgttttgcttatggtcctacaatgtaaaggggtcatttctgggggttcccaaatgactttgttcaagagaggtcacataaaagctagaaatggaacctcaggtgaaggatgacagtctcttcaagtggtgaagcaaagatcagaccccaccttccacgtcgacgcggccgcgaatttagtagtagtaggcggccgc

SEQ ID NO: 247759 - DNA, 278 bp, Homo Sapiens
cgtcgacccatagagatttaactttatcaaatgtaacatgggaaggggagaatagccaatatatctaagacctggaaataggcttaatccacccactgaccctgggaagcattctagagagtggtcatttggccattttaataacagtcttgcaatgtaaatgctcatctattgaaatagaacatttctgagcactagaattaattctaagtgaatctgtcagaaataccttagagtaacatttccaaaggctctaatagtcaaatttaggagtcgac

SEQ ID NO: 247760 - DNA, 355 bp, Homo Sapiens
gtcgaccctgcccccccaacttcaaaaatcagcacttcatccatctagctgctcaagataaatcaagtggcaagccctgccagatccacttactaaacactccacagctggcctcttctcgccactgccactgccacgacctatcccgtccccaccccatccatgccacctggaccactgaggctgcttcctccctggctggcttccactctgctggcatgcagttgattccatgtgggatgttaatcacatcacattccccggtcctgagatcacaacctcttgcagcagcctccgaggctttgtgtaaactccagtcgacgcggccgcgaatttagtagtagtaggcggccgc

SEQ ID NO: 247761 - DNA, 301 bp, Homo Sapiens
gcggccgcctactactactaaattcgcggccgcgtcgacccgtcctgtggtctgcctcagtttatcacttaataatacaaagcaaacaagaaagcaagttagtggattacctgagagagcaagacatagagaagatgttaatgcagggagctggccttctccaaacatatccctaacacacaatattcaagcaattcccaaactgtgatcagagaaccactgggagtaagacctctgatctatatttacaagtctataggtgagcaaaggtagaccttttccgtcgacgcggccgcgaatt

SEQ ID NO: 247762 - DNA, 1156 bp, Homo Sapiens
  misc_feature (581)..(624): n is a, c, g, or t
ttggggcacgctggttttccggggccgctccatcgcgccttcctcctgcgcctcgcttctccggtccagccgccatcttcctttccgcacaggggccgccgagcggggccatgcagccaacgctgcttctcagcctcctgggagccgtggggctggcggctgtcaattccatgccagtggataacaggaaccacaatgaaggaatggtgactcgctgcatcattgaggtcctctcaaatgccttgtcgaagtccagcgctccacccatcacccctgagtgccgccaagtcctgaagacgagtagaaaagacgtcaaagacaaagagacaactgaaaatgaaaacacaaagtttgaagtaagattgttaagagacccagctgatgcctcggaagcccacgagtcctccagcaggggagaggcaggagccccaggggaggaggacatccaaggcccaacaaaggcagacacagagaaatgggcagagggaggcgggcacagccgagagcgagcggatgagccccagtggagcctctatccctccgacagccaagtctctgaagaagtgaagacacgccattcnnnnnnnnnnnnnnnnnnnnnnnnnnnnnnnnnnnnnnnnnnnnactatcaaaaaggggagcgaggggaagatagcagtgaagagaaacaccttgaagagccaggagagacacaaaacgcttttctcaatgaaagaaagcaggcttcagctataaaaaaagaggagttagtggccagatcggaaacacatgctgccgggcattctcaggagaagacacatagccgagagaagagtagccaggagagtggagaggaggcagggagccaggagaatcacccccaggagtctaaaggccaaccccgaagccaggaagaatctgaggaaggtgaggaagatgccacctctgaggtggacaaacgacgcacgaggcccagacaccaccacgggaggagcaggcccgacaggtcctctcaaggagggagtcttctctctgaggaaaagggacacccccaggaggaatctgaggagtcaaacgtcagcatggccagtttaggggaaaagagggaccaccattcaacccactacagggcttcagaggaagaacctgaatatggagaagaaataaagggttatcc

SEQ ID NO: 247763 - DNA, 930 bp, Homo Sapiens
  misc_feature (64)..(79): n is a, c, g, or t
  misc_feature (432)..(574): n is a, c, g, or t
ttttaacagagataccatttatttatttatttacttacttaagacaaggtctcactctgtctcnnnnnnnnnnnnnnnngaaagaaataacgacatttctcccttctggagttcttaggagcttttaatttgcagtgcaattcataggagctacaaatattttcgtgaaatgcattttccctctcccttgattaagccaactttattagacttagctagaggagaaccgggtgactatctggtactggcaacatggactaaggcacaaggctagaagcaggtcacaggagctccacggttttacagggacagagtggactagacaattctctcaggaacatggggaagtggcagattatatgatattccttcaaaaccaaatggctgagcacagttcacaaacccaagtgaaatcttggacatacacttggnnnnnnnnnnnnnnnnnnnnnnnnnnnnnnnnnnnnnnnnnnnnnnnnnnnnnnnnnnnnnnnnnnnnnnnnnnnnnnnnnnnnnnnnnnnnnnnnnnnnnnnnnnnnnnnnnnnnnnnnnnnnnnnnnnnnnnnnnnnnnnnttggacacatcttttattgaaacgtggttaaatcaagaggttggaaaaggagtctatcttggtgtgaggcaatttgaagatatattgatccaggaggaagagaagttaaagaaaataaatggtgatagaagctcctgcggaagaagaggaagcaaagagcctgcagttatgactgagaacatgggcctgaaggagagtcagctccggccactgggaagaagcagggagcggaggtgggggacacgctggatatcaagcaggatacagttcctcgtcaggtttcttaaattcatggcatgaaaatcccagatatctcagtcgacgcggccgcgaatttagtagtagtaggcggccgc

SEQ ID NO: 247764 - DNA, 320 bp, Homo Sapiens
  misc_feature (131)..(159): n is a, c, g, or t
attcgcggcggcgtctacgagagcagctggtgcctgtaattctagttcccttatgacttcattatttctcatcatttaattaacatttttcctaatcctcttcaaaaacaccttgcacaccaggattgcannnnnnnnnnnnnnnnnnnnnnnnnnnnnaaccacagcagtacatttctaaaggatgcttagtgtatgattccctgggttggctacacaattgcaagtccctttgttaaaaattaaaaatttttaagatggcagtaacagagctttaaaccccaagtgccagaccaagggtcgacgcggccgcgaattta

SEQ ID NO: 247765 - DNA, 420 bp, Homo Sapiens
taaattcgcggccgcgtcgacatgctgcctaggctagttttgaacccctgggctcaagtaatcctcctgctcagcctcccaagtagctgagactacaggcatgcctcattgcacccagcttgctggggaagtatttgaatgaggaaagcatagacacaaaatctagcagcccctatgcttcctggcactcctctcagtttccccttcttgtcttactcctcccagaccccatacgtgactgcccaaaggcccaagaaaagggtgaaccccccaattcctgactacagtatgagtcataaagcatattagtgttgttagaaaaaatgcagtccaacttttcgaccacctcttttcctgaaagctggtagtgggggcagggactgcttcagttgtcgacgcggtcgctaatttatattagta

SEQ ID NO: 247766 - DNA, 262 bp, Homo Sapiens
aaattcgcggccgcgtcgacagaaactgaagcagtccctgcccccgctgtggctctctctctctggagaccctgtctgcacctcagttttcctgggcctcctcgggagctgggtaaggcaaaatctgcgggttctgtcccgctggttttccctctgagtggtccggctcctttccctgagcttccactgctgtgcatagctgagagacttgtcccccttgatgtgcggtgtaagctgtatgccgtcgacgcggccgcgaatt

SEQ ID NO: 247767 - DNA, 946 bp, Homo Sapiens
aaaaggctattcaggtatctgcctagtccctgttgtgatttgcttttacaacccttctcagaacatacacacatacaccccttgaaaatctcccacgaaggagctacatcacagagcaattagtgttactttaacacatttaatacaaccgttattcctccagccccggaacaactcatggtttgtctgtgaaccatgcatgtagggagcattgtagacactgtgtggttgaccctcatgattcactccaaatctctcccactgagtagaaacacagctagaagcttgggggagttaattcatctgcttgccagctgaaaaataaatatatgaaaaatgaatggtaaccaacaggccacaagaagccttaccgtaggattctagcaaaagacttcgtcatttgtaagatggagtcacaggaattaagcacttttcctgatgctcagaaacatgggcacagattacccaaaagaggcagcagggcttagtgcactggctcaatgtgtgttccctgaacctgcagcaccagcatcccctgggaacttgttagaaataaaaattctcagtccccatcctagggctactgaatcagaaattgcggggggagcccagcaatgtttgaacaaggcttccaagtaattctgatgcacactaaagtttaacaactactcagtggctaaaagcacaaactctggagacaaactgtgttcaaattacagtcccctctctcctccctcccctatgactttgcgttgatatcttaatatctgtgtctcaatttcctataaaatcgatattataatagtacttaccttatggggccattgtgagaattaaacaaagttgctattggcagacatcctatggctttgaggggaaccagcctggatgaggctgacactgtagagtcgacgcggccgcgaatttagtagtagtaggcggccgc

SEQ ID NO: 247768 - DNA, 1044 bp, Homo Sapiens
  misc_feature (651)..(660): n is a, c, g, or t
ttgggccggataatggcgggcgctgcagaagatgcgcgagctcttttccgggctggggtctgcgcggccctggaggcctggccggccttgcagatcgctgtggagaatggcttcgggggtgtgcacagccaggagaaggccaagtggctggggggtgcagtggaggattacttcatgcgcaatgctgacttggagctagatgaggtggaagacttccttggagagctgttgaccaacgagtttgatacagttgtggaagacgggagtctgccccaggtgagccagcaactgcagaccatgttccaccacttccagaggggtgatggggctgctctgagggagatggcctcctgcatcactcagagaaaatgcaaggtcacagccactgcacttaagacagctagagagactgatgaggatgaagatgatgtggacagtgtggaagagatggaggtcacagctacgaatgatggggctgctacagatggggtctgcccccagcctgaaccctctgatccagacgctcagactattaaggaagaggatatagtggaagatggctggaccattgtccggagaaaaaaatgagtggggatgattggaaatggctttgggcccttatttgctgttctaagagttgtctgtaggggnnnnnnnnnngaggattgcagacctgtggactggttaccccatctccaccctttcccctgttcctctgtctggctccctccagggcaaggaaaacctagggtccttggtcttgggggtggggggaccttttccagcatattcccctgggcctttagttaacatccgagtgacgaagccgggttccccagtacagtgtcttttgggtgcggtcattgtgaggaaggggatgagtgagtgtgggtgtggctggaggaggagctagatgccggtggacagtgggcaggtggatttggggaggagaggatcagcagcagcagcagtactcagtgatagggggcagggactgcttcagttgtcgacgcggccgcgaatttagtagtagtaggcggccgc

SEQ ID NO: 247769 - DNA, 340 bp, Homo Sapiens
taaacttgtaaaccactcccatcctctaatactcccaatccccttacattgctcgtcctactttttcctttttccagtgtttaccacattctaacattgccatagagtttacctgttatgcttatctattaactataacctcagcattacagcataggctattatttactgatatatcctaagaacacaaatactgcaaggcatggaagtacttgctgaatgaatacacaaatgaccacgctcccagctaagcttccttgctgtgagaatgagctccctgcaccccaacccttaaacgtcgacgcggccgcgaatttgtagtagtagtagtaggggccgc

SEQ ID NO: 247770 - DNA, 437 bp, Homo Sapiens
gcggccgcctactactactaaattcgcggccgcgtcgacttttttcctagtggggctacaacttatgcttaatacaaataaatgccttttattcatttaatacagatatttaccaagtaccccctgtgggtcaggccctactctcaccctaaggatacagcaggaagcaaagcagaggtggagaagatcccactaaacacacaggcaaggcacatcagtgggtgatgagcgctaagaggaagtatggccagatgaggtagagggtgaggatggggcggagaggatcctacctgttggcaaagccttttctaccagatggtccaggaagatttatctgataagcaacaggagggtgagacctgaaggagcctccagatcagggctgcctgggggcagggacgtcgacgcggccgcgaatttagtagtagtagtcgacc

SEQ ID NO: 247771 - DNA, 468 bp, Homo Sapiens
ggtcgactactactactaaattcgcggccgcgtcgacgttctgccgcggggcctcctctctgcttccctgaccgacatgcctgggcccgactctcctcctggtcagggctctcctagcgaggggagactttggtggggagaaactagacgtgggtcagacgggagccgcagggcgtctgcaagaggtacacactcctatgggagggacagctgctcacggggcggacacgcaggcattaggctatgcgccaggatgaaatgtctcatgaaaggcaggctgtaaacgcccacaacagctccctggagcctcgtcacggcagggccagagttcacagccaccctccagagagacctcgagaccaaagtggaggaaaatcacaacacaatcgacactcaacaatgcctgcttccctgcttccttcccagcgggtcgacgcggccgcgaatttagtagtagtaggcggccgc

SEQ ID NO: 247772 - DNA, 458 bp, Homo Sapiens
gcggccgcctactactactaaattcgcggccgcgtcgaccttaggacaaatctggaccagaccaggtgtggcttctttttaacctagccaataggaagcacttgttgtaggaaccctcaccccagtctgtgtagatgtgtctagagctgagcctctttcttccagtttggcctttgtgggctctccttcccatttctggcctcaacaaactgacctgccagcaggttctggagccttcccaggcctgcagcaaatagggcttggcaatgacaagatctgtggtagggcagcatttattggatgtcctttgaaattaactttcccatggtccataagtgcctcctgggagtttcttcagggtcctggcttcccttgaacttcatgcttatgctgactcccacacacatgtctgtgtttttcattttaaagatgattggtaatgaattgggggcagggac

SEQ ID NO: 247773 - DNA, 863 bp, Homo Sapiens
ttggagttaatcaggtagagagacaagtaaacaggtgttcagaatcaaactcagcatagactgctgtaggactacacagcagggacacataaccctctttcttgtgggggatagggtggggaggatgggagggccatggggcttcccaggggaaatgatgttcaggctgaaatcttaagaagggaataatattctaagcacagggaatagcatgtgcaaaaacccggaggccagagagcaaagtccagttgggaaacttgcaaatacactacaatttggtctctgtatagaatgtgagctgaagggtagacaggtcatggtggtgggagaggggaagggggagcagcacaggagcagcagcagtgtaccatgtgagaaagtttggactttatcctggggggcaaccagagagctttgagggtttggggaagggctccatttacctcaccagctgctgctgcttttccctttctctgctaccagtcacgctcacttcttgtagttcctgccaaggccacaatctttcttgcttcaggcctttgcacttctgtctggaatgtactgcaaagattattctggttgcagtttgctaactagattagagtagggtaagcctagaaatggagatagaataggaggctgatgcagtggtctaagtgaaaggagatggtgaccaaaactggggaagtggcagcgtggacagagaggcaagggcagatgtatgtgatattgtaggaggtagaattgacagtgtcacaattggcaagtgattgcctttgggggcaagtttgatacctttagccactgatgttcaaatggttagaaggcagcagctgtggtctgattcccagtgatctacctca

SEQ ID NO: 247774 - DNA, 273 bp, Homo Sapiens
gaccagtcctgccccctcacctgtacacctcactctccaggtgtgctcttccctgaacacaccaggatctgctactctgtgctttctgtacaagttctgtcccctctaacgagaagactgctctcaccgtcctccccagcactctcacagtgcacttggcccatgtccccaccctgaccccacacatggaaagccaaatacaaataagctttgtccttgaggagctcatagtccactaggagaaatgggccttgggacacaattatagtcgac

SEQ ID NO: 247775 - DNA, 345 bp, Homo Sapiens
gggctactatgctactaaatacgcggacccgatgacgttggtcctctgccctgacctcccttctctttcctgttctttctgtctgtgcacagccttgccctatcctacacatatctcccaagaaagtccctaacactgtgctccatgctctcctcttcaggaaccacagcccccacaatctaatcacagctatccaagctcctcatcccagcacttaaggctaacagtgtcccctggaccccaaagtcatactccaaaccccgtcatccaatgccacaccacaccctcagtccctgggacgcctcaccttctggtcgacgcggccgcgaatttagtagtagtaga

SEQ ID NO: 247776 - DNA, 114 bp, Homo Sapiens
tgagccaccgtgcctagccttttttcagttcaggttttaaaccagaacctttatggcatgattaatcactgaaattcgtgagataaactggatgctgcaacagctgccgtcgac

SEQ ID NO: 247777 - DNA, 357 bp, Homo Sapiens
cggccgcgtcgacctggattgtctcgtgttagctgctttccttttttgcatttcagtgacttatactgtaaatgttatttgtgaaatgagtccaattcacatgcactagaaaaatacaagttctagtgaataccaatgtttctgccatgcctctcccctgacttcctaccattcacattcttctttattctttttatataaatgacaccaaaaattgaacaaacccaacaaattatttcaaccaacttcatcaaaatgtgtcaagtcaggaattctttataatagtgctgctacaagttgtactagggagattcctttgtcagctactcgtctgacaaggttgtatatatagtcgac

SEQ ID NO: 247778 - DNA, 522 bp, Homo Sapiens
cgaggtcttcggcgcaggccgcgcccagcacacgcagtggtacaagctgcactccaagccaggcaagaaggagaaggaacgcggcgagattgaagtcaccatccagttcacgcgcaacaacctgagcgccagtatgtttgacctgtccatgaaggacaagccaaggtctcccttcagcaagatcagggacaagatgaagggcaagaagaagtatgatctggaatctgcctctgccatcctcccaagcagcgccatagaggatcctgacctgggcagcctgggcaagatgggcaaagccaaaggcttcttcctccgcaacaagctgcgcaagtcgtccctgacccagtccaacacctcgctgggctcggacagcaccctgtcctcagccagcgggagcttggcctaccatggacctggcgccgaactcctcacccgctcaccaagccgtagcagctggctgtccactgaagggggcagggactgctgtcgacccggccgcgaatttagtagtagtagtcgacc

SEQ ID NO: 247779 - DNA, 398 bp, Homo Sapiens
aaagaataagagggttacaagtagcctgaattttcctctcttcaaatagggacttctcaaagaaggtgaatctataatagtggtgtagattcagatataaggacacgtatttggcgtaaaggagaggcaaagttagaggaaccagaaagaatgctacacaaaagatggccggcttctcgcgtgaaggaagattcggatacgggggcctgatggatttagttgtaggcggtttgcctgcagcgagtaaattattcaaacgttcggacttcacaagactaaacttactgggggaataaaaattgaaattttggccggggcgcccatgggctcccccccctgggaaatcccctaaaactttttgggaagggcccaaaagggcggtggggaattataatcct

SEQ ID NO: 247780 - DNA, 289 bp, Homo Sapiens
cgcgtcgacaaccatagccttgactagatggacctttgttggcaaagtaatgtctatgctttttaatatgctatctaggttggtcataactttccttccaagaagtaagtgtcttttaatttcatggctgcaatcaccatctgcagtgattttggagcccagaaaaataaagtcagccactgtttccactgttttcccatgtatctgccatgaagtgatgggactggatgccttcgtcttagttttctgaatgtcgacccggccgcgaatttagtagtagtagtcgacc

SEQ ID NO: 247781 - DNA, 340 bp, Homo Sapiens
acgaaacacccagatgggtcatgagcccgtgcatcagtcagggtctaatggctcagctgaggaagggaggtttaaggaagagactgtggacagaggtgttagggaaggtgtcagagaaggttaaggagccaacatggatcatgggggtggtacagtgttgccagggctggggaggattggctgcagtgtggggtacccagccgctgccatgtggagagggacctgtcactcctgctgtgaactctcccttcttctgccctctgacctcctgctggtgcctcccattggctaaacacagttgatggccagtgcactggggagctgttcttggagcccacag

SEQ ID NO: 247782 - DNA, 292 bp, Homo Sapiens
ggtcgactactactactaaattcgcggccgggtcgactgatttgtgggcaatgagatgatagtatgtgaaaaatttttcagtgagaactatattttgccctccacccgttctccttcctgaaatttagaacccatgattgggtagctatttttcatagtgagttgacccctgtgctccaggatgttggatcagaaagaggaaaggagtttaagtctctgaataaacatgaaacttctcataagtcctagactaccgtcgacacgaccacgaatttaatagtagtaagcaacc

SEQ ID NO: 247783 - DNA, 264 bp, Homo Sapiens
ggtcgactactactactaaattcgcggccgggtcgacgtggcaattcacgatgaagagatctactgcaaatcctgctacggaaagaggtatgggccaaaaggctacggttatggccagggcgctggcacgcttaacatggaccgtggcgagaggctgggcatcaaaccagagagtgttcagcctcacaggcctacaacaaatccaaacacttctaaatttgctcagaaatatgcaggtgcttgtcgacgcggccgcgaatttta

SEQ ID NO: 247784 - DNA, 650 bp, Homo Sapiens
aggggaggcggccttcaagtaaattaaacctagtcttggcattttctcattaaatgcctgagcagctcaatcccaccggcctatataaggaccacggtagacagagcagatgattagcagtttcagaaccatcaaaaagatgcccacagtacctgacttttaattaataactattctgcatctagccatttatctcaagcatctgggggaacttgaaaggtatttctctccacatagctccagtatatcaaggttggggctgagcaaagctgatattaaagttaattatgacctgcaggaaattactgaaaaaccctcacctcattttctacttcttaaacttcaaatcacaattgtaagtttgactttcagaaccttctggaattataaacaaatatcttaaagagaaaactacatttaagtatttctatttttccaagggacagaattaggagcctcccaagctgagacagatctcagctactggctgtatggagttggatgagcttcttacctgacccctgggcttcagtttttcatctgcaagatgaagtttaccagagaatgggacaaacaggagagaagttcctctgcttttatgccagataatcttagatgaatgtggtcgacgcggccgcgaatttagtagt

SEQ ID NO: 247785 - DNA, 1090 bp, Homo Sapiens
ttggccaaaggatgcctctagagcaggaagctttgagaagacctggggagcctggaacttctaagtctaaacaaggaactgactcagcagggtctggctatcttcagagtctgaggagaggcgcatcaaaggaatgacagcctggtacctttgatgaaggaactgacaggaaattaacagcctcgtgcaggcaaggacaaagacaagaaaaggcccatttgggcctcatatctctctggattggaacccgcaggaagcagaaggggctgtttaatcctggctccagagcaaccgtgaaggctggcttcctcccttgaagaagaacaaggtgaaggaaagaaatcactgtgttttcagctcagcggccctgtgacattccttcgtgttgtcatttgttgagtgaccaatcagatgggtggagtgtgttacagaaattggcagcaagtatccaatgggtgaagaagaagctaactggggacgtgggcagccctgacgtgatgagctcaaccagcagagacattccatcccaagagaggtctgcgtgacgcgtccgggaggccaccctcagcaagaccaccgtacagttggtggaaggggtgacagctgcattctcctgtgcctaccacgtaaccaaaaatgaaggagaactactgtttacaagccgccctggtgtgcctgggcatgctgtgccacagccatgcctttgccccagagcggcgggggcacctgcggccctccttccatgggcaccatgagaagggcaaggaggggcaggtgctacagcgctccaagcgtggctgggtctggaaccagttcttcgtgatagaggagtacaccggggctgaccccgtgcttgtgggcaggcttcattcagatattgactctggtgatgggaacattaaatacattctctcaggggaaggagctggaaccatttttgtgattgatgacaaatcagggagcattcatgccaccaagacgttggatcgagaaagagaagagcccagtacacgtttgatggctcaggcggtggacatggacaccaattcgggcactggagccaccgtcagaattcattgttaaggttcaa

SEQ ID NO: 247786 - DNA, 357 bp, Homo Sapiens
acgccagacacgacgtctggcaggaacctcggcctcagaggtgggtcacttatatctctcacgcagatttactatcatgggtcacttaacccgtggatcacacgggttcctcattcttgagttttgggctagtgaggtgccgacttcggggtctaggaggggagacctgatgtggctgtgtgtgcgcacgcgggggtgttgagagtggatgagtgggaggagttggcgaatagaatagagactaggactgaagtaggaaagactccccggtgtttaggaggtttagagagatccaaaactgaggcagaccacaggacggggtcgacgcggccgcgaatttagtagtagtagtcgacc

SEQ ID NO: 247787 - DNA, 440 bp, Homo Sapiens
ggtcgactactactactaaattcgcggccgcgtcgaccccgtcctgtggtctgcctcagtttccctctatgacttggctatctgatggatgcaaaacaggcacagagctactgctgtggtttgaacagttgtcccctccaagtgtcatggtgaaatttaatctccaatatgggcgtattgagaggtggggcctctaggaggtgactgggtcatgatggctctgctctcatgaatggattaatccattaacaggttatcgcaggagtgggactggtgactaaagaggaaatgagacttaagctagcctccttgccatgtgatactctgcaccaccttgagactctgcagagagtacccaccaacaaggaagctctcaccagatgcgcccccttgaccttggacttctcgtcgacgcggccgcgaatttagtagtagtaggc

SEQ ID NO: 247788 - DNA, 480 bp, Homo Sapiens
ggtctactactactactaaattcgcggccgggtcgacccctgcccccatgaaaatctgatcctctaccagttttccccaatgtcggtaaatagcccactgttcacctcgttgcttgggccaaaagactgggcttcaccatgatgcctccgttcccattctttcacattgcacatccacttaatgcatcagcaagtctgccagctttgacttcagaacaacccccagtcagtccacttctgacaatttctactgctaccagcccaagccagatcaacaccatctgtattgccactattaacaccctagcacctattatccacagtcttgcctgttaacctcagaacggctttccctcccacttgaaatacaaactccttcctgtggctcccaaggctttctatcatctggtcccggctaacctctctggctccctctccaattcttcgtcgacgcggccacgaatttaatagtagtagacc

SEQ ID NO: 247789 - DNA, 377 bp, Homo Sapiens
ctactaaattcgcggccgcgtcgacggggccacacctgggaagacagacacagcaccatggaattgactgtttccccacatggtggtgagcacactgggggaagtgggtgccaagcatagtgagcagggaggatgggcactgaatgccttgtctcaggaggctttaagaagtgacctaatgagaatccccccggggggcatagggccagggagcccctcatgaatgacagcaggagacacatctgtctgtactcatcctttactgtgtgcgaggtaccataccaggcctgtgttctcatatgtcatctgtacaacaaaaccaagaggcaggtgctttctggtcgacgcggccgcgaatttagtagtagtagtcgacc

SEQ ID NO: 247790 - DNA, 431 bp, Homo Sapiens
attcgcggccgcgtcgacgtccctgccccctactccagccccccttactcatgctccagctgctctccttgagatacaccatgctgtttaatgcttcctcctctgcctgaaatgacctccaccccttcccatgcagagaacttctactcatccatcaagacccaggttaagagtcccctcttctgctaggcaccctcattgcccacttaaatccagcatcttcctcatctcttgtcccagtgaacagtaccccccgaccctgcactgtttggtctgtgcctgccctcactccatcctgggtagggtcactcctgtggccccagtggagttggatgggagcaggcctgtggccagtgtcctgttaagcccttagtggagcagctaaggtcagacccaggtcgacgcggccgcgaatttagtagtagtagacc

SEQ ID NO: 247791 - DNA, 873 bp, Homo Sapiens
gattcaggaaggaggggcctggagtctgctgcagactctcccgcccttacagcccaaaccgggcactgcagcaatgaggtggtcagtccagggagaggtccgacaagttctcggcacaatgctgcaggaagtcaaagtcaggcacggagaagggcacgcgggaccactttttggcctggatccgcccctgaggggtctccagcagcatgctgcggactttgagcactggcagcttcactgacttgtagatcatctgcagaccccagacctccccacagttcctgcagctgatgacacccccaggcttccagtccttgaagactttgttgatgaccacaggatccctggagacattatagtagttcctggagaggaaggggggtggccacagccctcattgaccctcctcagccccggatctcatgccctcctgccggccaagtctctgcctggaccttgggccttcctgctggttaagaggcacagacttcccaggccaggaaatccaatctttggtgagttctacctgtgtggcctccatcgcacgttcccttgtgcccaggttcaagcctcagcatcggttacctggtcttcacagtctccttatgggtctctctgcctccatttttactcccaatcccaagccatccttccaccaactgctagagggatctaaaaatataaatctgccctgacattctgttccttaaaatctatccaagattcctaagaggaacctcctggataaaggctacactttcacacctgacctttcaaatcttccacgggctagtctgtctttttctaaatctcattattcacagtcccttccactcaggtcaactggtgtcgctttttttgtcgacgcgcccg

SEQ ID NO: 247792 - DNA, 1167 bp, Homo Sapiens
  misc_feature (573)..(656): n is a, c, g, or t
ttggcttgaggaagcccagtacatttcaagttggtcgcggcttgggctccgctttggggaggggcagcaggtttattcactggatctctgaatacccaggccccctccaccatggccagccggggtgggggccggggtcgtggccggggccagttgaccttcaacgtggaggccgtgggcattgggaaaggggatgctttgcccccacccaccctgcagccttctccactcttccctcccttggagttccgcccagtacctttgccctcaggcgaggaaggggaatatgtcctggcactgaagcaagagctacgaggagccatgaggcagctcccctacttcatccggccagctgtccccaagagagatgtggagcgttattcagacaaatatcagatgtcaggtccgattgacaatgccatcgattggaaccctgattggcggcgtctaccccgggagctaaagatccgagtgcggaagctacagaaggaacggattacaattctgctccccaagaggccccctaagaccacagaagataaggaggaaacaatacagaaactagagaccctnnnnnnnnnnnnnnnnnnnnnnnnnnnnnnnnnnnnnnnnnnnnnnnnnnnnnnnnnnnnnnnnnnnnnnnnnnnnnnnnnnnngtatgatgaagaagaacatgaagaggaaactgattacatcatgtcatattttgacaatggagaggactttggtggtgacagtgatgacaatatggacgaactatatactgaagaagactctgggaccctcgtgtctttctttatgatacagagagtaactgtacctattatttgtttcttcagacaagcaaatcatttggtcagagttcatataatctgtctgttccctggagatgggagtagaggatgatgacagtttattttctacacttcccctccttccacatttgtatcacctttgctatcttggggaaagtgcaaaggacaaacatctcaattgtatgaagggagaaaggagaattgaaagaagaactggggttgttagagctgagatgactgtacacatacccctgcccaatttatatagctctttgtggagataattaggggtgggagcagtttgaaggagtaagctgttatcgggtccgcgtatttagtagtagtagcgccc

SEQ ID NO: 247793 - DNA, 356 bp, Homo Sapiens
aaattcgcggccgcgtcgacgtcctggtggcttgcttggatgctggtattgagagtggtgggctgggtacgttctcaggcccctggccagcaggtgtggtgtgggtgatggcagtagcagtggtaggataaccctctgggtcttgagcagtgcactctggtgctgacagtagatacaatgtgctgagtgggccagtcttcaggcccgcaggtagcatgtgcagtaggtgccagctgtggtggtagcagcagggtgtgtgggcctaatctcaggcccctagaagaggtgctcaggtgctgatggtggtagactaggctaggtcgacgcggccgcgaatttagtagtagtagtcgacc

SEQ ID NO: 247794 - DNA, 371 bp, Homo Sapiens
ggtcgctactactactactaaattcgcgggcgtgtcgacagcatgcagtctggcacagatctggctgatagatgttggggatcccattgccagcggcctgtcacatcccctccccatcgcctgtttccagagctgagcccagcttttccgtagcactgtggagatgaacctgtcatggggctcagagtgtggtgttgggagtagccttggcctggtgtctctgcctcacctgccctccgactctgctgcaaacagtcagttcctgtttgtgggggcttgcacaggggcagagggatggacgagctggcttgctcataaccttcgccagccacaaactgagctggcttgttttggacgtggtaaactgaggc

SEQ ID NO: 247795 - DNA, 306 bp, Homo Sapiens
tactactactaaattcgcggccgcgtcgacctcctggctgctggattgtctcgtcataaattcatttcccctggctgctgcactgtgatgtcatacattcatttcccctggctgctgtgccgtgacatcataaattcatttcccctggctgctgcaccgtgacgtcataaattcatttcccctggctgctgcaccgtgatgtcataaattcgtttcccctggttgctgtgccgtgacatcataaattcatttcccctggctgctgtgccgtcgacgcggccgcgaatttagtagtagtagtcgacc

SEQ ID NO: 247796 - DNA, 249 bp, Homo Sapiens
atgttaagtatccatcaagggccatctggtttttacctacaaagcaagccttgaccactccagctctcactggctgctgaacttctataatagtccttctcagtgggggcagaggcggagctgctcttcaaggggaggacatgcatcagaatcactgtttgtggagtggggaggggcagtggtgttgccggctacatctccacccggagaaaacccctgaggtcgacgcggccgcgaatttagtagtag

SEQ ID NO: 247797 - DNA, 1217 bp, Homo Sapiens
gggagatgcagttaaagacttgatgcttcgctttctgggtgaaaaagctgcagcaaagagacaagtcctaaatgccgactcagtggaacaatcttttgtggattgaaacagctaatcagctgcagaaactggagggcagcagtggacctgtgcggacgtctcctcacagcccacggccagggctacggcaagagcgggctgctcaccagccacacgacagattcactgcagctctggtttgtcaggctggcactactagtgaagttgggccttttccagaatgctgagatggaatttgaacccttcggaaatcttgatcagccagatctttattacgagtactacccgcacgtgtaccctgggcgcaggggctccatggtccccttctcgatgcgcatcttgcacgcggagcttcagcagtacctggggaacccacaggagtcgctggatagactgcacaaggtgaagactgtctgcagcaagatcctggccaatttggagcaaggcttagcagaagacggcggcatgagcagcgtgactcaggagggcagacaagcctctatccggctgtggaggtcacgtctgggccgggtgatgtactccatggcaaactgtctgctcctgatgaaggattatgtgctggccgtggaggcgtatcattcggttatcaagtattacccagagcaagagccccagctgctcagcggcatcggccggatttccctccagattggagacataaaaacagctgaaaagtattttcaagacgttgagaaagtaacacagaaattagatggactacagggtaaaatcctggttttgatgaacagcgcgttccttcacctcgggcagaataactttgcagaagcccacaggttcttcacagagatctttaaggatggatcccaagaaacgcagtggcccacaacaacgctgccgtgtgtctgctctacctgggcaagctcaaggactccctgcggcagctggaggccatggtccagcaggaccccaggcactacctgcacgagagcgtgctcttcaacctgaccaccatgtacgagctggagtcctcacggagcatgcagaagaaacatgccctgctggaggctgtcgccggcaaggagggggacagctttaacacacagtgcctcaagctggcctagctgcctccaacacactacgtcagaaggacccgggtctttgaaactgtggtcgac

SEQ ID NO: 247798 - DNA, 356 bp, Homo Sapiens
attcgcggccgcgtcgacatttggagatttttcccccacagatgttcatagacaatttgccattgtcttcaagactccaaagtatatagatattaatattacaaaaccagcctctgtgtttgtccagcttcggaggaaatctgacttggaaactagtgaaccagaacctttcctctactatcctgaaatcacagataaagaagaagtgcagaggaaacgtcagaagctcatgcccaatttttcggatagtttcggcggtggtagtggtgccggagctggaggcggaggcatgtttggtagtggcggtggaggagggggctctggaagtacaggtccagggcagaggaccaacgtcg

SEQ ID NO: 247799 - DNA, 197 bp, Homo Sapiens
tagttcatgtaaagatctgaggaccgtacctgccacatagtaaggggtctatacatgtagattgttacgactgtcccaggtatctaagattgactaatacctgaatcagaggattaaaccaagccccaggttcctggtagccaaagtcagagtgggtacgtgcaaagattctgcaactggagccgtcgacgcggccg

SEQ ID NO: 247800 - DNA, 320 bp, Homo Sapiens
gtcgacatttcttacctctatttctttgcgtgtcagtgtgtgcactcatgcactcacacataggtgccacacataggtcccacacatatggaggtcagaagataactgtcagcagaaggcccccctctctctaccatgtaggctctgggaatcaaacgcagctcatcatgtttggcagtagggaccctatggagtcatctcactggctccagaactctgtgtttgaaataagcttttcaggtgattttcccccctagctaggcaggcctctcgtcttagcaccaatagtcgacgcggccgcgaatttagtagtagtaggc

SEQ ID NO: 247801 - DNA, 341 bp, Homo Sapiens
tactactactaaattcgcggccgcgtcgacgttcctttccactcttgctttccccgccttactttcatgcctgtactgggcacctccctggtgggggtcccgatcttggccttgcttcgctatttctgtcctcctgttttcgctccgctctgcctgcctccctcaatctcaattgtttccccatcctttatgtgcgcgtgtctcttggtggccttggggtctctgtctccctcttcctgccttgccgtcttcttctctgtccaactttcttgcctcgcttatctctcccgccttcctgcatctcttcccgcctctgtcgacgcggccgcgaatttagtagt

SEQ ID NO: 247802 - DNA, 326 bp, Homo Sapiens
aattcgcggccgcgtcgacatacaaagtccctgctgccatgggggtcctgtctgttccgcccacctgaccacctggttgtgaggattaaatgaaataacataggaggaagcacctagtccataacagacactcaactcattttcactcattcagaaggttgttttggttcttctcaaccgcctcctttgttcctcaagttccagtaaaagaatgctaattagtcttcttgaagcagaaatagctgagtgtgcatgaccctaaatgaccccccgggggttattgttctgaggctccagctcaccccaccgtcgacgcggccgcgaat

SEQ ID NO: 247803 - DNA, 194 bp, Homo Sapiens
ctaaattcgcggccgcgtcgacggtgtctgaggtgggtgatgggcccctgggctgcccagtaacacaggaagcagaaggatgggcccaggccttgggccagctctgttcagagagacttgaggcttttgcaagaatgaaggtgagagaggaagcctgccttacaggtgggtaggtgtatgtatggggtaggagt

SEQ ID NO: 247804 - DNA, 374 bp, Homo Sapiens
gcggccgcgtcgacagcccatgtagagggggcagcaagtgccaaggccctggggttggttgtccgatctgaggaggtgtattggcataatctgattagtaggagcaggttggagctgcctgaatagggctatagtttagaaataccctgtagagaggaagtggtgcctggtatactgtaccaggtacggcaactgaaagaagatttagttggcattgcaaagcctggaatctaaggagagaggacacatataggtggcaatctgtgccagaggtcagtaatgggtggagagaatgtatttaatgagtggaaagcaagagtggaaaggtcgacgcggccgcgaatttagtagtagtaggcggccgctatagagga

SEQ ID NO: 247805 - DNA, 1272 bp, Homo Sapiens
  misc_feature (122)..(122): n is a, c, g, or t
ccaccttttctcagcttctgaggctgcgatgcctcaggaactccagtttacagagaccagtgtgtttacttgtaaataaagcctctgcgtggtggagacggtactttcagtgggtctgtgcnccgtggcccctgtgcctgttcggtgggggtgtcccagagaagcctggcaccagtacccccgtacaaggcccagcggactctgccttcccctgacctggctttgcaccccagcccttcttgggccaaacatctttactccaccttcagggctcggggaggacccaggtccgccagcacctggccttgcccctgcctcctggggctgttgcagactgaatgtcattttgacagcagtgtccaagaatcaggaagctgttctagaattcaggttggtatcatcataaatgagttcagaaaaagaacttctgtatattttactaaaataaaaagcttttacaatagctggcctgtggcctcctccagcccaccccagtatggagtgatagggagggaagggcaaggggagcccacctactcaaggaagcgccctctccttcgaggggtgtccaggccgaggggtgtccaggccgggcttctgctcccgaggtgggtggaggcagggcaggaacggcacattctcccagcaacgccgacgtcatccaagaattaacccaagccagaggacgggcatcgccacccagcaacgccagtgtcaccgaagaattagcccaagccagaggacgggcattgccacccagcaacgccagtgtcaccgaagaattaacccaagccagaggacgggcatcaccacccagcaatgccagtgtcaccgaagaattaacccaagccagaggacgggcatcgccatgccttcatctttggacactctcaaaaaagataagcttctgcccagaaacaccacaggttcaagctcatcactcagggagcctgctgccaatcagctgaaacctgcctggggaacagggacttgaccatggggcaaaacagaagaagcagaaacctgcccaaaggtcgctcaaaggcttcctctaggccagacgctggtaagagccaggcgccgtgctcccaggtgagtgtcggtgggacctgcgtactgcccacgcggcaccgaagcccctgcctgctctctgtgaagggttcagaagtatctgtggctgccaaagcctgaagagggcctcaggcctcccatttgcaggtccccaaaccaagccagaaaacaagactcccttgtcatgggctgggggcactg

SEQ ID NO: 247806 - DNA, 842 bp, Homo Sapiens
  misc_feature (730)..(746): n is a, c, g, or t
ttggatgtttggctttttctttggtcggaccccactcatcaagctgtccccgaagaagacctgggaaggcttcattgggggcttctttgctactgtggtgtttggccttctgctgtcctatgtgatgtccgggtacagatgctttgtctgccctgtggagtacaacaatgacaccaacagcttcactgtggactgtgagccctcggacctgtttcgcctgcaggagtacaacattcctggggtgatccagtcagtcattggctggaaaacggtccggatgtaccccttccagattcacagcatcgctctctccacctttgcctcgctcattggcccctttggaggattcttcgcaagtggattcaaacgagcctttaaaatcaaagactttgccaataccattcctggccatggaggcatcatggatcgctttgactgccagtatctgatggccacctttgtcaatgtatacatcgccagttttatcagaggccctaacccaagcaaactgattcagcagttcctgactttacggccagatcagcagctccacatcttcaacacgctgcggtctcatctgatcgacaaagggatgctgacatccaccacagaggacgagtaggggccacccagggccaggagaacaggaacagaactgagcaggggcaggtctccaaggcaagcccagctggtgtgacttagacaatgacgaggcttcaactcactgtcnnnnnnnnnnnnnnnnnggagggtattttttatttgtgggttcaaaaaatctgtatatacagtctatgtgtttagaatttgtgttgtaagtaaactacagctttgagttcgaa

SEQ ID NO: 247807 - DNA, 1193 bp, Homo Sapiens
  misc_feature (567)..(575): n is a, c, g, or t
  misc_feature (955)..(966): n is a, c, g, or t
ttggcagctgttgatctacctcctgaatttattcacctttatatatcaaattgcatctctacttgtgaacagattaaggataaatatatgcagaatcggttggtgcgtcttgtgtgtgtgtttctccaatccttgatccgtaacaaaattattaatgtacaggatttgtttatagaagtgcaggcattctgtattgaattcagtaggatacgagaagctgctggtcttttccggttgttgaagacattggatactggggaaacaccttctgagaccaaaatgtcaaaataatacctcatcagaaccatcccatccattcactgttcagctgtactgtgatttagtttttacaccgttaaaaccctgagtggattgcttggtttaatgcatataaacagtactttatctacttaaagcaaagttttgctttcttgaatgactttttctgtgagatgaatttttgataagaactagggaaaacatgtcttttaggtgtcttgctgatgactatccataggaggaatggctatcccaaaaaaagttccgcaaaaaagtagatgagtttcnnnnnnnnnaagcactaaagaacaaaatgcatttttcattaatacaggcttctgatgaaccaggaatcctgttttcgtaaagttccaatgttgatgagagtaaattcttaagcatttgtcctagaggtgaaagcagctgaatgttttctgaaccatcaagaggcaaacaaacaggagtttgtttcttgaacctgcttatgcacacagctcttaactcctcatgaggcacacagctcttaactcctgatgaaccaaggatttactcataactttctccttgtcatggaggcttaatagacaacagaataaatgcatttcttgggcctcttataaacttgggaattcttagaaagctgcttctattaccaggctgtaatagctggtatagnnnnnnnnnnnnctcttaagatgttctgttattagtctgagacagccatttttttgttttaaggaaaaatatcagtcagtgctccgggaggtaatttcctgtggggtctgcaccctcctgtctgggtggtggatgtgggtttgagaagtaggagagcagggtggtaccgtgtgggctcttaccctttatgtgattttggacaacagtgccttccattaaagttctttttatcaactgtt

SEQ ID NO: 247808 - DNA, 483 bp, Homo Sapiens
catcattcagaagtttttaataaacaacttcattataaaaacctttttttgaaaatgtaattctgtaaaacattgaaaaatctactttaacaaagatatgccctgtgcattttctaatggcacttatactttacaattaaaaaccttgttttatataaagccaaaaatactccaagaggttattcactgtgtttacaaagtgctagaagatttctgtcttgtacttttctctttaaataatctggagttacaaaagagtggctccaaagccttgaccgctggtagggagggagaagcatgagaagtggtgtctcaggagttctagtgccaaaggtggagaggtgcaagtgggaacaatcagctaaggaagtcagctgacacacaaagaaatcggactggaatttttccaaacccctctatggaggcactaggttatcatggtgaacacccttttccctcgccatagaccctactctccagagg

SEQ ID NO: 247809 - DNA, 889 bp, Homo Sapiens
  misc_feature (45)..(45): n is a, c, g, or t
  misc_feature (54)..(54): n is a, c, g, or t
taaaacccaagccctttcaaggctggaacaaatatataccacatncaacccccnttaagtgaagagacacatttaagtccccacaaaagcaaacttaactaccctacctatataacttactttttattgaaagtatcttgcattcatgatggatgctttctgggttttaccacatattttaatgttaaaagttaaattattctttacatgcaagtagtgtgaataattttctccacatgggaacactaattataaaaagatgacatcccacatgggttaagtgtctttttaattgaaaagctaactgtccagttacatttctcccaaaaaaccacaaactgggtagtaactgagtctctaggcaatatatttaaaactaagaggattaaaaataaagaaaaagaaaacaagtcctcagatgcaatgaagggagccctgctacatacaggctaatcaatacagtggtactccttgactgcaggaggctggaagacatcctagtagctccactcagaacatttacttcaagaagcctttttccagtttccaactcatgaataaagataatattttgttaattctattccagaaaacttttttgcaagttgttttatttacaatgccaacttttaaaaggtcactaaagttaactggacaataaactaggcagacattgctttacaaaaaagagggaaagcccaaaatgccacttatagagaacccacagttcagttttattcagagcaaagaaaaaagaaactttccatcatactagaagaaacttggccgtaaggtttgggatctgtgctcaaactacacatgcaatgaggacaatattctgctaatacaattgacttgctgctgcatttgtcccaacttttttgtacaa

SEQ ID NO: 247810 - DNA, 286 bp, Homo Sapiens
  misc_feature (24)..(24): n is a, c, g, or t
  misc_feature (37)..(37): n is a, c, g, or t
  misc_feature (43)..(43): n is a, c, g, or t
  misc_feature (55)..(55): n is a, c, g, or t
  misc_feature (69)..(69): n is a, c, g, or t
  misc_feature (75)..(75): n is a, c, g, or t
aagctttccttttcttccttcttnctcttccctcctncccttntctccttccctntttccccacctctnccttcngctcctttacctacccaccttccctctttttacattttcatctactcattgtctcagtgctggtggagttgacatttgacagtgtgggaggcctcgtaccagccaggatcccaagcgtcccgtcccttggaaagttcagccagaattttcgtcctgcccccgacagcccagcctagcccccttgtcatccataaagcaagctcaaccttgg

SEQ ID NO: 247811 - DNA, 678 bp, Homo Sapiens
gcggccgcatcgcgcactcgctgcctggtgccgtggccgcctcctcgggcagccccccgggctcggcgctggcggcagtggcgagcggcggagacctcttcccggggcagccggtgtccgaactgatcgcgcactgctgcgcctgagccctaccctgcggcggccggacgcttcggcgcagggggcggcgcggcgggcgcggtgctgggcatcgacaacgtgtgcgagctggcggcgcggctgctcttcagcaccgtggagtgggcgcgccacgcgtccatcttccccgagctgccggtgggcgaccaggtggcgctgctgcgtgtgagctggagcgagctcttcgtgctgaacgcggcgcaggcgggctgcccctgcacacggcgccgctactggccgccgccggcctccacgccgcgccaatggccgccgagcgcgccgtggctttcatggaccaggtgcgcgccttccaggagcaggtggacaagctgggccgcctgcaggtcgactcggccgagtatggctgcctcaaggccatcgcgctcttcacgcccgacgccgtgtggctctcagactcgggccacgttgagagcctgcaggagaaggcgcaggtgcccctcaccgagatgtgcgggcgcagtacccgtcccagcccagcgctttgggcgcctgctgctg

SEQ ID NO: 247812 - DNA, 2712 bp, Homo Sapiens
  misc_feature (2215)..(2227): n is a, c, g, or t
gcccctgtctggaaatttagactgatttaagggtgacacacagcagagttctagtggacattcgtgttaaccgtttggtgctcagaatggagatggccaaataccaagtgcttagtgacagaaagtcagaattaatcagttccaagtgactaagagccaatagaattaatctccatctcctgatttatggttgtgaacaaagagatagcttttttcactggcaaatttctgaaattaaactctatttctgaaggtggctgaaattcacagaacacagagaatactgtctgtactataatttcaaatgtttaaacacaaaattatgggtgattatcaaaactattattggtaataggtttcttttgaattctttacacgcccccttagcacattttgtgaagaaatgtgtgttttttcttaatactactcatctttactcaaatacattaaaaaatcattttaacattattttatatcatggattacagaagacttactaaaagtgaataatgcttattgttctcactacatgtttaaagaaccatctgaaaaacatattctttctaataccacttacaaaaaacatttaatgaagataacacttctaattaggttattctagtgatcattttctcatgtaactatttaaaacagatgatttatggcttttcaatttttaaaatttcacatttaatgtcatgttaaaaacttttctaaatcagtcttccagtatcggattcttaagtgagaaaaaagaagacaaaagaggaaaattccgtatcaattatttagcctcctcccttccctagaaaccaacatttccttttaaatgcaaggcacactcctgtttcttagaacagagatcaggaaactttttgtgtaattttgtgtaaagggcaggttaataaacattcttgggctttgcgattctcatttggcttctattgcagctgtttaccttaggctggagtagtgggaaagcagccatagacaatctgcatttataaaaagaagtccaaatttggcctttgggctatagttggccaaccgctgcctcagaagaacagatctacatacataaaagaatcattcgaaagaaactggtctctagtcagatgtgatgtatgattcagaatctagtagctaatcactctagaacattttgatgtcaagcactttgaatttagccaacttaagattcttctattgaaacacatgtcatgcttttcattggagataatttatcttcatttaagaatgtgcttcagtattacttattgagggcattcagtttaaaattaataaatgatgtccatacaatttaatatccaatttaattttttaaaaacttaataaaaaatataacagaattgaaacatttaagtacactcactacccactccagtaattcatttaagtcataccaactatagaatatgaaaaataaattcagaagtgtaattactttaaaatacactacttccacttttgtaagtattttacatttatgtatatattctatagtggaagcagaaattctttctaaaaacattatctccttaaaatcttgaggtgcatattagagccacaggcaatctctgacatataaaattgcagtacaggcctttcaaatttggcatttcactggtacaatacaacaaccaagatatataataactgtacagtgcctagacattccagtaagaaccattattttctttaatgtagaatgattaatacatattctacaaggggcagtaaggttagtaattctatagggtatgtcccgacataattttcaaattgtacaataacacaaacaactttgttaaggccatgttttatttgctgattaatggacaaaaggcaatgtaatttattttcaagtattttcttgaaagtctgtgctcataaaaatcatgaaaagttggaaagactgttaaatcactgaaacttcaaatatatcttacacaatcttgtttgtacaaaaatacaagttaaatataaacataaagcaatcatggtaattttatgcaaatctgttttatgtgatcatcagttatatataaaagtttctcagttctgttatttgtgaaaagatcaataccagattgaatgactacctattggcaaagggccctaaaaagcttactttagcactcatcttttacatggttaaatgcatttcctaatttgagatcacctaaacactggnnnnnnnnnnnnntgaaagggcagtatgtccataaaccaacaaataatttggctgtaatgtatcataaaacacaaaccccacacatctgtacaataaacattatgtattacatacacacaacacacacccagtcataaagcctaatgatgtgctgcttccagttcaatattcagctgtgcattttttcttatttcatcaaatgaatagctttttgtcaccttgccattcttgaagacagtatggagaagatcctgaccatattcctcaaggtctccttttccttcctccagtgtaacaaaattccctgctggcgtcctatgtaaagataatcggccctttttggaccttttgttgggatcagcaactgggtccttgaagacgttaatcccaaggctcattagttgcaacatagctacacttgaaggaacaattcaagagatctcttgtcaacttctgtagcaaacctccaccagaaccgaaggcaatattttcaccaa

SEQ ID NO: 247813 - DNA, 412 bp, Homo Sapiens
actgtttacataaaaaccatttttctaattctaacaagttagaatgtgaggaaggaatgaacatgagtgtttaggaacctgccctttggtgctgggctggcgtcccgcagtggggtgtcctcgctgtctgggggctgctctgctgccccggcccaggtccccttgtggtgttgcctgacgggcctcatggtctgctgtgcagagagagtcaggaaggatccttgaagagtgttggagaaaaggttctgtgccctcaggtggggcttaccccctcgtatttataatcttaatttatatagtgaccaccgtggaaacaaacgcctcttgtattgttatgtacatagtccatacctgagtgctgtacataagttgttctgtgtataaataaaacaagcctgtttttgatcttcaa

SEQ ID NO: 247814 - DNA, 635 bp, Homo Sapiens
tcctttctcagtaacccccgtctagcatggtttcgtaaagcccaggacgcagtggtgaatggcacttgcagtggcatgagattcaacattgatgggactcaggtgggactgtcctcactcaccgggtgcagagtctggtccatgaagagggtttctctctctgctcccaggggagggctggggtaagcggtgggtgagactccctcactctcagttggccctgatgatggaatctttggtgcagcctgagaaaggctagagtggtgggaggggccgggacccctgcgaaggtcacaggccagtgcctgtgggcatgagagaactgcagtggtcacagtgggtgctctggggtgcccatgggcacaggtggcagtgacccacacctgggaaggtgtcagggaagtgtacagaggtggcgcccgggggcaggcagggcaccatgccatgcccgttggcactgctccttgagcaaaagtcagctagtcctctggttccagagagcagaaggcacctaaggcagcgagtggtccacgggaggccaggtcagcctgaccaatggcaggcgtcaatcccagcggcgggagaggttcaggatgaaactgccaacttttttgtacaaagttgttttttaaagg

SEQ ID NO: 247815 - DNA, 869 bp, Homo Sapiens
  misc_feature (586)..(596): n is a, c, g, or t
  misc_feature (683)..(724): n is a, c, g, or t
aaatatttctttcttaggaaaataaaaagagtattaacacaaagaaacaaaatatgaggaaacagagtcgcagttgtaggggtgaattatttaatttagatgcaatcaaccattggaattacagttaacaatggacaaagagatactcagtttttcagtacatgcttatcttgtgctcaagacacttttagccaattagttgctcaattgactaagtacctccctaccttacttatttgaataagtaaggaacttcagtagaggaattcaataagcagaagaacttcagcaagacataattattatatagcagcacacaaagcagacacaaatccttgatggaaaataacttatacaaagcaatatggcacctagcaaattgattggtgtggctgttttcctaatttagaaagcaaggtcattgaaattcctaaataatttgaatactttggttaagagtagagaatcaaatatcaaagatttagttaaaattagacgaaaaagccctcttccttactgaatttctttttcctagaatttgttggtggcttacttctgattaaataaatatgcacacccttaaacnnnnnnnnnnntatttaagaagctattattctttcattgggaaatgaatagaagttactcatacaataataggtgacgtcggaggatttgtggaattnnnnnnnnnnnnnnnnnnnnnnnnnnnnnnnnnnnnnnnnnncatccacgggtttatctgtaatacccttgaaagagtagtttttaaaaaattcttcaagaaatggtgtagttgaagatcttaaagtttttagaaacataacagtttggggactgtgtcttttaggatcaacaatacagttccatga

SEQ ID NO: 247816 - DNA, 548 bp, Homo Sapiens
gtatctttaacaaaggtgtgtttatttccatatattgctcattacatttttcttgccacagttttatctaaagccaggtcaaaatctttctctaaggtatttattaatagtgtatgttcttcagatataaaatccctgtggtcaacatgcaacatttgaatatctattggcactgtacctttatgagatatttatgacatttgttaatagtgaacctcaacctcctgaccgcacatccgaagttgggggcgatgtgggggaacatacacaaaattacaaccacattactggtcaagcactttatagctaaaatctattgactttaaaatagcattgtatgtgaattcagagttttaatgtattttgtggatcaaaaggaaagggtcaaaggctaagctgaacacggagggcactaaattagctaataaggcagctagtgcccctgttcttgccccagccctgtcatatcactacatccgattctctcaaatgttataaagaataatgaagtgaaaacttcaggccaacttttttgtacaaagtttttt

SEQ ID NO: 247817 - DNA, 490 bp, Homo Sapiens
cgggtacctcagtttctcctttattgctcccgtacgaacccctcccctcccgcctgtaaacacagtgctgcgagatcgctggcagagaaggcttcctccagcggctgggtggtgaaggaccctggctcttctctcggggcgacccctcagtgctcggcagtcatactggggtgcgagagaggtgggcagcagctcagcctccccccgctggggagcgaaagtttcttggtctcagcttcatttccgtgaagggcaccgagaactcgaagcccttccagtggtaccagctcactccctgggaaaggggttgtccaaaaagaggcaaaagccggatgtcccatttgctcctcccattccccttaaggaggtggctcccagcactcaaccaacctccccgcagagctcccttcctgaccctctgccgcagaggattgaggcttaatcctgagctggtcctttccagccaataaatcaactccagctccctttg

SEQ ID NO: 247818 - DNA, 348 bp, Homo Sapiens
caagcaggctttattccctacttctggtttgctgttatcagagtctgctcgtttgcaggatttttcgaagttcagtgattgaagattttatcatgtaatgaagcttttgcctaatggggtattagatattatttgaagcccttgctgtgtcaaaaacttttctgcctactggttggtagtggtaaacgcggctataaatttcatttttgttttgaaggcttgttagcagtgatccctagaaattgagatagtacttgctgaaaatttgttttattccggtttcatgtactttttaaagtgattgtactatttgattttaatgtgcacccttcattgtccattttttgc

SEQ ID NO: 247819 - DNA, 526 bp, Homo Sapiens
ttggctctgtccggctcccccagctctcactcagcccgggaagcaggaagccccttctgtcactggtctcagacacaggcccctggtgtcccctgcagggggctcagctggaccctccccgggctcgggctcgagggcagggactcgcgcccacggcacctctgggagctgggatgataaagatgaggcttgcggctgtggcccgctggtgggctgagccacaaggcccccgatggcccaggagcagatgggaggaccccgaggccagacgcacactgtccgagccctctgctcagccgcctgggacccaccagggtgcagctgggctccagggtccagcccacaagctgcatcagggtctctgggagaggaggggcctggagggccaggagtcccagactcacgcaccctgggccacagggagccgggaatcggggcctgctgctcctgctggcctggaagactctgtggggtcagcactgtactccgttgctgtttttttataaacacactcttggaagtggca

SEQ ID NO: 247820 - DNA, 705 bp, Homo Sapiens
  misc_feature (504)..(535): n is a, c, g, or t
  misc_feature (609)..(622): n is a, c, g, or t
gggagaatattattttattatcaaatgtacagtatattgaccttaaaaatacagtaaagcagtcatggaaataacaggtcgtgtattattcatgggcacaaactgactcatggctggggaagaagcagccaccttagaccagatggacaagccagatactgcagagaagtttctgggcttttcggggaagactctagattcaattctgtaaagttatgatgcagttttctccttcctctcctctcacctcctctgagcacagctttcaacaaaaactttgcatacaaggaaatctaatatcgcagccttccccactggagggttcctggagaaggtaatataacagtggtgactgaatttgaaggaggttggagagaaattttttaaaattatatttccatgtctgctgtaatgtatccaagtcttgtaaagaccaataatttattaattttaataagacagaaagtatttctccttctagtctcatcgtctgatttgaaaggnnnnnnnnnnnnnnnnnnnnnnnnnnnnnnnngtgagttccaggaagaaatgtttttcttttttcatataaaatggtagctgtatgtatgtaactctgaattaaannnnnnnnnnnnnncagtcactctggttctaaatccttattgggcaagctggagttttgaagtgacccaacttttttgtacaaagccccgcattagg

SEQ ID NO: 247821 - DNA, 464 bp, Homo Sapiens
caccattttggacattttatttatagaaatttccagcagagccattgttaagtacctctgtcaggagatacctgtgagaacctagacgggaaaacagccacaggttgatctgcatctgttcctccccaacactccacacacaccagaacaggaatagccaggcaagcctctgggtgcctggtgatgcactgtctgaggcacagcccagcacgtgcttcctcagcacatgctacacacacagatctggacgaatgacagaaacttcacagatgtaacttccaagtgcgacctcaaatgacaactttctcaggtggtgcctggataggaaaggcaccggaacagaatctgtagaaaaccaaacctatcatgatcagcattcctacccgacgttaacctcctagactagctgaccttatttattttgaaagcaaatcaagtgtatacagtctctttttaaaaaactg

SEQ ID NO: 247822 - DNA, 897 bp, Homo Sapiens
ttgggttttttatacattcaacaagttgaagcaccacttgatggaacagcataatattgaaggggaaatacattcagattatgaaattcattgtgatcttaatggctgtggccagattttcacccatcgcagtaattactcacaacatgtatattaccgacataaagactatttatgatgatttgtttagaagccagaaagtagcaaatgagagactactaaggagtgaaaaggtatgtcaaacagctgatactcaggggcatgaacatcagaccaccaggagatcatttaatgctaagtctaaaaaatgtggcttaatcaaagaaaagaaagccccaataagttttaaaaccagagctgaggccctccatatgtgtgtggagcactctgagcacacacagtacccctgcatggttcaaggatgcttatctgtggtgaagttggagagcagcattgtgaggcattacaaacgcactcatcagatgagtagtgcctatttagagcaacagatggagaatcttgttgtttgcgttaagtacggtaccaaaattaaggaggaacccccttctgaagcagatccctgtataaagaaagaagaaaatagaagctgtgaatcagagcgcacagaacacagccattccccgggtgacagtagtgcacccatccagaacactgattgctgtcattcaagtgaaagggatggaggtcagaaagggtgcatagaaagcagctcagtatttgatgcagatactctgctctacagggggaactttgaaatgtaatcatagttccaaaaccacttccctagaacagtgtaatatagttcagcctcctcctccttgtaaaatagaaaattccatacctaatcccaatgggactgaaagtgggacttatttc

SEQ ID NO: 247823 - DNA, 1632 bp, Homo Sapiens
  misc_feature (23)..(23): n is a, c, g, or t
gaaggcgactttaaaggcgcgangactgagcgaagggcgtttgggtactgccgtcgccgccgcccagccggggaggggtgcgttagtgtcaggaagcgggctgcgccgaggtcgtagcggaaccagctggcgaccccgcagaatgaaccacaagagcaagaagcgcatccgcaggccaagcggagtgcgcggccggagctcaaggactcgctggattggacccggcacaactactacgagagcttctcgctgagcccggcgggccgtggcggataacgtggaaagggcagatgctttacagctgtctgtggaagaatttgtggagcggtatgaaagaccttacaagcccgtggttttgttgaatgcgcaagagggctggtctgcgcaggagaaatggactctggagcgcctaaaaaggaaatatcggaaccagaagttcaagtgtggtgaggataacgatggctactcagtgaagatgaagatgaaatactacatcgagtacatggagagcactcgagatgatagtcccctttacatctttgacagcagctatggtgaacaccctaaaagaaggaaacttttggaagactacaaggtgccaaagtttttcactgatgaccttttccagtatgctggggagaagcgcaggcccccttacaggtggtttgtgatggggccaccacgctccggaactgggattcacatcgaccctctgggaaccagtgcctggaatgccttagttcagggccacaagcgctggtgcctgtttcctaccagcactcccagggaactcatcaaagtgacccgagacgaaggagggaaccagcaagacgaagctattacctggtttaatgttatttatccccggacacagcttccaacctggccacctgaattcaaacccctggaaatcttacaaaaaccaggagagactgtctttgtaccaggaggctggtggcatgttgtcctcaatctcgacactactatcgccatcacccaaaattttgccagcagcaccaacttccctgtggtatggcacaagacggtaagagggagaccaaagttatcaaggaaatggtataggattttgaagcaagagcaccccgagttggcagtcctcgcagactcggttgaccttcaggagtccacagggatagcttccgagcagctccagcgactcttccagctcctccagctccagttcgtcagactccgactcagagtgcgagtctggatccgagggcgatgggacagtgcaccgcaggaagaagaggaggacgtgcagcatggtgggaaacggggacaccacctcccaggacgactgtgtcagcaaagagcgcagctcctccaggtgacccagcaaggctgttgtctgtatggaaggacacgctcgcggcaagggcagggcctgcgggagggtggcctgtccagtcctgcaagacaaggggaggcctgacagagcccaagaatgaggacaccctcggcacgggaacccattcacttagcgtttgctccagtagctttccctctgctaccaatgcagataaacgcggcttgttttactcaggcaagagaatgtgaatagtgccaagaaaatcctttacattatttaataaaaattgaatccatttt

SEQ ID NO: 247824 - DNA, 187 bp, Homo Sapiens; identical to SEQ ID NO: 176701

SEQ ID NO: 247825 - DNA, 1114 bp, Homo Sapiens
  misc_feature (201)..(201): n is a, c, g, or t
  misc_feature (470)..(470): n is a, c, g, or t
atgaaagtggaatttatgttaaaattctaacacacacagggagcaggagaaacggaagccaactgtgctttcctgggtcttctgctgctctccacactgagacctcaggcccagcctctgcacagacgagtgggaaggcacagtttttgaacacccacctgaggcaaggaggtcccaggagagggagtgttgtcagcccangccatgtcacagggagggagggagcctggtgcttggcagtcaccccacaggcactggtcagccatagaagggaacccagacctccctctaggaggcaggggcaagaagagagagagccgctccttttccttgcaacccaggttttttggggggaggccagcccagggggcagggaactggcttggggaccccttgttcactttggcatcccctgctgcctccagagtcttctgctggtgccccagaggctgtatccaggccccgagaancttgggaccatgggacccatatatatgaatttgtaaatcatgcaattaaagcccaagcaaaatataaggaggtggttgccacatctttctggttgctggatttgacccactgattctactgtgcaattcttggattgactcagtcagcattgacacccttatcttcactttggagtttcctaattggaagacacttgcaccagctgttgaaaggatgctctctgctcgtgcctcaaacgcttggattctacagcaacatattgccactgttccatccctgacccatctttgtcgtttggaaattcggtccagtctaaaatcagaacgtctacggtctgacagttatattagtcagctgccacttcccagaagcctacataattatttgctctatgaagacgttctgaggatgtatgaagttccagaactggcagctattcaagatggataaatcagtgaaactacttaacacagctaatttttttctctgaaaaatcatcgagacaaaagagccacagagtacaagtttttatgattttatagtcaaaagatgattattgattgtgagataggttaggttttggggggccagtagttcagtgagaatgtttatgtttacaactagccttccctgtaagcgcccc

SEQ ID NO: 247826 - DNA, 462 bp, Homo Sapiens
ccactggaggtgggctttattactgtcgccatgatgtgaaaagaggaagacagcacccattcccacgcctcctagacactgtgcaccaacaactgtctgctggggttagcacggagctgtccccacccccagggtcaaagcacccacaggtgccgagctggcccaggagacccccacgctgctgacgctgtttgccttgtgtctgcacaggcctctactaaactctcccacacaattagtgtcttaaatatatgtacacgtatatattttgtcccaactgtgtcagttataaaatgaaaactgaccacttctccttacgttatcttcacagtagctgtgcagaagacaacaaatccagtgttgatagctcagggcaggctgcccaccccagcaaagggaagttcttcccccatgggacccactgggggacccagtgccgcggccacatctccgtgcttgggt

SEQ ID NO: 247827 - DNA, 887 bp, Homo Sapiens
  misc_feature (706)..(706): n is a, c, g, or t
  misc_feature (774)..(774): n is a, c, g, or t
cgaagccagccattacaaaaaacgagcgggagctgaccaggcttgactcgggtacagaacgaggcaccagtccccttgcgaaccgaacggcctcgcagtggatggaggaggcccagccctgaggtctacctgttcactgtccgtatccacggcgccttgggcttcctaggtggcgtcctggtggcactcaagcaaaccatgggggactgtgtggtcctgcgagtgccccatgcgcgcttcagtgtgatgcccatgctgttgctggtgctgctgctcttgctgcggctcgccacgctgctcccgagcccggcgcttgtttcctatggcttcgggctgctctccagttgggtatatattcgcttctaccagcgccatagccggggcagagaggacatggctgaccactttgctttcgccactttcttccatgagatcctgcagcctgtggtgggtttgctggcgaacttggtgcacagcctcctggtgaaggtaaagatatgccagaagacggtgaagcgctacgatgtgggtgccccatcctccatcaccatcagcctgccaggcacagaccctcaagacgccgagcggagaaggcaactggccctgaaggcactcaatgagcggctgaagagagtggaagaccagtccatctggcccagcatggatgatgatgaagaggagtctggggccaaggtggacagccccntgccctcagacaaagctcccacacccccagggaagggggctgccccagaatccagtttaatcaccttngaggcagctcccccgacgctgtaactccagaccaccttgagtgtggcacctcccctcccaagccccccttgacatcctctcagctactccagggcacctgactgctctgagaa

SEQ ID NO: 247828 - DNA, 369 bp, Homo Sapiens
  misc_feature (293)..(293): n is a, c, g, or t
tttgttcatatgacatactttatttccaatctacaaccattaaaaacgctttataagtttacactgtacagttattctcatgtctgaaataagacacaggggcagggagagctggtggattggactgcagttgtcctagcacccgatccatcctaggaaggagccttttgaagacagaagtggaaaggagagaatagtggacaagagaggtggacagttggcccaaggatgcccttggtcccttccctcccatgggccttgccttgggggttcccccaggcccatgactgcangaccctcaccaggaaaccaggctgagtgggaagggggttcacagtattggcgggggctggggaggggccaggatga

SEQ ID NO: 247829 - DNA, 1283 bp, Homo Sapiens
  misc_feature (582)..(592): n is a, c, g, or t
ttggcgattcttcttggcccttccttcccttccacagtccctctccaccctaagcccagcgggcccgcctcccccgtccttcccggcaggtgacggcggaatcccgctgtaagctgctcagctggctgatcccggtgcaccgccaattcggcctctccttcgagtcgctgtgcctgacggtgaacactctggaccgcttcctcaccaccacgccggtggctgcagactgcttccagctgcttggggtcacctccttgctcatcgcttgcaaacaggtacctggggtatcaaacaggtacacgcggcatctggggacgcagccaaactcccccgccactccctggccgcccgtctttccagcgcgcacgattcagtgctgggttcccagaactcattttatcagacatttgcatacgcatatatcccttagccttaacttcacaatttctccacaaacgaaaaatcctgtcactcggcttccaaagaaatagcctaatagactaatagctgtaatcagtcccaaatagctcttttggcacctctagtctagcctccgaaaaagccttcaaaatttcccaagcnnnnnnnnnnnagttggacagtagttagatcaactgcgctggaagtacgctctaggtcacttacgtggaagcagtggagaggcagagccccggctgtctctctggaagggatggggaaagtccgggcgtcatactggggtgggcctggggcccgggaagccgcaaagcggggttgagtgcgccctgtgttgcaggtggaggtgcacccgccgcgcgtgaagcagcttctggccctctgctgcggcgccttctcccggcagcagctctgcaacctcgagtgcatcgtgctgcacaagctgcacttcaccctgggtgcgcccaccattagcttcttcctggagcatttcacgcacgctcgcgtggaggcggggcaggctgaggcctccgaagctctggaagcgcaagccctggcgcggggggtggcagagctgagtctggccgactatgccttcaccagctactccccttccctcctggcgatctgctgcctggcgctggcggaccgcatgctgcgggtctcgcggcccgtggacttgcgactgggagaccacccggaggcggcgctggaggactgtatgggcaagttgcagctgctggtggccataaacagtacttccttgactcacatgctgcccgttcagatctgcgagaagtgcagccctgcccccgagctcgaaataaaacagatccttcgtttccttt

SEQ ID NO: 247830 - DNA, 464 bp, Homo Sapiens
  misc_feature (426)..(426): n is a, c, g, or t
  misc_feature (435)..(435): n is a, c, g, or t
gaactgggaatctcaatttattgaaaatacatgttttggttgacaaagatctgaagaacagttctgtacacttctgaagattaagaacaagttttaaaaatttataaaatacccgtgaatagggaacttatagcaatattttacctatttataataaattaatcacccaaaagataacttggaacatcaaaaggaaaaatgctcagatttcagtttgataactgtaccttcagcaagtatttctgagtgcctaatacgaagagggactgcttcatgtgtttgagatacactgtgaataaaacagacaaaaattcctgccttgttttctatctttattaggcttgaagggcccttaggtggggtggggcagacagaaaatcagctcctcccagagtctctaggatgagggcatcccttctgctaggngtaaaaggncctgggttgctaagggggtccacccgggg

SEQ ID NO: 247831 - DNA, 1153 bp, Homo Sapiens
ttgggccctctctttctagaggcagccaatttcagctgcctctctctgcttacctacgtatttccatgtttcttggttcatcatctgaacgtcatcagctgtgctcctcttacagaagaggggacctggctcccttccaccccgacattgcccacccctcctcctcctcagttataccagccatgcttctgcccttcactttccagccaagaaacaaactttaattatgcaccctcaatagatacatcttgttttttcccgggtaagtaaacatctcatcttttcctctttttcacatttccggcaaagttcttccttccctgcaccgtggtcgccatcctgccctgccccacccctttcacgccatcagcctcactccgcccactgcgcggcttggccccagagcacctgtcaccacggtgctgggagtccccctcctctcttgcctgcgacacagccctagcagtctagacccctgtttaccactcctgtggtggaaactggctcctagcagcttcctgagttaggggaggtgggttctgcaagcttacaagtgcgtgatggctggattctgctctcgcctgaggcaatgtggacgtggaaacaccttctcttcagaacccccgtcttccagcctccattgctgtcactgacacgttcacagacattctgaccccagcccttgctttctgaccttctcttttttctcttagatctccaggttcccttccttaccccgggagcctttcttcatccaccgtcctggggcacctggtggcaccttcagtctgggaaacacctgcccttcactttaggggaattgggcccctgttcgtttgctaagttttcctaccattttctgatttgttttttctttctggaaaatgtattagtcagatgtaaggcttttctggattaatccttcaactttcctttctttctttcccttcctgcctgtctccctgttctttcttacactttctcagggagattcttgactgtattttccaactttgtatcgaccattttacttttcctgccatattttcaatgtttactgatgtttctctgccctttcagtgcatcctgttttatttcatgttagactgaatcatgtgaaattgataacaggttttcagccacacacacacac

SEQ ID NO: 247832 - DNA, 396 bp, Homo Sapiens
cccctttctattattactttgtagtagaaagaaagttaatgaaactgagaactgattggagggtgtttgatcatttagtttttaacaggctgaggcaacatggatcagtgtgtgtccccctcaggaatgtatccacagtggccttccttgctggtgggcagtgtatcctgatggcaggggacaggtcccattaatgaagggtctgcaacataaagccttaaaaagacacacactaagaaaactgtaaacccttgaacattgttatttatattttttaaaatggaaaagatcactatgtttgttgtgctaaccacttatttgattctgttttgtggtggacatagatgattacgtttgagctttgtattttgtgaaacccttaatgaaatgaattcc

SEQ ID NO: 247833 - DNA, 406 bp, Homo Sapiens
tgccgccccagccgttgccgcctgcaccggacccggagccgccatgcccaagtgtcccaagtgcaacaaggaggtgtacttcgccgagagggtgacctctctgggcaaggactggcatcggccctgcctgaagtgcgagaaatgtgggaagacgctgacctctgggggccacgctgagcacgaaggcaaaccctactgcaacccccccctgttacgcagccatgtttgggcctaaaggctttgggcggggcggagccgagagccacactttcaagtaaaccaggtggtggagaccccatccttggctgcttgcagggcccctgtccaggcaaatgccaggccttgtccccagatgcccagggctcccttgttgcccctaatgctttcagtaaacctgaacccttgg

SEQ ID NO: 247834 - DNA, 647 bp, Homo Sapiens
  misc_feature (34)..(34): n is a, c, g, or t
  misc_feature (141)..(141): n is a, c, g, or t
gccggggtggggccggcgcacccttccgggggcntgctagacctgagcgtcttccgggcccgcggttttgtgctttacgccgtggccgcctcggtcatggtgctggggctcttcgtcccgcccgtgttcgtggtgagctanccaaggacctgggcgtgcccgacaccaaggccgccttcctgctcaccatcctgggcttcattgacatcttcccgcggccggccgcgggcttcgtggcggggcttgggaaggtgcggccctactccgtctacctcttcagcttctccatgttcttcaacggcctcgcggacctggcgggctctacggcgggcgactacggcggcctcgtggtcttctgcatcttctttggcatctcctacggcatggtgggggccctgcagttcgaggtgctcatggccatcgtgggcacccacaagttctccagtgccattggcctggtgctgctgatggaggcggtggccgtgctcgtcgggcccccttcgggaggcaaactcctggatgcgacccacgtctacatgtacgtgttcatcctggcgggggccgaggtgctcacctcctccctgattttgctgctgggcaacttcttctgcattaggaagaagcccaaagagccacagcctgaggtg

SEQ ID NO: 247835 - DNA, 644 bp, Homo Sapiens
gcagatagaaacagctttattttttccattcaggctttatcaaatagcttgttcaaaaagcatatacaagagcaaaaaataccacatgcagtcaaacttcttttgccttatagtcattggctttcttttagaaaagagtgtgcacttgaataacttctaattcaaacattttccaactgtttctacttcatttttcaagttagcaacgacagatacattttagttaactgtttcatattccttatctttattcatactgaaataatataaagcctataaaatcaaagcatatactgttcagaaatctggaaaggttcttttacataatagattctgacacgttaagaaactacacacaacaaatatttgcaaaatgaatgaaaaataggataaagctatttaaaagtcaacatagtaatatttatctaaataattttaatcaaatgtacaacatatttatctgatatcatctatcttttagaatacaaaaaagtgctcagattacatttaaaaaaataacaaaaatctcttagaatggaaataatttaaataaggacggtagcaaggggaattgaaattacatctttgctcccaaacaggaaggcaggtgtgatgtatttgaaaatcagaaagggacacaacac

SEQ ID NO: 247836 - DNA, 460 bp, Homo Sapiens
  misc_feature (90)..(90): n is a, c, g, or t
agtctcttcccagcctggccctggcaaggggcgggtgggcgctgccaggcgggtgcttctcgacgcacttgctcccggaggctgcgcccnggcgcctggaacccgaggtgggaggaccggttggtgtcaccctgctcggccctcagccctgccgcgtggggcgcgtgggcacggagcttcctgcctctctgctccgacacccggcaagcagccggagacaaaacgccttaaagcccccggcccagccctgcaggtatattgcaggggcctgggggcggccctggactggcgggcggtttcccagtggggtgccctggaggctgccgggcagagtggagcagcttggggccgtgcccagggcggtggctgtgagtctagtttttgctttaccaagtgtacagaaatggcatttacgtttctctgatgctcccttgaagccatagaatttaggggctttttt

SEQ ID NO: 247837 - DNA, 450 bp, Homo Sapiens
  misc_feature (367)..(367): n is a, c, g, or t
  misc_feature (379)..(379): n is a, c, g, or t
gaggtcactgggttttatttgagtccaaaggggaaggcgttgactcccacccaggcccgagtgccctgaggctggaggagggaggcaggatggcagcacaaagcaagggcttcctgccctcctggctgcctgcaaacgggagtggagaccgtcagagcaagccccagcttttttcagaggagggttgattccaggactagagctcttgtcttgtggctgacaccttctttgagcaggccccctggggtcccccacatagcaatgcctccagagcccctcggccttgttggtgggcttcatagatgtggtcttctccaaactcccccaagtagtgcaaacatgtcctggagagcctaggggagcccancaggagcctcanatgctgcccagcccacagtggggcaaaccaaggctccaggagcttcatcctatccccaagccccgggcatc

SEQ ID NO: 247838 - DNA, 1744 bp, Homo Sapiens
  misc_feature (485)..(493): n is a, c, g, or t
  misc_feature (1289)..(1302): n is a, c, g, or t
ttggaaaagattcagtcttttatcacaggcccttttgaaactcagatcccaggtctctccgtggtatgtttgtatttggggtgtccctccggctctaggcggcctctgacccgctgtctactccccaccttcggtgagcggccgccatggtggagcagggtccgagccacgtcctgcagggcacgtctggggcatttcctgttttgtggtaggaaatgtccctgacctttcagaaccgaacccaatcctgaggctgactcctctacggaaaatgaggacaggacgggggtgagggaatgagagtgggaggtccctgcacctcctcgcccggctcctcaggaagaaaaccgctggcccttcccgagtgtgccggccgagggccgagggccgtgcacatggggagagggcgtcagcctgatggctgagcttttaaatgtcatcatcataacattatttatttaaatgtagttattttggtatttaannnnnnnnnagagaggaaaaaacctgtattttcctggtgggatgaaatagggatgaaatggctcagaagtggtatatttaggcaattttaaaacatttattatttacataaagaccaaatatgatgaatctgttccgtgaattgtgtcggccctcagcatggggctggggcagcgtcactgcggtgacgcccattgaaaggtatgaaatgactgcacactagctggattatcactcagccgtttaagaaataaaagcaaaaccatcacgtgactgagaccgtgtgtgtgaccgcagcaaagcgcagcgtgtggatggatcagagcccctcggtgcagctgtctgcatcttccaagcactttacagataccttggaatggtatatttttgtcttcttactcagaaggtttgcagtttgtaaaataatcaggattctgctctgtcctgtgtgtggggtcagctccctccacagagggctccagctctgttggtcacagctgatggggttctctgattgataggagacgagctctcgagctctaaggaacagtgaggtcgccggtggggagcttggctgggacaccaagcaaatgcatcgtatgtccccttggagacgtttttatgcagctgtgtatgttactatccagaaggagtcgggggtagactttcccgtgtaagctcagtccataaactggttacttctgatcctggaacgtggacttcacatgataggtctggatctgtttctgttgggatcacaggtaaggaaaatgtccattcaaatggtaaagaagggaggagggtgnnnnnnnnnnnnnngctgtaggcaccattctgcatcttgaacccagactgaagtgtgcctctcacagatggaaggtgcacacgctcctgtctcctcctcactctgccacgttcacttggctttttcattggtacctaggaatttaagaatatcgaagcgagagcagtaacaaaccatagatgagcagactcccacaccgggttttcttgcccgtctttaaggcactgtttctaaattttgaacttagctctgaatccccaagaacttgagcacagcaagggttgctgagctgctgtcgccgcagccctggcccctggtgctggagctgcagcacctttgggagaggtcctgcgtcgtcctcagctgcgtcgctgtgaactcccgctctccactgtgttcctcagtgtctgcttttcaggaagtctgctgtgacctttgcccaacttctgagctcct

SEQ ID NO: 247839 - DNA, 511 bp, Homo Sapiens
ttgcactcggagcttcgggggccacagactgtgggcccggcgcatgggcaagtgcaaggtgtactgggaaggttggcggaaccctccaggctccgccagctcctccaccccagcctgcctgctgcctcggaactgtgacacccccatcttcgacttcagagtcttcttccaagagctggtggaattccgggcacggcagcgccgtggctccccacgctataccatctacctgggcttcgggcaggacctgtcagctgggaggcccaaggagaagagcctggtcctggtgaagctggaaccctggctgtgccgagtgcacctagagggcacgcagcgtgagggtgtgtcttccctggatagcagcagcctcagcctctgcctgtccagcgccaacagcctctatgacgacatcgagtgcttccttatggagctggagcagcccgcctagaacccagtctaatgagaactccagaaagctggagcagcccacctagagctggccgcggccgct

SEQ ID NO: 247840 - DNA, 1443 bp, Homo Sapiens
cccttcgccatcaacacgctggcactgagcacagtcaggcacctgcaggagctggtcggccaggagacactgcccaggacagccccgacctcctgctgctgctccggctgctggcgctgggccagggagcctgggacatgatcgacagccaggtcttcaaggagcccaagatggaggtagagctcatcaccaggttcctcccgatgctcatgtccttcctggtggatgactacactttcaatgtggatcagaaacttccggctgaggagaaagccccagtctcatatccaaacacacttcccgaaagcttcactaagtttctgcaggagcagcgcatggcctgcgaggtggggctgtactacgtcctgcacatcaccaagcagaggaacaagaacgcgctcctccgcctgctgcccgggctggtggagacctttggcgacttggcctttggcgacatcttcctccacctgctcacgggcaaccttgcgctgctggccgacgaatttgcccttgaggacttctgcagcagcctcttcgatggcttcttcctcaccgcctctccaaggaaggagaacgtgcaccggcacgcgctgcggctcctcattcacctgcaccccagggtggccccgtctaagctggaggcgttgcagaaggccctggagcctacaggccagagcggagaggcagtgaaggagctttactcccagctcggcgagaagctggaacagctggatcaccggaagcccagcccggcacaggctgcggagacgccggccctggagctgcccctccccagcgtgcccgcccctgccccgctctgagggccctccagacctgctcgggtgctggggccatgccgagtcgcggccctgctcagccggaagaggctcccggacctggatgtacagggcagtctctcttcccggggctatggctgggcctgtcctgccgtcatggccccctgcttcctgctccttggagctggctcccggaccttgcccaccatccatgcagtggctcccagggcagagcctctccttgtactttggcagccatagaaagcgtgctcattttctgttttcctgtgttaggaaaaaaccacctgttttccaaggggagagggcggggcctgagggtgggggcggggcctcttcattggcccagcttggcgaaagcgaggcacactgcttactgccttggggttgtggagatggacccgtgacctcgtggaggccgtgtgggggcagcagcctggcctgtgccatggtgggtgtcctggggcctgtgcggagggagccacctcaccctgcagcccagtttgcaggtgtggccttgtttctccttgcccagcagtgctgccttcagcggccgtgacggggccagctggacacacggtgagattttctcgtatgtaaataaaaggcattttggtaaacgtgaaaa

SEQ ID NO: 247841 - DNA, 504 bp, Homo Sapiens
ttggattaatttaaaggtaaataaagtcagctgaatctacatgtctcttgttttatttctctctaaacttgaaaacagtaaatctgcagatactgtgaggcacaaattatactgtcaacctactgttgctatggttatatactcccacttcatacattaccaagagtcgatcactgatttaaaatttttaatttctatagttaagatttactgcctaatatagaatataaagttaagttaacatactaacatttctcctttggaggaagttttaatctacttcaggatgcatattattatcaagatactttcatatacaggatagcctaattttatttgtttaaatatgcttaatatgccccagattgcaaatgcatccagtcagtaatatcactgtctgtatgtggaggacatgttcccatggatcatatgtgaagatgtcaataagcttgcattaagccacctgctttgtaagtggattgattaataaataacttatatttc

SEQ ID NO: 247842 - DNA, 444 bp, Homo Sapiens
  misc_feature (369)..(369): n is a, c, g, or t
  misc_feature (417)..(417): n is a, c, g, or t
cactggagacaggaggttttattgatgctgatgggggtaggaaaggtccccagaagcatgggggctgagtcagtcagcaaatgcgtaaggcctaggcacagaggagcaggttagggcacattcaccttctcaggattctgtggctccctcattggagaagggagagagcatcttgggggcgcaattccaagagcagcgagggcagaggttagagatggctgagagcccctaacctgaggcggcaccacaataggcagcaacaactgtgtggaaagctggatgaactggtcagtagcggaaaatgggagggggcactgggttggcctcttggggaggggtccaaccttggcttggatgagctcatgagantacccagttttcccaaggcagaggggggcagagcaaaagccctttttntgcaggcctcctttaaggagaaaaagg

SEQ ID NO: 247843 - DNA, 665 bp, Homo Sapiens
  misc_feature (423)..(433): n is a, c, g, or t
ttggcctgtgaggagagttggggcccagccgtcttcctggcctccttcctttcctcgtggcagaggcctgcatgtgggtgccagaggccagctctccccctccatcttgggggggcggagcagttgggcccaagctgcccgggagggtgggtgcagacacaggctgaggaccagccctggccctgccccgccatctgctttcaccaagctgtctctccaccgtggcttcccttctccctccaggccaaagtgctgctgattcccactcccttggttttcgcctgcccagcgttgctgtttgcgtggagggtggggggagctcagtggcagggaatcagcggtccgtggggtcgtggggacgggaacatgtgcccgaccgctccatcccctcctcctccttaggatgcataacctaccttgtcnnnnnnnnnnnaaattttctttccaggtagagtagctctttgtacataaagaatacttgaaaaattaattgtatgatgtatgagaagacagagtctcctagttttgtatcttgttgtatgactgccatgagttccaccagaaagccactctattttggtctctgtgacattttaaatgcgtgacagaagtgagcaaataaagtgaggaagaaatctatatatgagataatatagattgtattg

SEQ ID NO: 247844 - DNA, 426 bp, Homo Sapiens
cttttattacaatttttattgtgataaaaacacataaaatttaccctttcacatactttgtgtgtaccgaagagtattgttaactataggcatatttttatacaacaaatctcaaaaagcttttccatcttgcgtggctgacactcaatacccattgaacaactcattttctcctccaccagcttgtggcaaataccgcagtactttgttcttctgagtttgacgttagataccccatataagtggaaatgggtgtatttgtcctttcggaactggtttatttcacttagcataacgtccatgttgtagcatatggcagaattttgtttttaaggctaaatgatattgcattgtatgtatataatgcattttgtttaccaattcatctgtcaatggacatttacttggcttccacctcttggctct

SEQ ID NO: 247845 - DNA, 1158 bp, Homo Sapiens
gagcaatgcttttccctataatagccaactttgtacaaaaaagttggatgtaaaattctgcttaacttacattttattgtatctgaaaaaccaattttcaacgaacagaatacaataactatcatttatcattagtgattgtgaaagcattttgggatcttgtaattactttaaaacaatattagcaaccctaaatgttaatctgttacgcaaaaataatcctgtgtacttcaattttctcattatttaagttgtaaatatttgaccctactgtaataggattctctgatttctatatttcagaattgccattgccttcagaaagtgttgatattattatttctgacattccatttgggaaaaagtttaagttaggaaaagacatcaaaagcattctacaagaaatggaaagagtgcttcatgttggcggaaccattgtattgttgcttagtgaagatcaccacaggcgccttacagattgtaaagagagcaacatccctttcaattccaaggacagtcacacagatgaacctggaattaaaaagtgcttgaatcctgaagaaaaaactggtgcattcaagacagcgtcaacttcattcgaagccagtaaccacaaattcttagacagaatgtcaccatttggctccttggtaccagtggaatgctacaaagttagccttggaaagacagatgcgttcatatgtaaatataagaagtcgcactcttctggactgtagcaggcttgctgccatcagccgggttcaggcccttgtaagttagctgtacagcagaagtttgctgtctctaggattcatatagcacccaagagctccaagtaaccaaattcccccaaagacaggaggtgtggttgatgggtacacatgcttggtaagagtttctgctttaatattctaaagtacttaatgtttttgaggaaaaagttatcgaatattttttagacttaagttttatcttctgtcagaatgtgaaaagttctgcccagtttctgagcaaaaacttcaatttcaaaataaaggttttcaggggttctcttaagtgtatcacaatcaacaccaaacgggatattttaactatcagattttcggaaatgtaaaaacctttatgtgtaacttcttttgatattaaacttgatttttg

SEQ ID NO: 247846 - DNA, 825 bp, Homo Sapiens
tttttgctttttggggtcttccccctcccagatccaatcccaccagaatctaggctgggaagctctcagatgcagccaccagaatctaggctgggaagctctcagatgcagcctccacttccatcaagaggagaagggatgtcatctgtggttccacacagccgccccctgtctagtatcactgcaggctgcgggtggcactggacctctctggtctagtactcttgggccacccccaagcccactgttcacacctgtccccaacccataatttccccactccctcgacacttgaccctttgttcccaaccccactaggcctcaaaacactcctggcttctgggggtttgtcccaaagtcctctcattggtgttaggcaagaagccacaattccaaactccccaccatgacagcaaacagaagcctcattataaagtagctccagaagcctcattataaagtagctccagaagcctcattataaagtagctccagtaattggtcagataatggcgagttacagggagcactgctggtcatcctgacaagtcagatgactgaaccgagcatgaatggcactcgaagtttcacaggcccccatggatcctgtttttgtttttggtgaccctgacaccaatttaagacacatttctaattggccctggctgggattccctggaagaggacgtccagtccaagttaggtggggtttggttcccggtgcgtgaacttgcaaggctccactctgtactatcacacccacccccccaatgccatacactttctttcaatttagggattgtttatagtcagtcgagtttttcc

SEQ ID NO: 247847 - DNA, 451 bp, Homo Sapiens
acagcttgcaaggcttgtgagcagtgggcagggtcccagaaggggccccatggactacggcatcactcatgttctgtggtcgggccctttgctgtgctgtttggtggagaaactctgaccagagctagagacaccatctgcaatgatctctacatctatgatactcgcacatctcctcctttgtggttccacttcccctgtgcagatcgtgggatgaaacgcatgggccatcgcacctgcctttggaatgatcagctttacctggttgggggttttggtgaggatggcaggacagccagtccacaggtttgcatcctggactttatttaaatagtgccaagacacatcactaagcctcgttttgttttgctttgttgcaaacctataaagcgttatcaccagagctatctgcttcacttcaaatgcttattaaatttcaatctgagactcc

SEQ ID NO: 247848 - DNA, 426 bp, Homo Sapiens
ctacttcaccatctcttaaggactcggcatttgtccacagtcagactgcaagagagggtaggtcatgaacagtcacccgtgctggctgtagcccccacagaggcaatcatgcccaatagattcaagagaagctaagcggaaatggagggcggaaggtgtgatctgtgggactgtctgggcctgttactcatcctgctatcaatttcttattaattaatcttgatgattcttattaattaatcacatttgcaggaaattcagatgaggcaagaaaattttattggcctgggtaagactgaaagcattccaaattaggcttagactgtgcaaagggcttagctaagttatcgagcttaaaacccgtcaattaaacaaacattatttgaacagttactgcatgccacgcactgtgttgggcttagtaat

SEQ ID NO: 247849 - DNA, 480 bp, Homo Sapiens
tcccttttactaacctcggtgtatcacgatcgcgcacctgtggtgggtgtgagggttaatgtgctcttgtccaggtatttgattgaaccctgtgggccaggaaaatccaaactcacctacatgtgcagagttgacttaaggggccacatgccagaatggtacacaaaatcttttggacatttgtgtgcagctgaagttgtaaagatccgggattccttcagtaaccagaacactgaaaccaaagacaccaaatctaggtgatcactgaagcaacgcaaccgcttccaccaccatggtgtttgtttctagaacttttgccagtccttgaagaatgggttctgtgtctaatcctgaaacaaagaaaactacaagctggagtgtaggaattgactatagcaatttgatacatttttaaagctgcttcctgtttgttgagggtctgtattcatagaccttgactggaatatgtaagactgtgca

SEQ ID NO: 247850 - DNA, 494 bp, Homo Sapiens
gcgctgagctgcttatttattgaaaataaacgacggaaaagtctggccttgcctctgtgcaagcttggaggcctgggtcgccgctgtggacaagcgtcttagtgtcatgcagaccagaaggcagctgcctgtcccagggccggggcccacctcactgcctctgatggggactcccagcccccatggctccgctgtgccctgggcaggggacgggctgggggcaggggagggctggagcccaggaggcagcacagcagccagaaagccgcaggcctgagcctgcacctttggttccgggaggggcttgggcccctcacccaggtgtgatccctgagaacaggaggcccagccaccctgggaggaggcgctggagggcggggcggtggtggcccccgtcagtcccctcaaccccagtctcagggacggtggaaaagccatccaagaccccagagcgaggcctcatggttcaggagtggggaaaggcgtctttccca

SEQ ID NO: 247851 - DNA, 652 bp, Homo Sapiens
atagtcaatataatttattcaaatagtaagaagagaagaaatatgtatcataaatgaacattatcatgagatattgggtacaagaattcaatacattgggtaaacagactgtagagatcttaagagcttaggatttcagagaatagcatacattctgtggtctagaaaaagctgttttctgatccaattgagactgtgagcaatgttaagaggcataacagacaaatcaagacacacaagaagcctctcattaggaggagaaagagcttggaattggttgaagggagcagccgtgttgacagttcatgtcaatacattccagttagcaggttatttaagcaatgacttcaggctaagctggccttgtaattctgagacacagtgttcaagaccagtaggaacttcctgagttgccctcatcccaaaaggggtagcaaggtctttgctggtgataattggactggaaaccacagttcattcgaggatcttcataagtgttgctaggtccttgcctcaccactgcaggacgaggcgctgagtaagggacggggctgctcccagcagaatccacaaagtagctcattctgctctcagcacctcacttactactttgccggagagcagatcctgagtgagcttccctcaaagtctg

SEQ ID NO: 247852 - DNA, 571 bp, Homo Sapiens
gtgaagggcaactgggagaagattgatagattctttagagacgtagcctaactctaagatggctagttttctggagagaaatggagaaagagagagctgggaagagactttctgggttagtaagaaatctcaagcactggcctttcctttcaaaggagtcagaatttgattggattagtctgtgaagcaatttattccctagggtgatgtcaaaaacaatcgagcaaccagcttgcaatgacgaatttagcagctgggtttggtcagggaaagagacaaagagagccttcccacacccccatcatatcaaggtggacctgcccactacttctcaggggaaacagactttactgcagtattccagtcattgcagctttcacctaaaagctttcacacaattgctttgggctattcataatagccccacactgaaaatccaggcgtccttcaatgggcgaacagttaaataagttggggctcgttcagcttatggaatatgtttagcaagaaaaaggaatgaactattgatacataccccagcctgctaatctccagagaatcatgctgaatg

SEQ ID NO: 247853 - DNA, 954 bp, Homo Sapiens
cccccaaacatacttggggcagaaggaagggtaaaaggaaaaaattaaattacaatgatgtaaatttcattaatgtatgcagtttcagtatataaactgacttaagccatacctatgccccaaaagttatcaattactaaacatttttgaatctgaaaaagtggcttaaatatcattcctaaagaacattgcaaaggctttactggcagctatttcagcctactgggctattttaatttaattgtttgttttctcataatctggatagtcaatctctggatggctaaagtagacactcctatactagggaattccttacacatgaaaatacaactacaaaagaaatttccaacatctttattctttaaaattaccacaaccattaaacaactaaacaattaaataactaaatcattttcattaaaaagtatcttccaatttttaaaatgtttctaacataatggaataaacaaaatagtcttacctaatcgtaattctccaaaattgccacatccaattttttttccaactctaaagttaggtccaaccattaaaactccagacgatgaagacccagttcctcgagtgttgtgtcccgatcgaccactaggtcgtgccattctatcatctgatttgtccttgtctttctttttattttccatatcaagtttgcggtactccactttgaattctttaatcaagacaagcacactgaaacagggtattgtgaaaataggtacatcactaggtaactgtaccagatgggtaatgttaacattcaaattgcagtaggtagtcaattaactggagcatgttcatcccattcgtaaaatttttcttagtgtcttttcagcaaaacatgtcttcaaaattatcttttcaatgatgtgagctgatattgatagagagcaacttaattgccacatattcatttgtgtataaatttttcccttg

SEQ ID NO: 247854 - DNA, 157 bp, Homo Sapiens
gggtgaaccagcatgttccgatgaagtctcaggccaaatgtcacccctgtcatcctctggtttccacagggtagccagcaccttctcactccctcgggcacttttgtttattttagagcgttttcttgctgtggaatccttccccccactttttttt

SEQ ID NO: 247855 - DNA, 352 bp, Homo Sapiens
tcttctcttctctctccggtctgtgcgctcagtggtgcttcgagctggagggcagcagtgaccctcaccactcatgccccctttggcttgggggcccatttcacagttcctttgaagcaggtatcttgcatggcccaccggggtgaagtccctgccatgctacctctgaaagtcaaaggccgacgcttctatttcctcttggacaaaactggacacttccctaacacaaaactctttgacaatactgtgggtgcctaccggagcttgtgaagaaatgacctcaagtcactcacctctccaagaggaggataaaaactgaaccttggggagccaggtgtgttggttcacacct

SEQ ID NO: 247856 - DNA, 433 bp, Homo Sapiens
  misc_feature (130)..(130): n is a, c, g, or t
  misc_feature (183)..(183): n is a, c, g, or t
  misc_feature (268)..(276): n is a, c, g, or t
  misc_feature (319)..(319): n is a, c, g, or t
  misc_feature (384)..(384): n is a, c, g, or t
acgtgtaaaacaaacaggtttattgataagcaggaatgccgtccagcatacagtgcaaactttcattgtcttgggatcaacacacacacacaagggaaccaaggccccacagagtctccaaattcatcgnttcccggctctgccctgtgatgccaaggaagcctgaggttctcccagggactntccaccagggggcaggtgcgctccatcatgtcctcatgtgggtccaatgtgggcagaaacctgggccagtcccagcagtctgacnnnnnnnnnctttaagagacagggtctcactctgttgctcaggctgggagtntagtgggcgcgatcatagcttcgcttgcagccttcaaactcctggggggttccagttgattcctncccttcagccttcctgagttacaggttgcacgttcattggcaggccagt

SEQ ID NO: 247857 - DNA, 448 bp, Homo Sapiens
  misc_feature (18)..(18): n is a, c, g, or t
aaaaaaatgttgctctgnaactggctcccactggcttgcaacccctggctgtgttcaaaagccttgtttgctgcttccatcttccccagtactgtgccaggccttctccccctccccagtgtcctctcctctcaggcaggccattgcacccatatggctgggcaggcacaggcagtgaagccgaggccaatagcgagtgatgagcgggatcctaggactgatctgtagcccatgctgatgtcacccacccagggcaatccatctggaggcctgagcaccctggcccaggactggcttcatcctggcactgaccaggaaagactgcctctgaccctcttagcagacagagcccaggcatgggagcactctggggcagcctggctcaggtttattgattttcgtctgtttaccctatccattaatcaatacatgtaattaactccttcca

SEQ ID NO: 247858 - DNA, 354 bp, Homo Sapiens
gggccctgagggtcccaggcttttgagactctgaaggttcagagcgcctgggccggctattacgactacaacacctttgaccagaatggcgtggtgggcccccacccgctagttgtcaacatgtactttgctactggcttcagtggtcacgggctccagcaggcccctggcattgggcgagctgtagcagagatggtactgaagggcaggttccagaccatcgacctgagccccttcctctttacccgcttttacttggggagagaagatccagggagaacaacatcatcttgaggcatgtgtgctctggcattgggcttccactggctttgcatcctggggttgtgtttcaca

SEQ ID NO: 247859 - DNA, 301 bp, Homo Sapiens; identical to SEQ ID NO: 176817

SEQ ID NO: 247860 - DNA, 992 bp, Homo Sapiens
  misc_feature (574)..(644): n is a, c, g, or t
  misc_feature (818)..(827): n is a, c, g, or t
gttttctatgaaatagtttatttcattgttcactatggaggggctacaaatacacttctgatattaacacaaaggtctaaactttgcaacactggtaaaaatggttatgaggaattgagaagctagggaacagggcacatgacatttacatttgctcatctcccactatacatttcaaaacatcaaaggcacttaccaaagtgattaaataagggagtgtggaatttaaaataatgacatatacccaagacacaaaataaaggacttgaattttcttatagtttgatttctaacattttactgactaaaatctctgctaattatgtaatctactttgtggctttaaaatattggatactttgattttaagactactttaaatgaaaagaacctaatggaataccataaagccagagtttttccacacccaattacagtagaagagcacccctatatccaggcaaaagcaaaaggccccactcttcagtcactcatattgcttctccagagagcactgtggagtcacctctcactgatatactaacatgtggcatctttgtggcttcataggcannnnnnnnnnnnnnnnnnnnnnnnnnnnnnnnnnnnnnnnnnnnnnnnnnnnnnnnnnnnnnnnnnnnnnnaaacatggtgtggtgcttactttaacaagcttacatttatcccctgtaattgggttggtcatgctttcttttcaattcctactgatttgttccaagaagcttcttggaataaaacagaagccagaataaatgcatttgtattcccatccctaattctacttggtttccagaagnnnnnnnnnntcagaataagactatctcaaagtattaaagaggatctaaaccctacatcaatctaaagcatttagacaaatgcatttttagacaaaagcatttagacaaatttcatttgtctacaacatggaaaaaacaagttaagaagtagagcacctttcagcccttacccaa

SEQ ID NO: 247861 - DNA, 368 bp, Homo Sapiens
caaatttaaaccacatttatttgggttcttcaaattaatttccaagcccatagcctaactaatacccctagaaatgaggaaggatggaaaaatcacacaacacaagagttaaaaaattaagctggctcttcgactacagcattctagaagttcatttccatgctgggcctgcagccatgtagtgtcagtttcctcctgctcagctctaaggcttcttctcctgcaccctttgtccctgcagccccaagacctctctaaagcccttcctctctgaccaccagggaaagctgacaatcttctcatgttaaaaaaaatcttttttgttggccaggcgtggtggctcacacctggaatcccagcactttggc

SEQ ID NO: 247862 - DNA, 447 bp, Homo Sapiens
ttggttttcaaagctttctttaatttggtggaaagacatttttttctaatcccagctgaacccccaaaatacgggagagaaaagcaagactctgctttggagtacagcctttcaaccctttccatccctaagggcacccagtgaggcccttctgcagaacctggggtcagtgggacacagtgaggcagctcctggagcagaccatgtggcctgagcccctttgggtggcagggcgggcagggctctgctgtctggcatggctgacagaggggcgtggctcacgagctgccccttgctgccctaggggatgagtcattccaggtcggcatcctccggcaatggcagctgaccctatatggctctgtgtggagtgcagtagacatcagggacagacaaaggtgggtaaagccgcatgtgtcagagggaaggccagtcacaggggaaggg

SEQ ID NO: 247863 - DNA, 531 bp, Homo Sapiens
ggccccgcgcgctcctcccgccccctgggcgcatgactgccgcaagcggacaaaggcgcttcctggcgccgcactaaccgtcggtcgggtggattgaattcgccccctgcttgacctttccagacgcccgacagaaggctctctacgctccctctctcccttccttcactttctctccttcccgtgcactgggctgtccctcatcccggacccatcctcctccagccaagcccccgaggagcttcaccacctcgggaactgtgcgtccggccctcaactcactagaggaagcccccctgaagagaatgggggtgggggagcacctgcgacacaaccgtcgccggcatccctggcctctttcgcgccatccctctggcagaaaccactccttgaaggtgtaagggaggcgagtttcctttgtttagtcagttcgctccagtctcttccccccacaggcccagcgccggcagctcagcgatgcactcaccatgctgcaagcgctaccggtttccgagacgccaacttttttgt

SEQ ID NO: 247864 - DNA, 524 bp, Homo Sapiens
tttattcaggtattatttattcaggtcgttttattttcttaaacactttaaaataaaatgtctatacttgcattaattacttataaggaatttaaaataatgtctattagctttttaatagcatttttcagatcctatgggagtttcagcttgagataaaagactatatattatctctgttctttattatatatcagaattcaaaaattccagaaagttggcttctgaagtagaataatgctattatatttaaactttatatatatgtagtataaaaacttccattcgcttgtattttgaattaggaacaagcaaaagaagaaaatgctagcaagccaacccctgccaaagtaaatagaactaaacagagaaaaagtttttctcggagtaggactcacattggacagcagcgtcggagacacagaactgtcagcatgtgttcagatatccagccatcttctcctgatatagaagttacttcacaacaaaatgatattgaaaatactgtacttacaatagaacca

SEQ ID NO: 247865 - DNA, 680 bp, Homo Sapiens
ttgggaaatgtgacctttgctctggggggcctggccctgcaggccccaaccttccctcatctctgtcgggcctcttgggcctctgacccagcccctccccgggccaggctcacagaagctggcttctgggactgtcctgggcccaagtgggcacctgcgccagccccacctgtgcctgggctgtggccccttcctacagggcgctcaccatggccccgccgctcctgctgctgctgctggccagtggagcggccgcctgcccgctgccctgcgtctgccagaacctgtccgagtcgctcagcaccctctgtgcccaccgaggcctgctgtttgtgccgcccaacgtggaccggcgcacagtggagctgcggctggctgacaacttcatccaggccctggggccgcctgacttccgcaacatgacgggactggtggacctgacactgtctcgcaatgccatcacccgcattggggcccgcgcctttggggacctcgagagcctgcgttccctccaccttgacggcaacaggctggtggagctgggcaccgggagcctccggggccccgtcaatctgcacaccctcaacctggaccataaccttattgacgcactgcccccaggcgccttcgcccagctcggtcagctctcccgcgtggacctcacctccaaccgcctggcc

SEQ ID NO: 247866 - DNA, 789 bp, Homo Sapiens
aggaaaattgccacatgtttatttcaggtaacaaaaaagatatagttatgatatacaatgaccatagaatccaataaagcaacttctgcaaatgaatagaaggtactttttctttaaatgaaactacaaaatagcagctggttttaaaaacaaagccaattgttttagatttaataggctaccactggcctctgctaagatccccaaatatattcctgagctcacatagattccagaaagtcaaacttttcaatattatgcaaactttccctatgcatccaaaaaattctcatttagtaaagaggtgatatgaaatgtaaggcagcatgtccatatctatcattttaaattgccttcatgctgtatcaactggttttgttttgggaagcaaccataatattgagagacgggtctttcctattttttctgctactcatttctaactagattcactacggagctcccaattgcatctctctgatctacaaatttttctctcttcaggaagacacctggaaagaagggactacattaaaggagtgtgttgggggcaatgctttggccttttgacatcctatctagtctgaagggaccctcactattgctaaggaggaggagtgttttaaatggaggcttcagaatgaaagcagaggaagaaggtactctctttttcaaaaagaaggagggtacaggccgggcgcagtggctcagagcagagccatctggagtacaaagatagtacaagatccccaactggacggagaaaagggagacagagaaatcagaaag

SEQ ID NO: 247867 - DNA, 1099 bp, Homo Sapiens
  misc_feature (553)..(576): n is a, c, g, or t
ttggcacatttgttgaaactggaccttctccccctgtccctcaccccaaaacacccggaatccatcccctttcgctctctccagatggattctcttggggtttcattgtgctgtggataaggagtgtaagaaatgcaaattatgtgaatggctcggagactccctaatgacctaagatttgcattagtttttctcctgcacccttaaaagtgattttgttgccgctgcatagattctgtgtaactttttactcttccttgttttttccctagacatcttcatgcccgttagttcatcgtttgcctagcatgtccctgtggcgtctcaaaaaaaagtttcatcgtcccgtcattgtttctgatgtctttctgacctcacatcatatttggttctcctactgacctttgatctagtttgacctttgaaatttgcatgtgacctcatctagctatgaattctgggaagtcaatgtgaaaaacattgctgcattcatgcaagactgaaatttattattagacaaattcattatagaaaaaacctgtggcaaaaacgnnnnnnnnnnnnnnnnnnnnnnnncctaaaacagacttgaaagtattatacagggattggcattcttcccggtcactggtaacaatagcaatatgtgtccagggacacagaatgttggtttctaacagactacttccaaaaacagtttgagaaaaaaactgtctgattttaagtctctagaggtctgtaatagtttttacatttttcacgcagtgtaaagttttttgataaaccattttaggtggctcactttctcattaagatatatatataggaaccactttttgtagattagtataagaaaaatatttactctgttttggggcaaatgctacctatttgtgtcaccttttgctgaactcacagttagacaatccatggtttaatgcacatgaaattacctatattttatactgtttcaatgtacaggagaaaggttactgtaaactgtgttatgttggtgcttctgtgaattaagttgtggtttcatcatgagtcttaatgttctttgttgataagacaagtttagaattggtttacttaatac

SEQ ID NO: 247868 - DNA, 527 bp, Homo Sapiens
  misc_feature (488)..(489): n is a, c, g, or t
  misc_feature (493)..(493): n is a, c, g, or t
tgttagaaaagtctctttttaagtttttaaattaaaatttcgccctggtgagatgggattctgattcgggaactaaacccaaaggcaggctctccactttggacctggacacgcagcgggaggggcagggcgcccagggcagtcaagtcccctgctgggcagaagcctggcctttgaccaaagtcagctcctcagtgccacatcagccctgcacattcagcaggagacaggggtgatgagctatggggccacaaccagcaatcagaggtggggaagaggccatggggagagagccctgataccaagagggccttccacagctttgacctcaggccctcctgggacctgcagctgctatgtggctgcccagtgactgcaggagtggtgtcctcttccagattccagaaggcatggctgttaaaggaggcagctgacagatgccttgtgcccacaacatcactccatcagtctgcagcatggcagccctnncccncgatgaccccaggtgtgccaggcccattctcacc

SEQ ID NO: 247869 - DNA, 470 bp, Homo Sapiens
  misc_feature (16)..(16): n is a, c, g, or t
  misc_feature (33)..(33): n is a, c, g, or t
  misc_feature (85)..(85): n is a, c, g, or t
  misc_feature (383)..(383): n is a, c, g, or t
  misc_feature (434)..(434): n is a, c, g, or t
caagtttttcctctgntttttaatatataactntaatatatatgaatagataaatataactaatgtgcgtgagaatgggcctggncacacctggggtgctcgggggtagggctgccatgctgcagagctgatggagtgatgttgtggggcacaagggcatctgtcagctgcctcctttaacagccatgccttctggaatctggaagaggacaccactcctggcagtcactggggcagccacataggcagctgctggtcccatgagggcctgaggtcaaagctgtggaaggccctcttggtatcagggctctctccccatggcctctttcccacctctgattgcttgttgttgccccatagcttattacccctgtcttcttctnaattttcaagggcttatgttgcacttagggagcttacttttggtaaaaggncagggttttcccagcaagggactttacttccctggg

SEQ ID NO: 247870 - DNA, 479 bp, Homo Sapiens
  misc_feature (433)..(433): n is a, c, g, or t
  misc_feature (466)..(466): n is a, c, g, or t
gctgctgctgccagagaggcgccttcagagacccagcgcttacacaatacccaccatgtcccaggctggtgctcaggaagcccctatcaagaagaagcgcccccctgtgaaggaggaggacctgaagggggcccgaggaaacctgaccaagaaccaggaaatcaagtccaagacctaccagttcatgcgagagtgtgagcaagctggctcggccgccccgtcggtgttcagccgcacccgcacaggtaccgagactgtctttgagaagcccaaagccggacccaccaagagtgtcttcggctgagaagtgtgcgccactcccctttgcttgcccgaatgcttcggaaacagggagcctttacccagggaacttttttttattgccagaacggtttccttttcccttgctgttctttgggggcttgccaccttnccccacagttcagggctttagccaaggttttgnaacagcacttttt

SEQ ID NO: 247871 - DNA, 452 bp, Homo Sapiens
ttaaatttttaaatggttctttattcataaacttgatgcaagtttacaaaatttactgtacattgccaaataaatctgcaattaaaaataaaatccattaaacaaagcatgccaaatgtgcagctatcagtctgcttgccatcaggatattaaagaattcaacaatgtattcaagatttagccttaggcttaaggaactttactgatttaaagaattctgccttgtcacttgttatctgagcaactggcaatcagaactttatacaaatgtaatcaagtgaacaagaataccagaaaatctatttactgctctcttaaccaaaatggaatcaaaagaaattaaacacacacaatgtagaaatgacaagtctctcagatgtggtttacaaagttaaaaactgaatctcaaagctaatgcacaagaaacacttttgaactttgtaacttgtttg

SEQ ID NO: 247872 - DNA, 278 bp, Homo Sapiens
aggtttttcaaaattaaatatattgttgatgaatatatgtgttggcagtaaactaaaagaaatgcaagggaataattaacaagtcaagatgatatttacatttaaaaaggagagagatacaattgcagatttactggagtcttctgagatcttattaaatgttttatttcttaacattcctacatattaataaatgttctatttcttaacctgatagtgggtacatgaatgtttattattctgtaaatcatattgtgcttatgaattgtttcacaatt

SEQ ID NO: 247873 - DNA, 838 bp, Homo Sapiens
  misc_feature (712)..(774): n is a, c, g, or t
ccttcaactccctccaagttgtttatttaataataataaaaaagaaatgcacacacataaacctgaactcccccccaccccaccctcccttactcccagtaactagctccaaaatgaaaaaacttcccttgtcccacctggggactaaattcccacctccactgccataacactagagaaacaaaataaaaaatatgcagcagctcaccacccaccccacaactgaacctcacacaatcccctcaaacaaagaagccgggactgggggttcacaggaatgagaggagccctatattctgaaaagggatgagaagagaggtgaacacccccacctcaaataagtgcttaacccccacacctgctctttcctttaccaattgccccaagcctggggatcagggaaatttgaaacagtcccacctggccacctggtaccccctccccccgttctaagtcagtgtgaatggcagaggtcagggatgattgaggtagaggggctggtgggaggcctggtgggcctggctggctgcagagactggcaaggggccacctgtggcattgcctggggttggggatggctgttttcggagcgaggggggcactgtggaggtcttgatgtgaatcaccctggtgtccatgacctcacactcgatctgcatcatctcctcatagtcccccggggccccacggcctgacagggtctctgtgagannnnnnnnnnnnnnnnnnnnnnnnnnnnnnnnnnnnnnnnnnnnnnnnnnnnnnnnnnnnnnngtcagaaaagtagaggtgagcagagagaaaaagaaagggcaatagtgaggaggcagatccccaa

SEQ ID NO: 247874 - DNA, 904 bp, Homo Sapiens
  misc_feature (638)..(707): n is a, c, g, or t
ttgggttctgctggtcagggggctgggggctgccgtcagtggacctggacagcctggccgtgctgacctatgccagatttactggtgctccactgaaggtacacaagatcagcaacccctggcagagcccttcaggaactctgcctgcccttcggaccagtcatggagaggtcatctcagttccacacaagatcatcacccaccttcgaaaagaggtaggtgacttggatagagggggctgccagtgagagaagttcagtcaattctatacaatacacatttattgagcactagatatatgccatgctagatgcaggtgacccagagcatcaaggagcaatagtcttgtggcagagacacacacaatgtcactgtgatgtattaaagcagtcggcaagagatgaaacttagggcactgtgaggcagggagggagaggagcacaggctgaaggagagtggaagacagcagttggcctctgatggtgggactggagagagatttctaagggccacttcctgttttcagggactaggttgggctagatatggggctcaggatggacaaggcttagagccaggttggagaagatgaaagagcattactagaggagtggggaggcctaggctatgctctttannnnnnnnnnnnnnnnnnnnnnnnnnnnnnnnnnnnnnnnnnnnnnnnnnnnnnnnnnnnnnnnnnnnnnaaactagagggctgggccagcatgttttccaagggttcttctagcattgacggtcaatttcaagagggaacagtgtcagaagtagacactcttcctcatttctaacttcccaaaggttgagacctggggaattaattgagaggcctggaaagagagatccagataaaagccaaaggtcctggcagagccgaggccac

SEQ ID NO: 247875 - DNA, 595 bp, Homo Sapiens
  misc_feature (322)..(362): n is a, c, g, or t
  misc_feature (420)..(430): n is a, c, g, or t
agtatttcaactgaagttctatttatttgtgagactgtaagttacatgaaggcagcagaatattgtgccccatgcttctttacccctcacaatccttgccacagtgtgtggcagtggatgggtgcttagtaagtacttaataaactgtggtgctttttttggcctgtctttggattgtgtaaaaaacagagagggatgcgtggatggtaaaactgaagtggagaggaggaaaatcagactgtcttctgatagctggagggacagagcatgtggggtgggggtaatgtgcatctgtttggaaaaggaaacgagaaaatgtggnnnnnnnnnnnnnnnnnnnnnnnnnnnnnnnnnnnnnnnnncatttcccacccacactcgccagctcaccccatcatccctttcccttggtgccctccnnnnnnnnnnnatcctagtcattcttccctaatcttccacttgagtgtcaagctgaccttgctgatggtgacattgcacctggatgtactatccaatctgtgatgacattccctgctaataaaagacaacataactcaagtctggcagactttcttctctatttctggatgaatgc

SEQ ID NO: 247876 - DNA, 1448 bp, Homo Sapiens
  misc_feature (178)..(178): n is a, c, g, or t
  misc_feature (821)..(881): n is a, c, g, or t
gatttgtgctggtgaaacaagatggatggtgtgtggctatgtgtgaggtaaggcacacggtgctgcatgtgactgctctcaaagctcttggagcaattgtctacattaccgacatatctgacctccatcttgtgctcgtgacagagcctgcgagtgcgatgtggttgcagcgtgtggntaagacgctaatatgaagtcatcctggcaagatcgatggtcagtaataatcttgcacatggagaatcaagaagtgttgatgagcacggtgagcgacgtatggcagtcgcagtgacaaaatcagctagtaatcagctactgcaattatggtgccatgtccaactacatgaatatctgatgtgaccagccctccggacatctcggatctgacgtggtgagcgagtacgttactacaggtggaccatgtcatctggccagagtggcgaaacgagttgtacctcctggcagagggtcgctctactcaatttgagcctgctccacagttcccacctttgttctgtccatcacagccacaacacaggctttggcactgatatgaactctataatgcacccgaggggcgatacaagcaggatgtgtacttgcttcctaagaaaatggagtgaatacgttgccagcttgcatctgccatcatttgatgcccaccttacgagagctgacagatgaccaagcaaaatatctgggactcaacaagaaatgggccattcgaaacctaatttattactgattctaatggaccatactaccaaggaccagtccacctgaaaccacacactctaaagaaatattttttaagataactnnnnnnnnnnnnnnnnnnnnnnnnnnnnnnnnnnnnnnnnnnnnnnnnnnnnnnnnnnnnncatctcattatccaagttctgcagaccacacaggaacttgcttcatggctctttagatgaaatagaagttcagggttcctcactctagtcactaaagaaggattttactctcccagcccagaaaggtgattctttctttaccatttctggggactttagtcttaattaggtaccttattaacaggaaatgctaaggtaccttctctgtggaacaatctgcaatgtctaaatcgccttaaaagagcccatttcttagctgctgaaatcagtgctctttcacttcttcagagaagcagggatggtacctacccggcaggtaggttagatgtgggtggtgcatgttaatttcccttagaagttccaagccctgtttcctgcgtaaaggtggtatgtccagttcagagatgtgtataatgagcatggcttgttaagatcaggaggcccacttggatttatagtatagcccttcctccactcccaccagacttgctcatttttcgagtttttaactagactacactctattgagtttaattttgtcctctaggatttatttctgttgtccaa

SEQ ID NO: 247877 - DNA, 780 bp, Homo Sapiens
  misc_feature (127)..(165): n is a, c, g, or t
  misc_feature (551)..(567): n is a, c, g, or t
ttgggtgtggacacgctgaccgacgggctgtccagcctgactccagtgtcccccacggcctccatgccgcctgccttcccccgcctggagctgccagagctgctggagcccccagccctgcctagtnnnnnnnnnnnnnnnnnnnnnnnnnnnnnnnnnnnnnnngtcctgagcaccgttgctaacccccagtcctgtcacagtgaccgtgtctaccagggctgcctgacgcccgcccgcctggagccgcagcccacggaggtcggagcctgcccacccgccttgtcctccaggatcggagtcaccctgaggaagccccgcggcgacgcgaagaagtgccggaaggtgtatggcatggagcgccgggacctctggtgcacagcctgccgctggaagaaagcctgccagcggttcctggactaagtccggctcgttcaagaacataagctaccaccttctccctccccaccccctccaggcccggggctgaaacagcccgaggacagccccaggggctggccttcaccagctgcagggtctgcttttacttnnnnnnnnnnnnnnnnnctgaccctgaatcctcccccccgccaggtcggggaggggtcccaccactcaaagtgcctctaaagaaaccagctttttgcactaaagccaaaccacaccgctgtccccttagccccaagggccctgggggcagccaccctcccgcctgtcggcccgtagatttatcaagggtgttatgggcccagctttggggggccagtcccgatgcacttt

SEQ ID NO: 247878 - DNA, 372 bp, Homo Sapiens
tacttccagcctggagagaacctcaccaaacagctggtgtggcctgagggtggccatggtgggaaatgggcatgagaataaatacctccccaaattcaatctgagcccagcaggagaggatggtagggttgcccgggctcagaagtgcaagctgattactcaccccaccctgcctcgccgcacctttcctttgtttccttgggtgaatgcaggagcagcagtggctgcccttcccccctggacagtggtgtgtgtagaaagccagctggatgtttgtggtggggcctcatggtgcctaggaggagataaagatgaggaggtttttccttattgtataaatgaatatttgtatgattaaattaacacacacac

SEQ ID NO: 247879 - DNA, 469 bp, Homo Sapiens
ataaaggcatttagtttatttttcaaaaaaatactttgctagaagggttgagtactgtaattttacatgatcataatctctaaataaattctttttctgaccaacaggtaccagttaagtgaacagctcgtctaggtctgcttttgtaacacccaaatacaattagcacttctctgctggtattccctgggccgtcttaattatctagaggccaggaggcaaagcttagcacgtaacaaagtatgtgctttgtaactgctgattaattcagtttcttaactaggcagagcaggtcatcagtgtatctaattcacactattaatacactgtcttgctgaagagtctgacctgcccagaaccccgttatggctagcccagggaagcagtaaactgcaaagcagagaaaaggggcagctaagatgaggctagtgctggctgagtcccagttaggtctgttactgttctgttc

SEQ ID NO: 247880 - DNA, 922 bp, Homo Sapiens
tatctgtcatgtttctatactcgattataatttgtaggattttatttgtattttgtttttaaaatttcatgttttaattgaataattgttccactgggcttggggtagggtaggcattctttttgttgtttattgctgcttccagaccagagtccctccctgcttcccaaaagctcccacatgtgaatatcgtgtcattcagactctgccacctattagctttcttggttctactcatcttctgtcccctgggtttcacttctcctggctcactctcactctccccatataatcactcctgtcctaattcttggtgatttcagtattacaaagatgatcctcccaacaccttgacacctccctcagtaatcttgttctccactctcagtaaatgaaattatttttagcttagacaagagtgatagcagtaaaagtggtatgaaacaagcatatttgggatataatttgaagacaaagctgaaagatttgatgagggattggaatgtggaggaattctagaaggggcaatgtggcttgaggattgcctatgcaagaaggaatggcacaagatcatggctaaagacagagcaattcaggccacagaaaggtgttagaagttgttcaaagtgctgttgcattcttttaagcgccggagtatcattttctatttgcttttaactttttcattgtgaaacatgacaaacatacagaaaagtgaagcccactgagttaccgcaaaatgaacccccatgtaaccaccaaccaggtcaaatttggaatgttgccagcacccagaagccctttcatgtttcttctcaataccagtctcctcactctccacacaaaggtaaccactgcccagaattttatggcattcacttccatacttctcctatggttttgccgtggaagcatacatcca

SEQ ID NO: 247881 - DNA, 987 bp, Homo Sapiens
  misc_feature (634)..(643): n is a, c, g, or t
agctggaccataagatgccccttggagtggcaaggaagctggacagggcaggcctctggggacgggacacagggaagcccgaaggggcgccttggccaggtctgccatctcctccagcgaggctctggccagcactgggtgagagtggggagggggcactggcctttgcagcacagtaaaacatggtccagacaacctgtggccccggcctcatgagcaccccctgcacaggcccggcccaagccaggcgctagaagggctggttgtggagtgcttatccttgacaggtatggggccaggtgagggcaggggacaaggtgcagctgaggccgagcccaactatgtcctgggcacccctgcaggtgggagtggtccttgtcctcctggtatccagcagacacccccctctccccaccagccccattctcaggtcctttcctctttgtcaccaacaccaagaatctgtccagggttcttggcttatcttttatctcttttcactcctagagaggaattgcaattgactcagaatgacacatttttggcaccacgtgtgtagaaagcccccactgttagatgatagcctcgtgaaattcatgtttctgtattctcctatttcttttcaaaaactaannnnnnnnnnagtgtaataaatcctaagagggaactgatttaagaaacaaggccgccaaacaaaggcaggcagttccgactccagcagctggggaaggaaggaaagtgaccccactttcactccctgccccagcccactggttaccaaaaccaccgtggcaggtcggggatgaaaagcagggacttcctggccaggtggggaaaaggtgcctggaaaagcgggtatggccccctggggcggtctccctgggcgcatgaatgttcccttgtgggggcatggtttatttcctgtggggcctggccctgtggggggcgattgcctttggagcggaggaccagagcctctctcccaag

SEQ ID NO: 247882 - DNA, 722 bp, Homo Sapiens
  misc_feature (710)..(710): n is a, c, g, or t
tgagaataccagatatatatttaattactagtaatcacagtagcactgaacatggctctagtgagtgggcctcagtcagttcaggcagctaaagggagggggatttcctcctagtcctctccctagagctaaatatgcatctgggaaaaattaggctctggagcacagaggtatttttctagaggaaaaagaactgaactcccagcactaggtaaaactgcaaaaagaaaaacacctgtgcccagggactagctacaaggccacaccagaaaaggaaagctgggtcctgggaagcttcaggacaggaactcttccttggtcaagttttccccagcacctagcacataggaaggtgcttgatgagtgagtgttaaatgaacctgtgagtgctcaggatgatttcctgataattgggttcaggaatctactgggaggagcttaaacctagaagttccctttttgaaagtctcaaatatggttccctaacttagagaagacagatgatgtgggaaggaggcctgaggagaggatgcaggctggcagaagggagcagggtgcatgcgagcccagaccctgacacccttccaagggtggtgactgggtggccactacacagcaccagcctgctgcagagttcaaaactagaaggggttacatgaaagtgttcccaggatgtggagcttgccctgggctaagttcagtcacctgcnagcctctgccgc

SEQ ID NO: 247883 - DNA, 477 bp, Homo Sapiens
gagctgtcagctgcgactgcagtttctctaggaggcattccagaatagagtagcacactgtgtctgcagttctcgatgaccgaaagttatcaaaaatatttaaaatatttaaattgtgaacctattgataaagaatatttataaaaactgatctgtaggcctgtactaatctctacgcattagcaatattgactgtaaacccacattaaggaaaccactacgggtctggcagtgcgtgtcccgtggggtgtgcattttaaaactcgattcatagacacaggtaccatgttccatttccgtcatggtgaagcaaatgaattggcctggctaccactgtggtcgcgtgctacaggtttgacaaaaagatatcatgtttcgatttttttgtgtgtggacaacaatatggaagctaaaattgacatatttttatgtaaagtttttctattctttgatttttaataaactttggaaaccagt

SEQ ID NO: 247884 - DNA, 878 bp, Homo Sapiens
ttgctgtaggaatgtggtttggcattgttttatacacacagtattttttataccttaatgcttattcttgatggcatctgtcagatattagaattgaaaataagaatcttcccaaaatcctttaatttacctgatgccctcatcaggtcgttaaaaattcaaatggttttaatagctaaaaaactacaaattaagctctaaaacaaacaaactacagaaatgtaaaccttcatttgccaaaggtccttggtggcctgtcccctgccctgggagcagatggccctgaagcccttccctcactgtgcaggccaccgggtgaggctggacggtcacccatggtggcttcactgcaaggagcaggactgccgagctcaagcacggggccttcagcttcccctgtcctctggccacaccgccagcccttgggtccttatctgtgtgaggtttacaaataaagcttctgatgtcaaatgtttaaatcgtgccctcagtgggacgagggcctgtcctgatgcaggaggctgaggccggggtctctgtggcgccgctgagagcagagggctgtcttggggtcttcgagctctggagccaaggatggcctggtcctacttctctgcccccaccaatgggggacttgaatgtggccagagaatacagtcagtcagggccagccagggtgtctgtcagggtgggcacagggtcctctccaaacctgcttctcactccctggtcaggccttcatccccaccacccgcacctgtaccctggacgctggctcagaggcctacaggtgtgtggacacctgggcagtcactgtgtcctactgtgcccctcctctgcaggcccagcttggtgtctgagcctcttacaagccccaa

SEQ ID NO: 247885 - DNA, 461 bp, Homo Sapiens
ctctctatctactgtgtcccagtcttctttatttgagaaaaaagtgatacatgatgtggggattaaaatcaagagcatcattgaacttcaccttccctccaaccagttgccccaaactcccctgcccccaccctttgtgttcccaattccttccttagtgaatgaagaacttaatcccaaaagccctggcacaaactccgggttttctttccctagcttctgccctctccctgtctcccattcctagaagggcaggcacctcagtttgaatgcatgggagagcccagagtggtgacagagacagggggaaaggcttccccctcagggaaagggaccgaggagtacagtgcagtgaagtgagggctcccatagcctggggtatcaaaatggggcccggggcagaggaaaggacacggtcccccgagaaaggagacccagagcccaaaatcctctgttgtgca

SEQ ID NO: 247886 - DNA, 1151 bp, Homo Sapiens
tgttgttggggtcggggctgagctcgtagactggccggcgccagttgggcgggggcgccgtgccctggaaggcccaacgccaggctgccgttgaccagcggcgggttgcggaacttgacgtggtagtcggtccaccaggcgatgccggagcggtcgagcggcacctcgacgtagggcccgccgggctggcgctggtgccaaagcgagaaggagtcgttgaagaggctgttggcgatggcgccgcagggcgcgatgggcaggccggccgcgctgcgctggtagggggcgcactcgttgacagggtggcgcagcgcgctggggagtccgctcagctgcgcgtcgtcgcgggacacgccgtagcgccggttgttctggtagaagttggtcagctcgtagtagaggtacactgggccctggaagagctcgggcagcgagaagtaccaggcgcacgagcaggggggcggcagcgcccggccctggccagccgcggcgcacaccgagcagttgccggtgcccgggtcgcctgtatagtcgtactccagctccttgatgccgttggaggagtagtagaggcccaggcccaggccgatgaaggccaggcccgcgcagaagaagagcggcagcgcgatgctggccgacagcagcggctgccaggcggggaggcgctgctgagtgaaggcggtgttgtcgggctggtgggcgccccgggccgtggcgctccaggtcatggcggccgcgcggggaccgacgcgcgggctgaccgagtgggggccccgccgcggggcgcctccctctccgcgccgcgcaagcccggggactgctcgcgggtcgggtttcccgccagctcaggtgggtttttgcccgggcccctcctctgcctccgtcacaggtgagtttagttccaggccctacgagcagtgcccacaccctcccagttccgcctccgcccaggtgcgctgcactcccgcgggtcaccgggagccgcacctcgcccgccccttccgaggtgagcaggtgggtgttttttacctcacctggtagactcagtctcgcgtttcctctcagtccaggtcatcggactccacctcctctcctaagtgagtggcggccccgggctgcttctgagtggctcctacctggctcaggtacca

SEQ ID NO: 247887 - DNA, 596 bp, Homo Sapiens
gagcaatgcttttcctataaaagccaactttgtacaaaaaagttggcttgacgtggcgcggttgctttccaaaatggcgcgggtgctgaaggctgcagccgcgaatgccgtagggcttttttccagacttcaagctcccattccaacagtaagagcttcttccacatcacagccgttggatcaagtgacaggttctgtgtggaacctgggtcgactcaaccatgtagccatagcagtgccagatttggaaaaggctgcagcattttataagaatattctgggggcccaggtaagtgaagtggtccctcttcctgaacatggagtatctgttgtttttgtcaacctgggaaataccaagatggaactgcttcatccattgggacgtgacagtccaattgcaggttttctgcagaaaaacaaggctggaggaatgcatcacatctgcatcgaggtggataatattaatgcagctgtgatggatttgaaaaaaaagaagatccgcagtctaagtgaagaggtcaaaataggagcacatggaaaaccagtgatttttctccatcctaaagactgtggtggagtccttgtggaactggagc

SEQ ID NO: 247888 - DNA, 891 bp, Homo Sapiens
  misc_feature (391)..(675): n is a, c, g, or t
  misc_feature (677)..(697): n is a, c, g, or t
ttggctgcttttccaagaaatgtcttgtctcctcatcagttgactgtcttctctttccagagggaccataaaggtgccagcctaaggaacacgtaaaacgtgggaacagacaaacaagctgctgcctattacagagatagataattaactttggaccattacatgcaattcatcagcttatctttttcaaactttatataagaagtcatttcccaatggtaaccacttgccagctgcaactttgacgcatattatcaggataggtgagattgatgggggccctttgaactcttcccagggaattatctttataatgttacagttttctctatagcatggtcatattgttaacattggttataaggtcatatggttagtatggttagtattnnnnnnnnnnnnnnnnnnnnnnnnnnnnnnnnnnnnnnnnnnnnnnnnnnnnnnnnnnnnnnnnnnnnnnnnnnnnnnnnnnnnnnnnnnnnnnnnnnnnnnnnnnnnnnnnnnnnnnnnnnnnnnnnnnnnnnnnnnnnnnnnnnnnnnnnnnnnnnnnnnnnnnnnnnnnnnnnnnnnnnnnnnnnnnnnnnnnnnnnnnnnnnnnnnnnnnnnnnnnnnnnnnnnnnnnnnnnnnnnnnnnnnnnnnnnnnnnnnnnnnnnnnnnnnnnnnnnnnnnnnnnncnnnnnnnnnnnnnnnnnnnnngtacctgtaaggtctttgggattttgaagatgaaaggtgtcgcataaattgaatgaattcacttagagagatagaaggcaactacagggaatattacgtacatcatggagcggaaagcactaagcctgtggaattattctcagtgacacgtcgttgagggcagtggtccacatgttttgaacatggtttctccc

SEQ ID NO: 247889 - DNA, 741 bp, Homo Sapiens
  misc_feature (187)..(202): n is a, c, g, or t
gtgtcccaggccttggctggttggctgggcccagctcctgggggctgggcaggcatggcagggccgggtccacttccattgttagcagttgtttgcagaattttctcttttaccattcctctctttttgttctcgcccagagtgggtggtttttgcttgttgttttagattttcatgtgaaggcagnnnnnnnnnnnnnnnnaactccccatccccctatgcagggtgtcatttcaccatccacatccacatccttgtttgtgtttctggccctcgtcctccctgcctctcatctgcctccccaacccccacctacccactgctcccaggggtctctccaggggcagggggattttaggagatggggtgggggccagcccctactggacccttgtaatctgatttggagaccatccccccgatgggaccagcagccccgccggcccactgggggtccctcttaacatctgcttgttgcgggggtcagtcatgagtgccagggtctggctggggtcttggcactgtcttcctggccggggcctgaaaccttagcccccagccggcctgagtgggggatattgacacccccagctaaagcacaagcaccttagtcacccctcctctccccccaagtgagattgcacatttaactactgtaaggagaggagcggcgttggcaaatgtgaaccatgagaatatcagtgatactgatgagaataaactaaacgcctttgtaacagc

SEQ ID NO: 247890 - DNA, 896 bp, Homo Sapiens
  misc_feature (314)..(327): n is a, c, g, or t
cacaaggggagtgtgagtgtgtgtttccatggtaggactccagtcccagttgctgcctaggctcctgtgggtcctgtgggtccccctcccctgttcaccttccccaacagggctatagtttaagggtgtcccaggccttggctggttggctgggcccagctcctgggggctgggcttgtcttggcagggccgggtccacttccattgttagcagttgtttgcagaattttctcttttaccattcctctctttttgttctcgcccagagtgggtggatttttgttgttgttttagattttcatgtgaaggcagannnnnnnnnnnnnnaactccccatccccctatgcagggtgtcatttcaccatccacatccacatccttgtttgtgtttctggccctcgtcctccctgcctctcatctgcctccccaacccccacctacccactgctcccaggggtctctccaggggcagggggattttaggagatggggtgggggccagcccctactggacccttgtaatctgatttggagaccatccccccgatgggaccagcagccccgccggcccactgggggtccctccttacatctgcttgttgcgggggtcagtcatgagtgccagggcctggctggggtcttggcactgtcttcctggccggggcctgaaaccttaacccccagccgggcttgaatgggggatattgacacccccaagctaaagctacaaaccaccttaatttaacccctcccttcttccccccggacctcctgggcctttgccacccccaacccccaaggggtttttacccccaaaaagcaccaaatggccccctggggtccacttttgggccaaagcgggggttggtgggccccctggaaacagggaaagcccc

SEQ ID NO: 247891 - DNA, 534 bp, Homo Sapiens
tatcaagaaagtggtattaattaggtctcgctttttgtcttctttggtgatgataaacgactttactctaaaagcggctggaactcagtgacatgagcgtgcgctgaccccacatggggccccctgtgcaagcagagctggccggcccctccttgctggcagaggcacgggaggcctgctggggatgaggccactggcagggctatgctgcaccagaccaatggcaccgcccccacccctcccagcgcaggggcagcttggagcagaggcagcactggccaccactgcgggggcaagtcagcgtcaagagagtccctgagtgagaaggcccagataagcccaggccccccaggccagcggacaggcacaggcagggcctacagaggtgccaaggccccaggccagttgtgctaggagcctggacctgcttttccacacccccatcccgcccctactgcacaggcttgtgccttggtgccccctggaggcagcagggaggaggcttctcaggcagaagtcttaagttgcatccaa

SEQ ID NO: 247892 - DNA, 680 bp, Homo Sapiens
  misc_feature (16)..(16): n is a, c, g, or t
tactccgccctcgagnggctgctggatccctcatggaaccaccgggtataccgactggccctcgccaagctctcccctcctgtcatccccttcatgccccttcttctcaaagacatgaccttcattcatgagggaaaccacacactagtggagaatctcatcaactttgagaagatgagaatgatggccagagccgcgcggatgctgcaccactgccgaagccacaaccctgtgcctctctcaccactcagaagccgagtttcccacctccacgaggacagccagcacctgggcttatgtccagcagctgaaggtcattgacaaccagcgggaactctcccgcctctcccgagagctggagccatgaggaggggctgggactggagctggagcaggcacttgcagccgggaaagccagggtgtgccgggccaagatactcacaggctggccacagctgggcaaggctctccgtggagtggactcgagtccctggagcaggcagtgtggaggcagccatcccctgtgatgactggcagctaaggaggacctcggagtggacccgagccaggaataacgaatgacccaaggccaaggaagggaggacagagaggccccaggagtgggtggagagtggagtgcgctgggacgttgtgtgcaatagagaggtctccacaccaga

SEQ ID NO: 247893 - DNA, 771 bp, Homo Sapiens
  misc_feature (273)..(402): n is a, c, g, or t
tttgtacaaaaaagttggttcaagggcaaagcaagaaccagcccgagtggtctcctctcagcttctaattttgtgctctttcctgcccttttcctgggccttctcagctctccacccccaccactcttgactcaggtggtgtccttcttcctcaagtcttgacaattcccgggcccttcagtccctgagcagtctacttctgtgtctgtcaccacatcttgtcttttcccctcattgcatttattgcagtttatatatatgctacttttactnnnnnnnnnnnnnnnnnnnnnnnnnnnnnnnnnnnnnnnnnnnnnnnnnnnnnnnnnnnnnnnnnnnnnnnnnnnnnnnnnnnnnnnnnnnnnnnnnnnnnnnnnnnnnnnnnnnnnnnnnnnnnnnnnngaaggcaagccaaccttagctacaatcctaccttttgataaaatgttccttttgacaatatacacggattattatttgtactttgtttttccatgtgttttgcttttatccactggcatttttagctccttgaagacatatcatgtgtgagataacttccttcacatctcccatggtccctagcaaaatgctaggcctgtagtagtcaaggtgctcaataaatatttgtttgggtggtttgtgagccttgctgccaagtcctgcctttgggtcgacatagtatggaagtatttgagagagagaacctttccactcccactgccaggattttgtattgccatcgggtgccaaataaatgctcatatttat

SEQ ID NO: 247894 - DNA, 1452 bp, Homo Sapiens
  misc_feature (1122)..(1145): n is a, c, g, or t
  misc_feature (1158)..(1246): n is a, c, g, or t
  misc_feature (1379)..(1379): n is a, c, g, or t
ttggctctcatcatctaggatgtgagtgggcatcaagcattttctggggaatatgacatcccatctgagttgtcctgtcacttaggtatccttgaagggactaaccatcgtcttggtactgatttgatgcaacgtagatgtaaaagagtattattcagttgaacacaagagggcactgtagaaccttgtgtccggtttatttctgaccttgaaggctgacaatcttttagtaacttgtctcatctccacacaagtgtgtgatagcacacctgggtgtgctttgtggcaataacacttgtgttccaggtgtgaagtgctgggacattggcaggcccagtgatggaagcagctagtgaacgattccctttgctaatgcctagtgcattaagttcattgctttgcgaaaggtaaggaaagaggccagttgtttgagcggtggggaagattttgttttttctagccagcttaggatctcaggattggttttatccaagctagtgctttgaagaacactatctcttggcaggaaaagatgagtgataggtcaaagcttttacttgagtctcccctagtgtcagagatcaggagaaaagacataagagaatttacaaaagctattcagactgctattgaaaacatgagaagaacttgtctcccattttgagagttcctatctaaataaagccaattcctcagactgaggggctgttcttaagtgttctttatacattccagttatccagttaaagccttccccatgtgaagctgatgtttgattccagtttcctttgatttgcctccctaaccttttctagggctcagtttgtatttctttgccttgcctcagactactttgccaacccacttccacaacagaatatgcttcaagatgtgggcaggtcagtgtcctgttcatgggagaaaatggcttaacagtctgattttctcaaatgattattgaagagttgttatcgtttttattataaaacacttctgacctgtcaattcaagagctgtttctaggatctttctctccggcaaggggttgttgcactagatttccccagagttccaagttctagttgtgccttttaatgaccctttaatattttaggacataannnnnnnnnnnnnnnnnnnnnnnngtagaaatagatnnnnnnnnnnnnnnnnnnnnnnnnnnnnnnnnnnnnnnnnnnnnnnnnnnnnnnnnnnnnnnnnnnnnnnnnnnnnnnnnnnnnnnnnntgagccactgcacccggcccctatttgaagacgtctttttgtaaagctagcttctagaacctgagaaaagctcttttctcagaggagatactcccttttgatatgttaatggattaagagtggttgccccagncctagttttcagtgggcagaaatagggattgggaattaaaaaagcagaaactcattctgggcttttcagcaga

SEQ ID NO: 247895 - DNA, 301 bp, Homo Sapiens
  misc_feature (11)..(11): n is a, c, g, or t
gctttcaacanatattttttttagtttctgaaatacaaatcaaaatacatttttgttacatgtcattttaacaagcttgacattcttttcaatacaggatgacacaaaataggtactttaaaacttcctttttagacaaccatacattttatttcagagtaaacaacccatcaaaaacaaatacataggtatatgggctattgtttttcagtattttagagcacaccatccaacttaaaatgtggtccactaaaatatgtaatatccctcctatcacaaaaataaattaaacctcatggtt

SEQ ID NO: 247896 - DNA, 704 bp, Homo Sapiens
aaattacatgatgcttttattgacacttgacaactggcctaaataaaaagactctgactctaatacaagtccccttactgataataggcatgaaagagcaccattcttaaaatctaaaccctttaaaatcagttacggcaattcacttaaggagcttgagggccgtgttaaaaggagccaggttttcacaagacctcatccacctctgcacattggctggcactgtcacactgcagcctccgatctgctggagtacagaccacagcaccacgtctgctacggtgagttcattcccagcgagccaagggtcttcccaagagcagagttcatggagcggaaaaacagcggctttttctttactgcttccctcttttaactgaaaaatcgcaatatctacccagctatctataagggttgcgttgacagcattatgcttctggccaaacagagagaacaagaaacgtgcaatgttcccttcgccttcgatgggggacatcgtctggatgctgaatttcatctgcgtcttcggcactgaaaagaaaaaacacgccaggtagatcaccagagcagccctgagggaagtactcgcacagtggggaaggggacagtcaccaaacaccacagactgatgacattggaaagggtgttttcaagaagaacatcacattttcagtctgtctctaagatgcttactactgaaaagc

SEQ ID NO: 247897 - DNA, 248 bp, Homo Sapiens
cagtttatagtttccaggaggaaagtcttgtaacgctttactttttctcttcgtttttttaaagtaaagtgagtgtcgagtagatgtgttttttacagtctggattttaaaaaaagtggggcgaggagagagggaaccagggaaagggctgtttagaaatacagtttgtggctctgagcgatgccaccggcttcctctacagagactgccagtttccctttttctttgcaaggtgtgtgtggttttaa

SEQ ID NO: 247898 - DNA, 709 bp, Homo Sapiens
ttggcctgtgtttaccccaagcccggcggggacacgctcacagatgtcaccacagccctgcccttcatgcccagccccatgggacacccggtggtctttcccaaacctccagtggcccctgtgcccagcagtccagctcttggaacctcgctgaatggcagcctcttgggggcctggagctctggcagcccagccgtgtgtggtgtcaggttcctctccccaccccagcttcaagcagaggcctcggggtgggggagctacaaagcacaacaatgtacatagtgtagaaacactaacagctgggagaggggagccagctgtccagccagcatgttcctgttgtacagcccggtctccctgcgcgctctgctccttcccatgtgcagacagatcagggaggaacctccaatgggtgggggacagtgagcttcggcctggccgaggtgggtgggtgggctctcagattcagctctgtgtaaagattctctagcggggtgcgctcccaagttccccttctctgtgaaagtgaagaattagtacagctgtgttttttaaagccacctctctgtctccacgccatgggcccacacccaggtgggggaggaggaagccactgcatctgttggctcaggccccagcctgtgcaagcagggcgcctgggctgttgtgtctcctgtctgtgccgatctctattaaaggactccctctt

SEQ ID NO: 247899 - DNA, 317 bp, Homo Sapiens
aatttaaaagagttttcccttgtttcaaataggaaaaggaaacgccaagacatagaaaaccacgcttttcccgtaggaagaacgcgatgatgagccctgatgaaagaaggaagaagacgcgcgctgtctgcgaaggccgtaaaggttagaaatacagcaatttttctcatgcgcgaaggaaaggcaaaatggtctaagaaactgcaagagtgtgatacaagttttcctcaacagcgagctgggactggcgacaatttcttaactcacagcctccgcagtcgccttagtcgacaaagagagcagcccacgcagcggcc

SEQ ID NO: 247900 - DNA, 904 bp, Homo Sapiens
acttaaggggctgggatgcttttgaactagcttaaggcccaggactgtggagtgtgtggaccaccccacagaggagggactcagatttatttactcttgctggatctgtagtgatggagttccttctggtgtcagccccacaggaggctcccaggcctccctcacttcccatacccagtctaggagctccttctggctcccaagcacccagagctttcctccgccttttagttttggttcctccactggaatgtaggctcctcacgggcgatggctgtcttttcttgactttgtatcttcactgccaagcaaaaagtctgccaagtgggaatgtttaataaatattcattgaataatgaatgaaccatcttcgtacatgaataataatactgtcttacgtttttctggtgctttataatgtatacattacatctgagtattttattttatttaattttcaaaacaatcctttaaggtcaacattgttatccttattttgctgatgaggaaactaacgttagaaacattttgatttcctctagacgtatagctaggaagtgttactatcttgatttgaacaaattttctggtgctaagtctgatgttctttccatgaatcattgtggtggttgagatggagctttgtaatgggaataaaacagtaccttaggttctttctgaaaaggaggtatctagcaatggataaatagataccactgaatgaaattaaatgttgattaggaacaaatttaaggcttaaaaaatactttatgagcagcaagattgctttaacttttaaaatgaagctttggttctctgatttgtaatgagcacctggatatgtcaattaaaatgcccatttgtgaagcttactcaataaaactttaaattgtcttaaaaaaaa

SEQ ID NO: 247901 - DNA, 560 bp, Homo Sapiens
ttttaatccaaacaataattataatttttaaaaaaggaaaattggaggaaatgaacaacaaatggaaatcaacaagaaagccacagtctatcaaccataggattgtatagcaagcttgagactagttcttagagaaattattaataacttggttctttgaaaacttaaggaaatcaatatttctatggtaaaaaaacaaatagcagaaatagacaaactttagaacaaaaaagggaagttatagcaaaacagatggcttttaataatcaaaggtattttatgtaacattgcacagacttaaatttgaaaattcccgtgaaatgtattccagttcaaaaaagaagggctaatgatctacaaaatgaaaacatttcaaaaaccacaaaagatgttttgtaaaagttatcaaagaatgctcctaagtggcaactggtcccaatagattaatgggaggattttgcaaactttaagccccaaagcggggttttagcccacgagggttcttggctttgcccagaaaagaattcaaaggtgagcaggggcaaggcaggggaaaacag

SEQ ID NO: 247902 - DNA, 575 bp, Homo Sapiens
gaatatggactattttattatatgctggtacgttgtgtttataatgcagtgtcaccataactggtaaaagaatagactgacagtatcagactaacatcacaatattcccaactggtgggaaagcaacagtcagaagaattagaaaatttaaatgaaacatcacagcaaaatttcacaaaagtaataaaaatgaggctgcaaccaaaatgtttacaagtagcctatttgttagccaagcaaagaaaaccatttactaatgctgaattacatcgtgcttgaagatagtaaccaacccaaagacatggtgtccagagaaaattaagacatcagccctttgatgagaacagtagtttgaagaatgaggattttggacacaacatcaaatgacactgttaattctttgcctcttactagtcagtactgcctaggctttattttttgagaaaccattgctgggtttgaagtgatcgaagaattttgtatggaactacaagtgggaatattctcaaaaaagttgataaacagtacaacctgaagtggaatctactaagatgtgatgcaaccgatgctgggaa

SEQ ID NO: 247903 - DNA, 418 bp, Homo Sapiens
aatttaccatatttatcaaattttttccttatttacatgtactaaacattgtagacctgaaaacataaggaaacattcacttcatgtgtatgtcatatggacagactgagtgcaactaaaacgatggttgtttcatgttgaatttccctcggatgcagacgctgcccttcagtagatataaaggtagcacagttacatttacgacatcacagttaggttttaaaggattcatcagacctccacatgacaccgatacagcaggtccatggggcgcaggtggtgccacctgaggaaggtcaggaagacaggatgtgcatggctctgtggatctgcatgagctcttgcttgtaaggctgagggtctgatcaatcaacctatgtcaccaagtttgggtcaccccacttccccaacatgtggc

SEQ ID NO: 247904 - DNA, 463 bp, Homo Sapiens
attaggaagttaacacttgggtctcttgaggagcttgccaattgggagcagcggttggggagcagagacactaacgacttcagggcagggttctgatattccatgaatgtatcaggaaatatatatgtgtgtgtatgtttgcacacttgtgtgtgggctgtgagtgtaagtgtgagtaagagctggtgtctgattgttaagtctaaatatttccttaaactgtgtggactgtgatgccacacagagtggtctttctggagaggttataggtcactcctggggcctcttggtcccccacgtgacagtgcctgggaatgtattattctgcagcatgacctgtgaccagcactgtctcagtttcactttcacatagatgtccctttcttggccagttatcccttccttttagcctagttcatccaatcctcactgggtggggtgaggaccactcctgtacactgaa

SEQ ID NO: 247905 - DNA, 554 bp, Homo Sapiens
ttgggtcctcacaatggctcggggacgtgggcctattcagcgccggatctgctgggggcatggtcctggggctcctgtgccgtgtatgacagcgggggctacgtgcaggagctgggcctgagcctggaggagagccgcgaccggctgcgcttcctgcagctgcacaactggctggacaacaggagccgcgctgtgttcctggagctcacgcgctacagcccggccgtggggctgcacgccgccgtcacgctgcgcctcgatgttcccggcggccggccgcgccctggccgccctcagcgtccgcccctgttgcgctgctgcgcctcagcgcgggcctctcgctgcctctgctcacctcggtgtgcctgctgctgttcgccgtgcacttcgccgtgccgaggcccgtacttggcacagggaaggggctggcgcgtgctgcggctcggagcctgggcgcggtggctgctggtggcgctgacggcggccacggcactggtacgcctcgcccagctgggtgccgtgaccgccagtggacccgtttcgtgcgcggtcgc

SEQ ID NO: 247906 - DNA, 451 bp, Homo Sapiens
  misc_feature (88)..(88): n is a, c, g, or t
  misc_feature (251)..(294): n is a, c, g, or t
  misc_feature (298)..(298): n is a, c, g, or t
  misc_feature (323)..(323): n is a, c, g, or t
  misc_feature (345)..(345): n is a, c, g, or t
  misc_feature (438)..(438): n is a, c, g, or t
atttaaataaggagaattctttcatatggaaagagctagtacaatcacatatttgaaaggagaaacaataggtactgaaccggagganaagggcgagggtgagtgtgccagcaccggcctggtgaatccacgattcgatttcccatccaaggtaagtttcccaaaataccgtataaacaagtctgcacattacacctctagccatcgtctgccctttcaaatatctggtctacatggaaagacaaagaggnnnnnnnnnnnnnnnnnnnnnnnnnnnnnnnnnnnnnnnnnnnncctntcaggaaccaaacaaaacccccaantccttttttactacacaaggcntgagggtcaaaagtttgagtacagtgtcccctttagttcacgggagaaaggcgtccacacagagcttagcaggttttccttctgaggttcagnactgttgaggttt

SEQ ID NO: 247907 - DNA, 1202 bp, Homo Sapiens
  misc_feature (288)..(301): n is a, c, g, or t
  misc_feature (424)..(445): n is a, c, g, or t
ttggattaggttgtctattataaaaccaaaactcattcgtttaatgaacttgactgtcatacctctatttagtaattgcgagggtaagattcatagtaggaatattggaaattttggcactctgagaataaataggcatatgatacccacttggacctttaacaaaagtaaaggaataaatttgcatataggcttggaaagtgaggcagcaatgctgttaactgcatttgttgtgatggtgcatttgattgaagcagcttgtctttattatgcaagactgtgtagagnnnnnnnnnnnnnnggcattgtactttttgtttttgttataaaggaagacagaacaaactggaatgttttatgatgttgtatagcaatcgctttttacctttcaaagttccgggtaaaaatgtgttatatctgtagnnnnnnnnnnnnnnnnnnnnnnaaagcactacatctgttttcactaattgttaatttctgtttgaacccttcatttaattttctcatagatttaagtaaacagatgtattttgcacagtgcacttatgtctattttaacaatcctcctgcatctgtattttatagtcagccttttgaccacctggtgccagctatataaggaataaagttgattcatatcaacattagaactccagtcccaaactaatctgtcaggttcactggtacataaatacctaggaaatatttttccagtctacaatttggtgctattgtgcagtaactaatagtactcttaccagaggagaaattatattaacgaccctgctaatatcctttcttagttatttgctccttgcaaattaaaaaagcaactaagagaaagaaaaacattgtagatatctatttatatttaaagtttatgtttcatgaactgcagctgcaggattctggcattttgcatgccattctccatcagatctgggatgatggctcagaacatgtacacagactaagagtaactgtgtgatctgttaaggggtggataacataatatgcagcttaggatgctattttgagatgtatgatattcagttcattcacctgattactttggttgcagcacaactgtatatattgtataaccgaaattgattattttcattgtcctttatgcagtgatttataattagagcatgtttaataagtttactcttcttgttaactagtcatttgactgg

SEQ ID NO: 247908 - DNA, 481 bp, Homo Sapiens
  misc_feature (18)..(18): n is a, c, g, or t
  misc_feature (26)..(26): n is a, c, g, or t
  misc_feature (35)..(35): n is a, c, g, or t
  misc_feature (66)..(66): n is a, c, g, or t
  misc_feature (110)..(110): n is a, c, g, or t
acctaccaaggcccgtgngtcacctnggtttgtgntttccccctgtttggtagccaagactctgangaataattctgtttcctcatctgccccattcagtattttgtttnccttccgtcaagttgtcttattttttcaatgactacctctccatcattgaggttctggtgaagctctctgcagctgtctcattccttcccaacgatagtaacaggaaatgactctttagcatcgatacctcaacatcaatttagggtagagattcctgcccctcttttgtcacagattaggaaattgagaactagggttaaccttgactatatttagaggtctttttgcctcttttccccttaacaaggatttcttatggtggtttcagtttcatttgcataaaggtattgagagggaacaaaaaacataaagctgagaatcttgagagagctcatctaccctgtctgttggtcagtttcaaatgagagtt

SEQ ID NO: 247909 - DNA, 289 bp, Homo Sapiens
taattttcggtcacaggcaggcccctgttgaaatttcatttgtcctgctctgggcccaaaggtggtggtggtttgggtcatcagaggactgcctgggacggttcagcgggcacggagcgctgtgctggcctggctggggatggccgcggaggtgcccttttcctggtgctttgtggtggctgcagaagaccagttttgttgagaactgcttttcagcctggaatcagacatcttccagatggtttggaccctgtccatgtgtaggtcattatcacacaaagagaccaat

SEQ ID NO: 247910 - DNA, 540 bp, Homo Sapiens
agcaatgctttttcataaaagccgactttgtacaaaaaagttggcttgaatcaaagtcctttgaagtagaactcaaagatgctgaacctgatattattgaacaactggtggaatttgcttatactgctagaatttccgtgaatagcaacaatgttcagtctttgttggatgcagcaaaccaatatcagattgaacctgtgaagaaaatgtgtgttgattttttgaaagaacaagttgatgcttcaaattgtcttggagaagcagaaaaagttgatcagagccttccagagtgtggtatgcttttcactgtgtgatgatccttagtggcacatgaatgaacgtccagatgtttgtgcagtagcccacccttatctgcaggatacgttccaagacccccagtgaatgccttaaactgcagatagtactgaatcctatatatactgtgttttttatgatacatacatgcctatgatgaagtttaatttctaaattagacagtaaaagattaacaacaataataataaaatagaacaactttaa

SEQ ID NO: 247911 - DNA, 588 bp, Homo Sapiens
ccgcccaccaccgagcctgatgacagcaagcctcccatccagatgcgtggctgttgagagtacgaagctccaggagggttccaggatcctgcatctgtccgcccccgggccccggtccacacgaccagatcccaccaaacaagcccccttggtttgaccagcctcaccccgtggctccttggggccagcagcagccgccagagcagccagcctactcgcaccaccagggcggcccaccccactgccccccctggaacaacagccatgagggcatgtggggcgagcagcgcggtgaccccggctggaacggtctcagcgacgcgccctggaacaaccagcccgacgccgcctggaacagccagttcgagggcccctggaacagccagcacgaggcaccgcccctggggcgggggccagcgcgagccaccctgtcgcatgcagcggcccccacacttccgggggcccttcccgccccaccagcagcacccgcagttcaaccagcctccgcacccccacaacttcaaccgcttctcgccccgcttcatgcaggacgacttgcccgccacggcaccccttgcgagcgggcgc

SEQ ID NO: 247912 - DNA, 532 bp, Homo Sapiens
actagtcacatatttattcaaaagcaatttacaaagctttctatatcttttcaacatatccacctgcccctccagcatctttttggcattcaagtaaccactatgatttaccccgctaagaaaaattattcacatttccatggcacaaattgtaggaaaggaaaagacattcttattcaagcagcggaagggttttggtgaaaaaacaggttctggttctggggaggtttttgttatgttaggtgatcgcctctgaagtttgcatcatcatagagctcttaacgttaaccagggctttggcctcaggagggaagccttatctgtagcagagatcagttgcaggaaacagccccaaatctcaaacagtggcacccagacttgatggccgaccaggcacagatgtaagccataaaaaagtactcatttgcttgctggctacaagaaggagcattttatctagtgagtccatcaggaggtcaggcgtaaagaaacatgtaccgggcagcttgacctccattgcttttggcttttg

SEQ ID NO: 247913 - DNA, 1208 bp, Homo Sapiens
  misc_feature (313)..(401): n is a, c, g, or t
  misc_feature (651)..(660): n is a, c, g, or t
ttggcacacagctgttttcttggtaccaagtacttgaagagacagcagcccatcccctcagcccacacccctgcgccctgtgggcaccgacaccacagaagccaatgtttggagatttgcacaacctcccgttcccccacatggagaagggaagtaagttgaggcagccgtgggatggtggtaggttccctcttagtcttgctgctgttgctggaattccaaagtgaccttagaaaccacgtgggggaaggcagtgctcactacttagaagggttgcttctgagccgcctggtcccccaagagcacaacaggnnnnnnnnnnnnnnnnnnnnnnnnnnnnnnnnnnnnnnnnnnnnnnnnnnnnnnnnnnnnnnnnnnnnnnnnnnnnnnnnnnnnnnnnncatttgcgctgcgggagaaaagcccatctctagcacaccttgaccccaggaaccgggttcccgtatggaactgggaagaaaccgcccctgtgccagctcccgcgggccctcctcgttccctcccagcctccatggccgccctctagagcctccctgctgtacggagctctgggctccacctatttgcaatgttactctgaagtttctggtgctatttttgtgttgtaatgtgaatacaggcttccttgannnnnnnnnnaatgggggtattgggtgggacagacggggtcagggaggccccaccatggcttgtcgagggcacgggcacctgcatggcggcgctctccctgcctcccctgccgggctgccagcctgaggtctgtgctgccggacggggatgctcagggctggggctgcagaaccgctgccctggccagggcaccctcatgcaccgacccaacccaggcctgggacgcacgtgtcctctcacagcgtcgtgcctgtgaaggtgggtcaaagggtgagagggcttccttctcacccttctctccataagtatcttgaagatccatggtttgttttgctctattgtttagtttttacttgggtgcaatgtgtacgtcaaaagtttttattttgatatttgaaagagaccaaatcaggcccagaccgcctctctggaaggtgttgtaggccattcaaaacgcctccggagtgtcgcaaaccaagtgcggaggggccctgaggttgtactgtaaacatcatagtgacttgtcttttcaaatatattcccactattttcgcaga

SEQ ID NO: 247914 - DNA, 966 bp, Homo Sapiens
aacaaaagaaaacattttattgcaatttgattaacaaggagacaggagcccagctcaaatctgtcccattgtacttattttaaagagttattttagtagaaaaggtgtagggagtggattctgtgattagtaggtgattgacagaaagaaaaggaagggctggaaaatcctcgggcatgggcagttacctcttcatgcctcctcatgggtcccatgtgcaaactcagagggagttagtatgaaacatgcggtacaaatttaggctgtgtgtcagcaagctcattctgtacaaactctggttttatctctttatcttgacacctgaagggtgtgcataatcccatcactccccaaaatatgccctacatgcagaatttaaattcatcctgcctccttgactctgagggccacttcctaccacagctagggtcccttttctgtcagcattctttctggagcttgcttatatcaaacctaagaaaagcaactccaggactccagacaaaacagatctccacccatctggcggccagaaagggaagctctgggcaaagagggagagagaatcaacctcactcactctggatgggcctcctgtgtgttcacagaggacagagcagagtcccccagctcatcctcaatatcagcgtccccagactggcttaggtcctgctagaagaacccaggattttgcctggcagaaagacacaagacctttgccaggatcagcctggtctctcaccaattcatgtcaggtgaagacttatagtggagctgtttaaatccttagaaaaatgattttaaatgccttgaagtccaaatgactttggagtgctaaaatttcataagtttccatgcctagcacatagaaaagggaagctggggtttcatgggcatgtttgtctaataccttccatctacacaacctcacacgcacatcacaaagccaacttttttgtacaaagt

SEQ ID NO: 247915 - DNA, 1119 bp, Homo Sapiens
gtatctttccttttatttaagcctttttgtcatcatggttttacagtttgcagcaaacagaatgtgcacatatttatattatttataattgcgtatttcattttttttggtgctattattaatggcacttttctcaaaattttcaattttcaactgttacagatagattatataaatatgatgaatttttgttacgttgaccttatatctggagaccttgcttaaacacacttattagttctaataactttcctgtagattccctaggattttctatgcaatcatgtgatctgcaaagggagatggtttcatttcttcccctctggcctggatggtttttcatttcttcttgccttctggcactggctttgacctcaagcacaatgatgacagggtggcaagtgtagacactcttagcttgttggaggggacattctgatgcttaacacatgacatcctattcccagagtctccagttttggtgatagtgtctcggttcttgagcactttccagaagaaggccctaggagagtcaggagcccatggaagcatggccacagggcgggcagagcagggcccagctaagtcgctctggccgtgcaggagagagggctgggcaggctctttaggccatacatgcccacaaatgggtcatccttgtacacatctgggcattcttacaaagcttggacagagtggcaaggcagcactggtagactcctgagaaatggaaccaggagtccaggtagcatggcttgtgaacagagtttgactcttgtagccagtcactaagctgggggtttaaagttatgtggccgggcacagggaacttgataagcactcaaccagtgcttctcatggccctaaacagacatgcaccctatacgaggagaaactgccctgcagaatggggtccaagcatcaccctctagctctgggtcctctggtgggcttggctgcaaatgtagccttgtgctcaccacagtcaactgcacatgtctgatggtacatgccacagtgcccactttcacccagcctcaggcacagcctctggaggacagctttgtcctcccacccagcagccccccggtgtggagggacactgacaacattccccaa

SEQ ID NO: 247916 - DNA, 811 bp, Homo Sapiens
cctctgtgtctttttgtttgcgagacaaagtcctttattagaaaatatatcaaaatcccagccccctgagccaggaccagaagagggagctattccagcataggcagaaaatgcccagggaggggcttccttcaccaaacaacttcccgggaaccataaatagaataaatattcacagaggtccgaggagaagccagatcactcttctctccatggaagagggaggggcttggggtccagccctgctcctactctaggggcagggactcctaggaatcgtcacataaaatcatgacatcaaggattcacagtcataagccctacaggagaccctagagagagggacccctcaggtctacaggagcccagctccagtccagcagtgagggagaggcccctaccccctagcacggcaccagagttcagttccctcacatccctctgagaacagtgaggagctgagggtggggagaatacaaccccatgaattcggtttcatgattaaggtagacaggaaggaggagtcagtgtgaacctcggagggctgtgtggttggcagtagatagaggcccaggcctggctgggggccggcgttgcagcatctcttgacggaaggcttgggaggaaccaggtgggtaacgtggcccagaaggagcccgaggaccccgagggtcagtcccaatgtctgctgtgatgttggtataaagaggccccagctctcgagccagcaactggtatgtcagtgagttcatcccatcttgcgtccaggaattctgggtacggaccaggaggtcaaatctgagggttccaa

SEQ ID NO: 247917 - DNA, 516 bp, Homo Sapiens
acgtctcgggctccctctccgtcaggtctcatgtcactaagccgcctgcctggaagccgcgaacgggactgggaaaatggcagcaatgcctcctccccagcgccaagtccaacaagttcatcatccacaatgccctatcacactgctgcctggcgggcaaggtgaacgaaccgcagaagaatcgcattctgcaggaaattgagaaaagcaaggccaaccacttcctgatcctctttcgcgactcgagctgccagttccgggcgctctacacgctgtcgggggagacagaggagctgtcgcggctggcagggtatgggccccggaccgtcacgcccgccatggtggaaggcatctacaattacaactcggaccgcaagcgcttcacccagatcgccgccaagaccatgtccatgagcgtcgatgccttcaccatccagggacacctctggcagggcaagaaacccaccactcccaagaagggcggcggcacccccaaatagccccacccgggcggtc

SEQ ID NO: 247918 - DNA, 479 bp, Homo Sapiens
  misc_feature (17)..(17): n is a, c, g, or t
  misc_feature (419)..(419): n is a, c, g, or t
  misc_feature (432)..(432): n is a, c, g, or t
attcggcacagggcagngggtcttgggcaggactgactcctcctgtgttccccccacagcctgctggaccgggtgttgtggagggcaggggcttctggtgggcactgacctgcaatctctgtccccaggctctcggctgagcaaaatctattcccagtccaccctgtcactgtccactgtggccaacgaggcccacaataacctcggggtgaagaggcccacgtctcgggctccctccccgtcagtctcatgtccccaagccgcctgcctggaagccgcgaacgggactgggaaaatggcagcaatgcttcctccccagcgttagtgcccgagtaacacaggttccacgggtgttacaaagaacccagcgccaagttccaacaagtttcattcatccacaatgcccttattcacaatgntgtcttgggtggnaaggttgaacgaaccgtagaagaattcgtatttttgggaggaaattt

SEQ ID NO: 247919 - DNA, 324 bp, Homo Sapiens
taacaataatgaccatttattgcttattctcaatacggcagggactatactgagtcccttaatcctgacactcatctaggaaggcactatttgctccattttacagctgagggaataagcactcagagaagttaaggaacttgctcaagtttgcacagccgatgaggaaccaaaccaagattcaagagtctctctgatactttctgtttgagttaacaacacccaatgtgtacattgggggagctatatccaaaaaataactccaatgcaaagatgtgttattattttggccttttgttttctgagacagagtctccctctgtg

SEQ ID NO: 247920 - DNA, 524 bp, Homo Sapiens
  misc_feature (289)..(297): n is a, c, g, or t
ccttataaagcacctactttattcatgcaaagtccttaccacatttctttgtgacctaattatacagccaccaccccccaccctagtttcgagttctaactttgctgcctcattggtgatacaagccaaaagcagcacctgttcagtatatacaagtgtcttatctaagaccctgaaaaatcaagctcgtttcccatttacctgagacgaagtttaaaactttacctattcctctttcctttctctgtgattcttttgggggaagtgggggtaaccaccaaaaattgannnnnnnnnacaaatataatctacagtatgtctgcagaatgaacatttaaaagagtatgaaagaaatcagtttttgttttgttttggttagacattccacttaaccagaggatcctgattattatggctaagggttgatgaaatgtgacttaaaaccagtgagctgtctaaagtcaggtcaaaagcagcctagggtgacaccggtgacagaaaaatttaaggatactttctagatt

SEQ ID NO: 247921 - DNA, 1178 bp, Homo Sapiens
  misc_feature (629)..(649): n is a, c, g, or t
cagttatacaacattttcagcctttattgagagtacagtcatcatgccaaaattcatccatcaacatacaaccttatttcccatctaaagttaatgagaatgtattttattttaaatgggacatagaggcaacatgccaagaattaaagtacaaccataaagttttagtttcacactttgaatatcaacaaagcagtaattcctaaaatcatgaaaacatgataaagtatctatacagaaaaaaatgaacatttaagtcatttcacgctttcttaatatcatatagtgaaaacagatgtacctataatttcagcctacagatagcatacttcataaggtcattattcatttaaaatagtacaaatgtttacaaagaacatttcacttaaatttcacagctgcttataaaatggtacttgcaagactgacctatataaagaaataagagtctcatcaagagatggtaaattataaatatataatatatcacaatgttaaaatcctcagtgctaatcaataaagataatgatctttggagaggaaagtatttagctttacatatttactgtgaatttccatattaataagaaacacatttaaaccttgccctgccacagaattattttgcnnnnnnnnnnnnnnnnnnnnnaagatgtactttttgaatatgtgtacatcaaaaccaaaaagttaacttttactttttcttttattggcaacttttgatgcatttttcgatttttggttcccagagggcattttttacaaatcttgaagctgcacctctgtccagcttgccagcctttttcttgtctgttatttccttgactctgttcatatatactctgattctttccaattcctgttttactggatgttccttaggattaactccttgggttgccaaataaacccaaaacattgaatttaatgtgtatgcagaaaccaaatccacttttgcttgttcaagtggatccaacttctgcaacaactcatttctagaaacagacatcatggtcttcagcatctcatccacagcaccaatggaattctcaaacgctgacaaatactcgtgaatttctactggatagtcttcattaatttcttcacctgccattatggctgacttagaaaaatacctcacggccttcgactccagtctcccggaaagcggtccc

SEQ ID NO: 247922 - DNA, 375 bp, Homo Sapiens
tcccgggcgtccggaggcgaaggtcccggagcgttcacgagaatccgggtcccggcgagtccggggtccgctcctcgcgcttctgccagggcgcacgagccggccagcctcggggagagggcgcgggggcgctgggggttcttacgggaagatgaggaagcccgacagcaagatcgtgctcctgggggacatgaacgtggggaagacgtcgctgctgcagcggtatatggagcggcgcttcccggacacggtcagcacggtgggcggcgccttctacctgaagcagtggcgctcctacaacatctccatctgggacaccgcagggcgggagcagttccacggcctgggctccatgtactgccggggggcggccgc

SEQ ID NO: 247923 - DNA, 562 bp, Homo Sapiens
  misc_feature (44)..(44): n is a, c, g, or t
tgaggtgttagagagggaccatgtgtcacttgtgctttgctctngtcccacgtgtcttccactttgcatatgagccgtgaactgtgcatagtgctgggatggaggcgagtgttgggcatgtgatcacgcctggctaataaggctttagtgtacttattaatttatctattctatttgtttttcattcatcccattaatcatttccccataactcaatggcctaaaactggcctgacttgggggaacgatgtgtctgtatttcatgtggctgtagatcccaagatgactggggtgggaggtcttgctagaatgggaagggtcatagaaagggccttgacatcagttcctttgtgtgtactcactgaagcctgcgttggtccagagcggaggctgtgtgcctgggggagttttcctctatacatctctccccaaccctaggttccctgttcttcctccagctgcaccagagcaacctctcactccccatgccacgttccacagttgccaccacctctgtggcattgaaatgagcacctccattaaagtctgaatcagtgcaaaa

SEQ ID NO: 247924 - DNA, 1069 bp, Homo Sapiens
tattcttacatttcttaatttatttttaataagtaaaaaatactcattgaaactgtacaaaaatcaaatcattaatttttgcacctggtatttcagtcatcaacagcaatctcatggtacagaaataaaataatgggaattatcattaacttcaccctggctttctagcttagtagaaccaaacagaagaaatcatggcaataaccattaactatagaaaaaaagtaatggaaaaatggttgcaggtttaatcacaaaatgaacttaatttttgttgattttgttttatctgctaaaacactaatatctataaatatgaactgacagcatcgttctaaatttacttctgaagagctgtcgagacttcaataaaatataagcaagttactggatcatatttatggactgctgaattaactacccgaaaagtatcagttactttcaaagaacacaaaacaaagtgaacgtggaaaaaagccttctttgcaaaagtccttttattagtcgtatcctctaaaattccaagccacagagccttgatattcctggattctgttttaagtaaccttagttttaaatatgacacttgggatatgcacaatgggaaagggtaggatatgtgaacaaaatttaatttcttttttccaaaggtagtcattttctttaaattcatcctatccacttttgcccacttccccatgtacagattatcctttagtcatacaaattcactctccacttccacatacattttccccacttgatggtacttttacaagagggaaacaatacagctggttgataaagtaatttaaactatttgtaaatgaaataaaaagaaagtaggtataatacatagtgtaaaagataccaaattggagtaatattgatgttaatctagttttttaatttaacaaagtacctactaatggtctgagcaggagagtagaaggaaaggagctagagggaaattacttcctatggttaaaaaaaagccaactgcttcagaatgcatgacagtcttagtaataaaagaatcatttactattttcactgagtttacagccaa

SEQ ID NO: 247925 - DNA, 1083 bp, Homo Sapiens
ttgggtgacacttcttggtcagaatgttaatagttttcgggacaattcggaggtccagttcaacagtgcagtgcctacctatctcagtcgtggctttaccaccaactatataaccaagcaaggaggacttcgttttgctcatcttctggatcaggtctccagagtagatcctgaaatgaggatccgttttacctctccccaccccaaggattttcctgatgaggttctgcagctgattcatgagagagataacatcgtgtaaacagatccacctgccagcccagagtggaagcagccgtgtgttggaggccatgcggaggggatattcaagagaagcttatgtggagttagttcaccatattagagaatctattccaggtgtgagcctcagcagcgatttcattgctggcttttgtggtgagacggaggaagatcacgtccagacagtctctttgctccgggaagttcagtacaacatgggcttcctctttgcctacagcatgagacagaagacacgggcatatcataggctgaaggatgatgtcccggaagaggtaaaattaaggcgtttggaggaactcatcactatcttccgagaagaagcaacaaaagccaatcagacctctgtgggctgtacccagttggtgctagtggaagggctcagtaaacgctctgccactgacctgtgtggcaggaatgatggaaaccttaaggtgatcttccctgatgcagagatggaggatgtcaataaccctgggctcagggtcagagcccagcctggggactatgtgctggtgaagatcacctcagccagttctcagacacttaggggacatgttctctgcaggaccactctgagggactcttctgcatattgctgacctgagaggatggcctcagagctgacttgggcaatcctccccaacaggaaggggagacattgcctgccactgaggaaacaggtcatgaaggtggagataagctgcaaggggcgaagcaactttatgtcagtggaaaacgtgtctctttaaagctgctatgtgaacagcttttacagtcattaaatttacctaaactaaggtt

SEQ ID NO: 247926 - DNA, 741 bp, Homo Sapiens
gttcctgttccacactgttcagcgggtgtttgtactgggtcgggtgtgtgtgctgggtcggagggagtgaggagcagagtgtgcttgtgtctgaagagactgagagaaacattttcgctctcaactatctgagagccatcccactatgaatttctcagtacaaaaagcattatgtcctgagacagcagagcataagtccttttaattatgtgtttgaaaaatgtcacaagtcaaaaaaggaacacaaggcaggctccggctccctccacccccgtgaggagcccttgtccatttcagccttgcactcagaaagaccccgggggtctgtgtagttccacgtgcttcatgtttcgtggtatctgtcagagccttaaaacaggcccacccactactgtgaaatttcaaggaaataactgattcagttaaataacagtcccaaggtagacctggtctcacaggtgaccacccgcttaaatccagagccttcttttctgtccaaagccactgaaatttgatctcctccttcacacattcccaggtccccaatatgccacccaccttctgacaggtggctacaggtctacactaatggaagctctgctaaaaacatctccacccaaccctcctgccaacgaggtcagctggcaggcatctgctaagcccctaaactggtcagcgcaggttatgcgcccattccgagacccaaacaatactccaggacttcgcaccttcctcctcgag

SEQ ID NO: 247927 - DNA, 664 bp, Homo Sapiens
tctgttcctaacacaaatgtgaatttattggttgatttgatatttaaaatagtacttttacaaaatcatctcagaaaatatactacatttattaaaattcctacaaaccattgcagaaaatattaaaccctctaaccaacctaacactcgctttcagaggcacttgtgatgattttcacagcttccatagttgcaaagaacaaagaaatcatcttccaacaggggtggaattagataagaataatccaaaaaatatttatttctttacagactcacagattgcttgatgtttaggggctcttacctaggatacctaattattcaaggttttcctaatttagtagactttttcattgcctacaatctacaatattcagcaaagtattaaggaaaatgaacccaagaaccttaaccacctcaaatagttttatggatatactaaactgtcaagtacaatctttatcttaagacttgagaactggaatgcaggaaaacaaactttggtggaatactggaataaaagacataaagctgggcagaactaggtgtggcaaccttgtatgttaattctgaaagccagaccagtgacgctaagaataacaaatagattcagatttgtttttcagaaacttgagctatttcggccaggtgcactgtctcacac

SEQ ID NO: 247928 - DNA, 646 bp, Homo Sapiens
ggtgcgagcttgctgtggtttttgctctgggtcctctgggatggcgcctggctgtggccgcgtggtctctcacgcaggggcgccgggcgggggaacgcggccaccctgagtctggtgagtcgactgcggcggcctgtgtccgaagtgtccggggccgtgaacaagggcagcggcctggcctcaggcctgcgttcccacgtttggaaacggggagcttcgtcgatttgtgtttacatcatcgactatgccagggagttctccagataagcctggttttattttcgtcagtgaaaaggccttaccgtataactgactttatgcttgccctgcccccgtataaaataacttaaaagcagcgtgcctggttacagctgtttccacgtgcggtgctcgtcgggagtgatcacctaccctacaggtggaagatggatgcctgaagtgtagactgctgctagctgaataccatctgggagcataaaggtgacctgaaggatgtccttggtgaggattttgaaaatttgatcttcacaagagttgcctggatcatttgaaatttctgggagtctgaggagtactgacataattacctgctggagtctgtaaatacacatttaagacagtgaggatgtgaataaatatattaatg

SEQ ID NO: 247929 - DNA, 670 bp, Homo Sapiens
  misc_feature (11)..(11): n is a, c, g, or t
aaatcttcctnttttgatacccagcattttataagtaaagagagagcaggagccttgatgatgcctctggtggatcagctggaaaacaggcttgggggagaagagaaattccaggaacgggtgacaaagcacctgataccatgcatcgcacagttttcagtggccatggcggatgactctctttggaaaccactgaactaccagattctgctaaagacgagagactcctcgcctaaggttcgatttgctgctttgattactgtgttagcactggctgaaaaactaaaggagaattatattgtcttgctaccagaatccattcctttcttagcagagttgatggaagatgaatgtgaagaagtagaacatcagtgccaaaagactattcagcaactggaaactgtcctgggagagccactccagagctatttctaagactttctgtggtgtttcatactctactcagagttcacactcatatttcatatttttatttttgggtgttgggtgccatgttacttttggtgccttaatacacctacttggattacttacaaatgttttatcacttcgttacaaaatccccacctggcttgtgctgccacataagcctctcctgcctatcgtatagagctgcagaaagagtaaatgatacacggtatttttatac

SEQ ID NO: 247930 - DNA, 445 bp, Homo Sapiens
  misc_feature (217)..(217): n is a, c, g, or t
tccctaagggactggcatagggttttgtggggtcaatcccaggaacctgggggaaactggatgcgttttatcctaagaagttcatccctcctgctcttactgtttccggccctggaggagaaatgagggaggagagggttttcctatgactgtgttagcttttattattagcaagagggctccttttgtaatttgtgccatgaaattcatgtcattntcctgggagaggagagggccgactggaaagggtggggggcacactggggaagcaggcagaggtttccttcccttgtaggggggtggggaaagtggggagagggggtgctatccagttcgcctgatgagggctctcgaaccagccgttttgggttgtgttaaaggtgagaccttcctccattaatgtacaatctcgaactaactgctaataaagtggggttctgtttgt

SEQ ID NO: 247931 - DNA, 1644 bp, Homo Sapiens
ttggcggggattcctcatgggcacagaggagggaggaggggtccatggccctagcatatgagaagcctctcctctgcctggaattcccatgcctcagcttcccccacactcccacctgtccgcttgcctctgaactcacgcatttcttggaagtcttgggagattcacctttactcagatggttgtttacctgtctcgtgcacagcttgaccttggactttaaagtgaggataaagaacgaggaggatggggggatgccccccttccacggggccctgtggcttccaaacctcggcctcctctggtctcttgtctgtggagcctccttcaaacccagggaaataaaaccacctgccacgggttgtggttcttctaggatcttctatcaatgttctctgaggtccccaggagccatgaagctggggctgactcccagggcaatgggactgcagtgtccttgttctttcttgttctatgcatccatgctctgctccacccctgccccttcactctgcccccccacatccctctagactggccttgtggtcagagcctggagtgcctgggctgctgggggcctgtgggctgcactgggccagaacccctggcgccttcaagactggcctgtagccagcaggaacatggagctgatccaggacacctcccgcccgccactggagtacgtgaagggggtcccgctcatcaagtactttgcagaggcactggggcccctgcagagcttccaagcccgacctgatgacctgctcatcaacacctaccccaagtctggcaccacctgggtgagccagatactggacatgatctaccagggcggcgacctagagaagtgtaaccgggctcccatctacgtacgggtgcccttccttgaggtcaatgatccaggggaaccctcagggctggagactctgaaagacacaccgcccccacggctcatcaagtcacacctgcccctggctctgctccctcagactctgttggatcagaaggtcaaggtggtctatgttgcccgaaacccaaaggacgtggcggtctcctactaccatttccaccgtatggaaaaggcgcaccctgagcctgggacctgggacagcttcctggaaaagttcatggctggagaagtgtcctacgggtcctggtaccagcacgtgcaggagtggtgggagctgagccgcacccaccctgttctctacctcttctatgaagacatgaaggagaaccccaaaagggagattcaaaagatcctggagtttgtggggcgctccctgccagaggagaccatggacttcatggttcagcacacgtcgttcaaggagatgaagaagaaccctatgaccaactacaccaccgtcccccaggagctcatggaccacagcatctcccccttcatgaggaaaggcatggctggggactggaagaccaccttcaccgtggccgcagaatgagcgcttcgatgcggactaatccggagacagatggcaggctggcagcctccagttccgtcttgagctgtgagaggggctcctgggagttcactgcagagggagtgtgcgaattctaccctgaccaatggggcccagaaataggctgattcgaagtccagcacaggggtcatggtcggaatcc

SEQ ID NO: 247932 - DNA, 543 bp, Homo Sapiens
  misc_feature (509)..(509): n is a, c, g, or t
  misc_feature (529)..(529): n is a, c, g, or t
atgaaacaaaggctcagcgaacgtttatttctcatcatatggaactggtagcaaagccaaagatttctgcacttgaacactggataccactccctacccacccagtgaacatttacagtcatcacatgccctctagaacccagatccccatgccggggcctcttctctcctgcacaccttcttgcagggagggctttcaggccggaagggggtgccggttgcttctccgcgcctgcacgggtatttaatgtggcacactggccaggctccttctcctgccccgcccagcagcagcacggcccttgcctttcttcagtgccctccaaactggccagagaggaggcacagactgctagaagaagggcaagagaagtcgtaattcacagtcatttgctacagaaagtgcctggaatcggtccttggctgcttctgcctggaagcaacccacttaagccccaggagaggggacagatgagatactgggatgggggtgggagtcctcagaaggnacccaggagacactggctgnagaaatggggtccc

SEQ ID NO: 247933 - DNA, 221 bp, Homo Sapiens
gatagggaagaattctttattgagcgccaactgcatgccagacatggctgcactgctttcctttaatgctccaacaacctgacaagagggtcgggtgaggagacaggccccaagcggcagccggcactccaagggtttccctccacggcagccgtcccaactccctctcctgcagggaccgtaagaagaagcggtttgtgggacagtcaggacaggaagac

SEQ ID NO: 247934 - DNA, 817 bp, Homo Sapiens
gaactgaaacgggtcgggatgccgatgccggcttggagttagagatgagtcaccgctgagagcagctgcagtagctgagcagtggcagcagagaggcagacgtgagctgagggcgcagaggcaggcagcatctctgagggtccccaaggagcatggctgggagccgtgaggtggtggccatggactgcgagatggtggggctggggccccaccgggagagtggcctggctcgttgcagcctcgtgaacgtccacggtgctgtgctgtacgacaagttcatccggcctgagggagagatcaccgattacagaacccgggtcagcggggtcacccctcagcacatggtgggggccacaccatttgccgtggccaggctagagatcctgcagctcctgaaaggcaagctggtggtgggtcatgacctgaagcacgacttccaggcactgaaagaggacatgagcggctacacaatctacgacacgtccactgacaggctgttggggcgtgaggccaagctggaccactgcaggcgtgtctccctgcgggtgctgagtgagcgcctcctgcacaagagcatccagaacagcctgcttggacacagctcggtggaagatgcgagggcaacgatggagctctatcaaatctcccagagaatccgagcccgccgaggggctgccccgcctggttgtgtcagactgaaagccccctccagcccggttccgcagggactagaacggctttcggcttttttgggacagcaactaccttgcttttggaaaatacatttttaatagtacagtggctgtatattttctct

SEQ ID NO: 247935 - DNA, 838 bp, Homo Sapiens
  misc_feature (726)..(732): n is a, c, g, or t
  misc_feature (736)..(736): n is a, c, g, or t
  misc_feature (739)..(739): n is a, c, g, or t
  misc_feature (741)..(741): n is a, c, g, or t
aggcaccagcctcatctattggaccctctttacactgggcctggatctttcttggtccatcagcctagccttcaagtggtgtgagcggcctgagtggatacacgtggatagccggccctttgcctccctgagccgtgactcaggggctgccctgggcctgggcattgccttgcactctccctgctatgcccaggtgcgtcgggcacagctgggaaatggccagaagatagcctgccttgtgctggccatggggctgctgggccccctggactggctgggccacccccctcagatcagcctcttctacattttcaatttcctcaagtacaccctctggccatgcctagtcctggccctcgtgccctgggcagtgcacatgttcagtgcccaggaagcaccgcccatccactcttcctgacttcttgtgtgcctccctttcctttccctcccacaaagccaacactctgtgaccaccacactccaggaggcagccccatccccttccagcccctaagtaggccctcccctccctaaatctgcttccgcaccacctggtcttagccccaaagatgggccttctctctcccagataagttggtcctccctctgcctttcctctcaagcccccaaagagcaaaggcaacagcaagaccagccggggttcttgcaacacttgtgaggggcagccagggcgggcccccaataaaggccccttggaataacttnnnnnnncaancancnacctccacccacaacatctaaaacaatccacacaaaaacccacctccaaacaagcccacctactctctccccaggaggcgctctttcttatggccgc

SEQ ID NO: 247936 - DNA, 878 bp, Homo Sapiens
ttgggtcgcttttctccgccgccgctggttggatcgtttcaataaaagtgttttttctcttgcactcgctctcctccggggaacaggcggaggcgtcaatccgcagccgccgagtgtgaaagcgacgcacacgcaaggagcgaacgcggccgcccgcattctcctgagctttccgcgggccgccgcagagccgcggagaaggagccagcgcccggccagacagtctcagcccgccgtcggcgcccgccgcgctcgcgcccggctgctccgaggggattagtgggccgtccgcgcggctcgtcggcgcgggagccatgttgaccgagggacttggcaacgcgtgagacacccgcgggccctcccgaggctccggacccgcggcgagagccggaaggcggttgtggcggcggaggcctgcgctcggaagcgcctcacgtctgccggccgctgagacccggacttgcatccggtcgccgcgggcgtccgcggagcagcttccccccgcgcctgtcttcgcctggcctcgtgacccgcggtccccgctcttgctggatttttcaagccacattcaattgataggatgaaaaaatttaagagaaggctatccctcacactccgaggaagtcagactattgatgaatcattgtctgaattggctgaactcatgactattgaagaatacagcatcaaggataatgagcctattgtgaagaatggcatgcctccaacgtctcacagtatgcattccttcctccaccagtacacaggatctttcaagaagcccccattgcggagaccacacagtgttattggagggagccttggctccttcatggcaatgcccagaaatggaagccaattagatattgttcatgaaa

SEQ ID NO: 247937 - DNA, 787 bp, Homo Sapiens
agaatagtttttattgactttagccaagggaggccctgagatgggggtccagagagagaggcttggtggggctacgtcctgggggccaggttggttctgaggggtagaaggccatccacccattcgcacggctgctccaggagggcttgccacagctgcttctcctcaggtgtggaatccatccagggcacctgcagcccatagctgctgcctgggatgtgggtgggcagggtttgagggcatgatcacactggacaccttggggcccccaaacacctgcctgggtcccagattatgcactgtcccccgttaccaccctcagttctcagtagatatcaaagttcagggaaaggacagagaggtatccagggccacacactgagcccccatctcccagggcctgtcccagggcctgtctcagggtgctgtcccacttaccggtgcccaggctgaggcgtgtgccccccagctggcggttggccagggccccaatggtcccagagggagagctcggcacaagcctggcgcaggtcaagcaggcccaaaagccatcgtacaccatggtgtgattgaacacagggctgaggctgcgtcgcacaacccttgtacgctggcggctggcctggctgtcatcaggcagcacgaagctgtgcgggaggtggcctggcatcaggtgacccccctcacactccctagagtcatccagtcaccacgtcccactcattctctctcacatatgtccatgtgccctggctcctgcctgcctggccttagaccctcactgccc

SEQ ID NO: 247938 - DNA, 600 bp, Homo Sapiens
  misc_feature (19)..(19): n is a, c, g, or t
  misc_feature (97)..(97): n is a, c, g, or t
  misc_feature (128)..(128): n is a, c, g, or t
cccggtgccacatcccacnttcaaacccatggccaactggcgggcacctcgattggggtctacctaccttcaatggagcccgtcttgctgcccaagnaggcccccggggtcgcccggccagagcggcnccgagcagacaccggccatgccttcctcgccaagcccccagcccgctccgggctggagcccgcctcctcccccagcaagggctcggagccccggcccctagtgcctcctgtctctggccacgccaccatcgcccgcacccctgcgaagaacctcgcacctcaccacgccagcccggacccgccggcgccacctgcctcggcctcggacccgcaccgggaaaagactcaaagtaaacccttttccatccaggaactggaactccgttctctgggttaccacggcagcagctacaggcccgaaggggtggagcccgtcagccctgtgagctcacccagtctgacccacgacaaggggctccccaagcacctggaagagctcgacaagagccacctggagggggagctgcggcccaagcagccaggccccgtgaagctctgcggggaggccgcccacctcccatcactgcggccc

SEQ ID NO: 247939 - DNA, 828 bp, Homo Sapiens
gccggacaagattgttcccgatcgtcagaattcctgtccgcgccttgcttcagccccgccgaaaggatcgccccccctagtcaaaccgctcgcgccccagaggcctcatggagtcccgcctcaggctcgggccttggcccccaaagaaagccactccgacgtgtttgagatgggcttagttcccggacccgtcctactgcccccaggcgctggacagcctcagaaagaggacaagtctgcatggaaagataatcgcacaactgagccttctgggagatgtagttcggagctgggaaggcggttggaccctccgaaagtcatcttaattgctctcacagataagccggtgctgggctgccggcctgagtactgtgcgcccagagtgcgcaggcgcaaacatcctgggttgctgttttggcctctttgttcgggcgtgaattttgtttattgctccttagtgcagaggggttatgggaccagaggttgtgagactcagaagtggttggggacgcagaaggggtgtagaccaggaacctgcgacctgatggggggaggtcgaagggaaaggaatcgccaaacgtgggacaggtttggagaggcagaaagagaggagtctgaaattgcaaagggcaggtgttattctgacttctgtgtgctttgtgataaatgagtgggacaggaagtaagaggagtttcactttctccttctgcaattatttgtgtacttggactaagtgtatctcatggccagtatttgactgcttttgacctataaaggtattgtatacacagtcatgcatagtttactaataaggatatatgctctca

SEQ ID NO: 247940 - DNA, 208 bp, Homo Sapiens
  misc_feature (137)..(151): n is a, c, g, or t
cctttggcctgggaatttttcccatttttatgaaggggttttaaattgtttcattttgtgtgctgtgcttcaaagccttaactgtcaaatcttgcattatcttgtttgtacagcaatatactggcctagcagaggcnnnnnnnnnnnnnnntgaattttattttacttgtcacacctgtcttaataaactggagttttgctgctaaag

SEQ ID NO: 247941 - DNA, 786 bp, Homo Sapiens
aaacatccatattcagtttatttttaaacggagggggcacgtacccacagaagaagcaggactgagaaccatcatggggggcttgcttgaagtgatctgcccccagccttctgacttcagagtgtctcatgatcccaatggccatggggactgagctgccccttgataggatgcatttaagcatggtcaattcccccttcccccaaaggaaatggagaaaaggagccaagaagtcaatgaatccctggaatattgtcccagaatccttccagggatggtatacgactggccaccagtccacaaatgtgactggtaagggatctagtaacagaggatggagttgggcagaatattatcctggatgatatgcacccagcactagaatacacctttcattagaatgaagagaacagacaaagccctcagaaaagatacaaaggcagagacattgattagaacattatctcataacagaggtggggccattacccaccattattgtaaaataactgtaactaaccaaaacacatacaggcttctttaatggagttaataaaactatggcacattgggaatcaggggcagaggtactgttcccagacggaaaactgggataaagggagccatgctgacagggccttattccagtctaggttgttagaaaggagccctagcccagaaatgacagcaaatagccataatcattatgtggggctgaaccagaggaagccaggctgagccaagaagctggaagtatcttgaacggctctccaaatccaaagccaa

SEQ ID NO: 247942 - DNA, 142 bp, Homo Sapiens
ggcacctgtccctaggggagcccgcccccaccctatcccatgcaaaccgcgcgcctccaagccaacccggtgtctctgcgccccaggggcgtgtctggggccgcgcgggccctgtcacgtgtccagggggtcacgcgtgggc

SEQ ID NO: 247943 - DNA, 540 bp, Homo Sapiens
acagatgcagctctttattttaaaaatcagtataatcatagtccacctgattcgaaatgcattctgtggaaattcaatgttacttaagtaaacagctagtggaacagtaataattatagctacaggcatttatggagcacctatcccgtgccaggcactgtcagatgtcctttaaatacctgatctcaattaaccctcaccacaaccaagaatgattaattctccaaggtcacagtgctgataagaggaatttaagcccagattccttttactacaaagcttgaagctctttcccctgtttgccacaacagctttcatcctaggcaaagtggccaggacccgagcatggtttccacctgctgttgtagccgtgctctcccaccagatgacgcaatcaccaggttagacttgatctcgagggaaccagaggaggttgtaattcactacacccacaaacagatttaactgagcaaattactcaacagccagagttgaggtaactacaaagctgtgatgaagggctcccattgtaaaaattca

SEQ ID NO: 247944 - DNA, 919 bp, Homo Sapiens
ttggcttgcttcgcacaaggctctttagttaacaatttagcagctactgtttgtgttaaacacacttttcaccaaataggttctgaggcaaacgagagcaatgactatttaaagaaaggctttcccagcatcacttacacatcccaaaactaaaaagatcaactcttccaactgagaaaagactcctggctttgaatggaaacttacagcagagagtcacaggccacggcaacaacaacgacaacaacaaacatttggaatattattctcaactcacgttttaataatacatcttattatttttctagtagagaaactacaaatcagcctcttcaacatttatatacagtttaataagcctcttgcaagttacttgttctctcacctgaggtatttttttcctccccaccttgcccctgttcctcccttcctcttctccctttgcaagaggaaatatttaacatatttgggtccaacttcaataatgtaataattaatacattaaaagcatttaacttcctttctagaaaaatgcacaggctaaggcatagacaaaacaaagagaaatgctgagaaatttgccactggagacaagcaatctgaataaatatttgccaaaagttctttttatgtcatatagtgtcaggatttgaaggagctattttttttaatgttgcaactagcaactcatcttcggaagacacagccaggagaatgaagtagaagtgaaaggtttataaatccatttgtaagcatttatcccatatattttaaattcaagaaaaattgtgtttatctttagaattttgtattcaatactttatgtactatgtgactcatgcttctggataaataaagcaccaaatatgtatctgtaaccacaatcacacatattatattaaatatatatctatataac

SEQ ID NO: 247945 - DNA, 431 bp, Homo Sapiens
cagtaatggaattgattttcagtaactgaatttgtgcacaaaacattctaaacactagtgaagcctgtttcgttgaactaattctggctctggaaatgtttttgttttatagttatttacgatttcgtttgtttggattcaagcttagtttgttaatatgtataatttagcatctattacactcatgtaaatatggagtaagtattgtaaactatttcattgcggggattgtgggtgttatacatacatttaggactgcaattttttggtattttttgtattgtaaaataacagctaatttaagcaggaacaagagaactaagggaggtctgtgcattttaaacacaaatgtgaagaacttgtatataaacaaaagtaaatactataatacaaacttccttctgaaatcaaagtagatctggtaaaaatgt

SEQ ID NO: 247946 - DNA, 438 bp, Homo Sapiens
  misc_feature (24)..(24): n is a, c, g, or t
  misc_feature (69)..(69): n is a, c, g, or t
  misc_feature (150)..(150): n is a, c, g, or t
ggggaaccctaccctcccttaatnggagtttccgttggtttaccctgaagttttctctggggtctgcanagaggcagcagcatggacatcatggcctctcaggtcccttttggttctcagtttcattggttcctctttctgttccccccnattgacttctgtgccccaccctagccttttccataaccttaggtattcagtttggaggggttttttgtatttttgaggattcctgtattctgtatcctctcctcgcatctcctcacatggaaagaaataatgtatttgtgccttctgtgaggaatggggggaacaagtggtcccaggtatccccatttccaaggcccccctccctctccaggtccccccacagcaataaaagcttccccctgatatccatccctttgtagtttgaacaaatatatttatatgatatgt

SEQ ID NO: 247947 - DNA, 477 bp, Homo Sapiens
cagttttccaagggagccgtgtactggacagacgtgagcgaggaggccatcaagcagacctacctgaaccagacgggggccgccgtgcagaacgtggtcatctccggcctggtctctcccgacggcctcgcctgcgactgggtgggcaagaagctgtactggacggactcagagaccaaccgcatcgaggtggccaacctcaatggcacatcccggaaggtgctcttctggcaggaccttgaccagccgagggccatcgccttggaccccgctcacgggtacatgtactggacagactggggtgagacgccccggattgagcgggcagggatggatggcagcacccggaagatcattgtggactcggacatttactggcccaatggactgaccatcgacctggaggagcagaagctctactgggctgacgccaagctcagcttcatccaccgtgccaacctggacggctcgttccgg

SEQ ID NO: 247948 - DNA, 432 bp, Homo Sapiens
  misc_feature (416)..(416): n is a, c, g, or t
aaggaagaaagaaggtcagtttttattcccctcaccataacaacccaataaaggggttaacttggatgaatgtcaaatcttacagccctctattatttcagcctctataaaaacaaatgagtaatttgaggggttgagaagataccttcttgtaattatgattacaagattctaatcatgagaacaaatttagtgcagcatgtcttcataaagaccaactagctagagctattaatagaaaagcctagagccattttaacatgaagtctaaacagaagcaaaaaagaagataaaacgtgcttctttaactgatgcacttagtggataaccacagcaaagctataaacgtcctttgagcagaatgccttttcctctcttgatcccattcttctttatttcttatttattttattagnataatgagtaatgttt

SEQ ID NO: 247949 - DNA, 966 bp, Homo Sapiens
gatgatatgaggaaattattttaataactttatgaaatttagtgatttgaacacttaaaatttaagtggacaatgacactggttttgtgaaaaatgtccttgatcacatgatccctcaatgtgcaactgcaggtgcatgcgtgagcgagttttcagtggacgtgactatgcaccttccacacatctctgatgattggggacattgtttgtcttctatttcgtgtctttcctcttctggcaggcagggacatgaacaaatccgtgactcagcactgacccaggagatgacgcaaacatcatagggtgttttggaaggaacctgagtccttattcttatttcctggagcctcagggcagaaagaatagaagattgggccccagccatcattagaagagtagcagaatcacaaaggatgttgaatgtcagctttaatggcttctatgctggggttgggccctgatggggaagttgtgggaccctgagatgtgggaggatgtattcgggtcaaagcactcaaagattgtctttcgactggagtagagggacccctcctggtattaaaagagagggaaataagacatattttggttatagagagggggaacactggccaaatttgggtccttgggacaaagcgcagcagaaagggaaagtttctctaattagcacaaattcccattatagcctggtagtgagcctgtcctcagggactagatttaccttcattactttggaccaataacctggtctaatgacaagaagtcttcaacaacatccctcattacttcctaagtcctggtttcccctttggtaaaactccaagctcactgggtgtttgaagcaggaaaggagatcagagatgaacagaaatttgcatatagtaaatgtgcagagtggttgtgattattgttggtcaaatatcaccatcagaacacaaaagaagcctgtgctgtgaacaggtcacc

SEQ ID NO: 247950 - DNA, 478 bp, Homo Sapiens
  misc_feature (86)..(98): n is a, c, g, or t
acctataaaaccaactttgtacaaaaaagttggctgctgatttccatgaatcgccttcaaaactctcgtgtagggttgacaatgtnnnnnnnnnnnnnatccagcttattcttttattttcaagtccattcttggggctggtggggaggcaggagaatacccctccctaagcccttagtgtgtgccgagcttgctttgtgatgttggcaggggaggggagacctgggtggtgactgagttccctttatcaaacccttcaatgggcacaaaattgagtgcttgattttaggttttatttttttatgaatgtccaaatctgtgtttccccctgccctcccagactgtgtggccagttgaaagtgtctggtttgtgttcatctctccctcattgtctggaggagggcctgagaccctgccacatctcctatgctctgcatccacgcctcttttggacattaaaggttgattgatgcaaaaa

SEQ ID NO: 247951 - DNA, 1439 bp, Homo Sapiens
  misc_feature (304)..(369): n is a, c, g, or t
  misc_feature (1384)..(1384): n is a, c, g, or t
ttgggtatgtttctgttatgcaccactgtcatccattacgttttcagaagaaccttggtaaacatttactagtgaagttcagacaaattcagtcttttctccatatgaaacttacttactattatctttatttaggttctgatgacaatatccagtgtgatttgactgccattgatgattctttagaaggagggctcttgtggttttttcctagatccttatctttgtcacctgattttcataccactttcttcaaaagacagtggctagtttatctttggtatttgtcttgcaaaaggacttnnnnnnnnnnnnnnnnnnnnnnnnnnnnnnnnnnnnnnnnnnnnnnnnnnnnnnnnnnnnnnnnnncctgggagtgacctcacagctgccggaacataaagactcacaggtccgcctcccaggctcaaagctggctctgcaggggacatgagaggcacaccgaagacccacctcctggccttctccctcctctgcctcctctcaaaggtgcgtacccagctgtgcccgacaccatgtacctgcccctggccacctccccgatgcccgctgggagtacccctggtgctggatggctgtggctgctgccgggtatgtgcacggcggctgggggagccctgcgaccaactccacgtctgcgacgccagccagggcctggtctgccagcccggggcaggacccggtggacggggggccctgtgcctcttggcagaggacgacagcagctgtgaggtgaacggccgcctgtatcgggaaggggagaccttccagccccactgcagcatccgctgccgctgcgaggacggcggcttcacctgcgtgccgctgtgcagcgaggatgtgcggctgcccagctgggactgcccccaccccaggagggtcgaggtcctgggcaagtgctgccctgagtgggtgtgcggccaaggagggggactggggacccagccccttccagcccaaggaccccagttttctggccttgtctcttccctgccccctggtgtcccctgcccagaatggagcacggcctggggaccctgctcgaccacctgtgggctgggcatggccacccgggtgtccaaccagaaccgcttctgccgactggagacccagcgccgcctgtgcctgtccaggccctgcccaccctccagggggtcgcagtccacaaaacagtgccttctagagcccgggcttgggaatgggggacacgggtgtccacccatccccaagttggtgggccctgtgtcctgggcccctggggctgatgggaaaaatggtcccgtgcccagggccccttgggctgcagggcaacaacttttaagctttggggtcccccatgcagaacccccattatttaacaccnctgccctggtcctggtctgggaatccccgaaggtattggcaagaggttggcaact

SEQ ID NO: 247952 - DNA, 488 bp, Homo Sapiens
tttttttcggctaaagtttatagaaattctttattattagacaaaaatagactctcttttttcccctattcatgtgatcctactctgaatctctgctcagaggaggcagtgactcgctccccacccctctcccatccctgccgtgctggcacctgcagctgggtggaactggcaggggctgatcccctggagggctgacgttctcctgcaggtggggctgcctgatctccttcggggctcaactgctgatgcctcctcacccctcacacacccatctctgccatctgctcacatgcaaggtcatcttgtgggcctgtccacttaacttagcaggctgggggcggggaaggagagcagtgtcccaggcctgatgcccactcctcattcctaagggagggtgctttctcctgggtctcctgggtccaggccaggggatgtgagggctgtggggtgctgggaggggggcagtgttgatgtgggctctgagc

SEQ ID NO: 247953 - DNA, 448 bp, Homo Sapiens
acaaaaaagttggccaagacagccccgaagatcctaccaaaatgaagcgcttcctcttcctcctactcaccatcagcctcctggttatggtacagatacaaactggactctcaggacaaaacgacaccagccaaaccagcagcccctcagcatccagcaacataagcggaggcattttccttttcttcgtggccaatgccataatccacctcttctgcttcagttgaggtgacacgtctcagccttagccctgtgccccctgaaacagctgccaccatcactcgcaagagaatcccctccatctttgggaggggttgatgccagacatcaccaggttgtagaagttgacaggcagtgccatgggggcaacagccaaaataggggggtaatgatgtaggggccaagcagtgcccagctgggggtcaatccagttacccttgtacttgca

SEQ ID NO: 247954 - DNA, 490 bp, Homo Sapiens
  misc_feature (253)..(253): n is a, c, g, or t
  misc_feature (295)..(295): n is a, c, g, or t
  misc_feature (354)..(354): n is a, c, g, or t
  misc_feature (394)..(394): n is a, c, g, or t
cagacccagaagttcattgactggctattcagcatcatggaaagccctaaagaagccctctcagcacagtccagggatcttttgaaagccaccctgctgtccttgagagttctcccagagtttaagaagaaagctgtatggaccagagcatatggttggtgaacagttttgcagtaaccagcagcattctcagctggatgaggaaaaccatataagtggaagaagtttttcagaattcatgccctggtattgnctgagacatgatgcagagagttaagggtcatgaaaagatggnccacatcactgacagcttgacacatgcctcctaagagaggagtgcattgtctttagtancccgggtccagttgagactgaaacaggaacttggattttnctttatttggtcttgagttcaatgtggagattttcctttgtgaaagcttgcaagatattatcttctccctgctaaattccagtaaaataatgttgt

SEQ ID NO: 247955 - DNA, 1131 bp, Homo Sapiens
  misc_feature (622)..(677): n is a, c, g, or t
ctacatctctttattgcagaatttatacttgtttgaaaaatacaaaatgtagcgttgataagattgaagcatgttgaaaggtaagtacagggaaaggtcctttcagaatgactgcaacagtgcagcaaggattgccattccccgcctaaaggacaatacctttttaatagaaataaatgagttagttagttagatttttattacagattgaattaaacagttagttacaaagacattctctgatacattcattcatagaggtcttaacgtataaatacatagtaaatatcctataaaatggtaggcaatctcatcgtgcattatctttttgtgctcagacttgacttcacattcagtctctacatacagcttgattagaatcataaaaacaatatgaagacgattgcataaagggatagtttgacaaagcatattcagatattgtaacatttatggtgggtaaaaatgtatcttttgaaacaatatattagactccatttttagctgaaatgaaatttactgattcaatctttttaagaatttgtggatgtttaaaggaaatgtatattagcatgaatgtgtaactattaaactcctccgcaaagctattcagctgttgctnnnnnnnnnnnnnnnnnnnnnnnnnnnnnnnnnnnnnnnnnnnnnnnnnnnnnnnnggaccttttttccccagatatacatgctgaagataatttgatccaataagttaaactaagtagagatttatggaattaactcatcaataggaagagtacacatcaataaaagtaaattttttttaaaaagtatatacctttttgatgttaattttgttataaaagtatctcaaaacatcattacaacagtgtgataaataatatacaaatgatctcttaaaataccatgaatagggagccagcttccccaaaaatgttattctgttaacatcagtatcttgctttcttaaaatgactttgtaaaacctgataaatactctcagcaatcttttctaataataaacatctagtattgctattaattagattgtagacttttatacatagtaaacaaaatagctttaaatgaatgcggcatagtattttcaatgatttttgtttgcaatgatgccaa

SEQ ID NO: 247956 - DNA, 418 bp, Homo Sapiens
tttttgttgatgctttagtgcaggcctgttctgaggcaataacaagttgctgtgaaaacagcatgtgctgctgcctttgtaactgcatggaaacttttcacatgggtttttctccaagttaatacagaaatatgtaaactgagagatgcaaatgtaatatttttaacagttcatgaagttgttattaaaataactaacataaaacttaattactttaatattatataattatagtagtggccttgttttacaaacctttaaattacattttagaaatcaaagttgatagtcttagttatcttttgagtaagaaaagctttcctaaagtcccatacatttggaccatggcagctaattttgtaacttaagcattcatatgaactacctatggacatctattaaagtgattgacaaaaaa

SEQ ID NO: 247957 - DNA, 702 bp, Homo Sapiens
ttgctgaataatacttttattaaagttttatggaaaagacccacatcatttctgtatgtatcatattatataatttccaggtgtgttagagtgcagtgacaaattacgtttgacgaacagctttcaaatccactcttgtctgccactcctttatgaaatattgaaaggcggctgtgtacctcagcattaaaggttacaaaaagcaccattaaaaagaggactcacatatttaattcccttcaaagtagtcttatctctcctttctgacagacacagagctgcactcattcgaaatgctgccgtgtaataccaaccaacatgctccaatgtaccaaaattcaaacaagtctcatttatgagacccgtgtagtgattaggactaaccaacaacagtgagctttggctgtcctaaaaccacaagctgggttaggtaagtgttttgtacaggggaacagaaaagaagtaagatcatcaatacctaatatatgacttaatgtaggtatcccttgaccatttaacctgacacctacaaaatccatagtgtttagtatttcacaccaatcttactgcaaaagtgctgtgctacatacaatcaattcaagttaactccaactaatattggaactaataaaaaattaatttgtaacaaagcttattcacttcaaagcacaactgagaaaagcaaatccagacaaagcccaa

SEQ ID NO: 247958 - DNA, 555 bp, Homo Sapiens
aaagaaaagacaacaaaattcagttgtcaaaactggaaatatgaccacagtcagaagtgtttgttactgagtgtttcagagtgtgtttggtttgagcaggtctagggtgattgaacatccctgggtgtgtttccatgtctcatgtactagtgaaagtagatgtgtgcatttgtgcacatatccctatgtatccctatcagggctgtgtgtatttgaaagtgtgtgtgtccgcatgatcatatctgtatataagagagtgtgattatatttcttgaagaatacatccttttgaaatggatgtctatggctgtttgagatgagttctctactcttgtgcttgtacagtagtctccccttatcccttatgcttggtggatacgttcttagaccccaagtggatctctgagaccgcagatggtaccaaacctcatatatgcaatattttttcctatacataaatacctaagataaagttcatcttctgaattaggcacagtaagagattaacaataactaacaataaaattgaatagttataataatatattgtaataa

SEQ ID NO: 247959 - DNA, 451 bp, Homo Sapiens
acactagcatccaaagtttatgaaaaacttccacacactcagtcctcacaacaaccgtgcggtgggtaaggcagtgattatgatcccatttcacaggttgaagacaccgaggctcagagaggggaaatgactggcccaaggggacaagtacgcatcttaagatgtcaagtcctggacccttccctgcaaggccccctgtggaaggaaatagctctgctggacattcagccactgaagagagcccccagtccagaggcttggagaccactggaggctctggcttggtgaccctgggtctcaagagaaatccgtgcggagagggaggggcttttccattccactgatgaggagctcaggctcttgggacatcgtggaggtactgggcacgctgaggtcttcaagctgcccacagtaacctcttccttttcctcctgccgcaggtgccggagaa

SEQ ID NO: 247960 - DNA, 1109 bp, Homo Sapiens
  misc_feature (352)..(454): n is a, c, g, or t
  misc_feature (486)..(497): n is a, c, g, or t
actttgtacaaaaaagttggatttatttatctaacagcagggccactcgtctagggcagtggagtctgcgtgtctcctggggctggggcagggcattggcagttacgcagtggccctgaacctggtctggtgcccccgaacctggtctgatgccccctcagctctttgacaatcactgtggctgttgggttttctcctatttctaaaaatgttctcttctttcctaagtgacagttttgaagtattggataaccaagagctcaggtcacacagaccttggagccccatctttgcttgcagcttagctttgagatactaagcaagctagggacttcactcttgaggctgtttnnnnnnnnnnnnnnnnnnnnnnnnnnnnnnnnnnnnnnnnnnnnnnnnnnnnnnnnnnnnnnnnnnnnnnnnnnnnnnnnnnnnnnnnnnnnnnnnnnnnnnncacagctactgtgagtttctgtttatcccccnnnnnnnnnnnnaagcccattgtttattctttgagaatttgttgtaacttcttcaggataacacctgagtccacaggctgagcagctgtggcccagacagaactgctccggcttggctgttccagcaggtggggcgctggcctcggtgagggcacagcagcaaggttcacggatatccgtgtgtcttgtctgtggccaccaggcacaggtttggcttccggtcagtgtcccgacactgtgcgggaggtgacaacagagcaaagcagcgcaggggtcagggaggtggagacactgctgaaatcacactaccccaccctcagctgaagccccacgttccacaaacttggggtcatagattgtccagtcactggctccctccctgtcagcacagcacagaggaaggggctaactgaatcttttaccacttctggcctggctccagaactttgttctagattccttaaaagtcggtagctgatgtcaaactcaattgagcagtagctttgatcccttggtctgggggtcgaaggaagatggcgctgttatcagcgggggaatgtactatttaagatcagctttgttgtaaaaccatttgttctagaataaaactcaattggaaacgtg

SEQ ID NO: 247961 - DNA, 431 bp, Homo Sapiens
aatgtcaaaggatgattttggcaggtgagctcaggttctcctaagcaaagagggtttgcatattccgcctccttatgggtatcagtgaagcctctcttagactcagctgcatgctctctgggattgggggctagccggcatccttagcctgtcccacgctcctggccctagtcttctactctctgatcttattactgactcttgcctgtctcagcacactcaggaccttcttgccaaccacatttcatctggccaactctacccaagcccacatccagccaggtccccagtcctgctgggatgcaggtacctaacaaagcactggactgtgtggaaggaagcgaaaggggaggaggtggtccaaagagagagggtgtcgccatgggggctgcagagcagaactgagcaaagaacgctgacacagatttgct

SEQ ID NO: 247962 - DNA, 586 bp, Homo Sapiens
cacgtgatgtccttttagagatggcagagccaccagacccgccacaggagttgccaataccctcttcggaacccccaccattaagctaaagtaaaacccttttgagggaagagggagactggggagaagggaaaagagagaaggcagggagagtagggagagaaaaccttccagcagcccagtaaactgcgggcgaagagatctacccgtctccctcccctcccacagttaccactggccttgtcatcgcaagcatttgacaaagacttgcttgtcttgggcctgtcacctcctgaaaggctgctttagctgtggatgcccttgattaagggagagagcgcctaggagctgcctgccccagctggggtgacggctgtagggctgggtctatgttgcaagccctatatcctagcatgcagtggaaagtgcttagctctctccctcctgacctctgggcagccagtcatcaaagcagagagacgtggcggcatgtgggcagcatgcccaggttccttgctgactcagcacttatttctgtagttttaaaaaagaatttaatgtttttggttgtatttttttggggggg

SEQ ID NO: 247963 - DNA, 252 bp, Homo Sapiens
ctctgtggatacacattttaattctctgaatttagttccatttacggcattgtccctgattctattttctgaagccttagacttacagatctgagatttacagatggagaatttccacaaaagtatggtgatctctggctctccgattacatttaaaggtgattagaaagttggtttacatgggtaggcttgttaacttgagcctcattgtaaggaggttagttggcacagctaccttttcagagagaactg

SEQ ID NO: 247964 - DNA, 719 bp, Homo Sapiens
  misc_feature (615)..(615): n is a, c, g, or t
gagcacttctgcacctgcgtctggtgggcctatggaaatatatttgttacaagaggggttttgattcctcagatcccactgttcagagaacaataagaagagcctcctgaaggggctactgagccaaggccctgagacgcaggcctaggatgaataagtcacccccaccttagagaaaaggaaaagacaaagggcccaaatagaaagggggctggggtggaggaaacccctgtggaagacaactgacatttctgggccacaaaagtgtcctccccttcaaataggaggctggcaaaggcttcatagcagagactgcattggggtaacgtcacatgaaacaggcatttccacagggctgactgccagccttggcaggatgggagggggtcagggaagcagtgggtgaggtatagagacatgctccagaatgacagagttgttgggggtctggagaagctacgcaataactggcccacctctgagcttcagtgacctcctgatggccacaggtggtgttcctcagggcgggcaggtgcggcctggccacattgcagggtcattagcaccagctgttttaacctaccctcaagcgggccacactgccttctgcttcanggctgggctggccagaaatcgggcctttgtgtacggatgctacatcttaccccagactctgccaacctcctcgtacctcctgggacctaccgtctcactcctca

SEQ ID NO: 247965 - DNA, 450 bp, Homo Sapiens
gtctgtttaattttcggcaggttggttcacgcacacacatcaccccaaggtggacacacagagaagggtctgagaaggaactcatgtaaccaaatggaaccatgacataaccaaatagcacctcctctttttaagaggctggcagaggagcccctgcttggtgtcctcctcactggctctttcggagcccacctcacgcctcactagctagggggtcagcagccaccaggcagatggacagccccgtctccacactagaggaataaatgtcagcgacaggatgacagcagagaacggtcacataccaccttggaactggaaatataggaggaaagaaggctttttttgctgacaaaagagaagtcactgtgataactgtgttaacttatttaatacaatgaaattgatgaacagcccttgacaaggcccagtgtggactttagctgctct

SEQ ID NO: 247966 - DNA, 413 bp, Homo Sapiens
  misc_feature (183)..(221): n is a, c, g, or t
ttttaacttgtatattctgacagtttaatacatataaattaagtcctactctcagtaaaacatgtttatgtattcacgcatttctaagaaaatggagctatgcatttgcttttaatatgctaagtttataaaacagattttctttctaaaatcaatgggccttagaataatatgagtatgacnnnnnnnnnnnnnnnnnnnnnnnnnnnnnnnnnnnnnnntcatgggcccgatcataatttttttccagctcatccgtttactcactgttgttaattgaaatcatgtgttctgtagacattttgccttctcttagctctaacactcattattaatacatttctatttaaggcaccagttttgcattcttttttgttttgtatgatgccacagattttcaacaagcttccaaa

SEQ ID NO: 247967 - DNA, 572 bp, Homo Sapiens
ccaagaatgtcggcacgaggctgagttttgtaatcagccaggtctggaaactaatattttaaaaatgactacaccaaacaagacacctcctggtgctgaccccaagcagttggaaaggactggaacagtacgggaaattgggtcacaagctgtttggtcactctcatcttgcaaaccaggatttggagtggatcagttacgagatgacaatctagaaacttattggcaatcagatggttcccagcctcatttagtgaacatccaattcagaagaaaaacaacagtgaagacattatgtatttatgcagactacaaatctgatgaaagctatactccaagcaagatctcagtcagagtaggaaataattttcacaaccttcaagaaattcggcaacttgagttggtggaaccaagtggctggattcatgttcccttaactgacaatcataagaagccaactcgtacattcatgatacagattgctgttctagccaatcaccagaatggaagagacacccatatgagacaaattaaaatatacacaccagtagaagagagctccattggtaaat

SEQ ID NO: 247968 - DNA, 558 bp, Homo Sapiens
acctgttaaacgttattttatttttaatgttttgtacagaactcccaggttctccaactacaacagatctccaaaacaaaacaagcaaaactcaggtaccaaaccattacttaaatagcaaagactctttcatgcttttttgatacacactgttttgcaaatctactcaaacaaggggagaaatacagtatctgactgctaacacaatgctttatgtatactgcccaattccaaaaagaatccaaggggattctggttctattcaagtatgcggctaggctatcaaggaaaataaatctctcagaaaagaggatgacgggttgtccagttggcttcaagtctgccaggatgaccttgagattttatattcagcatctaagaaagttggtaatgacatgttctgctctttccacattagcccgtaggtggcagcaaatcattatcattaaaattaaaaggtgcagtcaaatttctgaagagtaggtgatccgggtggagatgaatttccactaggagacaagtagagatagcttttgttcactcctgctccctggggtt

SEQ ID NO: 247969 - DNA, 358 bp, Homo Sapiens; identical to SEQ ID NO: 177172

SEQ ID NO: 247970 - DNA, 180 bp, Homo Sapiens
attgtttacttcactttgggttttttaaaaatttcaacttttattttagattcagagagtaaagatgcaggtttgttacacgggtatgttgtatgatactaaggtttgggatacaaatggtcccaacacccaggtagttaagcctagtacccaacagttagtttttcaacccttgcccca

SEQ ID NO: 247971 - DNA, 332 bp, Homo Sapiens; identical to SEQ ID NO: 177178

SEQ ID NO: 247972 - DNA, 483 bp, Homo Sapiens
cggcctgttatttccttttgcgcgacacggtctcagctgttgcgcctttggcgagtgacgctggccgccaacgaggtatacgtactgggaccctcgccctcagtctcgtctccggcgcggctacctgccccgttttccctgtgagttgacctgctccgggccgcgggccgccaatggcaggggccgctccgaccacggccttcgggcaggcggtgatcggcccgccgggctcagggaagaccacgtactgcctgggcatgagtgagttcctgcgcgcgctgggccggcgcgtggcggtggtgaacctggacccggccaacgaggggctgccgtacgagtgtgccgtggacgtgggcgagctggtggggctgggcgacgtgatggacgcgctgcgcctggggcccaacggcggcctgctctactgcatggagtacctggaagccaacctggactggctgcgtgccaagctcgaccccctccgcg

SEQ ID NO: 247973 - DNA, 430 bp, Homo Sapiens
  misc_feature (402)..(402): n is a, c, g, or t
  misc_feature (420)..(420): n is a, c, g, or t
cactgcaaaaggcttttattttataggcaccactgcaaaatgaggaatcacatcaaaacatatcaaatagaaaataataatttattttaacttcattttactgtttgtaactaatcatgattttgtgaacttgcctgtataagtctgtaccttcaaatctacaaagcaaaagtttactacaatgagcacttaaaattccacaaaccgtctccatccacaactttcctgtacatgcaaattctttcaatgggctgcaatatttgcaaacatgctttaaacttccataaagatgcaagatattttgctttctgctaaaacctttacactctcttgggaaccttaaccaggaaaatgtttaaatgtatatcccaactctaaacgctgccggtttggggtatatgnatttaaattcggtaaccnccgggtgggg

SEQ ID NO: 247974 - DNA, 427 bp, Homo Sapiens
  misc_feature (296)..(296): n is a, c, g, or t
gcaaaaaagtggcggtgttttaatcaagtctcattacaacggcagaattaggaatgagtcccacctagcttccacatgcgtgggcagcagctgtcacacgggcctgtcgtggcactcagcccatggcacagacatatgtggctcagggcaagaaccagtggatggggctctgcacaggaacgttggcctcgggatgggagacccggcctgcccaacactgctcagagcccctcccaactctgacaacaggctcgggtcaggactccccgaaatcaggcaccctcctgccccactgntgagatccccaacgggccagacctagcttggaaactttttttccacctgggcttggccagggaaggcaggcaaacagagatgatgactcggaatgatggggtatttcgggaaatggctaggggaaacaact

SEQ ID NO: 247975 - DNA, 870 bp, Homo Sapiens
gggtcgacttcggccggcatggtgaggcggctgggtgtcggatgaaccccgattcgggacgaccgaaggaagttgcaccttggcttcctccgagctggcctgacccgcaatgggaggctccacgctgtttgtggagacatccctgagacggccacaggacaaggatgccaagggtgacaaggatggcagcctggaggtgacaggccagctgggggaggtgatgaaggagagcgcccgcatagcctacaccttcgccagagccttcctcatgcagcacgcccccgccaatgactacctggtgacctcacacatccacctgcatgtgcccgagggcgccacccccaaggacggcccaagcgcaggctgcaccatcgtcacggccctgctgtccctggccatggccagcctgtccggcagaatctggccatgactggcgaaagtcttcctcacgggcaagatcctgcctgttggtggcatcaaggagaagaccattgcggccaagcgcgcaggggtgacgtgcatcgtcctgccagccgagaacaagaaggacttctacgacctggcagccttcatcaccgagggcctggaggtgcacttcgtggaacactaccgggagatcttcgacatcgccttcccggacgagcaggcagaggcgctggccgtggaacggtgacggccaccccgggactgcaggcggcggatgtcaggccctgtctgggccagaactgagcgctgtggggagcgcgcccggacctggcagtggagccaccgagcgagcagctcggtccagtgacccagatcccagggacctcagtcggcttaatcagagtgtggcatagaagctatttaatgattaaagtcatttgcagt

SEQ ID NO: 247976 - DNA, 937 bp, Homo Sapiens
  misc_feature (562)..(573): n is a, c, g, or t
gacattttaaaagccattttaatggaaattacatcctacatacaggtgttattccaagaagtttcattccattggctaggacagaacggacagctttgaaaagatgaagtctggccccagccacttcaggaggactatcttttatttgtagtgttttgtgtgccacagctgcaagatgacttaaagttagaaggtaactgacgatatgcctgggttgaaagtcctgagatgatttataaagcacctcgtcgaacctgagaagatgctgaagaattgaaacagactgtggctcttgtaaacaagcagtgttgaagtcattcaggtacccacatccaaaagtctcttccaaacttatcaaaagtttaaagttaaaaacatcaaaagattaaaaagtcatacaagggcacagagctgcaagtgatgaacatgaccttataatacacaattttggtctccttaatatccatacacagtggaggtaacagtatatttttcgacagggttattctgaggactaagataatacacataaatgtatttctaacataggtgctcaataaannnnnnnnnnnncctaaaagaaggtctactctagtcagatgtgaatagaagatattggaaaagcccagaaaacagggcctctggtcttagaatcacaggacctagcctaagtaagcacagtgcagcacaaggtttccctgcagcctcttctcacctgtggaggcgggcgtgtgtgtactgtaggaagactcctgtgtccccgcgactctggaaaacacgatcccagctgaacttgtagtcagataagagtaaacctttgaagtcctaaaacgacagaggaaatcttcactgctgggatttgctctagtaccaaacaaaagggcctcacaggtaggagtcttaacagacctgaataatgagtgctgcgagcccgacc

SEQ ID NO: 247977 - DNA, 496 bp, Homo Sapiens
catataagtagccatttgaaggtttaaaaactgaccattaatgtgaagacaggctcagcatctcccttcagctcttcatagcagctccctcctaagactcgtgccaaagtgaatgaagtaaggatggctggaaattcctaaggaactcactccaaaagcagttctgctcagagatctgccatctgctggctgcagaacagtagaagagctgggttctattgtacaaaaagtacaggtcctggacctcagtttggtctgtagtgtggctccacttatattccaggatatacagttagattgtaattttcgaagaactcactgttggtgtgtaagaatcttcatccaagaaaaaagcatgtgtgtaagtttgtgtgtgcctgtgtgttcctttgtacaagtgcttatacattgcatgggaagtagggctggaggaggatgtgtcactttctagggtggggagtattaacccctgcttttggcaagagcctgtttgcat

SEQ ID NO: 247978 - DNA, 969 bp, Homo Sapiens
ttggaaatgaggtttttgatatttccatcaaaatgaatataaaattcacttgatggattttgtagtgatgttttcacagttgaaacaaacatattgctgtgcggtggacagccacttcacagacatgcagacccatttctttagagatattaggtttaaaacccattttaattttattttgctgaaggtttggaatatataaagtaatggattcacaaaatatgatatcttaaaacatgttgaaagatttgaaagtggtgcatttttacttttaagagcagcaatctttgaaattagtcaacaatgcagtcttttttaaaagtcagttttctcaagtagtatgttgtaacgtaagatgtaactgatataactagattttgactggtaaacttaaagtgctttttatatttgaggttgactttaaaaagccattgagcagtcctcagaggttatggactctcaagcgactaatggaatagtgttctgttgtgaagtctagaactaaagcaccttgtattgtctgcttctaaagtgtcctatagtttttaacttaaagtgtaaagagtaacattttatcttatgtcaattaaagttacatttttcatttgttggtgtacatgtgctacctgttttatggggaatgtttaacacgatcctccaagttggttctatgcataaccattcaccaaatactgctgctgtgattccttgaaggaaatattctgtggtctgctatgatgcattgccatcttgctgcttgacaataggtttataaataattagaattacgtgttttaatagtacctttgtatatataacaagatgtaaaattaaagatgaggaatgtgtgtaaatgatcattcactgtttttgttttaaaactggtcagtactatgaagcttctgtgggtttgtatgatgttttaactttcactttaaactgcatagaataaattaaattgaaaacaac

SEQ ID NO: 247979 - DNA, 1553 bp, Homo Sapiens
  misc_feature (62)..(88): n is a, c, g, or t
  misc_feature (183)..(202): n is a, c, g, or t
  misc_feature (304)..(585): n is a, c, g, or t
  misc_feature (589)..(642): n is a, c, g, or t
ttggcaacttcctggaaaactcaatatggagtcatcagctgtctttgttatggaaactgaannnnnnnnnnnnnnnnnnnnnnnnnnnctgtttcacagctaaattaggagacacaaaagagctagaagccttcattgctgatcttgacaaaactttagcaagtaagtacatgtctgatattnnnnnnnnnnnnnnnnnnnnctaacagacacttctgataaagtgttgtaatgttaaccagcttgccctggggcagaaagtttcatcctaaggcttctataggtttagaaacaggaccctagnnnnnnnnnnnnnnnnnnnnnnnnnnnnnnnnnnnnnnnnnnnnnnnnnnnnnnnnnnnnnnnnnnnnnnnnnnnnnnnnnnnnnnnnnnnnnnnnnnnnnnnnnnnnnnnnnnnnnnnnnnnnnnnnnnnnnnnnnnnnnnnnnnnnnnnnnnnnnnnnnnnnnnnnnnnnnnnnnnnnnnnnnnnnnnnnnnnnnnnnnnnnnnnnnnnnnnnnnnnnnnnnnnnnnnnnnnnnnnnnnnnnnnnnnnnnnnnnnnnnnnnnnnnnnnnnnnnnnnnnnntagnnnnnnnnnnnnnnnnnnnnnnnnnnnnnnnnnnnnnnnnnnnnnnnnnnnnnnacaggactctagtggctaggaatgaaattctgggataagcttgtgttaaagtagaccatgtgcgtttccaaacagtgagaacaggtcactagcaaacaatggcattttgtttgagaaatggagagcgagcaagactggagcattaccatcatgatggcctgtcaggcttttcagagaagaaatgaactgattaaccacaaatgcattattccaacaagccaaaagtcttccatcccatgggccagggtaattttcccaggttagatccagggtttgggtgaaatttaactttaagatgtgggtgccaaaagagagaattggcttgtggggcctttcaccagagacccatgccagtgactgaatgacctggattaggtatgcatacttgcaagcctcttatttgggaattacactaatggttacctgttttgtgtgaccaaaaatgttgagaactgaagacatcaaattataactgcagtataggggcccagaagaagggaccctcacaatctatctacacactctatttccaaaggataagattgcaagagccaggaggaccaactccagcttctgggatggaaggttcagcaactctactacggggggtcctgtttagtcacagagtgggctaggaaaattttgtcccagccccttaattttccagggtaagggttgattttctgtgagaagtatttaatgctattctttgctaaagagccgggtaaactctgaaaaattaaatccaaagctggttatttaaaaataactatgttcttaacactcttgcagacaaacctaaatatcagatagaaaagtcctttgtatcatttctatttgaaaattgaagattttattgcctcttttcttatgtactgcaccatcttacatcagaggacagggcttgtttt

SEQ ID NO: 247980 - DNA, 1072 bp, Homo Sapiens
ttggcttattcattcctgtcagtgaggggccgtaccgcccccagtgctaggaaaaggcggtccctgtacatatcgatgattatgagggggtcaaatggatctattatagtatgcccaaaatcaactgacaccagcaaagtaatgtgaaaatttttaatggtattttaatatatcgggaggagcagggacatttttgagacagttgtctcctattttctctatcacagggagtaattttaaaagaaaaatggagggtaagtttctttctgagaaaattgtagtttaaaacaggtcatgggataattagaaataatttaatttctttctttgattttaatctttcaactgcttgcaattactatcctaaggcaataaaatgaataaggagatttggaaaaccattgtctgtaatctctgaagaatagtggacattaggggagtcagttgaaaagctcagctatcaccattttctaaagaggaaaaaggtgaacctcacaaactatataccaaaaaattaggacatcgagagaactaatatgaagctagcatatgttcagaaagaatgattcaaatcaaacaacatgcatttcttatttataaagcatgacttgttcattgtctgttcatgttagcttaatcattaagcattattgccatcactgcaatgcttatgtcagcaatatataattgaagaccatgcttccatcattctgtctaatatcttcaagtaatgcttaagtttgcaaatgctcttttaacacattctccatatgcagcctgcccagcactgcacacaatagacctgttacttccccctcacgagcactcctaatatttcatgtgctcatccaattgacttctcccactggtgcctcatattgaatttgtagaatcacacctgctcctttttcaaaactcttctgagttttctcttaaataattcactgaccccaaagttgtcagatatttgaagactactcgcacaattttaatattataaatgtataatgtaaatgtaattaagatttgtataatgtacgatgtactttggtaaataaaagtatgctgtgaa

SEQ ID NO: 247981 - DNA, 157 bp, Homo Sapiens; identical to SEQ ID NO: 177224

SEQ ID NO: 247982 - DNA, 300 bp, Homo Sapiens
accttaaaagggccaactttgtacaaaaaagttggctcctgttcctcggcctccgcggcctccacgccctcgggcgccccgacatgctgcgcctccgcggcggccgcggctgcggccgctctgctgtacggcaccgggggcgccgaggacctgctggcgccgggggccccgtgcgcggcctgctcgtcgtcctcgtgcgccaacaacgccttctccttcggtccggagctcagcagcctcatcacgccggtcgccatccagactcacaattttgccgccgtgggcgccgccgcctactat

SEQ ID NO: 247983 - DNA, 326 bp, Homo Sapiens
tatataaggaaaagaggtttatttggctcacacaattctgcaggctgtacgagaagcatggcgccacagtctgcttctgttgagggcctcaggaagcctccatcgtggtggaaggcaaaggggaacccgtgtgtcacatgatcagggaggaagagagcaagagaggggaggaaggtatcagattctttttaacaataagatctcacaggaagtaggagtgagaacttaatcccatgaagacagcaccaagccattcatgagggatctgcccccgtaacgaagacacctcccagtgcgccccacctccaacattggggatcaaatgt

SEQ ID NO: 247984 - DNA, 1008 bp, Homo Sapiens
actgttaaaatgttttaatatcaatgtaaaatgagatgagagttttacaagcagatttcagaacaccaacactgatttccaatatgatttctctccctttcagaagcctaaagatgaacatatacaaatcttaggggtttttacaaaaagcatgttttttttctattttcatacatatacagttgacaaacatgcaaaataactaatttccaaatcaaaggtctctagcagaaacatccaaattaaaaatgaagcatttaaatttacttactggccatgaaatccagcaagaaaccaccctttcccccacacttcagaaaaaccaccaattccttcttagaggattgatggcattaacagtacttggctctcccttgtcagcatccagacatccccggttcaatcttgtaaattaatgttacagttccaattactaaataatgccccaccatcttcttcactgcattacagcttagcaaggcacctaccaacaatgcagtttgggaaatgagccatgaaaaacataatggcctgagagttaaccatacatcctaggtctgccaattgaatgaggacattaatgggaatgtaaaattccaggagacattcttttattctcctctccaagttactagcatgtccagtatcagaaagaaaacagtagaggaatgtggcaatagccacatatgtgaaaccttagtagagctaaaaccaaactaaacaaaatgcaaactacagtgggacaaagaactgactctcatttgagttttatttgtggcttcaagcaacctccaaactaagaggctcataaattaggaaataattttaatgcactgagggttcagtaatttgcattagaatattattaaaatttatgttttgtaagagttgcatatacttcattgttgaattcggtgccaacagtaaacaaataactaaatgagatataacctcaaatatacccacttccaaaactaaaaagcattttaacacatttttctctgccaa

SEQ ID NO: 247985 - DNA, 458 bp, Homo Sapiens
taacacttttataaactgcatttattgtacagagtactctgaagaaagaaaaaaatatgtacagccattcattttcattaacacatatattctgtcctgcaatactggagaggtggaatgtgtttggcacagaaataacccctaggagttataaattagaaaaacaacacttttaaaaaagatttttacttttctggtagaaatataaaaactgtggttcatggggaaaaacattaaaattaaaaagtccaatcaattatagaggtggctttaacacttaaagttttttccctcaaaccaacttgtcaacagcagtgtttaaaatttacatataaataaatgggcagcgctgcccagataagcagcacggtatgagcaactcacagtcacgctgcgcggtgttctcggtgcacaaataatgccccttccgggattccccgggggggactttaagaagg

SEQ ID NO: 247986 - DNA, 1344 bp, Homo Sapiens
  misc_feature (174)..(353): n is a, c, g, or t
ttggctggtttcttcagtaaattgaaagaaagaaaaaataaagaccctatgcttaagtgatcctttgagcaaatactttgtgtggacttctagattctgatcagactagtctttaggacaataaggaattatagttaatttcttgaagtctgacaatggtatcatatttatgtnnnnnnnnnnnnnnnnnnnnnnnnnnnnnnnnnnnnnnnnnnnnnnnnnnnnnnnnnnnnnnnnnnnnnnnnnnnnnnnnnnnnnnnnnnnnnnnnnnnnnnnnnnnnnnnnnnnnnnnnnnnnnnnnnnnnnnnnnnnnnnnnnnnnnnnnnnnnnnnnnnnnnnnnnnnnnnnnnnnngaaggaaacctgaatagaactaaactattcttactcttcttcatcagtgatattttgtagaattggcagaataagctctatttcagtatctccacaaaattatgttaatttggcaatccacatgtggactgccttcgatgtagtaaaagttgatatagaataaactgcattaatttttagccagtttaaaacgtgtgtgaatatcaaactggaatcagacatctgtggcactgtattatgtctctgtcaccctcaggttctatgaaaccttggaaagcacaactcaggtttgtatactcctgtaggccatacactacatcacactgttctttaggcctcttgcacaaaatagatggtcagaaaatgtctacattgtaataaatgcagtgttaaaatgtgatactgattttctgctttatcccttagggcaccagtgtcttgtcacctggactccacataggactaattattatactggcaataatgatctataaaaagtcagcaactgatgtgtttgaaaagcatccttgtctttatatcctaatgtttggatgtgtctttgcctaaagtctcacaaacaattagtggtagctcacatgaccaaaagtgaactatatcttcaagacactgtctttttggggccaggtcttttgtttttagaccagtactttaataactttatagacgaatatgttgttctatggatggcaatggtgatttcttcatttgatatggtgatatactttagtgctttgtgcctgcaaatttcaagacaccttcatctaaatatattcaagactgcatgtcatcaagcacctgaacaggttcaagttctttcttcaaagagtcatcagaataacatggattgaagagacttccgaacacttgctatctcttgctgctgctgtttcatggaaggagatattaaacatttgtttaatttttatttaagtgttatacctatttcagcaaataaaatatttcattgctt

SEQ ID NO: 247987 - DNA, 462 bp, Homo Sapiens
  misc_feature (19)..(19): n is a, c, g, or t
aagcaggctgcaggtcaanaaaagagagctcacaagaagatggacttgaaaaaaactttgctgcccaatactctgggtgtgtacattctcacgacgggcctgatccctgtgctggagaaagaacacgacccccgagtgataaccgtctcctcaggaggaatgttggttcagaaactgaacaccaatgatctccagtccgaaagaacaccatttgatggaactatggtctatgcacaaaacaagaggcagcaagtggttctgacggagcggtggcgccaagggcacccggccatccatttttcttccatgcatcctggctgggccgacaccccaggtgtgaggcaggcgatgccggggttccacgccaggttcggggaccgcctgcgctccgaggcccagggcgcggacaccatgctgtggctggccctctcctctgccgcagccgcacagcccagcggacgc

SEQ ID NO: 247988 - DNA, 606 bp, Homo Sapiens
cctgtgtcaaagattttaaaatcatggaaagttaaaatctagaaagaccttagagaaccagccaaccaactctctcattttaaaagtgaaggattcatagcacagattacttgcctaagatcatccaggaacgaagacaagaatccaaatgtacttggggacaagaattagtccccaaattcagtgttcttcctagtattaaacattgcccctttcgacaaattttggatttcattcttgttatatttcagtactcttgctgatttattttaggtttaactggtaaagaatgaacatttcagaagtgttaggattagtcagtgtcatcgcttatgtatatgaatcacttgccaaagacactggctctcctcagctgtaaccagcatgtcaaatgtgaagattattgtgtgggatcctttggtttcattgttatgatgtattttataaatgtactagttatatccttgtttatgtatttttgctgatctttcataaagcagaatggtacgtatcggattgttttaatgttatatattggattgtattcgttgttacaaaaccaatattctatggagaatgaaaaaaataaaggactaaattaactgg

SEQ ID NO: 247989 - DNA, 247 bp, Homo Sapiens
gcatttcaaaacgggttttaaaatactcatcagggtgccacacaaaggagctggggtgagaacttcgtacatgtgagtttggggctggggtgccctgagagagaaaaaggggacccatctgtcagggcagctggggtgccccacccccaccctgggactagggagcagagtagaaaccctctctggagggtcccagggctaactgggagccagccctcccttcgaggtagaccatcggggagggaac

SEQ ID NO: 247990 - DNA, 416 bp, Homo Sapiens
gcctctactccagtaaacctgattgggtttgttcactctctgaatgattattagccagacttcaaaattattttatagcccaaattataacatcctattgtattatttagaccttttaacatatagagcctatttcctacctgatttttgccccttgttctgtcctttttttcaaaaaagaaaatgtgttttttgtttggtaccatagtgtgaaatgctgggaacaatgactataagacatgctatggcacatatatttatagtctgtttatgtagaaacaaatgtaatatattaaagccttatatataatgaactttgtactattcacattttgtatcagtattatgtagcataacaaaggtcataatgtttcagcaattgatgtcattttattaaagaacattgaaaaacttga

SEQ ID NO: 247991 - DNA, 794 bp, Homo Sapiens
  misc_feature (273)..(286): n is a, c, g, or t
cattgtggtaaacattttaatatgcaaagaaggtcactatatacagaaaaaggcaaaactttttcattttttgaagcaatctaaaacactgcagcttgaaggctgtgggaacgaatttatatctttctctttgattccatggtgcttcatgacgtgctctttcagcgagtgcaatttatcatttaataaatgatcactattcaatgaaggggagttctgaagaaatgacactgtgaacttggagttcatcaagtttatcccacattctacgtnnnnnnnnnnnnnncattttagtgtggccaagtttcaaaaaacccaattctcaaggcctaaatgaaacccatttgaagggccattaaatcttatgtaaattttcaatttaaaacttactctattttgagcacttagcaatttgcagccctcaagaaatagagtatgttacataattcacagactgcatatgtagccgatatcatcatactctgaaaaagtggcatgaaccagcctgcatcaccccttgcacagttatttaaacatgtcccattaggaagaatagtagaggctagaaattcctgtcatcaggggctcagatacttctaacagtttaagtcctgtgtggaaatcaaaatcagctttttctaaggcttctttatatgtcaactttctttttgtctgagggcatattatatttctgacatatgacttttgatctttgagttttgtggcaatgaggacatctataatacctacttggagagcctcttctattgataaccgagagtgaacctgtggct

SEQ ID NO: 247992 - DNA, 587 bp, Homo Sapiens
acttaaacattttattcattcacttaaccatatttaccatgtcacatagcagatgcacctccaaaatgtttatggtagcaaagaaagctatggcatacattccttaatgattggtctaacctcccagctgttccatcaatgttacaaattttaaatctcaactttattcatgaggcactagaagatctttgaattgctgcctttgcattagcattacaatcctaattgtcctgacaaaaaggtaccatagaaggctgatagaatagagaacgtctactgtacatgtaagggaaaatacacagaatgaaggaaaatccttcccctcctccaacacataatattcataatgttagctttcaagtgcgaagacttaactagaaatgggacattgtggtaaacattttaatatgcaaagaaggtcactatatacagaaaaaggcaaaactttttcattttttgaagcaatctaaaacactgcagcttgaaggctgtgggaacgaatttatatctttctctttgattccatggtgcttcatgacgtggtctttcagcgccaacttttttgtacaaagttggcctttttaagg

SEQ ID NO: 247993 - DNA, 900 bp, Homo Sapiens
  misc_feature (137)..(556): n is a, c, g, or t
ttggctcacagccttgtggtcagaacaagtcacatcatccctcctacttgcaggggtgctgggcagcgtagtcatccacagatcaggagagggagcagaggcaggtgttcccgggctgcagcgatctccactgcacnnnnnnnnnnnnnnnnnnnnnnnnnnnnnnnnnnnnnnnnnnnnnnnnnnnnnnnnnnnnnnnnnnnnnnnnnnnnnnnnnnnnnnnnnnnnnnnnnnnnnnnnnnnnnnnnnnnnnnnnnnnnnnnnnnnnnnnnnnnnnnnnnnnnnnnnnnnnnnnnnnnnnnnnnnnnnnnnnnnnnnnnnnnnnnnnnnnnnnnnnnnnnnnnnnnnnnnnnnnnnnnnnnnnnnnnnnnnnnnnnnnnnnnnnnnnnnnnnnnnnnnnnnnnnnnnnnnnnnnnnnnnnnnnnnnnnnnnnnnnnnnnnnnnnnnnnnnnnnnnnnnnnnnnnnnnnnnnnnnnnnnnnnnnnnnnnnnnnnnnnnnnnnnnnnnnnnnnnnnnnnnnnnnnnnnnnnnnnnnnnnnnnnnnnnnnnnnnnnnnttctcacccagttcaggcccttttaattgattgctgggcctttgcagttgtttttgcttctaatatattcatctctcaatttatttctggaggctgccacccgaggggcagaacttcaattgtgtccctaatgggaaaccttgctgggatcatgtggtctacagcacaaggttgctaaagcatcttctgccagaattctgtgagtatctggttaggtgggtctggaatatactgagtttaaaaaagttaaatatgtttctttactgcaagatgtttcagagactttaatatgctactctgctgtatgattctccaggcaggaaatcttataaaatgtgtttctg

SEQ ID NO: 247994 - DNA, 1015 bp, Homo Sapiens
ttggggtgtttttgcgctggttcaatgaatagatgatgcagaggccccattggagacacgtgaatggcgtgtgcggccatcagttcccggctggggggcaggtgttgcttcggcccccgccctccggccggcgtgtgcgagtgcgcccctggctgtgagtgttgaccgttcctctcccctgtacatagcccgagccagtcctgagtgggtgactcctgagtgggtgacgcgcagacgggatttctcaggtcatttgtatggtcgacatgatggctgctgctttggctgccaccacccccgggcccagcctgtctgaaagttcagggtttaggccgaaaaacccggtggggaggggtggggagccggagctctgtggcggggctggagggctggggtgcactttagtttggggcgggacgggagccgccgttgtgactggcgtggtctggctgctgctcccgaacggaggggtcggggttggcttgctgggccctcagagcccagtgggtggctctgactcggctccctactccctgcacccagctgggcgcatcctttggggcctgcggtctgaatgtatccctcccctcagttttaacctgagctgccgaactcacagtgggccgggggcgaggctgggggaagcggggcccaattacggatcccgggagttacaggtgccgacgtgatgtcgcttctctggtgcccagctcccttcctggtctgagactagctctgggggtggctgggggcccccacacgctgctcccggtccacctgcccgtgctgctgctctgtgcctgctgtcagagccctggtgggggaggatgtggccaccctgagacccggaggagacgggcgtctgcctgggtttgcggagagccgcttatgggtgtggtccggtccagacaccttgtttcaagggggatgggcgtaacggcaagcagagatcccaacgttgagcaagaacttttcttgtattaaagcatcacgtctcattcacattggcatacag

SEQ ID NO: 247995 - DNA, 1629 bp, Homo Sapiens
ttggtgaaaggacactttttactaagccagaactccgtggtctgttgtcattgtctcaagtcaatatgacagagaggtttaactggcaaggcacctcttcttaactggtagtggcctgaatccagctcattagaagctttcccctgagagcagcggcagcatctggattgggccgcggctggggtggggcaagtggagtaggcatttgggcgatgtctgtgtgaatcctggcataaacaagccacttgcctgtggagtgtttctgtttaaaggtcagtctcctagtgatcagctcttgcttttctcccaagcaggagctataccaccagtcctatgactgcgtctgcgtcatgtttgcctccattccggatttcaaagaattttatacagaatccgacgtgaacaaggagggcttggaatgccttcggctcctgaacgagatcatcgctgactttgatgatcttctttccaagccaaaattcagtggagttgaaaagattaagaccattggcagcacatacatggcagcaacaggtctgagcgctgtgcccagccaggagcactcccaggagcccgagcggcagtacatgcacattggcaccatggtggagtttgcttttgccctggtagggaagctggatgccatcaacaagcactccttcaacgacttcaaattgcgagtgggtattaaaccatggacctgtgatagctggtgtgattggagctcagaagccacaatatgatatctggggcaacactgtcattgtgggccagtatgatggacagcaccggagtccctggacaaaatacaggttaccgaggagacgagcctcgtcctgcagaccctcggatacacgtgcacctgtcgaggaataatcaacgtgaaaggaaagggggacctgaagacgtactttgtaaacacagaaatgtcaaggtccctttcccagagcaacgtggcatcctgaagagtcaccttcattttggcaagaagactgtattttcaggaaggtatcacacactttctgactgcaacttctgtcccttgtttttgatgtgcgtgctgtctgtcctatggagcctctgcagactcgttctcgtgacccagtggcataccgtttggtgtctgatgtgtgcccagatcgttctgccacttgcactgtgcttgctcctaagcaaaagggaaaaggagcgcgcgtgatagaagaaaagcactgggagaactaacagaggagaaaggtgaaacacacacacattcttaaggcaataaaaactagggggtgtatattatcttctggtgcatgttcttttctggaaaatggggctggacatgtgtgaagccataaagaaagtgagggatgctactggagttgatatcaacatgcgcgtgggcgtgcattctgggaatgtcctgtgtggcgtgattggtctgcagtggtgtccaagggcccccgttgggacccacggctctcgtccctctgctccgtgtgtctcatgccagcagcacgtcgccatccgtcaccagaattagtcctcacagcctaggaccagttttgtatcaaactcgtctgatgttttgatgccatttgtcttttgtaaagttaattcattaaaagttttatgtactttgaa

SEQ ID NO: 247996 - DNA, 1445 bp, Homo Sapiens
  misc_feature (61)..(61): n is a, c, g, or t
  misc_feature (104)..(104): n is a, c, g, or t
  misc_feature (121)..(121): n is a, c, g, or t
  misc_feature (204)..(205): n is a, c, g, or t
  misc_feature (254)..(254): n is a, c, g, or t
  misc_feature (282)..(282): n is a, c, g, or t
  misc_feature (295)..(295): n is a, c, g, or t
gtaaatccatttcaacatttttggggggcccagggcccccctgcttaggcaatagcactcncaagggcccccacagcaacagggggaaaccagaggtctcccanccagcccactgggctgncctgggcagaaaacccagggcccccctaggccaccagcgggcagctccaagggggccccatggctgacacagggcactgctcnnttccttgaggctgtcagacaccaggggcgggcgaggagagcccccagcnctgggcgtcctgccctctgtccccactntgggaaatgcccntaagcttagcctttaagaggtgatcacataggcactgtccctgggtggtgtcctgaatgcacctcccctaccccacaccgttgtcactgtggagggacctcctccatgcccttggcttctgtgaggggtaggggtacccacatagttccgggactcacaggctggcattcacaccccagccccgacacacttgcctggttgcctgcggcagacaacccactctgccgctcctctccgcagcgctgcctggcctcagcgagtgcagcccatgtcaggggctctggctgggtgggggatgccccgcctcttggacatgagtggacgaaggcctgggctgagctcagtgctgtgacatcagccaggaggccagagagcagggtcacctccctggttcctgggctggcctggtctcctagcgctggggagagcagggcagggattctgggtcagctcaccccagcttctggccaaggctggagcctcggcccggggactggagaagcacgagatggtctcaggccccgtggggcagccagggccgtgggggcccaggggtcagacgcagcgtggtctcagggtcaatgccctcctccctcctccacccccttcctgcttaggcccacctgggagggggtcagactcccccacttgcaccctttggcttcaacacccaggggagcctgtggcagtggatacttcatattggcaacaaacagcagctgggatgggccacagggctggacaggaatggctgaggcccagccccagcactgctcctccatcacagccgcccttcctgctgtcccactctggccacccaggaggcccccaagccccaccccaccgtctgtgtctggcaggcatcgctgaccatataaggtgcctctggcctccctgcccagcccttcagtgctcccagctccctggtgccctgggaggcggccccctagcctggggtcttggtggcgaaggtcaggtagccggtgtggcccacggcctccttcatgggcgtgccgctgcggaaggggctggtgtcggagccggcagggccatctgtgcctgtgcccaggtcgggcggtggcaggctgacagtgcgcacgttgtagacctgtggcagcacctccagggtgctcagctgtgagaagcccaa

SEQ ID NO: 247997 - DNA, 839 bp, Homo Sapiens
  misc_feature (104)..(104): n is a, c, g, or t
cacattgtcagatcatttatttcagcgcagttacacccagcagaggggcacaggcttaaacgccggcatattagttttcccgcacgcgagccctgcatggcggntgggctggggagccggggcgttgcgattctgccacacgccacgctctactaggcccccttactcctaattaattgcctgctcaccagactgtgagaaaataattgccactataaattttccctcctctgcataaaatattcgggggaaccagcacttaaaaaacagacttcatgaaagaagggcagcaaggcgtggatgctgcgccccccacaacccccactgcagaggacacagagaggccaggagccccttcctggttccccctggttccaaatgagacagaaaggctcaaagagctcccaggaatggtcacagctgaaaaaaagtcgagtgagtggctacatgcggcagccgcttgtgttcacctgccgtccacccaggacagtccccggcagcagcttgtgttcacctgccctccacccaggacagtccccgggctggctccaggctgcagggggtcagcagagggagcctcctgccccatatccttggcaaactcacttctccttctgggaccacacaagagacatgggagaatgttcctaattaggcaagagcacagaacccctaatcccagtctctgcttggcatgagtacccaggcaggcaaggaagatggagacaggtggatttcagctcctggaaggagccccggctcagagtggctgctgagtacccagccttgccctcctctgacgtgggaacgggtgggctgtgctgccacctggggcctct

SEQ ID NO: 247998 - DNA, 349 bp, Homo Sapiens
  misc_feature (334)..(334): n is a, c, g, or t
aagagacaaagaaactttatttatacaaaactccaccccttctgttccactctcctcagcaaacacagataacaggtgatgaaactaaaacacacagacgagcattactcaacccaaggttcccgccttccctagcacctgaggtctgggccaacatgcagggtaactggtgccttatgcctgctgtctggattgcccggcccacagggtgggctgagcatatttattctgggggttccatgcatacgaggggcccccagccatacagctggggcatggggtgtttgggcagcaaattgtccctgctttaggtcacaggcaattttttcatggncccctggttggctcc

SEQ ID NO: 247999 - DNA, 415 bp, Homo Sapiens
aatcttgaagatttttaaagaataaatatttttttgtaattaaacattatgcaaacacgtgccacgcttgctttgtccatgcatatgcgctatatacaattttgaaaaatactgtgttgtcctcttgttttaaaagtcatatacaaagtttttatgtttttcgtttgttgaatcctcttgctgcctacccctttccccatcccaagattttctttacaaggaactaagcatcattcactcatgaccttggggtatgagagaaagagagtcagtctgtgtgtgggtgtatctgtatgtgtagaggaggaaggggaagaggtcctttaccaaagtacaacaaaatggctggtttgaacatgaaaagcagtgtcaaggagctgtttgaaattttaactgtactacactcaggaaaagg

SEQ ID NO: 248000 - DNA, 486 bp, Homo Sapiens
  misc_feature (18)..(18): n is a, c, g, or t
ccctttcctctgttgacntgcctgccaacctcttaaagctccgggaaacaagcaaaaccctgctggcggatgagaaaaccgtgtctcagaggaagaggccgtgggactgacgcctggagtcaggctgtactcaggggcccatcttctggctgctggtcaagagccccgagctggccgcccagcccagcacatacctggccgtggcggaggaactggcggatgtttccggaaagtacttcgatggactcaaacagaaggccccggcccccgaggctgaggatgaggaggtggcccggaggctttgggctgaaagtgcccgcctggtgggcttagagggtccctctgtgagggagcagcccctccccagataacctctggagcagatttgaaagccaggatggcgcctccagaccgaggacagctgtccgccatgcccgcagcttcctggcactacctgagccgggagacccaggactggcggccgca

SEQ ID NO: 248001 - DNA, 891 bp, Homo Sapiens
  misc_feature (410)..(419): n is a, c, g, or t
tcccagggtttttcccagagagaaaaggccgtggtttccccttgcaaaggtttttttctttctgccctgaatgaaaacgggatcccagagagaaggggtggtttcccctttaagtttttttcccggccctgggggttcccggagaaagcggaattaataggcccttttatcccccgtgccaccctcctggcagggggatgggcactttgagcccttctggagccctccccttgctgagccttactctcttcagactttctgaatgtacagtgccgttggttgggatttggggactggaagggaccaaggacactgaccccaagctgtcctgcctagcgtccagcgtcttctaggagggtggggtctgcctgtcctggtgtggttggtttggccctgtttgctgtgactannnnnnnnnntccccgaaccgagggacggctgcctttgtctctgcctcagatgccacctgccccgcccatgctccccatcagcagcatccagactttcaggaagggcagggccagccagtccagaaccgcatccctcagcagggactgataagccatctctcggagggccccctaatacccagtggagtctggttcacaccctggggggtgtgtcactgtgatgggacacgtaggagtccacccttaaaaccagcaccctgtccctcgaggctgccgagtgggtgtgtggactcgggggccttcccacaaaactagcctccggctctgggctcgagacagccgcaggccccagccactgaatgatactggcagcggctggggttttatgaactcctttctggtattttttcccctctatgtacaaatgtatatgttacgtctcaatttttgtgcttaagtaaaaataaaaacattttcagcc

SEQ ID NO: 248002 - DNA, 1193 bp, Homo Sapiens
  misc_feature (696)..(756): n is a, c, g, or t
ccaaaacaattttcagggtctttattttttatattgtatacctaagttgatttcatcaacatacaagccaaacaaagatcccatttcaattagatataccactcaagagaatctctaaagatcttcacatttttccatcttctaaaacaagggttgacgaagttttttgtgacaaaaaccagacagtaaataattgggctttgtaggctttgccatctgtattgcaactactcatttccggagcagccacagataatatataaacagatgagtataggtagttccaataaagctttatttgtgaattctgataattttcacgtcatgaattattagtctttgatttcttttcccaaccatttaaaaatgcggaaaccattcttagcttacagggtatataaaaacaggcagcaggctggatttggcccacatgctgtagattgccaacccatgctacaaaatataccttaaaagcctgtcacctcaaaatttcaaatcactgcttcccaaagacttaaagtgattattcaaatcttcctcagtaacttcttttagatcagctggtttccattttggactctggtctttatcaattaaaactgtcaagagaagatacaaatgttaataccattatttttgtctaatattgctagattttacttactgaattgacagaaattcttatactaggcacannnnnnnnnnnnnnnnnnnnnnnnnnnnnnnnnnnnnnnnnnnnnnnnnnnnnnnnnnnnnaaatctccagggatggacagcaatatacttttgatgactggggtggatattttctaacttcctaagcctcatgtcttagctttaataaagcctactgaattaatccagtggtttaaacattagaattctttttttcttcttgaaataaaattgccagtgaaacctccacattacaaaacaggtaaaaccagtggtttaaagtaaaggcaggggagggcagagggaccagatgtgccttctaacctcctccacattgaattttgggaggaaattaattgcttaaggtagagaaaaggggacttcatgcataattaaatgtggatactgttgttctgctgaatcctccagttcagacagctctggatttaaaaaaatcaggttatcatgaaaccgtctagttctcctatttcagtgtagtcatcactcatcatagccaa

SEQ ID NO: 248003 - DNA, 377 bp, Homo Sapiens
ttctcacagagggtcatcattatttccaaatattgtttgtctgatgacttcctcttcccagtgcaatttttcccttcctatttcaacctctggttcctgggatgagccataccctggaactggcccacccactgtgtcttccacgtaagggagacctttgcaaagggcatccaaatgggtaggcaggtgacagccgccgtatttattttgcataatattttaatttgtatatttttgtgatttattttggcgttatgagtttgactctcggggagttttgttgttatgactcttgtgtcttttgtcacaaaacaatgatatttgctaaacgatatatggaatttatttttgattggtaataaataatcaaatatgta

SEQ ID NO: 248004 - DNA, 703 bp, Homo Sapiens
  misc_feature (131)..(131): n is a, c, g, or t
gattaaagagacatatcatgcaatttcaaagaattctttcatgctatttcttaaccctgacatttctaactttattgcaggcaatatacaaagattggctcactactccataggttaattgaattcctggntgagaaactaacttgttttgttttccaaaattagctgaaatcttgtaaaacatgacttccctttaaaggatctagatattgttcaatttaaaatatggcacccataaaaaagtcatgtagtaatagagcatatgcttttttagaaccagggttaaaagctgtttgttatctaatagagtaaaagttactgaggtcaacagatagacaggtctggccataatatatgccccgtcataatagtcttattatattcttttgaccacagaccgcattcctccgggcacttaattcggatgaggagttttggctatcaagatgtgttgattctaaatattattgaatgagacctgattaaagtctgactttcctggccccagtgttttgcaggttggctatttccattatcagcccatcactccataaagttcttagctgcaccaagtgattggtgaacaaggacaacaacaaaagcagcatacattgtatggatttatctcaacgctattgtttaatggctgtgtttaatgtgatctatctggaaaatgaggactccgaataaaaagctattacta

SEQ ID NO: 248005 - DNA, 1583 bp, Homo Sapiens
aacgtcaaggaaacaaaatgtttatttaaaaaaatgagatcaatatcattttaatgtagaagatgccatctttatttacaggctaataaaaaaatattaaactcaactagatataatacattatcataaatgcaatagatttgaggccaaccataagtgtaagactggatagatggaatagggattacataatcaggatgtcaaatactgtgcatcttacacatgaatcacatgaaacctttttgtttctaaacatgaaaacagcataagtccactgcagtggggaaaaaaacagcaccacagacaagctgtgctaactttcgatagctgttgacttgtaattatcaagactcacaaaattttcgtctttctcaaatttattttaacaatagtctcaccaccaaaatgttgcttttccatcatattcataacagagatactgtagaagagaattttagaggttaagtgtaaatatatacacgcacacatacaaccctcacattttattaaaacgttttctcaaccattctgtttgtgtatacatgtgtgtatttctccttctgtccccttctcgatgaaatggctttgcaacagttccctccttacttgtttggttttgtcctagaagtttcagggacatatgaatttctttcctataaatgtgaaaatattaaaattggttctcagtcctttggaactaataactaattctttagttcatccccaaaaaccatacattctaaaatgaacttttaactagttactttctaacaccggacaggaagctcacagtagcatctgagcaacggtgctctcccgtaggcttataaaccacagtgaagcaggaatgaaaaggaaactgacctgtggagttttaaactacctggaaacttttcattctatttatcagtccttaaaaggaatttatatcatgacaatctcacacaattcttcaaattacacagtgacctcataaaaattccaacttgaagttttaaaaaaccacctcttcatacacttattcggtagttcttgaaaatcaaagggttatagcttacatttcctaaggattcagtcatagcagataaaggatgttctctgaaaaaaatgccatggccattccatcccaggctgtgttttaagaagataagaataacatggtttcatgtcacagcaaaaaggttttcgggtctgctacaatggacaatttttttgactaaataaatacggtggctaaaatccagtttgcagatctcatgtcatgcatggaaggtatgtgtttggcataggggattcataaagaaaaaacaagttggtttttttcttttaagaggcctaccctgtcaagagcaaacaataacatgtaacttgcttattcatttgtacaattaaatactagcttttgctcagagacaatgctataaagtattttaatgtcagtaacaatatacactacgaagtgcacttccattacaaattaacatggtgatatacagatgaacaccaccacccaaaacaaaccataaatgagcaacagttaaaacattaaatttataaatagcaaaaccacaaaataaagccaa

SEQ ID NO: 248006 - DNA, 451 bp, Homo Sapiens
  misc_feature (19)..(19): n is a, c, g, or t
  misc_feature (63)..(63): n is a, c, g, or t
  misc_feature (70)..(70): n is a, c, g, or t
  misc_feature (82)..(82): n is a, c, g, or t
  misc_feature (99)..(99): n is a, c, g, or t
  misc_feature (132)..(132): n is a, c, g, or t
cccaaaatggctcccaaanttcccctggggggcgtttgccaaaaaccttcctcttccccaaanaaatttnccggggcccttnaaaatttacgttctttnaaaaactacggggactggggtcgtctttgcccnacgtcccgaaacaacttgttccctgaaccccctcagggatggcccccaaactgtccccttcctctggcaccccctttcattggttccatccatcccccacaacagcctgcccaatcgaagcccgtccctgcatcccaggatggtactcagtcccgcccctcgccccccacctccacaggtgccttaaagggccctcgttcacccaaggtgggggcaggggccctcactctccggccctggtgtgggggagagagtgaggggttgggggatcggcagttgggaggggtgctctgagattaaagagttttacctctgagat

SEQ ID NO: 248007 - DNA, 1102 bp, Homo Sapiens
  misc_feature (959)..(959): n is a, c, g, or t
  misc_feature (964)..(964): n is a, c, g, or t
  misc_feature (1000)..(1000): n is a, c, g, or t
  misc_feature (1008)..(1008): n is a, c, g, or t
  misc_feature (1017)..(1017): n is a, c, g, or t
  misc_feature (1021)..(1021): n is a, c, g, or t
  misc_feature (1081)..(1081): n is a, c, g, or t
cttccccccttctgtgagtcagaccccgagagtacagatgatggcagcctgagcgaggagacccccgccgggccccccactgctcagtggccccagcctcagccgctacccacacgagcagtacgccaagtccctgcctgtgtctgtgcccgtctggggcttcaaggagaagaggacagaggcgcggtcatcagatgaggagaatgggccgccctcttcgcccgacctggaccgcatcgcggcgagcatgcgcgcgctggtgctgcgagaggccgaggacacccaggtcttcggggacctgccacggccgcggcttaacaccagcgacttccagaagctgaagcggaaatattgaagtccagggagggagcgccccgggccgcgtccgccccgtcccacactacgcccccgccccactcccggggcctgctaatctgaggccgatccgggaccggcctccttgcgtctcccattcccaagattgtcccgcctctgccaatccccgccgtccttccagcccacgacctgccgcgccgaggagcggcatctgtcccgtttcccgattgggtctgtcgtctctctccgcctagcgacagattccttctattaagggattggctcgctgagttctaagctctaaatgggtcaactcctttgttttccgcctagcgacaagggatttgctcgcacggcattggctccatcccctagtcgctggacagctctttttttgattggctcaaatcctgtaaagggcttgaccagtctctacatagtcaccgtccgcttttcctgagttctccctcccaattggctccagcttcctggggggcgtggccaagccctcctcttcccagaattggcccggggccttcaatttacgttctttacactacgggggactgggggtcgtcttttgccacgttcccgacaacttgttcccctgaccccctcagggnatggnccccaaactgtcccctggcctctgggcacccccttntcattggntcccatccnatcnccaccaacaagcctgcccaatccgaagcccgtcccctgcaatccaggaatgggtaccagntttccggcccctcggccccct

SEQ ID NO: 248008 - DNA, 499 bp, Homo Sapiens
  misc_feature (138)..(159): n is a, c, g, or t
agactgttatggaaaatttttgtggttttattgtatcatgaggcattgaaacatttgaacaaatcaatgtttgggcggtgaggcagctgctttttccttcacttctttgggttactagagcaacttgtcagtagattnnnnnnnnnnnnnnnnnnnnnnggacaaccttttgcattacttaagtctttccaaggcatgcgctggtacaacacaaacttctcccgtcagatgcaactagtctagcatccaaacatcatgcacaacacctcagtggcagcagcgcactgcgcccactcccaccgcggccctgctcatttgtgcatgatatttggagcatctggaggagtgggaatagtattgggaagaggagggaggaggaaacagcgtgagtgcctagctgagaggaggtcagccaaagttgtgcagggcgagcctgaacatgtcattggtgcaaacccaagcatcgccaacttttttgtacaaagttgcctttataagt

SEQ ID NO: 248009 - DNA, 841 bp, Homo Sapiens
ccccgccgaccgggaaccataaagattgccctacggaagtgtgttgggggggctgtttttaaagaagccgggagggcatttacttttatttcaaggcaggggaactagccaaggcaggggccacagcgtgggcaggggatggggggagtcagccacatggaagtgccctcccctccattagccgcaggccagacggcccaggagggcgtgctactgcagtgagatggtgcactactgcagtgaggtggcgcagggctggtgagcttgggcacaaaagccagcatgtcaccctccctttggagaagcctctgggccacaggccttttccagctgacgggatgcggagggaaggggacctagtactatcgggattcagctgacttagcctatgagatggagcaggcaagagattccctttgcagggtgggaggttatattcgtacagcctccattcttggagtaggctcctttgccacaccccttttcaccttagcgggccaggcctctcagccagaaaccatatgtcaagagatcgtaagttaagagtgctgctcctgagcagggagcgggcttggaggcgtccttcccctccccgcacccctaagtccccagtgccgggcagatggtcttttcctagtcctcccctgaggaccaggactctctatctccttccctctgagtgaacttcaggaactgaccctggcccaggtgaacaggagcccctgcccaagaggtcttcagagcactcccctcctcctcctgaaaggggctccctcggtctccctcagagactagcggcattccttgccccacttcctcagcctcgtaccgaattcggcac

SEQ ID NO: 248010 - DNA, 162 bp, Homo Sapiens
ttatctttctgaatattttattagggcaaaacaagatatttgcatgggatgcttcttaagtcatctcaagtagttccccttcagttcttaacatgcactctcaaaatcaacacacctaccccaacccaatactcatcgcttcacagtcatccagtaaagtac

SEQ ID NO: 248011 - DNA, 391 bp, Homo Sapiens; identical to SEQ ID NO: 177350
  misc_feature (30)..(30): n is a, c, g, or t

SEQ ID NO: 248012 - DNA, 925 bp, Homo Sapiens
ggttggaaatgacgcaattatttttatttttaattagtaccccaagtcattctttaccatcaaggaagtttgggaaacaaatcacgtttgtttcaatcacctgtggaactggagcagttatttttttccccagcgactttaccacgaagttaactttggaatacgttagtggttaatacacggaacgttcccgagatccctcaagaaagaagctacgaatacttagaagatactattccgcggcgtttacagcaacactgtcccgttccagaaggattcaagtggcggcctgctttgaaggcgaagaccacagggcaaacccaaacttcagaagggttctggccacgggagccacactggtcactgtcccctagtgctgggatgacggctcgagtgttagaggatcccactctctcctctggtagatgaggtcagagagctgagggggccagaacaagtcttccttatcggattctgggcggaaaaagataaagtcggggaggactttctctttttaataagattcatcgttacgaattgttctaggcaagcagacctcaggagaaataggcccaagttttgattcctgttttcaccaagtcgcaagtcctaatcgtagcaagaggtgcggggaagagtcgccttccttcctgcatagtgggatccaagtcaggctgtccttgttagccagggtcaaaggggctctgccagggaaaaacgacggcaaatgtttttcaagaggaagtctccagccacttgtgacctgggaaatccgtctgggccaaaaagatagtggaggcttggctgagggccccagggacacacgtttcctcccgtatggagggggcgggactcttcataaaattacactgcacacagggctagcatcaagccaacttttttgtacaaagttggcttttatagt

SEQ ID NO: 248013 - DNA, 466 bp, Homo Sapiens
cctttttttgggaaattattttcctgagccttttgttttacggtatattgtaaacttttatgttaaagaaaaaatatacatttacaaattgtgagatttttaagagaaattttctacgatgtatactggcttattttttaatttaaaacggggtttccgtcggcactgttggagggggtgcgctgttagtcccctcgctcctggctttgggggttgggacttggtggtccagaaactctgggagcttctagaagaaatctactgagtgtatttctgttttttgtttaattccttgcttttgtcgactgacctgcttggtagtgtctgaggtgaactgtgggggttgcgcacagctcagctgcgtggatcccccgcagcgctgaaccgaaccgagtaggaagcctttctccccaggcacgtggcttcagggcgtttcccattgaccagtttgaccctggtttgaata

SEQ ID NO: 248014 - DNA, 1550 bp, Homo Sapiens
  misc_feature (235)..(257): n is a, c, g, or t
  misc_feature (879)..(895): n is a, c, g, or t
caccttttatcacaaagtttttattgaacaaaaataatatgacagtaaaaatgatacataaagtgaagatttgcagtcatagaaaagatgtgtacaaagagaccaacattcaggttatatagttctataaaacttttcccatagcagtttaacactgattaagcagacataaaagggaaaagaaagtcattaatgttctttgaaacctattttctgagtaaaatacctctgctannnnnnnnnnnnnnnnnnnnnnngaatgaggcagagctatatgagtgagttattcttcagttcctccagttctctgtttgtgttacaggagtattttcatccatcaaaaaattgtagtatttttgcatttctaataaatggatctagagcatacattaatcccagtttccaaaggaaaagaaagaatcagatctatagtcatttaaatatttccaatcagcatttacgtaaacaagtatactaaaaatagtagttttggttgagatttttgcacattaacttcctttagtttgtaagaatcatgcattttggatgtgttctcttatctgacaacacagttttaaatgctgtctttatctgttttgtttgttttactaataacacgtagttttgaaccagtaattacttaacagctaggcatgggggagacagaattggactgagcaccaatcattgttctactttcagtgagctgtgcagccataggcaactcccagcttctgctgtgcacctgtcttgagctggaaacaggtggcgggaagcattctcaaaggccccttctagcactaactttgtatgttcagtaaatatcagttccctggaccagctccttttattctggtacagaattattcttagcctatnnnnnnnnnnnnnnnnnacagtagtgtctattatttgtgaattttggaaccagtgtcattactttacagtcaaggaggcatgttagagtgtttggatttttatcccttgataagggcccacatccccacatacagagatgctcaattccaattgaaaaacctcagaatttctaagtgtcaaagcaatagtctagatttttttctgaaaattcaagaaatgtgttttctcaaatctctttttttatcctttctcataatcctgccacttaatgcccagtttggatcagttatttagtcacatttcaagttagtttttatcatcacttatagttaaggattgtaattaatcttgaatttaaagcttggtgcttttcagttttcttgtattagaactttccttcttcatgtacaggtgtggtacctttggactggtgcctgctgattttctgatggaacagaaaatatgtctgtattatcactgctccaaattacattacacaacagaatttactggagtgttccaagttatcatcagttcagttccacgatgatgaggttcctgtagaatttttcatctgtcagatttccttcattctcccctaactttagtaatacataaagcagtgtatcctctctcagtttccacaagcaaggcctttagtacctccccaa

SEQ ID NO: 248015 - DNA, 1598 bp, Homo Sapiens
  misc_feature (477)..(477): n is a, c, g, or t
  misc_feature (498)..(498): n is a, c, g, or t
tagtttgaaaaatcaatgtagaatattaaattcaccaaacacagatagatcagatctacataaaaatatgtcttaatatcttagaattttcctttactccaaaaaaccccatatatacatgtttctcctttataagcttagagattgctttggtggtcaagtgcagggcggctgggggaggtaagaccttcaggaaggccatatcccggacaagacccagaagggaagcccccagagccaagggtaggagggccccacccgggtctcagccactcacttctccagggcggatccgagacactcacaggcctcagggaggggccaggtgctgctcctggtcattgcttcccccacaaggtttgcatgaggagcagagacagtccagtttcctgaacacccacagggcacagagcccagttgcagggggcagacaccaccgcagttcctggggaccaagaggaagctcccagagggggngcccagggaacgctggggttnggttggacagggttgggtaggggttccttctgggccaaacccccagagcagcagagcaccccagtccaaggaagctcttctcagggacccaaggctccagagccaggaaaaagggaggggcggggcgggagcttgcatcccccgtgccccatcagctctgggggaaacctccgtctccccgtcccttatggtgaccccagcagcagagggggatcctccatgccccaggcaggctggcatcagggccacacaggggccaggagcaggggtctcggagtccacagctcccggccccagtggtgggctcagggctcctgggcgccatgggtctcaccacagcctcgccagggaacaggaccatagggagtccttctccccatctctagccacccacaggccagcagagcacacagccccaccctcgcacaggcacctgtggtctccaagtaaccaagcccaggccccaggggccactgcagacagcagctgggatctgcagagggatctcagcagcgagcaggcagctggcgaggagaggtgcgtgtgagggaggggtggccctctcctcagtaggaggaagtaagagggtatctaggccaatttattcagctggaaatcaatctgtccagggctagaccaggcgcctccccctcgatacagctcctggctgaagaggtcatcagagcagcagctgtccccaggccagtgtcacgtcactgcgtacagttcctcccgatcgttcttgcagatctgatagtggcaggggaatttctgcgagcaggcccagggctcggcgggctggtcaggtggcggcagcagcaaggctgcgctcccggccagcaggatgtgccagatgctgtgggtgtagtagtagttgtcgctagtcatcatggaggtgtagatggcgatgcccacagaggccatagagacgccgggcaggaggtagaaggcccagcgctgccacgaggtggggtagcactggcgccggtgcccgcagcggtaagcccacatggaggccatgatcacgaaggcaaagaggcagggccccagcatgccaacttttttgtacaaagttggcccttaaaagtaagcattgctca

SEQ ID NO: 248016 - DNA, 991 bp, Homo Sapiens
attcatacatatttattcacacaccacacacatataatttcatgtacattgtttgaatgtcccaaactttggagtttaaacatatatacacataagtttattttctcaagtcttactttgatgtagaaaattttattcttgattgatgagtaaggagaaagtgtttatctggcatagagaaaagggacagatagcaaaagggaatatgatgatactataacattactttcactaattgtcttcaacctcattttgattttacagatttggcctctgagtgattttgggatttttaccgtgccagccctaatggccacagattttttgatgattagtaagcatttattcttttgacttgattattgtctccttttcatgtgaatttattactcccgttgaaaccgtgtacttaccaataaactatttggtattcagttttagttgtttttaattgttaaatgtaaagaatattcaacacacattctgccaagttctgttagttcaaaatatatggataaaaatgtaacccaaaaaagtcatttaaattttatgatacaaaaatattgtgggagggggaacctggatgactacctcacttttgaattcttgttcttataggtataatgaaactaatctattcttcttaaatatacctcatactttagcagctacatttacaagtcagagtagtaactattcgtatttataagttcaacctgacaatgccaggtttgataaaaagctgctagtctacatgctcagcccactcatttgaaattaagtaaaaatgtttctaaaggatcccttaaagttctttaaatgagttctgacttttactgtacacaaaatattaaatacatagaaaaatgcatctttaaggcatatgccatctgtagttggctatagtcaataatactttataaaagttcatttcagcatagcagcagtgcaatggccctgtcttcataaatacaggcattaatactatatc

SEQ ID NO: 248017 - DNA, 1846 bp, Homo Sapiens
  misc_feature (101)..(139): n is a, c, g, or t
  misc_feature (430)..(443): n is a, c, g, or t
  misc_feature (698)..(753): n is a, c, g, or t
  misc_feature (811)..(820): n is a, c, g, or t
  misc_feature (1175)..(1183): n is a, c, g, or t
cagaaattcaataatttattcctctaaaaaagtgtgtaaaagtttatagctctcatccacaaggtatatatgaatgacatttaaaatggaggccttttatnnnnnnnnnnnnnnnnnnnnnnnnnnnnnnnnnnnnnnncagcgctatactgtagttatttttttaaatgaacttcacatatttttgtattctttcaaattgtttgctatatataaaagaagctcactgcaaaatgcttgaaggaaaaaaggaaacaaaagaaattcagaacttcccagaaatgtacagcttttacatttaaaaaaggttctgaaatatacatacaagcatgctggacaatcccacccttttcccctccccatttcccctttttttgttcaaaccatggtaagagttctgatttctgcagaatttccaaaattaagaatnnnnnnnnnnnnnntaacttctcactctgtagcaaatccagggcttgtacatttcagattaattcagtaaaaaactcacaagtaaaataatgcatatttaagggaaatattatacagactttttcacacagaagtacataataagattttttaaaatctattgccattcatttatttttgcacaaaaacgtataaatatgtcaccagcttttcttaacttaaaaaacttaaataaaagacaccagatgaaaactaccctttgctgccannnnnnnnnnnnnnnnnnnnnnnnnnnnnnnnnnnnnnnnnnnnnnnnnnnnnnnnctgcttagaattgggtttctagggaagaaaagcccctgcattaaaaacagcccatttnnnnnnnnnnttcaaagttctgatgaattccgggaaaaaagcaaccccaaagtggtaaaagattacaaatatctactttacaatttgtcttctcaccaagataattttatacaagtttacaatcttcatcttcttatgctcttcaaaaggccttgagaattttcctttctgattaagaaaaaatagcactgcaatatttttaaagtcaattttacactgtacacattagatacaaatggtttgatatatcagattttttatcctatacattgcgaaagtcaacccccccttcaactggtggtacagagaacaaaattatccatttacaagttatttctctgctttcacattcccaccacacaacnnnnnnnnnaatataatgttttaaactttagattatttcaagaaaaatacttttacaaaatcatatcaattattacatttttccttttttgttaataaccaggacatggaagtctcttggaagaacttttaaaatttgcatgattctctccacagatgacaagagctcaaaggcctggtcacagtggctcccgggaggccagtacacacccactgtcctcagacagaaacacacaacacaagggttagaaacagggtttcaaagacaaccctctgggccaggaatgaggagtcataaaatacttcaattagccattaatgctttaaaaaggcatttttttaaaaagtcccaccacaaaggctcaacttcaagtactaatttaatggttaagttgtaatatttctttgaaataatattcctatggtccagaaaaaattcaccatatttataactgatttcatgagcaaacactttcaattgttgtatgtacataagtcccttttgatctaatgagaggagagacctggcttccaataagaattcactagaaaatatatttccgttgtgactatataaaactaattaaggtacttgcctccatggctctgagttgagcttgactgccttcggtataaaaatgccaacttttttgtacaaagttggcttttaaag

SEQ ID NO: 248018 - DNA, 909 bp, Homo Sapiens
ggggggatcctacccacagagctgggggctttgtgccagccttttgggtaaggttcagtttattgtctggaggctgcagattcagggacctcagcagggtctgccaccctttgcagtgaccttcaggagagttcatggatgctgtccttccactccttccttcccctcccagaaaaacaatgtgccgctccctttcccttagtggcgatgtacaggggtacacgggcccccatttgcaacagcctctgaggccagggccagcccgggagggcggagtgggggaggagagaggaagaagccagggactgggcagtgccttgcaccattttgaagctgttcagtctctgtgcctgaccctgaagactccaaagactcaggacgcaaggctggaggggaggggagacacaaggggccaggcgagagctgtctctgcacaggcgggtggttagaaaaaaaatgggggacacagccatttttgtgcttgttttattggaagcaagactccagccagctgcagggctcaggggaggaggcctggagagttcagtcctgggtctccctctgggccagcagggggaaaaggggtgttaaaagagctagaaccctcagagatgctcctctgaagcaggggaaagaaaactagaaaggaaaactgtcccagggcggggagcggaatagggcccccacatctcagactctcctaccctcaagcagttaattctcaccccctgccttcctctgtcaacggtgggggtgattccaataactcttctcagcttccatacttcaggtgctcttcgtgaatgctgggtggctttaacccttgggggtcccaaacaagtttccagaatcccactgtccaccattctcccccaaagaaggtcccagaaaaggtgaagttccgtgtct

SEQ ID NO: 248019 - DNA, 1292 bp, Homo Sapiens
  misc_feature (156)..(187): n is a, c, g, or t
  misc_feature (239)..(248): n is a, c, g, or t
  misc_feature (310)..(319): n is a, c, g, or t
ttgggtacattttgtgaaattccagtatgttttgcttaaggtgttaataaaattagtttgcatcatgtagtcattgagtgagggggagatataagccaaggattttaaattgacccttagctatagagaatttgctataagctagtcttgtttgtnnnnnnnnnnnnnnnnnnnnnnnnnnnnnnnngtgtattttactgttttctgtattaagtaattctgtaactgcatggcagtcnnnnnnnnnnaaataaatatagttgttactggtcctgttgtagcagtgaatatagttaaaatacgtacattnnnnnnnnnnttattaggtccttaccagttactgtcctatagctcattcctactagttttcttgacagatttgtattcccagtgtcccgtattgccactcaaattgctctactatgctaagtccttgttaatagtcttaccctccttgaaacacttgaacacttgattactttagctttgaggagataccatctccaggtgtgctttcttagtctttgcaggcacctcttcccttcaatatctgttcttcgtatttttaaaaaaatttgttttagactgccttgttctgtgtcagctcgctagctgatctcatttccttccatggtttccttaccatttatatgcaaatgactgtcagattcatatctcctttctagatcttccctaattgatgtatctaattgctaacaaatgctctttgctgtctcaggcactacatgtcattgatcttgcccccaatcctgctcctcctctcatgtttcctctttgactaaatggcattaccactaccaaccattcatttgtcctttttaccaattctccaatgctgccattttaattcaggccatcaacctacctaaattatagcaacagcctccttattagtctctgtgttttttatttttattcctttctacactacaaccaaattgctccaaaagacttactgatcatgtcactgcattgctttcaccattgctcttcgggtacaatacaaatttatcttcatctttaatgtctcagtatgccacttcatctaggaaaccttcattgatgccctctagattaggtgcccttactatccattccctatacaccctgttctttcccagacatacacttggcacactttattgttactgcttattgatcactgctagactgtaagctttgtaagggcagggaccatataagccttgttcactgttatatctctagtgcttagcacaatgcctggcatttcaataaatgtttggacaaac

SEQ ID NO: 248020 - DNA, 343 bp, Homo Sapiens
cttgactgtttttactgaaaagcgaaatgcaagtataaagcgagggtatcttcagcaaagggcaggctgtggggcaggccgtctgtctgagtgggagctgcagctgatgtggacacgggcctccgtggagcctcaattttattacatttgagtaggaatgactttgtgttataacatcaaagaaagaatctgaatatgagggaactgcagaaattaaactttcagtctaattctcagaatgccagagtaagatgaaccctttacagtaatagtgaaataattcgggctcattttcagtagaaactcaagctgcttcaatatgggaatacaattttgacaatac

SEQ ID NO: 248021 - DNA, 1221 bp, Homo Sapiens
  misc_feature (767)..(777): n is a, c, g, or t
  misc_feature (889)..(1050): n is a, c, g, or t
  misc_feature (1078)..(1105): n is a, c, g, or t
ttggcatgatggtagacagggtcttagaagaacagtgttcggagagggaaacagagatccacagacctgcacagagtcacacaagagaactcagatgaaagctcacccgtgttctcacttagtgatgctcccctgcccctcagacgtagggagggtttttggtagatgtagcagatggcagaatattagcttggaccagatgaaattgctgtttggagggttagaaaaggttacatcagggattccctgcggttctcctcttaggtaaccctcagacaaaatcaggctggtgtggagatcttggagtttgtatggagaatggacaagatctgatggttgctggtgaaaggggaacttagggttgctccagggatgcgtgtgtttaggagaaggtgggatgaggagcgacttctcaggagatttgcttgagaggataccccggggaggggcctttcctcaggccacgaggatcgcctggggggatgaactgtgtggtgcgtgctgagatgccaagtagcttttaaaatcggcttttacgagagataatttgggtcatatttttccccttgttggattaaggataaatggaaagatgttctgagcttctgcccatggcaaagcatggggaggtgcttttgttggtcaccaggtgtctttcctacagtgttggggtttttgagttgttgttaggttctgactgaaggtaaaaggttatgtttaataaatgtgagaaaatactatttgaagcctacttttgaaaactcacnnnnnnnnnnnaacctaggcattaatcctttgggttgcgagctactagtctgatttttacttaccagattatctttctgtctgtcttactctctgggtatctttttctgtctctgtttccccnnnnnnnnnnnnnnnnnnnnnnnnnnnnnnnnnnnnnnnnnnnnnnnnnnnnnnnnnnnnnnnnnnnnnnnnnnnnnnnnnnnnnnnnnnnnnnnnnnnnnnnnnnnnnnnnnnnnnnnnnnnnnnnnnnnnnnnnnnnnnnnnnnnnnnnnnnnnnnnnnnttctctctgtctctgctccatgcatgtnnnnnnnnnnnnnnnnnnnnnnnnnnnntattggtctatccagaatttctgacttggaacggaaatcttcacagttgaattcacgtgcggtgtctttctcccctttgctttttcagttcctccaggagtgatcctaaatggagc

SEQ ID NO: 248022 - DNA, 577 bp, Homo Sapiens
tacaaaataactcttttcagaaaacagaaatatttaatcctttttccacaaattagaacttgctttatcctcagagcatagtttgatatgcgtgcgtacatacttacgatttgtttcacaaagtgttcattagactggtattgcagtgcaggacgtgggagcagttcattgcaggagaaaaagacgtggaaaaagccgcacctctgaatggtcattcagaaattcaggatttttctaattctatgttgttacttattagtccaaattattctttatcataatctttcttttgaggggagagaattattaagagaagtgcagcttttgaaagaatttttctttcccaccatcactgcaggagcccaaagtgttttcaatcaaacccacccacccacttccagaaacatgtcagccagggtgatcaatctgtcacccgaaatttccctttctcccaatacactgtgctaccaaattctgtgaattccctgaacctcaaaattccaagtatcaaaaccagtgccaggagtcaaacctgaaagattaaaagcagagaaggtgccctgggccagtgctccaa

SEQ ID NO: 248023 - DNA, 815 bp, Homo Sapiens
tttgtacaaaaaagttggatgagagacacccctatgcctacttaccattctcagctggatcaaggaactgcattgggcaggagtttgccatgattgagttaaaggtaaccattgccttgattctgctccacttcagagtgactccagaccccaccaggcctcttactttccccaaccattttatcctcgagcccaagaatgggatgtatttgcacctgaagaaactctctgaatgttagatctcagggtacaatgattaaacgtactttgtttttcgaagttaaatttacagctaatgatccaagcagatagaaagggatcattgtttggtgggaggattggaggttggtgggataggggtctctgtgaagagatccaaaatcatttctaggtacacagtgtgtcagctagatctgtttctatataactttgggagattttcggatcttttctgttaaactttcactactattaatgctgtatacaccaatagactttcatatattctctgttgtttttaaaatagttttcagaattatgcaagtaataagtgcatgtatgctcactgtcaaaaattcccaacactagaaaatcatgtagaataaaaattttaaatctcacttcacttagccgacattccatgccctgaccaatcctactgcttttcctaaaaacagaataatttggtgtgcattctttcagactttttcctatacattttatatgtagaaatgtagcaatgtatttgtatagatgtgatcattcctatattgttattgatttttttcacttaataaaaattcaccttattcctt

SEQ ID NO: 248024 - DNA, 2134 bp, Homo Sapiens
  misc_feature (1907)..(1907): n is a, c, g, or t
  misc_feature (2099)..(2099): n is a, c, g, or t
ttggcgccggccgtattctccgggctgcggagggtaaagagcgggctcgggccgaggctggagggctgggtggggccagagcggcgcttcgggggcccgcggaggacgagggagggagagaatctgaggagctgggttgccattaggggactcctgaggtcctatctccaggctgcggtgactgcactttccctggagtggaagctgctggaaggcggaccggccgccatgtccacgttcaggcaggaggacgtggaggaccattatgagatgggggaggagctgggcagcggccagtttgcgatcgtgcggaagtgccggcagaagggcacgggcaaggagtacgcagccaagttcatcaagaagcgccgcctgtcatccagccggcgtggggtgagccgggaggagatcgagcgggaggtgaacatcctgcgggagatccggcaccccaacatcatcaccctgcacgacatcttcgagaacaagacggacgtggtcctcatcctggagctggtctctggcggggagctctttgacttcctggcggagaaggagtcgctgacggaggacgaggccacccagttcctcaagcagatcctggacggcgttcactacctgcactctaagcgcatcgcacactttgacctgaagccggaaaacatcatgctgctggacaagaacgtgcccaacccacgaatcaagctcatcgacttcggcatcgcgcacaagatcgaggcggggaacgagttcaagaacatcttcggcaccccggagtttgtggccccagagattgtgaactatgagccgctgggcctggaggcggacatgtggagcatcggtgtcatcacctatatcctcctgagcggtgcatccccgttcctgggcgagaccaagcaggagacgctcaccaacatctcagccgtgaactacgacttcgacgaggagtacttcagcaacaccagcgagctggccaaggacttcattcgccggctgctcgtcaaagatcccaagcggagaatgaccattgcccagagcctggaacattcctggattaaggcgatccggcggcggaacgtgcgtggtgaggacagcggccgcaagcccgagcggcggcgcctgaagaccacgcgtctgaaggagtacaccatcaagtcgcactccagcttgccgcccaacaacagctacgccgacttcgagcgcttctccaaggtgctggaggaggcggcggccgccgaggagggcctgcgcgagctgcagcgcagccggcggctctgccatgatgacgtggaggcgctggccgtcatctacgatgagaaatgacgtctggtaccgcgaggagagcgacagccctggcccacgacctgtcggaggctaccgaaaggacctgctcccagacccgacggcgcttcaagccggcaggctcacggatgaatgcccaaggcgcgcgtctgcttgggggacccatttgggactcaacgccgccccttttcaccccgcccttgttactaaaccaccttcccatgtgtcgtttggcaccaaacccaaaatctatcccttctcccaaaaatggcctcttgtcaactggcaggcggaacattccgtaggcgccaccccccctggtagacataaggaacaaagccttctctcctgcggctattgggcagtttgtcctcggctcactactctactataaagtcgacccatgcgcggggagactgagggtccccaatgatcccaccctaagttcaaagatgtcagagaaagcacatgctagcgcatttggatcccttaagagacgatccacccaccacctcccaggttgtggcttacagcacttccgcacacctgtttcctgctattcaccacgctctcgcgagctcggtcacagtgagctctcttatgtatcnctcatatgcggcttcccaccactatctaattcttatgcctctatacttcccacgagcatatctagatcgtcgatacggcatatatatctgtctgcgataccatccctctccagagtatactgccgctatagacaccgactcgtcatctactcatatacatatcgacatgaagctctaaaacacatagagtantgttgtctgcgcacacctattgcttcccgctccag

SEQ ID NO: 248025 - DNA, 1086 bp, Homo Sapiens
tgtgagttcggacctgtggtacgcttggtcatgtaagccaacgataaatttaggtgaatgtccctaagtgtttactgttgttatccagtcaaggatgtgctgttccttgaacatttgttttaaattctggggccaaaatgcaaaggagaagttctattcaaaggcagtagttgaaatctattattttagttagcctacttggcatttactacatcggtcacttctccaggctgccctaaattaggttgatggagtgagacatgccaaacatccacctttgggaccatagcatagttaaaattaaatgtagttggaatagctagcattgcagctacagtagggaactgtagtctagttccctacagaaaacccaaggagtgaagggacaggattttgcctaggcaaaaatctaagactcgtgccctcctggtacatggggttttaagactgaatgtgtaataggagcactgcctttgccaaatcaaatgagtgacaggttaactagaaaatgtgacaatcacatttcctcttagctcaaataattctgtttttccatagctttagcagcttaattatatctgttggactgggggaggagagatctgttctctagtggttaacatggtattctttaagaagaaaaaacaaagccaaagaaaactcattatctggcatgttcgccttaaagatggtactgggtagaatctggagttttcatctcttttcaaagctgcatatctcttatatttggtattggcctctaagtctaatattgcagttggaattcttgctgtattattttttaagcaagtgttaggtgcatttaactgctttcttcatccatgacgacattcccaccatgggggtcttgacaaagcagagtaaaaatatgctgtttacattgtttacttacaagtaaggagcctgaaataacctgtagtttcgaatgcaggccctgatttactggcgttgtcagtttcaattatgaaactgaagtttggtgcctcctctttatcatgttttttcccttgtagcagttgtgtttaatgtcattaaaaagaaataaaagttctttgtcagtgacat

SEQ ID NO: 248026 - DNA, 850 bp, Homo Sapiens
aaaaagacagaagcagcttttactatatttacatccaacaaaacttcgcagggaacaatccttattgcacaggtcaggacctgggtgggtgaggcattccccaaggcggggcaggcaagaaaaattaggactggagggggcaccagttcttcctaaggggagcttgagactcctctagctcccagtgcctgactttgaaggaactacaaaccaccggaccatggtgccctatttcccttccctttctcactctccataagaacctcataagcaagggggctgtggctccagaataaataatttaaaataaaatacaaacacttaggtagaaaggcatggagagccttgggctccttcagcaacgtcagggaagagggaccattattggtggagaatgacatccctacctcccattcagggcaaaggctcagtagctctgcatctttccagttgttttttaaaacaaaaacttctaaaatgaccagggcaatgcaagatctgtgggtaaccctggaaggggagttcccggtataggacaagggaagaacagagctgtaccaactccccccagatctcccccaacatcagcacgaacaaactgggtaggttggtgatgggggaatcaggacttttggtaacagtggatccctcttcctgttgtcctcgcttggagcctttgactgggcatccttcccagcctgttcccaactccatgaaggcaacagggaagcagtttaactctagaatcccttcttcctcacttccccaccctaggctggagagggaagcttaaggtctctagcattctggaggtgctccaaaacattttcggcagtccctagtgccgaat

SEQ ID NO: 248027 - DNA, 1126 bp, Homo Sapiens
  misc_feature (140)..(140): n is a, c, g, or t
  misc_feature (1062)..(1086): n is a, c, g, or t
atttattgaacgccaactatggaccaggccctgtgctcaatgctgggtacagagtggagactgaaccaggcatggcacctggcctcatgagcttacactcgagtgggaggcacagtcaaccaacaagtaaattacacaantggatatgcagtggcaaattctccatgaagggaaagaacagaggccttgtgatagaggaactccacaagtaaagtagtcgaggaaggcctcttggacgaggcaacgttgaagccaaggcctgagggtctgcagaactcagccatgcacagggtaggggaagagcattcttggcaaagggaacagcatatgcaaagtgctggaggtgggaacaaggctggaatgtcgaggaaatgaaggaagggcaggtggcagaagctcagggagcaagtctgggactggcaagaaatgaggctggaagtgaggttgggaccaaaagaagacctttagaacaatagggtaagagagtgaggttttcaaactaaagatgatacgatatgacctgcagctttcaatttctctctgctgctactgagaactgattgacaaagcaagagggaagacctttctgaggccagggcagtgatctgggggaggtgatgtggcctggccaggatggctgtgggtgcagacagaagtggatggactccagagatagtttagaagtagaatctactggaagtttccagaagcactaaaaaaatctttattggatgtccgcaacaacccatgcaatggggtaggagttggagacaccaggaaggcttggggatagaaacacaagatgcaagtccttgaccacagaatcagatcacacagtcacctttccttccacaatatcccagggacaatgaaagcaagttcaaccaagatgctgaaagagctggatcattcccatctcatttcagtggcatcacagattctttggagttgcatgcttgcaacgttggaaatgtgtttcccacagccccactagggattctcaggctaggaagttgccaaactgcaagactacatcactgacctggtatcccaggagcagcnnnnnnnnnnnnnnnnnnnnnnnnnttgtccttgttcctgtcctgagtgggccccttcatgccaa

SEQ ID NO: 248028 - DNA, 985 bp, Homo Sapiens
  misc_feature (842)..(842): n is a, c, g, or t
  misc_feature (908)..(908): n is a, c, g, or t
  misc_feature (940)..(940): n is a, c, g, or t
  misc_feature (955)..(955): n is a, c, g, or t
  misc_feature (969)..(969): n is a, c, g, or t
ttggcagcaggcgagcctcggccccgcaaggccatgaaggtgaagaagggcggcggtggggccgggacggcgacggagtccgctccggggccctcgggccagagcgtggcccccataccacagccgcctgcggaatccgaatctgggtccgagtcggagccggacgcaggcccagggcccaggccggggccgctgcagaggaagcagccgatcgggccggaggacgtgctggggctgcagcggatcaccggtgactacctctgctcccctgaggagaatatctacaagatcgactttgtcaggtttaagattcgggacatggactcaggcactgtcctctttgaaatcaagaagcccccagtctcagaacggttgcccatcaaccggcgggacctggaccccaatgctgggcgctttgtccgctaccagttcacgcctgccttcctccgcctgaggcaggtgggagccacggtggagttcacagtgggagacaagcctgtcaacaacttccgcatgatcgagaggcactacttccgcaaccagctactcaaaagcttcgacttccactttggcttctgcatccccagcagcaagaacacctgcgagcacatttacgacttcccccctctctccgaggagctgatcagcgagatgatccgccacccgtatgagacccagtctgacagcttctacttcgtggatgaccggctggtgatgcacaataaaagcagactattcctacagcgggacaccctgaccccacggctgccctgaccccaggaggctccagttctgggctgggagctgtgacctccccaacgctcacccctcaaccccaagtnctctgcttggggagttctccagggagctccgggaccctgagtcaatgttggggagggaagggtacngggtgttccccagttcaagcccatgaagcccntgcggccttgttacntggggttggggttnttaggggaggtttttt

SEQ ID NO: 248029 - DNA, 399 bp, Homo Sapiens
acagagcgagactccgtttaaataaataaataaataaaccaatcacacaagcacagcaccgcagcgcaatggcaacgcacagggcggcccgcagaccccaatcccgggcccctcctggcctctgccaacgcagctccctgacccggaactttcgtggtgtcgggcgagagtttgtgcccacttcctgagagggatgggtaagaagaggaccacttccggcgagggacgggaaagacagcggcttccggcgcggcggttccggacaaccgtgcgcttttagtaaaagattggggttcgcgcgggggagaagggctgccccgggccctctggttctcgtcccgcagcgtccgctcccccgcgccactgcgcgctcccaggaaccctgtactccggggtcgc

SEQ ID NO: 248030 - DNA, 254 bp, Homo Sapiens
tggcccttgcccaagataaaatgtgtgtgcccccatgatcacactccaggggcacaggccacatacgtttccctgaaaccttgggctccagcctccatcccgtccatgtgggagggaacttgggtcccagcagtgtgtctttcagcaccaagtcatgtttaaaagaccagagagacaagcattttgccaagatcttccagggaagatgcatgtgtgacacattaacattcaaatcaggccagcgcggtgctcat

SEQ ID NO: 248031 - DNA, 2272 bp, Homo Sapiens
  misc_feature (1155)..(1163): n is a, c, g, or t
  misc_feature (1231)..(1272): n is a, c, g, or t
  misc_feature (1405)..(1420): n is a, c, g, or t
tccattatgatttattctctacaatacttcgttaaagtgttcaatgatttgcactcagaagttatatagccaagaggcaaccaagtgtaatacaaagaattggtctgaagtctttgcactgaaggccatatagtctcttgcttcagggaagtaagaacgaaatgaacaaaaagaacacatagctccctaggctccagaatctcaatagaaaataacgtcaacagttagtgaaattgtagatgtcaacacatcatggaaaacagatcttgtgcaaaatattaacacccaggacttcttttgtatagatgatttttattataaacaataaaatatatgtaatgtctcaactacaaacctttcattttgaaagggtctctaacatgagttgttttattattatgaagcaaaaaagttttaagaatctcacagtggaaataatccaacaccgacagactctagtgatcaaagacattctcttttaatgtaaaacaaggacaattcataattacagagagaatgtcctagctgtgggtattatgagacaagccaactttccagaccaaaaggcactcacagctagggatgaaacgaactccgaaccaagccagagaaattgggctggtccttgaaaacagtggttacctactgtccagctcgagcagcccaaggacaaaggaaacactcagcagaaaacattcccttttctttaaacctaccacgcacaccgcaggtactggccgccctcatcactgctttggtcaagcgtgcagagaaggcagttcagttccagttcggagctatcctctccctatgcaaagctgccacatggatgatccagacttggtatttttcctgagagccacctgctacacactttcatgaggcgaccgtgaccgtacacttctagaccgcttcctgactaggccccgttcaggacggatactgacaatgcccattcctcacggggccaaatggtttcccttggtcgactcctgagtcccctgacaaagcaagaggaacccaagcatttccattgctggacttgtgtgggagcatgagggaatgtgcagggagtaaggcttcttcactccaaaaaccactgagcccacttcagtgtggtgctgggcctaaccagcccaattcttgtgcactgannnnnnnnnccccatttctcgggttttaaaattttctattcattttcttaaatggcaggtatcgtaccccccctcgnnnnnnnnnnnnnnnnnnnnnnnnnnnnnnnnnnnnnnnnnncataccatacattggagaagacaaatagggcaacatttctacaagaaaaaatcggcttgaggagcatggcactgtaaatgcttgcatgaccagtctcactgagcgtgctcaggggtgaaggtttagcaccaannnnnnnnnnnnnnnnaatctttagaaattaaacacaactcttaacatagaacacttgaacagtaatgagtgtagccctatgtatcaatactgttgtacaaattggaggtgggtggcttagtccagagctgaccaccctgacatcgatccatggcacctaagagtaaccgttgccacgtttttaacaagacatttattctcagcagcaggaaatcacgaaacgacccctccatcttcatttacattgccaagggaaacgtagcaggctgcaggaacccagcacagcagtgaagggccgcagcctaggcaccgtcacccacgtttccctcgcacgtcccaggtcctctcgagcagcacaggacggtgtggagcaaacccactcacccttgcccatcccttcccacaaacttgccagcgatgcctagaacagcacaggtgtcctttctcagattgtgcccccactccccttccccattcctgacagaagaaaatgcaaaagatcttctgaatatttgcccatttcggaaagccacaccatcaccacataaacttcaaaaaataaattaaataaaaacatgttcactgggttgacacccaatccacttcatgagttctctaagcatgttgttgaaaaccagtgtcacatccttaggatccttcttccaactggccactctccctgtgaatcattttagcagtgcctttgtaacaatattttcaaagcatcttccaagtcccctagttctatgaactttgccaccaaatgagtgaagaataggcaaggagagaggaaaaaattgctgacagcgatttggaaatcagcaacaatgggaaagggaaatatgtcacatgaaagtttgaaccaact

SEQ ID NO: 248032 - DNA, 975 bp, Homo Sapiens
aagtgacagcggcagtgagtcctcctggggatccagcaccggctcctcctccggcaaccacggtgggagcggcggaggaaatggacataaacccgggtgtgaaaagccagggaatgaagcccgcgggagcggggaatctgggattcagaactctgagacgtctcctgggatgtttaactttgacactttctggaagaattttaaatccaagctgggtttcttttattgggatgccataaacaagaaccaggtcccgccccccagcacccgagccctcctctacttcagccgactctgggaggatttcaaacagaacactcctttcctcaactggaaagcaattattgagggtgcggacgcgtcatcactgcagaaacgtgcaggcagagccgatcagaactacaattacaaccagcatgcgtatcccactgcctatggtgggaagtactcagtcaagacccctgcaaaggggggagtctcaccttcttcctcggcttcccgggtgcaacctggcttgctgcagtgggtgaagttttggtaggtgagtttcagagtgagccgacccaggccacatcctggcagtggaggcacagtcacccggggcagggccaggttcttggtatatcctcagatctcagtgggcagcgacatgaagtcaggcaatttcttgcaaccaccaccgaggccccgaaaagcactggtcgtcagggagctcctccccttggcccccagcctgtgccagccctggcccggctgccacacctctgtttcctaggctggggacccagcttgtctctccttgtttcttcccactcactgtggtgcttcagtggccaccagcctcgtcacatacaccagcatctttctgtacctcctccctttggtgacctgaagtcactgtgacagttctccaggaaggaggagcttcctacttttgagtttctctgtggaaataaaacatgaatcttgtttccc

SEQ ID NO: 248033 - DNA, 1766 bp, Homo Sapiens
ttggcacctttttaaaggaaacactgcaactttccttaacagcctgttaataaaggctttgtgacaagctctcaaaaaatgcatttctaaataggaggacatcaatgtattgatgaagagaaaaaactagtacttagttgccacactcatgcttacatagaaagagagcccaagaatattagatttcctcatgatacaagatactacagtaacaggctttaatttaggatccttaagattttggggtattatttgtgactctcctgaaattgtaaacttgtgcttctgtgtccagttttctaatgagtaggttcgtagcttgattgaattaataattgtgagcccatagacacaagggaagtgagaaacagtgctctggtgacatgataaatatatgtgtcaaccaccatttcagctattaaaaactcctgttatctccttgtttgaatttcaggtcattaaattgtataaccatcatttgaattgtagtggctctgagtcctaattaggagaatggtgattgaatgatgctaaatcccaccccttttctcagctaggattcaaactgaactactccagctttttgtactgtcaggtgagaagtgaaaaaatactgcttccattttcttatctgcaagtttacagtagaggaatgtgtcatccatccacttacgttgtaacagagctttattgcaattcatttcaaataaggttatgtttacagacttgtggtagacatgtgaattgttcattccaatataatgtgaattgcagtggtagtagcggtatacacagtgctatgggggcacagaggaaggtggggatgtcagagaaggcagtcgtgaatcagataacttcccaaagggaagagatgatgcctaaactctagaaaataggaattagtcacaagggagaacagttgttccaggtgcacaagacagactgaaccaaagtggggaggcaggaatctgcagattacatgaggcaattgtgaacagcagagtagcattggtacgtaaaagttgaggtatgcagagactaggtcgaaggaggctaaggagcttcaacttaatcatactggtctctaaattttgtaaccctaatcaaaaagggaaaaaattacacctgcacaaccaatagacatacaaagttatgaaacatgtaactgtcaattcaaatatttaaaagttttgcttgtgtaaatatataaaaagggctagtattcctcctccctccctcccacacacaccagtggtatatattaaatgcccaagtgcatgtactccatattggagacttctgcagaaggtgaggggaaccactggaaggttctcagcagagaagtggtagggttgcacttagatttccctggcttttgatttgaatttgaagtggatgcaagtatgttaagactagaagctttaaattcttgatctcttcagccattctacattcttttatgtggtatcaggccaagataaccaaggtttaaatgaggaaaatggcagatgcgtttgtgaaatacttggagtagaaagcttaatttttaattactgatttgctagccacttaaatgccctgttaaaaagcttatatttcacacaattaccaaagaaatcattttggtaccaattttgctaaattggatatactaatagaaacttcctcactgcaagaccaagagggaggctaaggttcagactctctgtatagtgaattagtgagtggaaaaacactgtatattttaattgtttgatttgggccaa

SEQ ID NO: 248034 - DNA, 428 bp, Homo Sapiens
ttaaagttgttagcagtcagcttgctccaataggatgaacactaataaacatagcggtaacaacctgctgggtagtatcattattctcactttgttggtgaggaacttgaggcccaaaatggtcagaaagttagcagatggcagagctggtatttcaagtctattttttaatccctatcttgcactccttggtcacgtaaaccttgtgtgaatatgtttgatgctttaatggagcaaagaggagaatattaaaataccaggtttcttgggtgggatgtggagtgaggaggaagaacacaaaacggaaaggctccacgcatcagaagccaagctttgggcactccacagttttgctaaagacttccctgtctgctcacatctggtctgttccccagtatcctcactgtattaaagttgtttctttgtca

SEQ ID NO: 248035 - DNA, 408 bp, Homo Sapiens
aagacatcccctactacttctaccgggacgacgggctcctggtgtgggaagccatcaggacgttcacggccgaggtggtagacatctactacgagggcgaaccaggtggtggaggaggaacccggagcttgcagggcttccgtgaacgattgtctacgtgtaccggcatgcggggccgcaaagtcctcaggcttccccaagtcggtcaagagccgggagcagctgtcggagtacctgaccgtggtgatcttcaccgcctccgcccagcacgccgcggtcaacttcggccagtacgactggtgctcctggatccccaatgcgcccccaaccatgcgagccccgccaccgactgccaagggcgtggtgaccattgagcagatcgtggacacgctgcccgaccgcggtcgc

SEQ ID NO: 248036 - DNA, 950 bp, Homo Sapiens
  misc_feature (68)..(87): n is a, c, g, or t
  misc_feature (305)..(314): n is a, c, g, or t
  misc_feature (444)..(452): n is a, c, g, or t
ttgggtttctattgcttttccttttttccatcccttccctaccatcaaaagcatacctgctctaattnnnnnnnnnnnnnnnnnnnnttcaagttcagctgatttgttggtaagccgcactagaaaggtatacatagtaatgtatatttatttacatactgaagtcctaaatttatattagaaaaatgtaaataatcgggggtaaacatttttgaagatttattctttttgtgttgctggggtgtatacatttatgtctttgtgaaatacactggtggtgtccttcttacaaaacttttgaaatnnnnnnnnnnctcaaatcttcactgtctgtgaaatccccttcagtcttttcagattgcattgactgtcctcttgatttttcatattacatgtcaaattacttttgctatcataaataagctccaaagtcccccatttaannnnnnnnnaattttgtgtatgatgggtttcagatctggcttttgttaacattttggggcttttttaatcttttcaatctggcgtattgctgtttgaccttttgcaaggtacttaattgctcttttgttatagggtatggatcattgtcagaacttgattggaggggtttaaagagattgtgtctgtttaaaatcagtatgattcagagaaggaccaaattatatgaatgtcttacaatggaatttacttgttactgatttttttgttctattgtaccactattttttgaggattttgcacagtgtaaaatgacataatcatagattgctatggtttaggctgtatatacagtgaaaactatgggttttaaatgtttggggaaattcctatggaaaaaagagagacatgtagaagaacctctaacaaggttaatgtgcatgcccaaggtcttttgaaatttcagtgtgtaaatttcctttttagcttatacaaaaataaaataattt

SEQ ID NO: 248037 - DNA, 931 bp, Homo Sapiens
  misc_feature (550)..(580): n is a, c, g, or t
ttggctcttgggatccttggatacctggggccatttaagaagctaggggaattaggccacaacaccccctgggacatccgaaagctacaccacagatgccagtggttcatgccttcttcccgcaactttaggaaaatttatttatttattgtttattagttatggggggagaggggagatttaaaggaccagggacatgggaaccaagccatagggatcagagggccttgtccttgaacactactggggtatattcaggctcatccacgcagctgctgggttcttgccctaacggccctcccctgcaacatccgtcttggaggagaggctgcagccacagcaccctactgccctttaaataaaggagggctgtgggcagggccatgtccctttctcctctcccctcaacctcttactgctgttctccctttctccgtccttcatggaagccctgggagataacctggcttcctggagttgatggaataaaggttggggtggccataatggtttgttgggggtgagggaaaaaacccacagggaccagaannnnnnnnnnnnnnnnnnnnnnnnnnnnnnnaccaaagtcaactgcacgtgttttatatttttaagagatcgtaggcaattagagatcgaagcctcctatctccacatctctgaagaagttgaggggtgggggagagaatgacttctgccttcatctgcagtaacggggggacctatactgacctcttccccagccatttagaaacaagttctagggtgggttggaaaatctccaagagccctgacctcatcttccacctcagcaaccatgacctgaaacctcagcgtgaatttgggggatttttcagtggaacccttgcccccaaatgtcgaccagcccccacatgtcgaagaattttcttcttgccaattttgttgtttt

SEQ ID NO: 248038 - DNA, 895 bp, Homo Sapiens
cactttatttccaaaagccatagcagtaatggctgatggtgtcctcgtaggattagaagctgatgagaaggatcttagtgttcccatatacaaagttcagttccatccaaagggaaagcacagtctgcatgctgcaagcaagctgaacatgagacacagactccttggattcaaccaggtatttttctataactatatcacttagacagccaccattacttgagaaaatgtcttggggattttccatcttcaatctatttattcacctctcctcatcccaagaaaaaagaagagaaattgccgaaaactctggagcttccacattctcaactgctccattcttctcacgggctttccagttaagcaaaccttgactcaaataccactattcccacttcacagagcctgcttaggcttcctcgatcagcttccacaactgagcccttttcctccgaactccacatgcgctcagttctcaaagcgccgatctcaagcggccgcccggatgctccggcccgacttgtgccccgaattcccctggagaccctcgcactagcacggcgtcaggaggaggcttcgggtgacgagacagcgggcaacggctctggtccagagcgcgcgtgtccgccgttggaagcggtcacggcggaaccctcaaatcgccccctttcctagagacctcagcggagccgcgagcaaccgcgcagcccccgcgctccagccctgcgccctaggcacacgccccagagcagcagctcgggttcggcgccgactccgcgccgagaccagcccgctaggggaggactcacagcacccagctcccaggagggcacgcagaggactaccgagccacactccgccccacgctcgccgctatggttacttgccagccgac

SEQ ID NO: 248039 - DNA, 621 bp, Homo Sapiens
  misc_feature (548)..(557): n is a, c, g, or t
gaaagtgaagtatagagtatctcatagtttgtcagtgatagaaacaggtttcaaactcagtcaatctgaccgtttgatacatctcagacaccactacattcagtagtttagatgcctagaataaatagagaaggaaggagatggctcttctcttgtctcattgtgtttcttctgaatgagcttgaatcacatgaaggggaacagcagaaaacaaccaactgatcctcagctgtcatgtttcctttaaaagtccctgaaaggaaggtcctggaatgtgactcccttgctcctctgttgctctctttggcattcatttctttggaccctacgcaaggactgtaattggtggggacagctagtggccctgctgggcttcacacacggtgtcctccctaggccagtgcctctggagtcagaactctggtggtatttccctcaatgaagtggagtaagctctctcattttgagatggtataatggaaggcaccaagtggcttagaggatgcccaggtccttccatggagccactggggttccggtgcacattnnnnnnnnnntctaaccaggacattcaggaattgctagattctgggaaatcagttcaccatgttcaaaagagtc

SEQ ID NO: 248040 - DNA, 1014 bp, Homo Sapiens
  misc_feature (410)..(446): n is a, c, g, or t
  misc_feature (879)..(926): n is a, c, g, or t
ccataaagccaactttatacaaaaaagttggttcatttgctgcttggcttgatggcataacaagtatgggttatttaccctgaaaaggaaacagtatcacccttccagaatctctatttacagctacagaagatgcaacacacctgtttctggaccacttccagatcagatgtgatgcatgctttagatcatttactttgatctaggaattactgtctggcatttcgtggtgtagggtaggtgtctccagcactgtataggtgtctggaattgagataagaatcaatttcaatacaaaatacattttttgcttaaagcacgcaaggattctatgaattcaggtaaattcacagggtggaaaacaggaactaatgttatatattcctgtagttatcttcataatgaagcannnnnnnnnnnnnnnnnnnnnnnnnnnnnnnnnnnnngaactgtattttctagaattgaaaaataattcttttagatgatagataagatgtttacatcaacctgcaaaaagtcaatgttgaagaggtctcattgtatctcacagaattttgatttgcctactcacccacaggagacatttctgggacagtagcaacataaggtccatcccaaaactttggctcattatcattaatatcctgcactttgatgatgaattctgattcaggctccaggggctttctggtttctatgtccacagcctgagcacgaagagtgtagaaaggtttttcttctctatctaggctccttattgcatgaatgtcccctgtggtttcatcaatggtaaaaacggtgccagcgccatctcctgagagggtgtatttcgcagtgccctttcccttgtctaagtcggaatggagctttagggannnnnnnnnnnnnnnnnnnnnnnnnnnnnnnnnnnnnnnnnnnnnnnnccattaaaaggatgttgccaaattaaaaagtcataatttgcaatacaattcctttaatcaaaaatgttaaataaaaatcttatggttc

SEQ ID NO: 248041 - DNA, 641 bp, Homo Sapiens
ctttgtacaaaaaagttgggaaggaccaatacaaaacatactcaagcctcagcctgtttagttgttttcactggggctcgcttttctgggacggtatttattatcagactggcaagcctaactccataggtttacaggaagtagggatatttttataaaacaattgtgtcctccccacattttgctatgttaatatttgcttctaacaatttgcagctgtttcactttttcctcatttgtctctaagttgaaggctttgttggaggggacagagcacaggaacagccttgacagtctgtaattattgtacagatattttattatcatataaataagtatattccttttattttgaaacaaaaatgatcagacactgccttttgtgtgtttagctgcctgtggcatccttttttaaaaagactgttacatattaaaatagtgtacatatataaatattacctcttttgctgtacagttgtgatagagactgaagattttattttttgtgtgctttttataagaaaaaaattaatacactaaagaatcttgctgatgtgattgtaatgtacctatgtaacttatttacttttgaatgttcttctgtatctttaaaccttttattaaataaggttttaaaaatt

SEQ ID NO: 248042 - DNA, 470 bp, Homo Sapiens
acggcgttagcactttaagcacaatccctaggggagggggtgagtgaggggcccagagccctctttgtggcttccccacgtttggccttctgggattcactgtgagtgtcctgagctctcggggttgatggtttttctctcagcatgtctcctccaccacgggaccccagccctgaccaacccatggttgcctcatcagcaggaaggtgcccttcctggaggatggtcgccacaggcacataattcaacagtgtggatgctttaggggaacatggagaaagaaggagaccacataccccaaagtgacctaagaacactttaaaaagcaacatgtaaatgattggaaattaatatagtacagaatatatttttcccttgttgagatcttcttttgtaatgtttttcatgttactgcctagggcgtgctgagcacacagcaagtttaataaacttgactgaattcatttaaa

SEQ ID NO: 248043 - DNA, 1527 bp, Homo Sapiens
  misc_feature (1211)..(1211): n is a, c, g, or t
  misc_feature (1357)..(1357): n is a, c, g, or t
ttggcttccggtgcgtttccgctgtaccggaacgtggggcgaggcgctgttcatcaaagaaaaagggttcttttgtgtcacccaccactggccccatggctgccgtgcagatggatcctgagctagccaagcgcctcttctttgaaggggccactgtggtcatcctgaacatgcccaagggaacagagtttgggattgactataactcctgggaggtcgggcccaagttccggggcgtgaagatgatccctccaggcatccacttcctccactacagctctgtggacaaggctaatccgaaggaagtaggccctcgtatgggtttcttccttagcctgcaccagcgggggctgacagtgctgcgctggagcacactcagggaagaggtagacctgtccccagccccagagtctgaggtggaggccatgagggccaacctccaggagctggaccagttcctggggccttacccatatgccaccctgaagaagtggatctcactcaccaacttcatcagcgaagccacagtggagaagctacagcccgagaatcgacagatctgtgccttttccgatgtgctacctgtgctctccatgaagcacaccaaggaccgcgtggggcagaatctaccccgctgtggcattgagtgcaaaagctaccaagagggcctggcccggctaccagagatgaagcccagagccgggacagagatccgcttctcagagctgcccacgcagatgttcccagagggtgccacgccagctgagataaccaagcacagcatggacctgagctatgccctggagactgtgctcaacaagcagttccccagcagcccccaggatgtgcttggtgaactccagtttgcttttgtgtgcttcctgctggggaatgtgtacgaggcatttgagcattggaagcggctcctgaacctcctgtgccggtcagaagcagccatgatgaagcaccacaccctctacatcaacctcatctccatcctgtaccaccagcttggtgagatccccgctgacttcttcgtagacattgtctcccaagacaacttcctcaccagcaccttacaggttttcttttcctctgcctgcagcattgccgtggatgccaccctgagaaagaaagctgaaaagttccaagctcacctgaccaagaagttccggtgggactttgctgcggaacctgaggactgtgccccnggtggtggtggagctccctgagggcatcgagatgggctaactcggggagcgctctcagctgcgaggggccccttcccacagggctgcagtcctggcctctccatttacttcttcccatcctgggacctgccagggcagcaatctcntcaggtccctgcaaagattggagccagaaattcccctttttcactggataaatatatttttttcattggccaaaagaggctgtaccccatcctgaaggggacccttttggttgggttccccccatcaaccccagggcctttggtggcctaaccctgggcttgaaattttc

SEQ ID NO: 248044 - DNA, 1124 bp, Homo Sapiens
agaatttatttttactttattaacaatgtggcttacaatttttttgaagtaaaaagggtttttttcatttagaataaaaattaaaatataactctgatatagattttcatttatttacatgaaaacatatatacagaatacaatcttacagcaaaccaaaagcatgcccttcgtcctgcaaattttcaaaagtaatgacaccattttttccgttttacgcaccaaaaacatacacaagataggaatccaatttcaatacaaactattcaaactagaatgcaaaacagtgaaagagctttcaacaatcacgacgagggatagttgatgcttccagagatcatgctggctcctgtttcaagcaagtgagatgattatctttttctgtcatttaaaaaaatttgcctcaaatttttcatcttaaggtgatttttagccaacgattgtcctagaattttccttttttcgtcagcacatcgcttcagccacacaaaaagcactgctctgcgttggttaggcgacacgaccgtcatacttactgggccaaatcccattacttagtgccaacaattcagaaggattatggcctcttcctcaaacaatatggaattatttgagttgttacttgtcattgaaactagagaggttttaaaccaaaattcaaggcagtactctgtcagcaattacaacttttaggtaaattacatgggtcaaaagtagcacaatttgattttatcatagtatgtttggggtatctgcaaaccattctagtgatagagctatgagaactggtcaacttaagagttcaaccatgtgaaagggagtaatttccagaaaattcttgaacagaaaagggcagtaaacaaaagaattattgaattataatagttgccaatacagatttcctttgctatttaattattgcaccaacgagatatgggcagtatggatatcttgccaacaatttcttccttaacaactacaggtttcttaattgactatgttgcctttcaaataattgcacgcacgatcacagctttctaaagacagaagagagaggaagtgaagccttgattcgccatctcaatccaaaagcagcaaagatgctcaaaccacaacaaagccaa

SEQ ID NO: 248045 - DNA, 702 bp, Homo Sapiens
aagtttggaaatttgtattctggaaatgttctctatcctgcatgaacattaggttggatccatgcaaaataagttacgccaattaatcaatttactcatttcatcatacacgcttggaaggaagactttttgaaattaaaatgcacatatgcaaaacaacctggcagggccctgggaggatccaatgtgataatgtatgagaaagcgttttgtaaactgtgaagccctgtacaaatgctagttgtcttcattactaacatgtttacagcttggttggccctgaaattgctggcttaacctgaaagagaaaagtgggcaactttccaggcttccagggttaggccaaaaagtccccagatgaagaggcctgggctgggcagtacacagaatacaatcacccagccctctccccacgccactgtcacaaccaaatttccagttgagtcagcccaactagggtgggctcaggacctctgcaatcagggaggcaaacagggtatctgctgcccttgagtgcccaggccaggggctacaaatacagcaacccccaggaactgcatggcacgtgggagagtaagcaggccaggtagagctgcagaaaactaaggcccacaaccagccacagaaggcgatggagggaccgccattatcccagtctagcaatcgttggcgttatgaaagcccgctgttgccagatctagc

SEQ ID NO: 248046 - DNA, 1808 bp, Homo Sapiens
  misc_feature (578)..(592): n is a, c, g, or t
  misc_feature (905)..(960): n is a, c, g, or t
ttggcaagcaagcatagaccagatattcagccgtctagaacgtctggagattttgtccagcaaggagccccctaacaaaaggcaaaatgccagacttcgggttgaccagttaaagtatgatgtccagcacctgcagactgcgctcagaaacttccagcatcggcgccatgcaagggagcagcaggagagacagcgagaagagcttctgtctcgaaccttcaccactaacgactctgacaccaccataccaatggacgaatcactgcagtttaactcctccctccagaaagttcacaacggcatggatgacctcattttagatgggcacaatattttagatggactgaggacccagagactgaccttgaaggggactcagaagaagatccttgacattgccaacatgctgggcttgtccaacacagtgatgcggctcatcgagaagcgggctttccaggacaagtactcttatgataggtgggatgctgctgacctgtgtggtcatgttcctcgtggtgcagtacctgacatgagccagccacgctcagtggctgaacagcattcccacagcctgcaannnnnnnnnnnnnnnaaagagagaggggggcccagaggccgccttttgaaatgtttgcctgtctgaactgtgaagacacttgggagtgattgtggtctaatttccaacctgctctgttttctgtgacatcttggagggggagctagtgccaccaccatgcgcggtgcttaggaaatgaaagaagtcccgggtctgtctctctcactctcgctctcactgggggagggaaagaatggctttggtggctttgttcacacagctgatgcgtgccctgggaaggtgtccacagtgagccctgtgtgcaggactgtccacacggttcacaccnnnnnnnnnnnnnnnnnnnnnnnnnnnnnnnnnnnnnnnnnnnnnnnnnnnnnnnnaggaaagaggccttttctcacagccattatattaaatagtaggtcgattcacatcctcgtgctcctggccaccctcccctgtgcctcagtgacatgtagatgactgactgccaatacttgtcaccattccctggaagcagctacctaggggaaacaagatgtagtgctattgccgataacaagtaagattttccacactacagctgggtgtttctcttttctaaagtgaggccagtgttatttccccgggagtgttcagtcttgaccctagtccctgatatttattctatttgtttatagagtggttggctttttaaggttcagagactgtggcttggcacctgcgcccaggctttgtgggcctttgccccttagaaagtagctgtaggcaaagatttgtgattttccaattacagtctcagctctagttttagtatctctaattctttggttcccttctcttccctgaaatatattagcacctgccagccaggccctcattttgcccagccagtgtgggcagatcccaccgtggagacatctgtagtgtgtatgtccttgtaacactctgttttcagggactacaacctttttaccttctgctgcccagccccggattcaggctgtactaataccaggtatattgtggaatttagtataaaggccactctgtcctgaagtccatctaatgtgatgaatcactgaaagtctcagaaagacctggttagtgtatgttctcatttaccacaggcctaccagctctgggcacagcagcttcatggcaagacataaaatgacactcaaaatccttcagatctggaaaccggctcagtattaaccctaccttt

SEQ ID NO: 248047 - DNA, 400 bp, Homo Sapiens
ggttgtcatttattgttttcaacactatcttcatgacctgtttgtgttcagagtggctcacagataaggaaacatttttgcccagtcttaagttcatggaagataataggaagagtaattaactgcagcaaaaggttaggacaaaacatggcattatcagggcttgaaaggactttattgtggctgtggtgaagcaggccctgggtcttggcagatgataccagaagggcactgagtgcaggggtgcaacttgaatttgatcccataaagtcagggcatcaggaagccattcagaatttttcaccctgtcagatgctcagatttgctaggagaactctgggtagtgggcaagaaccagagctgttacttcaggaattggggacagagggcatttttcccc

SEQ ID NO: 248048 - DNA, 799 bp, Homo Sapiens
ttgggatgcttttaatgaataaaatctgccttaaaatttgatacctggtaacttctctctgtgagttttgaattggctgatgtaaccaaaatgccagctcttgccatctaactaccattaaaaggaacttctaaagctccgaagtggtcaacagtttcacttccaacttttttaaaagatacacaattttctaaaaaatttttctttatgggcgattgaatagttgggctttggctaattcctcattagcaatagaattatgtatattttgcaaactctaatacagaacacttaatgtatcagacaaccatgattatgatgtatatacctggtataaacaatcttttttgcatattgaattctgcatttttttcttccttgatacgtatgagattcaccagtaccagtttttctcttgtggtggcatatagttgattgtcatttgcattatctattaaaaacctgtggcagctcatggtattattgaccatatgttctagtgtcttcttgcagatttaaatattttattgcagtgtaaagtttaatatttagatgtgtgatacatctttggataatctgtaattaaattgatcttttgtaatggtgatagtgattagcacacactgaaaatccagcaaagcaatttatttttctctttttaactggaaatcatattcgtaagttgtggtagatattatcatcagtgtattcatgattcgatttatattttgtgttatctggttataaattttatatagcattcaatttgacaaaatataaatatatttgatttgaattt

SEQ ID NO: 248049 - DNA, 487 bp, Homo Sapiens
gagtgacgctaatagcattgtgtttattagaaattgggcaccaagtcgtctttcaccagtgacaacagaaggaacagaaaacctccatggccacccttccccaccacgctgcgtgttcaggaagagtcttgtccaaatccccaccccctgagaagatgaggattggtctgtggaaaatacactcagcagaccagacacagctcagacgcccacgtctgttagccttaggcactggggaatgttttttttcccagagaaagaaagcacttttaaaaagcagtaatcaattaattcagaatgagcaaaggcttaacctctattctccctgccctctgcagagttcacactgcagagcccttcttcctttgagacacccctaggagcagctttgtcctggctctcccatgctgctgtgactgtcacagtcctctgatctccacctggatctccttccctgatgcatacttgccagcatggatgatcccca

SEQ ID NO: 248050 - DNA, 1129 bp, Homo Sapiens
  misc_feature (82)..(82): n is a, c, g, or t
gaaaaagtccccgcctcccagagaaattgaaggatccagaaagaagtgcttatagcagggaatgtctcccctcacctcctgnatgaacatctctctccttcctccagtataggagggtctgcaaagctaaaggaagagttcctttgttacaagatagaaaagtggtgccactttaaagatgatttctcagtgttctccttagataccaaatacaaaggacgagggatcaagctcagcgaaagtatcaggcatttaaggtatcaggcagcaatgcggggaaaggtgaattttcttcaatcagcataggatggttagggaagagcatttatcactttggttcttatccttcaagccaggggaaaaagcaacagtgaggacatcagagaccaaaagcatttatttgacttacaaaccccaaccgtttgacaagtgagaaagctttattaaagcacacatacatgtcaggggggtgggaaacaaaagagcaagttacagcccgggatcccaagttatgccttccattacaattgcaatccacaccaaatcaatctttgaaaacattcctccattcggttcatacatacagtagaaaccactgtggctgcccttaatccagtgtgcttataggaaatcagttagcagctgactctgttgaaagggatttcctctctgctatacactccttccacacacaactttgggtagaaacgcttatgagaatagaaaggtcagtttgatcaatgagtaccagaagatgaaacttagctcactagacccttctttgaaaagcctcaacacactacacccatgtaatatgtaggtcaaatttaggaaacaatagcaaaaacaggaactgaaagctcatcaagcaggaagtcagaataacagggagactctgtctacattcccttagagcccttaacagtccccagcctggagaaacactgggccaattgagataacacttggctcttctggttgacacagtgggatgtagaccatgctctgtttgataacacaccccagacgcaaacactaagacagatgtggtacatgaggatgaatatatctcatctttcattcgagaaatgaggagctctctctccaatgactgcagtatcagtttaaa

SEQ ID NO: 248051 - DNA, 1293 bp, Homo Sapiens
  misc_feature (1131)..(1140): n is a, c, g, or t
  misc_feature (1276)..(1276): n is a, c, g, or t
ttggaccatgaggaccttcttgcgggcctgggagacgtcgctctcttgccacttgaaggaccggatatgactggctttcggctctgtggagcccaggcttcctgccaggcggctgaggagtttctgcggagcctgctgggcagcattagctgccatgtgttgtgcctggagcacccgggcagcgccaggtttctcctgggcccagaagggcagcaccttctccaggggctggaggctcagttccagtgtgtctttgggacagagcgcctggccacagccacgttggacacaggccttgaagaggtggaccctaccgaggccctcccagtgctccctggcaacgcccacaccctgtggaccccatacagtacaggtggtgaccaggaggacgtgagcctggaggaggtccgagaactgctggccaccctggagggcctagacctagacggggaggactggctgcctcgggagctggaggaggaagggcctcaggagcagccagaggaggaggtgaccccagggcatgaggaggaggagcctgtggcccccagcactgtggcacccaggtggctggaggaggaggccgctctgcagctggccctccaccggtcactggagcctcaaggtcaggtggctgagcaggaggaggctgctgccctgcggcaagccctaaccctctccctgctggagcagcccccgttggaggcagaagagcccccagatggggggactgatggcaaggcccagctggtggtgcactcggcctttgagcaggatgtggaggagctggaccgggcgctcagggctgccttggaggtccacgtccaggaggagacggtggggccctggcgccgcacactgcctgcagagctgcgtgctcgcctggagcggtgccatggtgtgagtgttgccctgcgtggtgactgcaccatcctccgtggcttcggggcccaccctgcccgtgctgcccgccacttggtggcccttctggctggcccctgggatcggagtttggcccttcgccgggttgccttcggccctcccccgcgcgcgccatactctgccccgggcccctgggatgccccggcccctgtctagtccgaaatcgcccccgaaatatatacaacggtnnnnnnnnnnttgtctcccccgccgtccgtgtgcccagcgtccatatttgccccgcgcccgccatacgccacgaccatctgctttcttccgcgcgcaagcgaggacccgatagctcctgcccgccacccgtgcatcacgcgggtgnctcgcgcgagtcccgca

SEQ ID NO: 248052 - DNA, 915 bp, Homo Sapiens
ggcagtcaggggcctctctgaggacaggtcccatggtgcagggtagagggattatgacaacaggctctggccaggaaccagggcagtcagggacctctctgaggacaggtcccatggggtctctgggacaggcagagcaagtcagctcgatgcccatggggtctctggaacatgaggggctggtaagcctgaggcctgtggggttgcaggaacaggaggggcccatgagcctggggcctgtggggtctgcaggcccagtggagacctctaaggggttgccggggcaggagggcctggtggaaattgccatggactcaccagagcaagaggggctggtgggtcccatggagatcaccatggggtctctggagaaggcagggcctgtgagcccaggatgtgtgaagctggcagggcaggagggcctggtggagatggtgctattgatggagccaggggcgatgcgcttcctgcagctctaccatgaggaccttcttgcgggcctgggagacgtcgctctcttgccacttgaaaggaccggatatgactggctttcggctctgtggagcccaggcttcctgccaggcggctgaggagtttctgcggagcctgctgggcagcatttagctgccctgtgttgtgcctgggagcacccgggcagccgccaggtttctcctggggcccagaagggcagcacctttctccaggggcttggaggctcagtttccagtgtggtctttggggacaaaacggcctgggcccagccacgttgggaaaccagcccttgaagaggtggaaccctacccgaggcccctcccaagtggctcccctggaaacgccccacacccctgtgggacccccagaaccggtacaaggtggggtgaacccagcaaaggaccctggagaccctggaaggga

SEQ ID NO: 248053 - DNA, 1275 bp, Homo Sapiens
aactcttcccaggttcttcagttttaatatttgtgggtaaatgaggctccatttcggctgctcacaatgccccagccctaccctcaaattaatataactgcagaccaactttgggggtcagtggctgtgctggtttagatgcacaagtggtttgccaggattgtgcatttgagcttgggaaaaaaccacttcaggtggagaacaatacccttcctctagtgctataaaacagggacctaaagaaccatatgcagattttatagctcggttacaggagtctcttaaaaaggtgattgcagatttggctgctcaggatatagtgttgtggttattagcttttgacaatgctaatcctgattgccaggctgctctgtgacctatcagagggaacgcacatttagttgattatatcaaggtctgtgatggtatcagaggtaatctgcataaggctactttgttggtccaggcaatggcaggactgagagtgggtaaaggaaatcctttgtttcctggagcttgttttaactgtgggaagcatggtcatactaaacaagaacgtagaaaaaatgagtgagtcaggctgccagataggggaaaaaagaaaactgctgagcctgaaatatgtccaaaatgtaaaaaaggaaaacgttgggctaatcagtgtcactctaagtttgataaagatgggaaccccattttgggaaatgccatgaggggcccgtcctgggtcccattccaaaccggggcatttccggctcaggccactccctcacccctgtacaatgtctgttccccgccacagccggtagtgccacagtagatttatgctgcacagtagctgtgagtcttctgcctggggaacccccaccaaaggtcccagcaggagtctgtggacccgtgcaagcggggacggtaggattacttctaggtaggtctagtttaagtttaaaaggagtgcaagtacatacaggagtcattgattcagattacaatggggaaattcaaattgttatatctacttctgttctctggaaagcagagccaggagagcgtatagcacaggtcctgagtgtgctgtatgtgggaatggggaaaagtgaaattaaacgaacaggaggatttggaagtacaaatatacaaggcaaagcagcttattgggtgaatcaaattactgataaatgtcctacctgtgaaataaccattcaaggaaaaaaatgaatgaaaggattggtagatacaggagcggactatttcccatcaatttctcgtacaagc

SEQ ID NO: 248054 - DNA, 482 bp, Homo Sapiens
ctaattaaaaactttgtacaaaaaagttgggaatgaatgaatatcgattgctgttaactagaaacacttctgtatgtcagtcagcatttaatgaccacctactgtgtgcacagcactactggtaaaattttgaagacattgttaacattaaaaaatattttaaagttgtctacaaatctgagccttgtaatgatgtatatttaagttatttttgtttttatagattaaagtaagattatactatccagttttattactaaaaaagactggttttaattttaccaatgtgtgaactataaaagctttttgcctacagattttacattttacaattatctatggctgttttaaattgtctagcaatttatatggttgtggttaactcatttaagaaacaattatctttctatattaagccattttcaaatagcaagacagtgcttgtctttatttgttattacactaactgcaattcagtaagc

SEQ ID NO: 248055 - DNA, 310 bp, Homo Sapiens; identical to SEQ ID NO: 177460

SEQ ID NO: 248056 - DNA, 666 bp, Homo Sapiens
acatttgcctggtttttattgagtggatctctcacgacaaaatcatgaatattacactgaaaggcttattacattatctttgtgtagttactctccagtataaaccctgtgatgttccggttttgatgcctgggtaaaagcttaagcatgcacgttacatttgtatggtttcatcaaaaaagtttttgatgcctagtgagactttggcctgcggaaaatctctatcacatataattattataaatgctctttagtatggattctctgatgttgatgaatgtttgaagtcataatggtttcccactctcagtgtttttgtttctctcaagcatgaatttttgcaatattgtacaatgtgagaattgtgccagaagaccttgccacattcattacatttgttaggtttctcaccagcaagaattctttgaagaatcctggtctcagattttaccttaagaccttgccacattcagtacattagtaaagtttctgtcctctatggtctagctaacggttattaagccttgaacagaaagctaaaggctctgctacattcattatacttgcaaagtttttctccagtataaattattgtatgtcttacaaggcttgaatgctaactgaacactgtggccacattaattacatgtgttagattgctttcgg

SEQ ID NO: 248057 - DNA, 683 bp, Homo Sapiens
aatcgctgcatggagagttctcagcctcggacagctccctcactgacatccaggagacccgcaggcagcctatgcccgaccctggcctgatgcccctgcctgacactgctgcagacttggattggtccaacctggtagatgctgccaaagcctatgaggtccagagagcctcattttttgctgctagtgatgaaaaccatcgccccttgagtgctgcatccaacagtgatcagctggaggaccaggctctggcccagatgaagccttacagcagcagtaaagactcctctcccactctggcttctaaagtggaccagctggaaggtatgctgaagatgcttcgggaagatttgaagaaggaaaaagaagacaaagctcaccttcaggcggaggtgcagcacctgcgagaggacaacctgaggctacaggaggagtcccagaacgcctcggacaagctgaagaagttcacagaatgggtcttcaacaccatagacatgagctagggaaggctgaggaggacaggagaagggcccagacactccctccagtgagtgtcctgcagcccttattccctccatagaaagcatcctcagagcaccttccctggcttcctactctgccccgtttcggggagtgcacaacacaatagttgcagatcaacaatcatcacctgccttttgtag

SEQ ID NO: 248058 - DNA, 970 bp, Homo Sapiens
ttggaacctctcactttttacctacgtttccacctaaaaatacaacaaaaaacctataccacgtagaactcagattggctgaaaaacactttccacctggtagatggcccatatgcctcaattatgtggtccatttaggagcaggagtcagaagagagacctcttattggctgctggtgggtaactgcatggacagaggaaaagggaaggcaggactttgctgcagagctgtgggatgaatgtagttcttccctgggcagcctgggagtgggaaggtcagaatgactcatgttgccttcaggatcaagccatccaggatttagggacaacccaagaggtctttagtcctctggcataatttagacatgttttggaagagcatgagttccatatctgagatgagatttaagactttcagtgcagatagtacaagccatttcttcagggttcctctgggggcagctccttcatgaggtcccacctccggggaggggcacagggctccagatagtaagcacttaaggcaaacagtggatggcaccaacttttaaaggtgactctattaatggcttcacctctaaattatatttttacagatatgcacctatgcaacttaacgtggctcttctaagcaggtgaggacttcctcctcaatgctctctataaaaattatttgtgttctatatagtgagttttaccagtaaatgtggcttaatattttaattcttagaatgtgtcttctctacgtgatgtgactaaattctgttttgtttgtggaatgactagcacaggccgactctctctctccctcacttaacaaaagaccaatgagctgttaatcgagctgttatctccatggtattacttgctaaatgcactgatttcataagtatgtggaatccttttccttttgaatctgtatatcatatataagactgaatctacttaataaacactgaacaacaaaaaa

SEQ ID NO: 248059 - DNA, 445 bp, Homo Sapiens
atttttctaaacttttgtttatttttatagcaatcgtcatgtttagagaagtaaataacacatttaaaaaccttctcagggccaaaggatgccagagtatttacaaacacatggaggaagggcggcaagacatgaggggctggggctctggggctaggactctacccaggaccccgccccaggccttgagccaagcatggacgctgatgtcagccaccaggactgtcccactggccacagtgtgggctcagggaacattctggcagccgtggggttctgttcagtgggcctggtggagaccctctagccgacctgtggccccgcctcccatccagggggcttcccgtgccccacaggccagctcagaggggtctctgggaagcaccgaaggacagggggcagtgtgggggacacagggtctgggacccaacttttttgtacaaag

SEQ ID NO: 248060 - DNA, 1384 bp, Homo Sapiens
  misc_feature (1273)..(1273): n is a, c, g, or t
  misc_feature (1278)..(1278): n is a, c, g, or t
  misc_feature (1280)..(1280): n is a, c, g, or t
  misc_feature (1339)..(1339): n is a, c, g, or t
  misc_feature (1352)..(1352): n is a, c, g, or t
  misc_feature (1367)..(1367): n is a, c, g, or t
ggccttttcagctgcggatcagggtgcctttctttgtggtggtggatgattccaatgagcacatgctgtcggtgtgggactgcagccggggaatgaagctggctgagatcaagagtacaaatgactcagtcctggccgttggcttcaaccctcgtgacagcagctgcatcgtcaccagtgggaaatctcacgtccacttctggaattggagtggtggagtaggggttcctgggaatgggacccttacccggaaacagggtgtctttgggaaatacaagaaacccaagtttatcccttgctttgtgttccttccggatggagacattctcactggagactcagaggggaacattctcacctgggggcggagcccttcagattccaagaccccaggcaggggtggcgccaaagagacctatgggattgtggcccaggctcacgctcatgaaggttctatcttcgccttgtgtctccggagggacgggacagtgctgagtggtggcgggcgggaccgccggctggtacagtgggggcccgggttggtggccctccaggaggctgagattcccgagcacttcggggccgtgcgagccattgctgaagggcttggctctgagctgctggtgggaaccacgaagaatgcattgctgaggggagacctggcccagggcttctcccctgtaatccagggccacactgatgagctctgggggctctgcacacacccctcccagaaaccgcttcctcacctgcggcacgaccggcagctctgcctgtgggatggggagagccatgcactggcctggagcatcgacctcaaggagactggtctctgtgctgacttccacccgagtggggcagttgtggccgtagactgaacacggggaggtggttggttttggacacagagaccagagagatcgtgtctgatgtcattgatggcaatgagcagctctcagtggtccggtacagcccagatgggttgtacctggccattggttcccatgacaacgtgatctacatctatagtgtttccagtgatggtgccaaatccagccgctttggccgctgtatgggtcactccagcttcatcactcatcttgactggtccaaggatgggaatttcatcatgtccaattctggggactatgagattctttactgggacgtggctggaggctgcaagcagctgaagaatcgctatgagagccgagaccgggaatgggctacctacacctgtgtgctgggctttcacgtctacggcgtctggccngacgntnccgatgggaccgacatcaactccctgtgccgctcccacaacgagcgcttgttggcggtnggccgacgacttntgcaaagttgcatgntctttccagtgaccctt

SEQ ID NO: 248061 - DNA, 369 bp, Homo Sapiens
agaggcatgaatatgacaaattttttatttcaaaaatctcaagttgtaaccagcatagcaccactgacatggatgccttgatagaactccttgatagaactttatgatctgttcaccagaaaagattctacatgatcacgccagactataattaaggctaaccaatcaaaattcaggtacccaaaaccagttataatccaggtagaaactacagatcataggaaccctgggactggttttccagggaaccctgtatattattttttaagtgctacagcatgtacaaggacactggcccacaagcttgcttctcacacgtagaaactgacagactaagaggtagatgagagattccaggttccatctagc

SEQ ID NO: 248062 - DNA, 544 bp, Homo Sapiens
ccttttattttcatttctgcataatgaaagagcctttcgatttattagaagtggtttttcctccctacatctttaaattcttggttctctttagtcctcatcccttgaatggacttgtcagctacctcccctggaggagttcagaagcttctgttggccatcacttgagtagatgacaagctgtaaggtatctgctgctaacgtggctgcttctccgagagcacattgaggtccagacagatccaaaccttggccctaaaaaatgtgtgctgtaaagttacttgatgtatatttattataattatttatggttgcatttaacaaacttttcattcaatctgatgctatttacaccatgctgtgtaaaggaagctcactaaaggaaaaaagtcacaccaataaataaccttcatctaattttgatttaccttaagagttgtgtgatcatctactcttgctgagcaagttcaaaggctggcatgcttggatggctctgatatttaagtgctgccaagtggctaggaattaaagtgtttctaattat

SEQ ID NO: 248063 - DNA, 1036 bp, Homo Sapiens
  misc_feature (524)..(545): n is a, c, g, or t
ttgggctgttaatggaccagtttcacactcctccttaactaagacttccaatatgaataaaggcagtgtttcattaaccactggacagcctgtggatcagccaacaacagaatcttgttcaactttgaaggtagcagctgatcttcagctgtctacaccacagaaagcaagtcaacaccaagttttatttttgttatcagatgtagcacatgctaagaatcccacccattccaataaaaaactacctacctctgcttcagttggttgtgacattcagaattcagtagggagtaatataaagtcagatggcactttaataaatcaagtagaggtgggtgaggatggtgaagatttattggtgaaagatgattgtgtcaatacagtaacgggaatttcctcaggtacagatggatttaggtcagaaaatgatacaaactgggatccccaaaaagagttcattcaatttcttatgactaatgaggaaacagtagataaagctccacctcattctaaaataggtctannnnnnnnnnnnnnnnnnnnnntggatgtaagcaagataactcgttataccgaggattgctttagtgattctaattgtgtacccaataaatcaaaaatgcaagaagtagactttctagaacaaaatgaagagctacaagcagtagactcacagaaatatgcattatcaaaagtgaagcctgaatcaactgatgaagacttagaatctgtggatgccttccaacatctaatttataacccagataagtgtggagaagagagttcacctgttcatactagcacttttctttcaaataccttaaaaaagaaatgtgaagagagtgattctgagtcacctgctactttcagtaccgaagagccatcattctacccctgtacaaagtgcaatgtgaattttacgggagaagaagcacctccacagggcatatgatgtatcatttagatgggaatagtcactttcgccatcttaatgtcccaaggccatatgcttgtagagaatgtggacggacatttc

SEQ ID NO: 248064 - DNA, 385 bp, Homo Sapiens
gccaaaaacaaaaaatagctttcaaaagaaatttaagttctatgagaaattccttagtcatggtgttgcgtaaatcatattttagctgcacggcattaccccacacagggtggcagaacttgaagggttactgacgtgtaaatgctggtatttgatttcctgtgtgtgttgccctggcattaagggcattttacccttgcagttttactaaaacactgaaaaatattccaagcttcatattaaccctacctgtcaacgtaacgatttcatgaacgttattatattgtcgaattcctactgacaacattataactgtatgggagcttaactttataaggaaatgtattttgacactggtatcttattaaagtattctgatcctaaa

SEQ ID NO: 248065 - DNA, 697 bp, Homo Sapiens
cggagtccactcctgggcccactgtgcctctcccctcagtgtcccttctgacagtgactcctctctctccagcgctgcctgtttcttccccctcctctaagctactcttccttgagccctccctggctgcttcctctcgctcatccgtcagatgcaatctgtgggccgcccctctcccctggccgctaagcagcctccattgatttccgctcgtgtttataggatttccacttagccgtgatcagtagttaagcacaggaaaatcccttgccaccccccctcccttggtcgatgccattgattctgccagcggctcctaaaccgccttacagctgagttagaagatgaggagaggcagcagggatttccctgccttgggatgtgggaaacagaagaaaagttgaggaaatggttgggaatcgctgttagaactctagaaattctaatctgactttgccactgtgcccagctctggcccagagggtagagtgcctcctgtggaagtttaggggcaaatttgttccctgacctggagagggttagaaagaaccaacagctgccccctccccgcccccttgttgagacaggttctcaaggctcaggggaagatgcatacctcctatgtaagaatgctcttcccttgctgttattcatacacactttccacttcaaatatacccaaatatggctttcctca

SEQ ID NO: 248066 - DNA, 620 bp, Homo Sapiens
atttcatctttacataggatggtaattgtacaaagaaataaaatgttttttaaaaatccgattaaaacactgattccacccaccccccagccccactccagtgaaggaggtaatggagggtaaggtcagggcagaggagaggagtccccatctgcactgagcggccgcctcccgcccctcctcaggacccacagccagctggtgcgtcgaggcccggctggcagcttcctgcacaggaggctgccaacaagaagtgagtgggcactgtcctctctggctgttcctggggcaccaagcacaggtgacagcttaagtctaatgagctttcaagttcaacaagccctgaacgttctctgccagatggaagccccacgcggaagaaggacagggtccctggacagcgaggttgaaaggaccctggaggagagctggcttgtggctatggccatgtgcacacgtgtgtcgcgtgcgtgcgtgtgtcgggggcagcatgcaggcccgacacgtggtaatcaggctgccatttggtccaagaaagcagaatcttcccagaaagacaatgccagcagctccccaattgtcctgtgggaatctgggcatgaaggctctcctgcctgctc

SEQ ID NO: 248067 - DNA, 1000 bp, Homo Sapiens
ttggctgtggactgcctccagggcatcctgagcgtgattccgctgcagctgctgtccttccacctggctgttctccgaggatatgacgttgacttccccagaaatctggccaagtctgtaactgtggaatgaggctgagaccgtgacaagaccatcaccacctttcatctgattccagacctgtcccaacagcagggatgctacatgggaagagaagtggacatcccacatgttctgcgtgctcctgtagagcttgacagcttccacgtgccttctacccaagtgcttttgcttacagcagatactgtttctctgtgtcctgaagtcgccagaggagaagggaatcattgtttacacatggggatcagagcagacttctccactactgtgcaatagagatacagctctcttcagagtaactgtgaaccttttataaccaacactagagttagttttaaaagacaagatatttataatgacgactgtatagcttttaagttatttttctagtatgtggctttctgtagccgtggtaacggccaaactgttcatcctagctacccatgctctgtgtccaggcttgctcctggcaggtggcattcatctcagatgtgagcacaaggcattggccctctggactcctttctccttttctttcctctctaggctgctcctgaatcctgttctctgacatccgtggagcccctcctgcatccacctatgcctcctataagtccagttgaaatctcagcctccttcaacattttcttctcgtgtgtggcccacatccctccacttctccaacttctgtttaatctgatcacggctcttttttaagccctggcagcattttggtccctgctccttgcccatagtaaaacagcttgaaatatcccatgccagagagtagtttcaagtgggcaactctgctctctatttaaaagcgtgcacaatcaaaagtactatgcaattttaggacaataaagaacatacagttaaa

SEQ ID NO: 248068 - DNA, 1045 bp, Homo Sapiens
  misc_feature (483)..(522): n is a, c, g, or t
  misc_feature (571)..(579): n is a, c, g, or t
cattttattccctgaaaccctggggttgcttgccctgctacttttcgatagtacctttcctggccttcagtggtttgctcacataggttcgtcagtacatgttgaagtcttgaagaccctgtatagatctctggagatccagggatctccagatctctagatgcaaatctgcatagatgcaaatattttcttcctggatttccggctcttacatcctcagtctagggtgacaactaggttgtgctgagctgtggcctaggaattcttttccagacagctcacacaatcctaggggtcacctcattggtttccacttacccatgcatcactgccctgccctgcctgatactcagtgtctgaaaagtattgttaatatatatttctagttaaggttatttcacgtgggagatgaacctgatccttataattccagaagtggaattttaaaacagagcagctttttgcatacgttcaagtacagannnnnnnnnnnnnnnnnnnnnnnnnnnnnnnnnnnnnnnngtaaattaatattagaaaccagagcatttttaaaaggaagttgagaaannnnnnnnnagtgtttgaatggcatttattctttatatttacttttgaaataagggtaataaatgaaaattggctaaacttctaattgcactaagtaaattattacctaatattctttgtgtgcttttcttacctgattatgctatgaattaattttgtgaatttcttattatttaaatgtttcactctgacctgtgtcagtatgtttgccatttttagttgcttggttgtttttgttagaaagtaaaatgtattgttgcaccatgcatttgttatgtgtataaaattttttacttcacaaaactgtctataggcaattagcaattagtattaagaagttgtataaattgaaatcactttcatatactaaaaactgtaaaatgagagttattacaaaagatgttgtttattgttttattgtctcaacctttttaacataaaagaccgggtcataattgtgctaaattagggaagt

SEQ ID NO: 248069 - DNA, 437 bp, Homo Sapiens
  misc_feature (25)..(25): n is a, c, g, or t
  misc_feature (30)..(30): n is a, c, g, or t
  misc_feature (173)..(173): n is a, c, g, or t
  misc_feature (222)..(222): n is a, c, g, or t
  misc_feature (238)..(238): n is a, c, g, or t
  misc_feature (259)..(259): n is a, c, g, or t
  misc_feature (287)..(287): n is a, c, g, or t
  misc_feature (306)..(306): n is a, c, g, or t
  misc_feature (338)..(338): n is a, c, g, or t
tggagatggtcagcacaaaccgatnctgtncctctttaaagtgtatattagccacttagcaatctctatattctttcaagtaaccaagctgttgactttcttactacttgcagtagcctgtcccccgacttttcccatccagtgccttaacctaaaaaactccttaactctgnccttgaccctgaggaagaccatgcctaactggtgttattttgtatgtanccctgtgccttaattnctataacagtaaaccccatancgcaggtgggagggaggaacaccggtgncctcggtcactctgggggncagtttagatgtctgtgaaattaaacctgttnctaagtgtacttgtttgaattaattgtattgtaatattatttgttgaatgtagtaattaggtatttatgaatatattgctgtaatttctgacaacatcc

SEQ ID NO: 248070 - DNA, 422 bp, Homo Sapiens
cttgtttgacgcctgctcaaatatggaagcacctttaatgagagttgacatgacttgggggatttcctaaccatcatgctcttaacacaggtgcctggttaggcaggttccttccacctggctgagcccagacaccgatctgtgagagcagcacagtgcaagggaaggctccctgcacggaggggctgcaggctaggctggcccttcagggtagtgttttggttctttcctgaagcaggaggcctcgcttggagcattgctttgctcctaaattacttaaccaaacagcgacttattttccacagtcaggtagacaaacaccacaatgatgaaaataccaagcacagcaagcttcaagcccactgggaaaccttcttctctccagctctcgatagtctggtcttccgcgcagtagtctctct

SEQ ID NO: 248071 - DNA, 963 bp, Homo Sapiens
  misc_feature (139)..(491): n is a, c, g, or t
ttgggtcatcctcttcaggcccccttttttgttagatcaccaactcctgaagaacaggaacgatggtgtctttcatcttcagagctgtggtgcctggcacacagtggggagtcagcaaatgtttccagggaatagcccnnnnnnnnnnnnnnnnnnnnnnnnnnnnnnnnnnnnnnnnnnnnnnnnnnnnnnnnnnnnnnnnnnnnnnnnnnnnnnnnnnnnnnnnnnnnnnnnnnnnnnnnnnnnnnnnnnnnnnnnnnnnnnnnnnnnnnnnnnnnnnnnnnnnnnnnnnnnnnnnnnnnnnnnnnnnnnnnnnnnnnnnnnnnnnnnnnnnnnnnnnnnnnnnnnnnnnnnnnnnnnnnnnnnnnnnnnnnnnnnnnnnnnnnnnnnnnnnnnnnnnnnnnnnnnnnnnnnnnnnnnnnnnnnnnnnnnnnnnnnnnnnnnnnnnnnnnnnnnnnnnnnnnnnnnnnnnnnnnnnnnnnnnnnnnnnngaactggaaatgcaacccaatttttctctcgagtgatgtcaagagatggcaaggaaggtgttgcaacattctagccagaaagctattttcttcccactttggaagggcctcagagaatgacagaagtggccatgatatgaaaggaacaactgacagattttgatttctcttggctgacagcttcattttaggactttgtttgtcaacgacatccagacctatgcagctggaagactgacttcaacaaatctaaatgtacacatgacagagtctaagcaacctattcctttttttccagagacaaggacaaagtgcttgtaagacatagaaactgagtgttgtaattaccttaatctctcctgccacgatttacaggggagcacagcttcaacacttcaaaaacgaagcactatcatgggaaagaaagctcgttttcaacaagcgccaacaataaacaggtcagatctggttt

SEQ ID NO: 248072 - DNA, 393 bp, Homo Sapiens
  misc_feature (381)..(381): n is a, c, g, or t
ttttttccaacctaaatcagacctagaaagctttttcacatagcccagtcttcctccttgtgctgggttctgtctcattatcacctcatcagggaagtctgtacagatagaatccctacccctgcatttgtcgcctccgtctgcctctttggtcagtttcaggtccctgtagttcacactgtgtccccagggatgaagtgggtcccggcacggtggggcattctgtcatgaatgaatggtccccttgtgtatgcagggttcgcgctgcagctaggcagcatctccgcaggtccaggtagtgtaagccctcaccttcacgtccccttgggaactcggcatggctgggcctttcttggccagattccaattcacccttcccgnggaaagttgggt

SEQ ID NO: 248073 - DNA, 284 bp, Homo Sapiens
ctttgtcactccctgccctctgtggtggtcactgtttttctctcttgccaaatgaggcagtctctgagtgacggtgactgtggccttgaagccctggaggactgttgggcatgtagactggcaccttgaagattcaccattgtttaaataaaatcaagcaaatgcttttttaccaagagcccgagcctcgctctaagggacgcagtcctagaggcgtgcctttggggcttgaagagcacactgtgggacgcacgtgcttctgattaaaggaatctcagatctca

SEQ ID NO: 248074 - DNA, 1665 bp, Homo Sapiens
  misc_feature (604)..(618): n is a, c, g, or t
ttggctttgtatttctaattttaggattcacaatttagctggagaactattttttaacctgttgcacctaaacatgattgagctagaagacagttttaccatatgcatgcattttctctgagttatattttaaaatctatacatttctcctaaatatggaggaaatcactggcatcaaatgccagtctcagacggaagacctaaagcccatttctggcctggagctacttggctttgtgacctatggtgaggcataagtgctctgagtttgtgttgcctcttttgtaaaatgagggtttgacttaatcagtgattttcatagcttaaaatttttttgaagaacagaactttttttaaaaacagttagatgcaaccatattatataaaacagaacagatacaagtagagctaacttgctaaagaaaggatggaggctctgaagctgtgacttcattatcccttaatactgctatgtcctctgtagtaccttagatttctatgggacatcgtttaaaaactattgtttatgcgagagccttgctaatttcctaaaaattgtggatacattttttctcccatgtataattttctcaccttctatttnnnnnnnnnnnnnnngtcagtgtagtatttacatattttaccctataaggagctaacataacttttgatttagtgttattcataaaattaggttagcagtttattaaccttttgtatttgctctggcaatgtttaatatctcataagctatacacacctcgaagccatcaatgacaaccttttcttgctgaatagaacagtgattgatgtcatgaagacaattttatctccttttgccttccataatttgtaccaggttatataatagtataacactgccaaggagcggattatctcatcttcatcctgtaattccagtgtttgtcacgtggttgttgaataaatgaataaagaatgagaaaaccagaagctctgatacataatcataatgataattatttcaatgcacaactacgggtggtgctgaactagaatctatattttctgaaactggctcctctaggatctactaatgatttaaatctaaaagatgaagttagtaaagcatcagaaaaaaaaggtaaacaaattgctcctgtggagatgattggcatcacatggtgttttgagctgatacacccaacacttgagctcactgcaacagtaccagattttcaccgctatgcctcctttcactctgggagtcttccagaggtcttgcactcgggagagcatgctcaggtttccccagctctacaaaatcacccagaatgccaaagacttcaacacaagggtaaataaggttgatctcagaattgtcacctcaaaaaggccctgccttccactgttcagttctggtcatctgcctatgagatatctgaagcttgaaagagaacactttgaaaatcactgagaccgtgactcccatcccagcacacacagcaagcccaagtaggttacagagatttcttcttgggtgatgagttcacgccacatgggagtccacaccatggaaacccgattcctcatcttttaagaataccatatggatacttatatataggcatgaattaagcaactaggctttcaacagttttggagaggccattttccacttttaaa

SEQ ID NO: 248075 - DNA, 479 bp, Homo Sapiens
taggtctcttctgaggagctgcgttcgggctcccctaagtcagtagccctggaaagtgacacatcaaggatctccgaagaagagagatcttccgtgtgagattcatccagatcatcatagctctcagtgtcctctgctatactgttgttagagctgatactagcggagatctgagcaggaattaacgctagttatctggaagccacttttctttttcatttgagtttccgcctggcgcaatgagctgtgcctgcagctgagcctgcgaaaggaggttcaggctttgtggaggcggaggctgtggtcccgacgtagaagatgctgcagggggcggcggctgaagcagcgacggaggcggaaaatcctcggaagatgtggcattactaccgacgccggtacctgctgcattgagaggcagatgcgctgcccactaccgctgccccttcgagggaacattgccgggtgcgccatcttcctag

SEQ ID NO: 248076 - DNA, 571 bp, Homo Sapiens
tacaaaaaaagttgggatttgtttcaccctaataagcttgtcattttcaagttcattttttattcatatttatgttcatggttgattgtaccttcccaagcccgcccagtgggatgggaggaggaggagaaggggggccttgggccgctgcagtcacatctgtccagagaaattccttttgggactggaggcagaaaagcggccagaaggcagcagccctggctcctttcctttggcaggttggggaagggcttgcccccagccttaggatttcagggtttgactgggggcgtggagagagagggaggaacctcaataaccttgaatgtggaatccagttatttcctgcgctgcgagggtttctttatttcactcttttctgaatgtcaaggcagtgaggtgcctctcactgtgaatttgtggtgggcgggggctggaggagagggtggggggctggctccgtccctcccagccttctgctgcccttgcttaacaatgccggccaactggcgactcacggttgcacttccattccaccagaatgacctgatgaggaaatcttcaataggat

SEQ ID NO: 248077 - DNA, 576 bp, Homo Sapiens
cacttgcaagcgtgccgcatacgttatggcgaccatacgccttttcggggctacccggacgtgggccggctggggggcctgggagctcctaaaccccgccacttccggaacgactcctggcccgggattatgccaatgaaacccagtttatgaagggggccaaatcgggaaaaggtgcagtgaccagcgaggccctcaaggaccccgacgtatgcacagatcctgtccagctcaccacatatgccatgggcgtcaacatctacaaggaagggcaggatgtacccctgaaaccggatgctgagtaccctgcaatggctgtttgagatgaacttgggtcccccatagaccctggaggagctggacccctagagccgggagtactggcggcggctgcggaacacagaacatctggacgccacaaccggctgagcaaagaacaagaggttgtagcaatggagggcccaggcatcgctgaaccccacgccgagggacttgccggaattacccgagaggacagtggacattaacgtgagacaagaggcgagtccccagactgggtattcccatgtgaccaca

SEQ ID NO: 248078 - DNA, 977 bp, Homo Sapiens
ttggcgatggtgtccccgcgggatcaaacttcagcgtcacagctgaggactggcttcgtggtccctgatgggagagcatgaacaggtgaagcccttggagaccagctcttccaaagtcaaagccaagaccattgtgatgattccccgactcccagaagctcctgcgatgtgaacttgaagtcactcaaagagccagttacaggcccagacccagggctttcgagttcctgaacccactcagtgacccatgttggagaaaggagagctgcttgcagcaaatcaagattcagcagcttgaagcaagaagttcctgtgggaggagctggaactggtgcgggaggaggtgaccttcatctatcagaagctccaagcgcaggaggatgagatctcagagaacttggtgaacattcagaaaatgcagaaaacgcaggtgaaatgccgcaaaatcctgaccaagatgaagcagcagggtcatgagacagccgcctgtccggagactgaagagataccgcagggagccagtggctgctggaaggatgacctccagaaggaactgagtgatatatggtgatgcccagcctgcagtctgacccctgaccctcctctgaacccgttcccctaacgggatctggcagtgacccaccagaacctggagcccacctgagtccagacttccctcacccccctaggactcaccccaccacggccccccaaccttagctgtactgctgtctacaccctgagcagtgtgggagtctcccagcgcccccagctccttgtcttcttgcaggtctgctgtgcacgtgctgcagaactccatagacagcctcactttgtgctcgggggcctgtcccaaggcctcgagcctaagaggccacaagggcaccagtgcctgagccctccactcccctcctgggactctgactccgactgtgaccaggacctctcccagccacctttcagcaagagcggccgca

SEQ ID NO: 248079 - DNA, 1176 bp, Homo Sapiens
gaattttaaaatgcaatcagctgcattttccattgctgcagatgtaaaggatgtcaaggcggctcagtcaaatgagaatctaagcgactctcaacaagagccacctaaaagtgaagtctcggaagggcccgtagagccctctaattgggaccagaatgttcaaagtatggagactcaaatcgacaaagcccaagctgttactcagcctgtaccccttgcgaataagcctgtacctgctcaatctacttttccttcaaaaacaggggggatggagggaggaacagcagtagcaacatcatcattaacagcagataatgattttaaacctgtgggtattggtctaccccattcagaaaacaaccaagataaaggcctgcctcggccagataatagagataatagattagaaggcaatagaggcaacagctcatcttacagaggtcctgggcaaagcagaatggaagacacacgggataaaggtctagtaaacagaggtcgcggccaggcaatcagtcgaggcccaggattggtcaagcaagaagactttcgggataagatgatgggtagaagagaagatagtcgagagaagatgaacagaggagaaggtagccgggacagagggttggtgaggcctggaagcagtcgggagaaagtgccaggtggtcttcaagggagccaggacaggggtgcagctggcagccgagaaaggggaccacctcggagggctggcagtcaggagaggggacctcttcgaagggctgggagtagagagagaataccaccccgaagagctgggagcagggagagaggaccacctcgagggcctggcagtcgagaaaggggactgggaagatcagattttggtcgtgatagaggtccattcagaccagaaccaggagatggtggggaaaaaatgtatccatatcaccgggatgagcctcctagggctccatggaaccatggagaagagcgagggcatgaagagtttccattagatggtagaaatgctccaatggaacgagaaagactcgatgactgggatagagagagatactggagagaatgtgaacgtgactatcaagatgatacactagagctctataacagagaggacaggttctcagcaccaccatctcggtctcatgatggagataggcgaggcccttggtgggatga

SEQ ID NO: 248080 - DNA, 757 bp, Homo Sapiens
tttaggctgcaactcagtagttttcttgatccctaactgggttacgggaagaacactgaatttcaagctcttaactattcagagtagggcaatatctcagggttaaggaaaacaaatcaagccagcatatttgtccataatattttaatacttttccactttaaatactggttttaattctgtgattgtaacatggaagatccaactttattgtgtttaaaaaacatcatcaggatcataaagctattatagaagttactctacacactcccaaggtactttaaaatgattatgttttgagtctgtagatgaaccatgacaaaatccaaatacatcgtctgtacaactcggactaaatactggtgaaaagtgtttaattggacaaataactgataagcttaaagataaccagcacaatttcacaagagaaccagctcagcccaactaaaaatttcttaatagcaattgacactgaagttgtattaagtgtataaattagttgatgaaactgaacaaatagaaaacccattcctccttttccttattttgccttcttacacctcccttgcagatataaccctcctttggtttagctacccctgtggcaattccaaaccaagtactgcagtgatcatcctctacctcaaaaccaggagtcctgaattccaactgaaacactgtactctcttgtcctgtacagtgggcagtcagggacaaaatccccacatcaccaatatatttcaagtttctaacccaa

SEQ ID NO: 248081 - DNA, 994 bp, Homo Sapiens
  misc_feature (673)..(717): n is a, c, g, or t
aaatataagaaatactcatttttgtcttaaagccaataatgtgttatcagattagaaattattcttgtttgtgactttgcagaacccttccatctggcctaatgatagcattattattttttaaagaatgaagccctttcttaaaagcctagttgactagggatatcaagtggacacagctgacagaactttgtactagaaaggagggaggatacagaatgtctcttcaggcaagaaactatattcagtctttgactcagatgccgaagatgaactttgcgaatgtatttattggtgccaatcccctggctgtcgacttgctggagaagatgcttgtattggactcagataagagaattacagcggcccaagcccttgcacatgcctactttgctcagtaccacgatcctgatgatgaaccagtggccgatccttatgatcagtcctttgaaagcagggacctgcttatagatgagtggaaaagcctgacctatgatgaagtcatcagctttgtgccaccaccccttgaccaagaagagatggagtcctgagcacctggtttctgttctgttgatcccacttcactgtgaggggaaggccttttcatgggaactctccaaatattattcaagtgcctcttgttgcagagatttcctccatggtggaagggggnnnnnnnnnnnnnnnnnnnnnnnnnnnnnnnnnnnnnnnnnnnnnctgtctttgtggggagggtagacaatatgaacaaactatgatcacagtgactttacaggaggttgtggatgctccaaggcagcctcccccttgctcttctttctgagaagtggctccagcagaaaaaagctgctggcccttttaggatatgttccatggcaagtaaaaaatatgtatttgtccccaatccccggccatggcttttgccaccttgggcttcccccgggacccccaccttgaagggtggggggctaaacttgaaaccatcccacagggt

SEQ ID NO: 248082 - DNA, 881 bp, Homo Sapiens
  misc_feature (100)..(137): n is a, c, g, or t
  misc_feature (315)..(382): n is a, c, g, or t
ttggagaaaggagtgaggagctgctgggcagagagggactgtccggctcccagatgctgggcctcctggggagcacagccctcgtgggatggatcacagnnnnnnnnnnnnnnnnnnnnnnnnnnnnnnnnnnnnnngccacctgccttttccacggacggcaggactgtgacgtggagaggaaccgtacagctgcagggggaaaccgagtccgccgggcccagccttggcccttccggcggcggggccacctgggaatctttcaccatcaccgtcatcctggccacgtatctcatgtgccgaatgtgggcctcnnnnnnnnnnnnnnnnnnnnnnnnnnnnnnnnnnnnnnnnnnnnnnnnnnnnnnnnnnnnnnnnnnnntccccgccacgctcgctgaggctgctgtcgccggtgcctgtggacagcagctgcccctgccctcccatctgttcccaggacaagtggaccccatgtttccatgtggaaggatgcatctctggggtgaacgaggggaacaatagactggggcttgctccagctgcatttgcatggcatgccccagtgtactatggcagcagagaatggaggaacactgggtctgcagtgctgaagggtttggggagtggagagcaagggtgctctttcggggctggacagcccgtcttgtgacagtgactcccagtgagccccagaaatgacaagcgtgtcttggcagagccagcacacaagtggatgtgaagtgcccgtcttgacctcctcatcaggctgctgcagcctctggcgggcagggcactgggagaggccctgagaatgtccttttggtttggagaaggcagtgtgaggctgcacagtcaaattcatcggtgccttagtccaa

SEQ ID NO: 248083 - DNA, 906 bp, Homo Sapiens
  misc_feature (21)..(21): n is a, c, g, or t
  misc_feature (41)..(41): n is a, c, g, or t
  misc_feature (60)..(60): n is a, c, g, or t
  misc_feature (128)..(128): n is a, c, g, or t
  misc_feature (141)..(141): n is a, c, g, or t
  misc_feature (252)..(252): n is a, c, g, or t
cctacaaggtgggcccacagnctgcctcaccgggattgccncccactaaatagctggagnccacagattgcggataaagcccaccttcaaggttgccagtgaaaagccataaccctatgtgatggaanttatatgtgttantttttaaaaagctattttattactgcatgttccccgtcccgtcttgtgaatgtgagtccccgcccaccacgtgaggtgcagtcgttgcagcggctggtgcaggagtgccantggcgcgtgtgtgatagcatctcgtaggtgttgctgcacaagagttaaccagagtcaatgccaaacacatagtatgagaagtgtactttttaagaaattaatttatttgagttcaaatatttttgaaatataaaaattggttgtattttttaaagctataattcttgtagacattctgtggttaaaaatttgattgtgcttattaaaaatggtcatctatgttttgcacttcagctacgtgaaaataaaatttctttgggaaggtgacatttggcttcctgattacgggagggagttggttatctcaggtggagcaggaaagcctggttgattctcacaccaggatgggactgggacttcccaggatggagggaggaggccatttctacaccatactttgagctactgacagcaaaaccctcccaccatactgggtgcatcttgtttactcttgactaacatacacttctgatttacagcagaagcctcagaagctaattcagttctcctttggcatgccactggataacaagatagtgagggggcagtgtgtacaagctgtggacatgggcatttcctctctgttgcagcaaggcggaggaaagcccagggagagtaaaacgctacaatctttctaacagctttgccctacac

SEQ ID NO: 248084 - DNA, 1113 bp, Homo Sapiens
ttggctttaaaacagcaaatagcagatttacgggaagatttgaaaagaaaggaaaccaaatggtcaagtacacacagccgtctcagaagccagatacaaatgttagtcagagagaacacagacctccgggaagaaataaaagtgatggaaagattccgactggatgcctggaagagagcagaagccatagagagcagcctcgaggtggagaagaaggacaagcttgcgaacacatctgttcgatttcaaaacagtcagatttcttcaggaacccaggtagaaaaatacaagaaaaattatcttccaatgcaaggcacagcacagccgcctcacacgcccagcagcttgttggctgaccacctgcctccgctctcctccttcaggccattctcccgtaacatccagctccgttacactttttaacatggaggcaatccacctcgaagatccaagtctgcacctcctcgtgatttaggcaatttggataagggacaagctgcctctcccagggagccacttgaaccactgaacttcccagatcctgaatataaagaggaggaggaagaccaagacatacagggagaaatcagtcatcctgatggaaaggtggaaaaggtttataagaatgggtgccgtgttatactgtttcccaatggaactcgaaaggaagtgagtgcagatgggaagaccatcactgtcactttctttaatggtgacgtgaagcaggtcatgccagaccaaagagtgatctactactatgcagctgcccagaccactcacacgacatacccggagggactggaaagtcttacatttctcaagtggacaaatagaaaaacattacccagatggaagaaaagaaatcacgtttcctgaccagactgttaaaaacttatttcctgatggacaagaagaaagcattttcccagatggtacaattgtcagagtacaacgtgatggcaacaaactcatagagtttaataatggccaaagagaactacatactgcccagttcaagagacgggaatacccagatggcactgttaaaaccgtatatgcaaacggtcatcaagaaacgaagtacagatccggtcggataagagttaaggacaa

SEQ ID NO: 248085 - DNA, 1268 bp, Homo Sapiens
  misc_feature (420)..(451): n is a, c, g, or t
  misc_feature (712)..(712): n is a, c, g, or t
  misc_feature (742)..(760): n is a, c, g, or t
  misc_feature (800)..(831): n is a, c, g, or t
ccaaagacaactttgtacaaaaaagttggtggaattctagatgactttaattttctttatatcagtatttttcagattttctatatgctttccttttaaaatcagattttagtttttaaaatactgatacatccattttgatataccatgtattcacactttaaaaaatacacatagcagagtatcggaaagtatgtaccaaaacattgatctggctaccactgggagtcaggatcatgagttcatcttcttccttcttactgcttttccaaacattctccagtaagcaggtactacatttataatggaaggaattttttaaaaaattttaagctgtacactttcaagtaagatctgaattctaatgctggcttgtgcctcttactatgtggtttggtcattatagataatgcccagttnnnnnnnnnnnnnnnnnnnnnnnnnnnnnnnntgttatctcttgggagtagttctgaatatgaagtgtgttgatacaagaagcactgacaatgtttctgtttcttaaatttaaaactggcctggtttgccttttttatcaagagagcttaacagataaaaaatgaaattagtctattttctacttgccagcagagtatctgtcttattttaggatgcagtgtgaaacttaccattcaactgaacaactagttgtcaactaatgaaaataaaacattttctctaagcaaacccngaaaatcaaaccccatccaacacctctgtnnnnnnnnnnnnnnnnnnnacagtgccgcactacgacccaccccactaatcaactagtnnnnnnnnnnnnnnnnnnnnnnnnnnnnnnnntgtgcgttgctccgcagaggtttgaccgcgccgtaagccccctcgtcttgctgtgtgaatagccccggcttgcccaccccaatttccctccacccaaccagaccagtcggctccgcgggtgaccgccgctcgcctgagctgaccggcctgcccagtcaatcgctttatcgccgccgcctctttctcccacaccatgagtaaccccctcgtccttgaccccccagtgtattggcttgtctcgctctcaccctcgctggattacccctccgatctcctacatgctatcatcgccgccccgccgcgagcacttttcctctctttaccccaccacgtttgttgacgcgggccctttttcctctcccctcgcgatgtttcaccgcccgccgactctctcgccccacccagccccgcatcgtgtcttctctggtgcgggtcgc

SEQ ID NO: 248086 - DNA, 379 bp, Homo Sapiens
cgaagcggcgccgggctgcggagtcacgcgcgcatccacgtgtcccggagccccacgcgaccccgtgtctcagacgccaccagtgtggcgtgtgcggcaagtgctttggcaagagcatcctactgacgcgacacctgcagacgcactcgggggagaaacccttcaagtgcccggagtgcggcaagggcttcctggagagcgctcacgctggtgccaccagcgcacacacacgggcgagaagccgtacgcatgtggcgactgtggacgctgcttcagcgagagttccagcgcctcgcatcgcgcagccatcagggcgagcggccacatggtgcgccacttgcggcaagggtttcgggcagcgctccgacctggtggtgca

SEQ ID NO: 248087 - DNA, 1033 bp, Homo Sapiens
  misc_feature (272)..(272): n is a, c, g, or t
  misc_feature (733)..(733): n is a, c, g, or t
  misc_feature (832)..(832): n is a, c, g, or t
ttggctttaaatgccacgggctgcgctcccgcccgggagcccggagccggatctacaatcccgtccctccagctccggtgcttgttgctcgcccggcccaagcgggagctgttgccgccaggctgcgaggctgccgtcctctcctcctcgcgccccacctcccccgagagctggctgaggaggggcagcagccccagctggcgggaggaagcgcggtgtgaacagggattgccccccgccttcaagtatcggggcgctacgcagccgcgggnggaaagacatgcccctagtctgcccgctgcgctgccctctgcccagcctcgctgccgcccgcgccgggagaggagggactgccgagcctacaccttcaaactcgccctagaagtctcggggcgcggcagggagcccttccccaggccccacggctttcacctctccgcggttagcctcagcccctgtccggggacctgtgcaaatgaccctggagttggtttcgctttctccccttgcggcggtgtgaacgtgtgtccgcatcgtgatgggcaaccaggtggagaaattgacccacctaagttacaaggaagttcccacggccgacccgactggcgtggaccgggacgacgggccccgcattggggtctcctacattttctccaatgacgatgaggacgtggagccgctgtcgccgcctcaggggccagcaatgggcggcttgcccgacggtggggacggnccgccgccgccccagccgcagccctacgatccgcggctgcacgaggtggaatgctccgtgttctaccgggacgaatgcatctaccagaagagctttcgnccgggctcggcggcgctgagtacctacacgcccgagaacctgctcaacaagtgcaagccgggcgatctggtggagttcgtgtcgcaggctcagtacccgcactgggccgtatatgtgggtaacttccaggttgtgcacctgcaccggctggaggtgattaacagcttcctgactgacgccagcctacggcgtcgcggccgc

SEQ ID NO: 248088 - DNA, 871 bp, Homo Sapiens
  misc_feature (41)..(51): n is a, c, g, or t
  misc_feature (756)..(765): n is a, c, g, or t
ttggtttttaaacaatggaagtgtcaaaaaatacacatggnnnnnnnnnnnccctatatgcttactgtgcacctagagcttttttataacaacgtctttttgtttgtttgttttggattctttaaatatatattattctcatttagtgccctctttagccagaatctcattactgcttcatttttgtaataacatttaatttagatattttccatatattggcactgctaaaatagaatatagcatctttcatatggtaggaaccaacaaggaaactttcctttaactccctttttacactttatggtaagtagcagggggggaaatgcatttatagatcatttctaggcaaaattgtgaagctaatgaccaacctgtttctacctatatgcagtctctttattttactagaaatgggaatcatggcctcttgaagagaaaaaagtcaccattctgcatttagctgtattcatatattgcatttctgtattttttgtttgtattgtaaaaaattcacataataaacgatgttgtgatgtaatattgtgtgaggtcttaaatatcctacagtcgatgtacaagagtagagtatgttgggaagaaacttttcagcttaagtttgcctcctctacaatgacatcttttatatgcttgtctcatttagaatgcatatgtgctgattttctaatttaagagataccatatctctctattcatttctatctctcatttgtatgcttatttttctgagaacannnnnnnnnncccccagacagggtcttgcttcattgcccaggctgagtgcggtggcacaaacacgatcgatgaagctcaaccctctgggctcaagcagtcctcctgctcagcccct

SEQ ID NO: 248089 - DNA, 812 bp, Homo Sapiens
caaatatttattgaggatataatgagtaatcaaaggttgtcccagtactcaaggcgatgattgtcaggtagcagaaacaattacaagtcgatggaaaatgctgggatcgaagtgcacacaaagagctatggaagccctgtagggactggggagtgaggagggatgtcaagaaggctgctatccagaagaagcaatgtttcgactgaggcttgaaagtttcaatgtaatgtgggaggaagagcaaatggaacagtgtgtgaaaagacatggaggcatgagaacacatggtgtttttagagaccaaggtggacctcaggatgagcgtaaggcagtaagaaatgagatgggaaggagtcaaatcatgactggcttgcttgtttgatcattttcctatgagtgaccgtgctgacggattcaaatttaaggagtacaagatcgtattttaaaaatgcccttagcagtatttataattgaacaaggatagacaacagctgggtaagaaagactagaggcagaattctcagccagggatcatggaatgtgaatatccttttgctgacacaaggaacaaatgttggctccaaacattagttactttataccagtattagctgttcattcagttttttaacttctttagagcaattttatttatcatctattttttcccaattacccattacatatagaaatattatcatgcctgtcaccgatgaaacatattaagaaaagtgaaaaatacatattctttaaagtgcctcccttttaaggattttgtatcaacaaagcactgattgtggaattcatgccaa

SEQ ID NO: 248090 - DNA, 596 bp, Homo Sapiens
  misc_feature (489)..(489): n is a, c, g, or t
  misc_feature (513)..(513): n is a, c, g, or t
  misc_feature (527)..(527): n is a, c, g, or t
  misc_feature (530)..(530): n is a, c, g, or t
gttttggtatagaaagtggggctgatccaacaattgaaactgactctggatataattctatggatctagctgtagccctaggtatagaagtgttcaacaggttattgagtcacatttgttgaagctgcttcaaaatatcaaggagtagacacagtcatcagaaaatgtctgcccttttgtttacttcttggtccttataaatgatagttttgtttacttataaatttttacctcagttgcaatatttactggtttttagtaggttttaataaatatttctctgagtaattcactggtttataataaatgtaatactctttttataactatgttttactgtatatttaaaattataaattaatgttttcgtggcatgtaaatttttatggtacagatagttatcatcagtctttgtatcaagtgctgtaatttgacattttcagcaattattctaccctagtcatcttcactcgtgtattaagtcattcnctttatatagggtttgctataaanccctagaaaaaaantgntcttattgttgaattaaaaagtgcacagtgtgattgtttacaaaatgatattataaataaataaaa

SEQ ID NO: 248091 - DNA, 1356 bp, Homo Sapiens
  misc_feature (1301)..(1301): n is a, c, g, or t
  misc_feature (1337)..(1337): n is a, c, g, or t
ttggcaagcccctgcggacccgggatgagctggaccagttcctggacaagatggacgatcctgactactggcgcaccgtgcaggacccgatgacagggcgggacctgagactgacggatgagcaggtggccctggtgcggcggctgcagagtggccagtttggggatgtgggcttcaacccctatgagccggctgtcgacttcttcagcggggacgtcatgatccacccggtgaccaaccgcccggccgacaagcgcagcttcatcccctccctggtggagaaggagaaggtctctcgcatggtgcacgccatcaagatgggctggatccagcctcgccggccccgagaccccacccccagcttctatgacctgtgggcccaggaggaccccaacgccgtgctcgggcgccacaagatgcacgtacctgctcccaagctggccctgccaggccacgccgagtcgtacaacccaccccctgaatacctgctcagcgaggaggagcgcttggcgtgggaacagcaggagccaggcgagaggaagctgagctttttgccacgcaagttcccgagcctgcgggccgtgcctgcctacggacgcttcatccaggaacgcttcgagcgctgccttgacctgtacctgtgcccacggcagcgcaagatgagggtgaatgtagaccctgaggacctcatccccaagctgcctcggccgagggacctgcagcccttccccacgtgccaggccctggtctacaggggccacagtgaccttgtccggtgcctcagtgtctctcctgggggccagtggctggtttcaggctctgacgacggctccctgcggctctgggaggtggccactgcccgctgtgtgaggactgttcccgtggggggcgtggtgaagagtgtggcctggaaccccagccccgctgtctgcctggtggctgcagccgtggaggactcggtgctgctgctgaacccagctctgggggacctgctggtggcgggcagcacagatcagctgttgagcgccttcgtcccgcctgaggagccccccttgcagccggcccgctggctggaggcctcagaggaggagcgccaagtgggcctgcggctgcgcatctgccacgggaagccagtgacgcaggtgacctggcacgggcgtggggactacctggccgtggtgctggccacccaaggccacacccaggtgctgattcaccagctgagccgtcggcgcagtcagagtccgttccgccgcagccacggacaggtgcagcgagtgggccttccaccctgcccgggncccttcctggttgggtggcgttcccagggcaagcgntctcggcctctaccaacct

SEQ ID NO: 248092 - DNA, 416 bp, Homo Sapiens
cgtaggggtgctccggcggccccaaaacaccgttgtaacctgacaaggtggtggcaaacggggtaagccgggaactcggggcgccgcgctcttacgtcttctccggagttcaaccggtatctcttcaactgtggagaaggcgttcagagactcatgcaggagcacaagttaaaggttgctcgccctggacaacatattcctgacacgaatgcactggtctaatgttgggggcttaagtggaatgattcttactttaaaggaaaccgggcttccaaagtgtgtactttctggacctccacaactggaaaaatacctcgaagcaatcaaaatattttctggtccattgaaaggaatagaactggctgtgcggccccactctgccccagaatacgaggatgaaaccatgacagtttacc

SEQ ID NO: 248093 - DNA, 750 bp, Homo Sapiens
  misc_feature (322)..(331): n is a, c, g, or t
gtgattttgttaaatttttaaatatcttcattttgatctatcattaatggagaaaatattccgtctaccatgtatataaggactttcagcagatgaaatgcttaaatagtttaagggtggaaatgaatacagcaattagaaataaggggttgataaaatatgcatttagttttgctgttacagttaaagaagcattttttaagaaagactttctcatttatctactttgtgcaataaaacttaatttttgttgttgtgatttatcttacaaaggatactgtatactgttctctttcccaaactaaagtctaaatttgcactnnnnnnnnnntcatgcatgatgaaaagaccagcctacttaaatgtgcttggagtcctttcatgttggcatggatcaaagcctgagtatcccttcaaacattttccagtttgccagatccagataaacagacttgtaaatatactttggtaaaaatatgaagtgatgaattacttaactgctgaatgataaacagatggcatggtgtgctgagaaataacggattatgtgctactagagggcaggaactttcttttggacccttcagaatgcctggtgtagaactatacattaataaatgtttattagatgaaagaacacatgaatatgtcattaattagctttccagtttcaaaattagtgtcaatagcatggacgtaagattattgcaaactgagaaagggacttaggggactcagaaattataaatc

SEQ ID NO: 248094 - DNA, 184 bp, Homo Sapiens
ttttttaactgtagaaaagaaatattttattgaaacagtttctcaattaacaatggagcaaagtacaatttgactcaaacctgtccaaccagcatcaacagctactgaaagatttcaaacatacagaagaggtgggggtggggtgaggggtgggacccttaggtccatcgtctgccaatgtggc

SEQ ID NO: 248095 - DNA, 682 bp, Homo Sapiens
aaaccaccccagggctattatatttttgttatagcagcctgaacaaagacagctttgattcttaacatatttaatgaaactcgagcttcataaaccagtgaaatgcctacccctatggagacggggagctggtcatgggacccaggtgcctggaggacatcccagtggctttgaaggctccagcctgtcaagacggtcaatattagcccttctgccaacatctggcaatgtgaggctggggtggacgttggcctgatgttgccaggagtaggatgctgatgctgccagagagtaggtgggctccaaaccccaggcttctcacttgcttactaagcacagcagtctgaagcttgggacctggcagtgcgtctttggagaaggcaaaaaaagccacagcagcaacacttaggagcaagacccttcccgctctccaccctatttcctcccctgaagaagagcaacagctcaagctctagcatggcacagaacgctaggttgggccaggcaagcagccatggtggggccaggtgaagcaatgtgggtctcagcaaggaacccctctgaaggtggcagtggctcccagggctgctgcacactggacaccacaactttggcatcagctgcatggtgagctgcagagtggtcagaggggctggggccctgccaagagagcaaggccaga

SEQ ID NO: 248096 - DNA, 1256 bp, Homo Sapiens
ggccgccgcagcttttctgcctccgcattcgggcactaaccaacctcccggcgggcgcccagcccgagtttacctgcaaaaatgcggtccctgggatgccttcgcgtcttctcttccctcgggtgacttgaggtttgtggtaaatatgccagctctagaacacatgaatcagattttacacatcttgtttgtatttttaccctttctgtgggcacttgggactctgcccccacccgatgcacttctcttatgggcaatggagcaggttttagagttcggccttggaggctcatctatgtcaacccacttacggttattagtaatgttcatcatgtctgctggaacagctatagcatcatatttcattccaagcactgttggtgtggttcttttcatgactggatttggtttcttgctgagtctgaacttaagtgatatgggtcacaaaattggaaccaaatctaaggatttacccagtggtccggaaaaacatttttcatggaaggaatgccttttctacatcattatattagtcttggctcttttagaaactagtttgcttcatcactttgctggcttctcacagatttctaaaagcaattcccaggctattgtgggctatggtttgatgatattacttataatactgtggatacttagagaaattcaaagcatatatatcattggaattttccgaaatcccttttatccgaaggatgtgcaaactgtgactgtattctttgagaagcaaactaggctcatgaagattggtattgtcagacggattttgctaactttagtatcaccttttgccatgatagcatttctttcattggacagttccttacaagggctccactcagtgtctgtctgtattggattcacaagagcctttagaatggtatggcagaatacagaaaatgctttattggagacagtcattgtatcaacagtacacttgatctccagtacagacatatggtggaacagaagcctggatacaggactcagactcttactggttggtatcatacgtgatcgtttgattcagttcatctctaaattgcagtttgccgtgactgtgcttttgacatcatggacagagaaaaaacaacgtcgaaaaacaactgccactttatgtatactcaacattgtcttttctccattcgtgttggtcatcatagttttttctacactactctcttctcccttactccctctcttcacccttcctgtgttcttggtggggtttcccc

SEQ ID NO: 248097 - DNA, 715 bp, Homo Sapiens
catttactaaaagtttatttcaaatctgcctccaagtccatgtgttctgaaaaggacagagggggccttggagtgcagccagatggaaggactttgaaggctgtccaagtgctgctttcagagtgcaccaagtttttattgtccctgactgtggctccctgcctgtttgtcaggcgggagcctggagcctgcacagggacagagctggtttcatccggcactccctagccctggacaccctccttgtctcgcctgccctcctgcaggccttcactctcccctgagggttgtcctggcccggactgtggggagcacctccaccccccggagcaggtgcacacccaggtaagcaggtccaggggctggggtgggcagggctagcttttggatcctgagtgtcactactctctcctcccagggatgccctggacctaagtgacatcaactcagagcctcctcggggctccttcccctcctttgagcctcggaacctcctcagcctgtttgaggacaccctagacccaacctgagccccagactctgcctctgcacttttaaccttttatcctgtgtctctcccgtcgcccttgaaagctggggcccctcgggaactcccatggtcttctctgcctggccgtgtctaataaaaagtatttgaaccttgggagcacccaagcttgctcccaacttttttgtacaaagttggcttttatgg

SEQ ID NO: 248098 - DNA, 509 bp, Homo Sapiens
gctctgtgtttagaaggaatatttttaagagtccagctttttcatttccacaatttcctatatccagatttgttttgacaatgtagtttggaagaactaagattctaatctctgaaagaaccttattgggcctttctaaaacttaagagtttcctttgttgcttcaaatatttgaacattatgttaaagatcaagtattaattttagttgtactctagaaagctaaagtgccacattcggggctatttttatgattcagcaatcttttctaaattgtgtagcatgtgtatgagactatttatacccaaggatatgaaggaacataagtgactacaaggctctaataagccacggtggcaggaggttcaagcggttctgttcactaaatttttctcctgtaagctttgaatggaaacttctgtatcacatgatgtgtttcacttatgctgttgtgtatatacctaatatttctatttttgattttattttaatacacctcgtccaataac

SEQ ID NO: 248099 - DNA, 614 bp, Homo Sapiens
ttggtccctttcttcatgggagatggtgtggtaattgataatcacaccatctccctttcttcatgggagatggtgtggtactaagcgctagaggaagcagccaagtcggttagtggaagcatgattggtgcccagttagcctctgcaggatgtggaaacctccttccaggggaggttcagtgaattgtgtaggagaggttgtctgtggccagaatttaaacctatactcactttcccaaattgaatcactgctcacactgctgatgatttagagtgctgtccggtggagatcccacccgaacgtcttatctaatcttgaaactccctagttccttcatgtaacttccctgaaaaatctaagtgtttcataaatttgagagtctgtgacccacttaccttgcatctcacaggtagacagtatataactaacaaccaaagactacatattgtcactgacacacacgttataatcatttatcatatatatatatacatgcatacactctcaaagcaaataatttttcacttcaaaacagtattgacttgtataccttgtaatttgaaatattttctttgttaaaatagaatggtatcaataaatagaccattaatca

SEQ ID NO: 248100 - DNA, 2164 bp, Homo Sapiens
  misc_feature (277)..(305): n is a, c, g, or t
  misc_feature (324)..(554): n is a, c, g, or t
  misc_feature (605)..(616): n is a, c, g, or t
  misc_feature (1233)..(1254): n is a, c, g, or t
ttggcaaaacatgtgaatactaccaagtttctgtccccaaagtcaggcatcactgctagtcttttgggacagatgggacagatgttcactttaatgttttacttgaagttttactgctctttgccatgtggtaaaaagaggctgagacatatttaagaattccaagaggatattatgtgtcagaatttcagacactgatgagaagtttttaattgttcttttttatttgattttggaattcaggtgcactctattcaagtgcaaggatatcagaagnnnnnnnnnnnnnnnnnnnnnnnnnnnnncgagatggagtttcactcnnnnnnnnnnnnnnnnnnnnnnnnnnnnnnnnnnnnnnnnnnnnnnnnnnnnnnnnnnnnnnnnnnnnnnnnnnnnnnnnnnnnnnnnnnnnnnnnnnnnnnnnnnnnnnnnnnnnnnnnnnnnnnnnnnnnnnnnnnnnnnnnnnnnnnnnnnnnnnnnnnnnnnnnnnnnnnnnnnnnnnnnnnnnnnnnnnnnnnnnnnnnnnnnnnnnnnnnnnnnnnnnnnnnnnnatgagccaccaggccggccccaggattttatattaagccttcttgctctcnnnnnnnnnnnnggttttaactattccatttccagatgaatcccatgagcgctgcttactgttgaataccaaggtctagggctctgcttcctgtagacacgcacacgttgtctccatccaatggccttttctgaagttacagaaaacaccaacatgggagggagtttatgaagcaaaggcaaaggcaacacgtctgctagcttcagggtagcaccgtgagaaatgggctgtattgatactgtgaatgtttgttttccaagctgttttatacaggtttgttttttcatggtgtagggtatttatgacaaagtaaatgttgtgaaggttaaagataaattaagattatccaccaaatgctaaaaatactgatgtgtaaatcacctttatcgcctcacctcttctacaagcttttgtggcttgagggcttttgtttttggcttttgtctggatgaaagttttgcccagttgtgttttaaaaacaattcctcatgaacactaagattaattgtgtctgtatctctggaactgggtgctcatgttggttttaatgagcttgcaacccttccccgtttgctttgtttaaggaggtgcctctgttctttgtggaggagtgaaatggagctttaatnnnnnnnnnnnnnnnnnnnnnnttgcacacacgcgtgtgttattgtagcaataacaaaaagtagccatctccttgttccagctgaaaacctgctgtgagagttttgacagagcactttattttcgtcaagtttcaagtctgagttcaaaaccagccctgatcccttatgaccaactgctactcgaccagtcgccactcagtggccacctggtgcccgtttagatttttgcttgggttttactggccacctctatagacgagagttgcaaagttgctttgagcagagagggaaagattaatttacactgctggccaccgaaggcaggtgtttcctgggtagtaatctcacggctcttgatctggaaacttcagagtacaaattggtggatggtggaaggcaggacacgtatctctgtctgacggaaaacagacctcggggctggcgtaaaccctgctgccaggccctctccccactgccccaaaccggcctagacacgaagaccaaagcagcctgcacagggcaaggcccccgcggaatcctgcagagcaaactcaggttaacttgggtccatgaccgtttgcattcgaaacacaatacactgcctcgttctctcagttagcagctgggcagcagcgcaccattcatcatttaggcttgtggtttgttgtttactctaccaatgttatgtcgaaactgcattgtaaaagagagaagaaaatggcaggttttccaggtccacggaaaggtttggcctgacgctggagtgcggtgatgaacttacgtgacaatgattgtattcctcagtagcactttaaacgccgaagacagccctgcagcaagcctgcacacgggcttgggtgggttcctttggagaagatgtggctggaacacaaacaatctttgaaagaaataaatgtgcacacagaacact

SEQ ID NO: 248101 - DNA, 329 bp, Homo Sapiens
  misc_feature (59)..(59): n is a, c, g, or t
cctgtggggtaatcatattttagttattacttgttaaaagggtaactgaacctctgttntctttacccaagtcgctggttggccatttctccaattgatgaactaccattggttttagctctttctcatttgggattcccctcaattgcttacatgattctggtacttagagtctaatagagttgctgtgaatatgtagtgctgtacataatggcagttttgtaaatgtgagataaccttgaatatgttgtggtttgtatacagagccattagtattgttattttggccacttttttattcaaaataaataacataattatttgtaaaa

SEQ ID NO: 248102 - DNA, 657 bp, Homo Sapiens
  misc_feature (140)..(148): n is a, c, g, or t
gaggtttcagtgtggttatttacaacagagactgtaaaataagtggtagaattagatatgaagctgaaagaggcacagctttccctttcttgaatacactgtaaacggttcattatgcatgcaggacattgcactttacnnnnnnnnnttaccttgtttagacaaagatagtacttaaatagtctccagcgaaatagagttctttcaaaaatactttcccattcatcctattaaccattaaagattttttttgtatgtgtctcatttacaaaagatccttataccttgtttcaggtccttcataatttatacgtacagtaatgtacagcacagcaaaagactgcaaaaaattatttgtaaagccaacgcaatagatactagaaatcgaaccaaggcatttaacatcatcttatccattctgattaaatacgagatggacgctaacgagtgtgtataccagtgatgcagaagaccgtggacgagcgagtggctcagaggcagctgctgccccacgccacgagttctgttattaacacaacaggaatctgtatatatatttgttattattttttggtggttttgttaaataacaagaggaatatgatgccgccaaaatgactatacgtttttaggtggcaaccaaggggtgagccttta

SEQ ID NO: 248103 - DNA, 1027 bp, Homo Sapiens
ttttagcttttgatcattttattcacaaaatataagcgagacttacatccctttctggtgaaagttttcaaataattttatgggtagggccttgagatgtatcaattataaaacatgttaaaatggaaaacattttttaaatttacaaatacaaaccaatactttttacaagaattctctataaagtttcgtcaaagtaaaaaataatttgtttcaactgaatataaaggcatgtccagtttatgtcattttgtagaattatttttgttttgctggagacttttctctttcgcccggtcatgatttttctttgattctctggattgttcagagtatctgctagatttttcccatcgtctctcggcaccattttgatatctatcttcatcacttcttgagcctgagtgctttctattcatttcctttgactttgatctatcttttcttctgaaattttcactgtctttaattcggtgtgtatgcttctcattttcagaaaaagaatttcttctctctcctctcttctttttgggatcaccatgcttattttccaaatctatatgcatttcttggtctctgtcattcgcaactctactgtagttatttcgttcagaaggaacatctttgtctgatgtgtactttgttataggatctctccaatttgaacctcttgaattttgatctctgtgtttttctgaccttctttctctctcagtccttgtttcctggtgcccgtgttcttgtcttctttctttttgtttcttatcatttgtttgctggtttctgatcaatttatctacctctttacttctggtcttcccatgtcccttctttcttacatcattagctgcgtgtgtaaaataaaagacagttagcttttatttcaatcttaatttcataattataacaatcacatttactgatacagtgtaggtttactaactcagataaactaggtgcaaagccaaattgattgaatagaaagtctgatgacacagagtcttaccaaatgcttaattttatccaa

SEQ ID NO: 248104 - DNA, 449 bp, Homo Sapiens
  misc_feature (289)..(289): n is a, c, g, or t
  misc_feature (371)..(371): n is a, c, g, or t
  misc_feature (405)..(405): n is a, c, g, or t
  misc_feature (411)..(411): n is a, c, g, or t
  misc_feature (419)..(419): n is a, c, g, or t
aactttaaaacttccgtcttctgctttattgacaggtaaattgttcaaaaatgttctcacaattcaataattaattacaaagactgagacttacattaaaaaagtaaaaaccagaaccccccaggtgcccatccagcagaaggcccaggaggcagttggggtggcagggctaggcggtgctgggccactcagtgccgacttggggaagtgcacgtcctgaacagccttgccaagcagccgaccggtgggaggacaggggaagcctggcccaagctttggacaagctgtntctgccgccacagttaatcacaagcctctgacgacacagggccacagagctgggtcacttcaacatctgggtacaaagggtnagggtgaaattccacggcggcagggggtttgctnttgccntggggccnggggcagttttgcagggattttttttgggt

SEQ ID NO: 248105 - DNA, 1349 bp, Homo Sapiens
ttggttctttcatgctgactggggaagatggcagcagacgctttggctactgcaggcgcttactgccaagtgggaaagggccccggttgccagaggtgtactgtgtcatcagccgccttggctgcttcggcttgttttccaaggtcctagatgaggtggagcgccggcgtgggatctccgctgcattggtctatcctttcatgagaagtctcatggagtcgcccttcccagccccagggaagaccatcaaagtgaagacattcctgccaggtgctggcaatgaggtgttagagctgcggcggcccatggactcaaggctggagcacgtggactttgagtgcctttttacctgcctcagtgtgcgccagctcatccgaatctttgcctcactgctgctggagcgccgggtcatttttgtggcagataagctcagtactctctccagctgctctcacgcggtggtggccttgctctaccccttctcctggcagcacaccttcattcctgtcctcccggcctccatgattgacatcgtctgctgtcccacccccttcctggttggcctgctctccagctccctccccaaactgaaggagctgcctgtggaggaggcgctgatggtgaatctgggatctgaccgattcatccgacagatggacgacgaagacacgttgttacctaggaagttacaggcagctctggagcaggctctggagaggaagaatgagctgatctcccagcgactctgacagcgatctccgacgatgaatgtaataccctcaatgggctggtgtcggaggtgtttatccggttctttgtggaaaccgttgggcactactccctctttactgacagcacgagtgagaagggagagcagggcctttcagcgtagagagcgcttccgcaatatctagtgggcctccaaagagcatccgaccgtctttacttgagtgattttgatagtgagatctcaagatgcttcgcgtgtgcttcattcctaaggacaatgggtagtctgatgcaaagtgtcgggggtcgaataggggtcacttaattgcacgcagtcggtaagtggaggcaacgtacatatatcaaagacactgcccgagtacacctagagccattgagatgagaactgcaagtaacgcttcgtctccggtgaccgttatggtgcagacggagaatatgaaagctttctgtaccacgagacgcataagaagtatgagaggcctttcctttctcatgggacgtcagggaaggtaccaagtagaccttagcagaagactctagaaatgcgcctggaggtggatgaaaaggaccccagcctggggaaccctgctgagagcatg

SEQ ID NO: 248106 - DNA, 491 bp, Homo Sapiens
gaaatgacctttccagatatttctatggaattcagtgccattttctgccgctgttctcaccacattcattcatcatgtttagttttaaaagtaccagattctgtcgatttctccaactgaactctgaaatctttgaggtcagggagcttgcctcattctattttgtattcccagtacgtgacacatggctggacacaccagaaattgtccgatcaagtttgtgggtattaagagtggtcaaagacgctggggagggcagtgctgggagaagggcagcgcgcgtcttggcgaccccagcgcagttcgaactactccggagtctggtgtggagccgagagggaggcccgcacttttctccccgcggagctgcgctgagtctgaaataggtgtacgcgtcagcggggcaggaaacggaaagacagtgcagtaattggtggaaagctggaagtgggcacctcgagggcctcagccccacgaacacagtcacccag

SEQ ID NO: 248107 - DNA, 934 bp, Homo Sapiens
ccttataaaagccaactttgtacaaaaaagttggccattcttccgccagggtcgcccaggcccaccgcccccgcagccgccgcctcctgctcctttcggctgtccgccaccgccgctgccctccccggctttcccgccgcctctcccccagcggcccggcccttttccgggggcctccgcccccttccttcagcctccgctggctctgcagccccgagcctccgcggaggcctcccgcggcggaggcggcgctggcgccttctacccggtgccaccaccgccgctgcctcctccgccgccccagtgtcggcccttcccggggaccgacgccggcgagcggccgcggccaccgcctcccggcccggggccgccctggagcccgcggtggcctgaggcgccgccgccgccggccgacgtgctcggggatgcggccctccaacgcctgcgcgaccggcagtggctggaggcggtgttcgggaccccgcggcgggcaggctgtgcggtgccccagcgcacgcatgccgggcccagccttggcgaagtgcgcgcgcgattgctccgggctctgcgcctggtgcggcggctgcgcggcctgagccaggccctgcgcgaggccgaagccgacggcgcggcctgggtcctgctgtactcccagaccgcgccgctgcgcgcggaactggccgagcggctacagccgttgacccaggctgcctatgtgggcgaggcgcggaggaggctggagagggtccggcgccgccggctgctgcttcgcgagagggcccgggaacgcgaggccgagctggaggcagaggccgcgcgggcagaggaacgcgagcatgagattgaccgctggagggtgaagtgtgtgcaggaggtggatgagaataatcaggaacaagaactctaagcagccgttgatgctgtactatctgag

SEQ ID NO: 248108 - DNA, 441 bp, Homo Sapiens
agagagcgagaaatagaaaactacacatgaccttaaatataaatgagattttcgtctcccatatttatcttgggcaagttgtgggattcatctctatttaaggtagaaataagcacatttttagtgggaaaacaaaagcagctttgcaagaaagtcctgcccccataactgacaagcgcaagactcactgcaaggccaggcatggcgtgaggtctccagagcgggcagaaggctgcaacattaatacacggttcattacaaccgaattagaggctggttactcagtgctctagaagtacgggttggtcagcagcaaactgattttcccatgaaagcaggaagtgtcctgttcaaccctagaaaatcactaattacggttgctgaacctacttaacatgcagagccccctacttcttgctttctgttttaactctagtatct

SEQ ID NO: 248109 - DNA, 1183 bp, Homo Sapiens
  misc_feature (573)..(603): n is a, c, g, or t
gagatgtttgctttctagcatgtatacaagttctgctgaatgcttaaggaatgccctttacatattctaaccatcgagtattttccagtgaagataaccatttctcttcagtttcttcaaaaggctcattaacgcatagctgcttcagttttacaaatgctgcctgtacttcttgaatattaggcaaggtcttatccaaatctgatttgtaaacatcacttctctgtgggtgacttttagttattgcattacaaatcctctggtcaatcttcctctgctgcagcacgtctttgatgagggccattcgcacaagagcactgccgttagagtggctccagcaccagagtggcatccttctcccaacaaaagaatgggaaaagatctttagatcttggtctgctaaagaacttggcactacaatgtattctggaaggcaagtggatatcatgtaaccctcgttaatagaacaaactctccacccggaagcacctgtcctcttgatttctctgtcccaatccgagtaagtttcaaagagtggagttttctggctgctgccaccaccagctccattannnnnnnnnnnnnnnnnnnnnnnnnnnnnnnagggaattccattaattttgtttgctgaattgtggtattttttcccaacatattcaaatgcaaagagtagctggaggtctgttggctgggaataatgagctattgcaaggcatacctttttagcactttcgggacctgattcatcaaagcgagatctgacaattctgaaatctttacaataaataattaactctgttggattaaatttcagtttctggttggggcctaggactttctgcttcctcttgtggtcgtttactgtgacaatttgctcaatacatgttaaagggacatcgtgttcaccaagaagaaggtttctgtaatggaatttctgtaatggcattgggtcatctgtaataaaggagattttgaagttactgcatatcagctttccccacaaatcgtactggcttgtgtctgttgcaatgcattttctcacaaaattgacttcatttacgacaatttctcctggcaaaaggactggctccagttttttaatcttcggttccgaattgatcttatcgtcagtctggggcggtggcaggaggtaggacctgaaggtgggtttgggcggcttgag

SEQ ID NO: 248110 - DNA, 583 bp, Homo Sapiens
ggcttgccttgtgtcattaaatatatgtaattacaaatcactgtcaattttatgggaagctcatagtattttaatattttattgacatggaactcttgtttttttaatctttagaacttaaattctacaagaattttaaatattttctgtatataattatgacattgtcacacagaaattacacattttatgtgccagaagccttaaacatctttctgtgaaaatgctgatatattgtgacagttatttcacatttgatatgtagagaggaataggggttagtttatgtttatattgaaaaactttaaagactatttggaagttccagaaattctggttttaattcaagtaaaatgataaaatagtcattatatagttcagatgctaatattctaagtaataatatatatttacattgaagctaaaactgttaagcaaaacaatgcccatttgtcggcttacagctcttccggagtctagagcctgttggtgttctgtccctactttaagaatttaattgctcacttattctgaaagctttgttcaaacaagatgatattaaatttgttaaacactaaaacta

SEQ ID NO: 248111 - DNA, 559 bp, Homo Sapiens
  misc_feature (126)..(146): n is a, c, g, or t
ttggcacagatccaacctagaatcagattatctctttttttctaaaggagagaaagacttagaacatacacagatcctaagtagaaccaggtaattgtctctttttctaataaggaatttgggtannnnnnnnnnnnnnnnnnnnnaaaaaataacctagactatgcaaaacatcaaagtgaattttccatgaatgtttttaatattctcatctcaacattgtgatatatgctactaaaaaccttttcatatacatcttacctcatttcaagtgaattattttaatctttttctctctttccaaaaatttacaggaatgtttagtgtaattggatttcgctatcagttcccatccttacgttttgatattcaatatctgatagataccctgcatctttggtcatctaagatttgtttataaatgtgcaaattatttagagcttagactttataagcattaaataaaaactaatggaggtaaaacctaaatgcaatgtgaaataattttagtgttgaaactgtatgtgtatttttattctaataaacttttgtgttccag

SEQ ID NO: 248112 - DNA, 389 bp, Homo Sapiens
cttttctacgagatgaccttgacataccaagtggtttccaaatggtcaacttacttaaaaatcttttcctgttttgagatagtcactggatcaagaatgcattaagtgtggttaccctaaatgttcccttttaaatctgcttttcatgttgaaaatcagttttaatgtagagaaagaaatgtctgccatttgctgcttaacaggctttgtgtcaggtttttcagtgttggcaagctcttggttctacgtggatgatttctacgtggatgttctcctgagtccttaattctgcctaaatagaatttctttatgatcttaacttcacttccattaggtgaagattgaaaggataggattgacatacccaaagtagccagctggtcttcagc

SEQ ID NO: 248113 - DNA, 773 bp, Homo Sapiens
ttgttctttccaaaactttatttagagaaactaaaatttcgtaattttcgtattatacaaaatattattttgagccattaacaaaagggaatataaaaaccatagtttgtaggccatacaaaaataggcagcaggccagatttggcccatgggtggtagtttgctgacccctgctctagattaacaaatttacgggctttggaagctttgtggggcaaggaggcttgatatacaggttggtggtgcagaacaaagaggaaatttctaagtataatagaaaaaagatgtaatgctgtccttcatgtatcaacgctggattcaactatgtgcaaaacattttatcatatgtcgctggaatcaaagatgcagaagtcacagtctctggtctcgaggagcatatacttctccatggtagcttagaaatggaaagtcttccttcaaagtacaatacatccttctcagactttgacaatgcacccgtgcgtgctcatctgtgaggcaggtagtttctttggcaactacagctgaggccaaacatgcattattatcttgaccacctgtgcttcttcccctccccagtaatcataccagtttttctcctggtctccaaattattctgttttgcattatcattttggggataatacttgggatgatatactaaaagtcaactggtcacatctttttaaaaattaccattttaattagtcttcagagataccctctctctcttaataggtaacatgcttgtgacacctgtgtttttttgccaa

SEQ ID NO: 248114 - DNA, 506 bp, Homo Sapiens
  misc_feature (431)..(431): n is a, c, g, or t
gaagttttagggacatttattgcaaagcaaagtaactggaacagaaatccatgcctgtaggccctgtattgatttgctggggctactgtggaaaagtactacaactgggcagcttacacaacacgaatatactgtctcacaggtctgaggccagaagtccaaaatcgaggtgtcgacagggttggtgccttccaagtgctgtaaagaaaagacctgtttcaggcctctctcctcagctcactggtgtctgtcttctccctgtgtgtttacatcacccttgctctgtatccgcctgcatctacattttttccttatttctctgtctccaaatgcagtcacattctgagctactggaggttaagatttcaagatgtgaattattggagagcacaattcaacttgaacaggtcccaaagcaactttcatatggntgtggtgtctctggtaccatgaaagaaattgtttaaaatgattgcatgattttggggccaagttctatctttcga

SEQ ID NO: 248115 - DNA, 857 bp, Homo Sapiens
  misc_feature (521)..(533): n is a, c, g, or t
  misc_feature (759)..(771): n is a, c, g, or t
tcattgcaactatcgtttattaaaaaatatatgtctcgttggaagaaacactggtaaacccactagtatcatgcttactttgaatctttgtttctcttccctggagagggggagggctgagcatggttgagactttgccacttagttaacatcagagaatcaacctcccctgctcacccctcctcaccagagtcacagtcggctgtcactttatccctttttgccttcaagccattgtactgcccagggaaagccgctgtcctttccttatcctcatcctgggtcccatgctttatacagttagcctcattctgctggttggacaactgttaacagagttcccggattcggctggtagtgcttaaagcatcctcaacattgcctcgcttgcaccagccctaacccagcgggctaggaaacaagtgcctcaatcctagggccaagcacttctctgttctcccctgcgtcgtccctccagtatggaggcgagggaggcacgttggcttcaaaggagcacagtnnnnnnnnnnnnnacctgaaccacacctgctgcctgcacttgtggcggtgaagattcccttgatcacagtcactgccatcagactctgggaaaaagcaacaaggtttcacagctcaccagtaagcgaatcttagctctacagctcaaatgtacagcataaagtctactttcctcttgaagaaaccataagctaccagctgttggggaggggctggagcagagcatatgaagcagctgcnnnnnnnnnnnnnccaaatcaaactcatgacgcagctggccaagcaagccaagtgctgtcccgccatcccagcacagaactggaaggcaagtgacccaa

SEQ ID NO: 248116 - DNA, 235 bp, Homo Sapiens
aaaatttaaactttctaacctatgtattcaacttctgtatttatatttaatcagtggttcatgttatatattacacccttaattagttaaatggaatgttggtatggtacagagtaccatattgctaagaaaactgttttataaaagatgtatatgtgtgaagacatgaaagtttaatgtacagaatggttggggaaatgcctatggtgaattaaagcttcatatctgctttctg

SEQ ID NO: 248117 - DNA, 883 bp, Homo Sapiens
  misc_feature (664)..(681): n is a, c, g, or t
ttggagtagaagtgggtcgtgcctattttgaaaccgaaaagaagcatttcacaattctagatgcccctggccacaagagttttgtcccaaatatgatttgtggtgcctctcaagctgatttggctgtgctggtaagaaagtcattttccagtccatctgtatatttgttagtagccccgcttatatctttaaatttgaatttatcttctaaaagctcaaattcaggttgcagtgaaatataatgatgtacacggtcacagttttcatcatactaatctctcttcaagaaatcttcaaaatttgatttacttctgaaaatacgtttcaccttttctctcctgttgctattatctattaccatgtcagaacttagtctccattaaatgccaagcccaccgttaggcaccatgggtaaaaaatgaataggaaaccatctgtttcatacggtcttcagtcattttgcgcttttcacaatgtactggtagtagatcacaattttttttcctttgtagttacaatagctagaaagtaaatgttggaattttaaaatatgcaggtatactagattttgggaatgtgggggattggaagcatctagacattgtttgatttgtgacattcaaaagcaggtacgtcataactcgtttgcttctattttcttgcnnnnnnnnnnnnnnnnnnctcgtgatataactgaaaggaaagatgttttactgccataagggtatgcctgaaggcgaaggagtaaactgtttcctttcttgcattaggtaatctcagccaggaaaggagagtttgaaactggatttgaaaaaggaggacagacagagaacatgcaatgttgggcaaagacagcagtgtaaacacctaattgtgctaatta

SEQ ID NO: 248118 - DNA, 854 bp, Homo Sapiens
ggcggacgaggagaagctgccgcccggctgggagaagcgcatgagccgcagctcaggccgagtgtactacttcaaccacatcactaacgccagccagtgggagcggcccagcggcaacagcagcagtggtggcaaaaacgggcagggggagcctgccagggtccgctgctcgcacctgctggtgaagcacagccagtcacggcggccctcgtcctggcggcaggagaagatcacccggaccaaggaggaggccctggagctgatcaacggctacatccagaagatcaagtcgggagaggaggactttgagtctctggcctcacagttcagcgactgcagctcagccaaggccaggggagacctgggtgccttcagcagaggtcagatgcagaagccatttgaagacgcctcgtttgcgctgcggacgggggagatgagcgggcccgtgttcacggattccggcatccacatcatcctccgcactgagtgagggtggggagcccaggcctggcctcggggcagggcagggcggctaggccggccagctcccccttgcccgccagccagtggccgaaccccccagtccctgccaccgtcacacagtatttattgttcccacaatggctgggaggggcccttccagattggggccctggggtccccactccctgtccatccccagttggggctgcgaccgccagattctcccttaaggaattgacttcagcaggggtgggaggctcccagacccagggcagtgtggtgggaggggtgttccaaagagaaggcctggtcagcagagccgccccgtgtccccccaggtgctggaggcagactcgagggccgaattgttt

SEQ ID NO: 248119 - DNA, 390 bp, Homo Sapiens
  misc_feature (151)..(151): n is a, c, g, or t
  misc_feature (323)..(323): n is a, c, g, or t
  misc_feature (339)..(339): n is a, c, g, or t
  misc_feature (365)..(365): n is a, c, g, or t
ttttttgtgcaaatattttttactttatttgtctcctttcaggagcctcacagacatatccaggtaaaaagatcgttaaataaatgccttcagccatcgcaatgcaaaaataaatatcaatcctccagacgcagtagcagccgcgctggcnccaaagtcccaacggccacggctaacaattataaaagtgttcagcgagagtgttggcgtgagtgtgaatgggtgtgcgctggggggcacggtggagcggtgtgcaaaatcggagttgcaaaccatcggacaagggcatggagtggctacccgccgccgactcagcgcgggcnccttccccgcacacantcacagcagagttcgcactggggagngttaaaaaataaacatttacaggtc

SEQ ID NO: 248120 - DNA, 474 bp, Homo Sapiens
  misc_feature (12)..(12): n is a, c, g, or t
  misc_feature (31)..(31): n is a, c, g, or t
  misc_feature (60)..(60): n is a, c, g, or t
  misc_feature (125)..(125): n is a, c, g, or t
  misc_feature (423)..(423): n is a, c, g, or t
gtgccaaaatanaattgactttatttgttcncctttcagaaccctcacagacataccccngttaaaaagatcgtttaaataaatcccttcaacccatcgcaatgccaaaaataaatatcaatccntcccagaacgcaagtaagcaagcccgcctgcgccccaaattccccaaacgcccacgccctaacaattataaaattgttcagcgagagtgttggcgtgagtgtgaatgggtgtgcgctggggggcacggtggagcggtgtgcaaaatcggagttgcaaaccatcggacaagggcatggagtgctacccgccgccgacttcagcgggcgcgcctccccgcacacactcacagcagagttcgcactgggaagagttaaaaaataaacatttacaaggacgaggaaagcggccccgcttccnggcgctcccgggccagggcgagcgcggcgagggcgcaccgaccggttcgcc

SEQ ID NO: 248121 - DNA, 358 bp, Homo Sapiens
  misc_feature (215)..(215): n is a, c, g, or t
cgggctgagaggatttctttatttcgcgttcagacccaacacactcggacaccttggggccctgtgagcgtaagcagggtggtggcgtccgtcccggggaggccccactccctggggaggaaatacacggcagggggccgcacccagccccccacggagggacccgtgttgctctaacagggacactgaagttgcctctgccgccccgtgagctngttgagcggccccagacccagcccagccaggccagaggagcctcccaggggccctcaggtggtgaggtgggggcttcccggcccgggtgcccaccggcccttctagctgcctgtgctgggccaggtgtcctctgaggccggca

SEQ ID NO: 248122 - DNA, 1027 bp, Homo Sapiens
  misc_feature (177)..(185): n is a, c, g, or t
  misc_feature (631)..(631): n is a, c, g, or t
ttggataaagtacccatctagtacttgaaaaagtaaagtgttctgccagatcttaggtatagaggaccctaacacagtatatcccaagtgcactttctaatgtttctgggtcctgaagaattaagatacaaattaattttactccataaacagactgttaattataggagccttaannnnnnnnncatagagatttgtctaattgcatctcaaaattattctgccctccttaatttgggaaggtttgtgttttctctggaatggtacatgtcttccatgtgtcttttgaactggcaattgtctatttatcttttatttttttaagtcagtatggtctaacactggcatgttcaaagccacattatttctagtccaaaattacaagtaatcaagggtcattatgggttaggcattaatgtttctatctgattttgtgcaaaagcttcaaattaaaacagctgcattagaaaaagaggcgcttctcccctcccctacacctaaaggtgtatttaaactatcttgtgtgattaacttatttagagatgctgtaacttaaaataggggatatttaaggtagcttcagctagcttttaggaaaatcactttgtctaactcagaattatttttaaanaagaaatctggtcttgttagaaaaccaaaattttattttgtgctcatttaagtttcaaacttactattttgacagttattttgataacaatgacactagaaaacttgactccatttcatcattgtttctgcatgaatatcatacaaatcagttagtttttaggtcaagggcttactatttctgggtcttttgctactaagttcacattagaattagtgccagaattttaggaacttcagagatcgtgtattgagatttcttaaataatgcttcagatattattgctttattgcttttttgtattggttaaaactgtacatttaaaattgctatgttactattttctacaattaatagtttgtctattttaaaataaattagttgttaagagtctct

SEQ ID NO: 248123 - DNA, 533 bp, Homo Sapiens
gtgtgaattatgattctttattctgactggtgcctatgaaagcaatagggaaacatgtctactaatgagttttgtctttttccacagagaaagcttggactatatttctggaaggcacccactgtggggtgctgcttgttctgtggtgttgctgtgcagcggccgggaggagcagagggctgcaggagaccctctgagattctgctttgtgcacatgtactgccagcgcatggcattcttgagcccataaagcaagacttctcaggccctgtggttagcatcccccacacccatatcagccactagcattttaaagatggttttaggtgggtacataagggcccagaaaaaaagttttacaattattttaggggcctgaaccctcatgtcatagctaatcagtgaatgaagttaccttttaatccaagagcctcatccctgttttcttggtactaaaaactttcaccaatctgaatcctagtgtcatactctaaacacgaaccccacccatcccactgtcaccagatggagat

SEQ ID NO: 248124 - DNA, 524 bp, Homo Sapiens
caccatgctccagaagataagacattgagggttacattcagaggacaggacaatgggcggcagattctgggacacagaggatgagctgaggaggttgcagagcagaaggaacacagactgccccctggccaggaggagaatggggaagacccgtatgcaggctccacggatgagaacacggacagtgaggaacaccaggagcctcctgatctgccagtccctgagctcccagatttcttccagggcaagcacttctttctttacggggagttccctggggacgagcggcggaaactcatccgatacgtcacagccttcaatggggagctcgaggactatatgagtgaccgggttcagtttgtgatcacagcacaggaatgggatcccagctttgaggaggccctgatggacaacccctccctggcattcgttcgtccccgatggatctacagttgcaatgagaagcagaagttacttcctcaccagctctatggggtggtccgcaggcctgaagtatgtgctat

SEQ ID NO: 248125 - DNA, 1091 bp, Homo Sapiens
  misc_feature (472)..(551): n is a, c, g, or t
ttgggtcatggtggcgcctgtgtggtacttggtagcggcggctctgctagtcggctttatcctcttcctgactcgcagccggggccgggcggcatcagccggccaagagccactgcacaatgaggagctggcaggagcaggccgggtggcccagcctgggcccctggagcctgaggagccgagagctggaggcaggcctcggcgccggagggacctgggcagccgcctacaggcccagcgtcgagcccagcgggtggcctgggcagaagcagatgagaacgaggaggaagctgtcatcctagcccaggaggaggaaggtgtcgagaagccagcggaaactcacctgtcggggaaaattggagctaagaaactgcggaagctggaggagaaacaagcgcgaaaggcccagcgtgaggcagaggaggctgaacgtgaggagcggaaacgactcgagtcccagcgcgaagctgannnnnnnnnnnnnnnnnnnnnnnnnnnnnnnnnnnnnnnnnnnnnnnnnnnnnnnnnnnnnnnnnnnnnnnnnnnnnnnncccagcgggagcatgaggagtacctgaaactgaaggaggcctttgtggtggaggaggaaggcgtaggagagaccatgactgaggaacagtcccagagcttcctgacagagttcatcaactacatcaagcagtccaaggttgtgctcttggaagacctggcttcccaggtgggcctacgcactcaggacaccataaatcgcatcccaggacctgctggctgaggggactataacaggtgtgatttgacgaccggggcaagttcatctacataaccccagaggaactgggccgccgtggcccacttcatccgacagcggggccggttgtccatcgccgagcttgcccaagccagcaactccctcatcgctctggggccgggagtcccctgcccaagccccagcctgaccccagtccttccctcttggactcagagttggtgtggcctacctggctatacatcttcatccctccccaccatcctggggaagtgatggtgtggccaggcagttatagattaaaggcctgtgagtactgctgaaa

SEQ ID NO: 248126 - DNA, 574 bp, Homo Sapiens
taaaataaacataagacacttcatttttatgtaagaaatttcagattagcataatgtgatttatgaaccatgacaattctcttaatatattactcagttataaaacatttttccttataagcccttcaacttacttctcaataatacatccttatatttatgaaaatgttaatattttgaatactttatttcatctttcataatgggcagaaacatactagcatttaataatatttcagcttttcttttcaaaaagaaacaccacaaaataggtcactgagaactttttgctgccaagatgaaaatgattatttgtcacactaatttaataagttttagaagaaaatatatatatttccttaatctatttccttctgaatttaaaccagcatgtaaagattataaaaaatagtctatttacatggcatagtatacctcagtgatatataaacaaggccataataaagcacagacacatccgactcctacggacacagctgagcagagtccacagacacaagagctaccgccgccctactgcacgttgtaggaactggcgaaatcctagagccaa

SEQ ID NO: 248127 - DNA, 402 bp, Homo Sapiens
tgatttatagtaacatctttatttcatgattaaaaacactgtgtgtgtttggttgtctggtagaatatgcacatcagaaacaacctgtagttctggaagcctctgggttgctataacaaccagacaaaacagtttaataacagctctaccgcaaagctggaaaactgacaaaaagatgagagctataaatgcaggtgtttgtcatataaatgtgaacaagtaccaaacacatttatttcttcaacaaatattcattgagtgccaatgccgcacctggtcctattgctaggaacttcgaaaaagataaatatggtccatgccatgacggcatatacattcttcttttttggtgacaacaggtgcacaccacatgcctggctaatttttggatttttagtagat

SEQ ID NO: 248128 - DNA, 264 bp, Homo Sapiens; identical to SEQ ID NO: 177756

SEQ ID NO: 248129 - DNA, 437 bp, Homo Sapiens
ggcttaatacacatttattctctgatagttctagaagtcagaagtctgacacaggtctcaatggacttaagtcaaagtattggcagggctgtgctcttttctggaggctccaggggaaaacccatttcctctccttttccagctttcagagactgctgcgttccttaagttcatggccccttcctccattgtcaaaggcagcagtagctgagtccttctcacgttgcatctctctgacctccttcaaacatctccttctgatctcttctctgcctgcttcttccacttttacggaccctgattattacactggaaccatcagataaacctgaatatattccttattttaacatcagttgatcagcaacctgaattccttgtataatgtcaattcccatggccatgaaacctgacatatccacaggttccaggggtct

SEQ ID NO: 248130 - DNA, 683 bp, Homo Sapiens
aacacttacatccatttatttgggaaattgcttcacctgtaaactcacaactgataaggcacattattgcaaaactgtcggggtggagggagggaggcaactctaaggatcctgaaaaggggcaaagggcacacacttgcgatgatgtggaaaacatgtttctccttccctccccctactccagaacaccaaaggccacagtcttcaaagtctgctgcctccttcccccactctcgttatcaaggcttcttttaaagaaacacgttttaaacaatgaaatcctcggtgtgaaaggatcataccataaccaaaaaccatcacctggggatgcactcttcctatggaacgtgagtaattcccaagaattcatgtagaacaagaggcatagattaaagtcttggcaagactcttggccaaaccaaatcatcaacccagcagatgatgcccaaaagcagcagtctggtaagtcctgatgagttactcctgtggggtgcaggatcacagggctggtcagtttaggtgccaaggtccttctgtctttggaagcattaatccaggtctgtaacaattctgtactgcagctacaggaagtaatgacagctataggccattaagatacaacacaacaaagttatcagaagccaaggtttcctctttgaattaaaagataaattaaaagccaa

SEQ ID NO: 248131 - DNA, 470 bp, Homo Sapiens
  misc_feature (336)..(345): n is a, c, g, or t
tttttaaagtttccccttttttagattatcttttcaaagccaatacccgggattaaaaaaatccctggctctcctggaggtcgagtaaaaatctaaaaatcctcccaattcctcccaaggcttcttggtaacttatttcagatgattggagaagtaaattgttaaaccctgttgagaggatttgatggtttctgagaaatactaggtacattcatcctcacagattgcaaaggtgatttgggtgggggtttagtaattttctgcttaaaaaatgagtatcttgtaaccattacctatatgctaaatattcttgaacaattagtagatccagaaagnnnnnnnnnntatgctttctctgtgtgtgtacctgttgtatgtcctaaacttattagaaaattttatatacttttttacatgttggggggcagaagtaagccatgttttgacttggtgaaatggggttgtcaaac

SEQ ID NO: 248132 - DNA, 514 bp, Homo Sapiens
ttgggttttcttgtcatcttgaaggctccatggaatgagataaagcattgacccaccacaggacatctcatgaagccatgttcagggtaggagctccacgcacatcaccacccattgtcaggtgctctccctcacccctgtaagccagacagtttgttcaaaacctgcagcaaagagaagcatcagtctaacaagccagaactcattttgtgccacccatttaggtatgcctgtttttgtcctcaatggcacccatgagctttccaatagtatagttttctttctttccttgtcctggttgaaggtaacgtgttcctagaaaagaaaatgctgcataggaaaactgagatgccttttattccaacgtgtttgatccctgtcactcattattctgtactttttattgtacattctattcctgtaattattgtgccctttaagtgttgtaaaatcgttttggaatttgtgcctgctagttatgcaataaacaggctctacaagtgtttttgtggta

SEQ ID NO: 248133 - DNA, 1162 bp, Homo Sapiens
  misc_feature (714)..(789): n is a, c, g, or t
  misc_feature (797)..(844): n is a, c, g, or t
ttagagggagagttttacaattaggacgtcctgttagctcaaaagaacatctaacagattcgttgacatggaattctttaatataagcaatcaccttacaaccatgctgagatataaaattgctatggtctatatttactatcattatatgatggtttgggggttggggaagtggatacaatttagatgtagcacacgaaacattttaaataagctagaaacagctcttttatctaaccacatttagtaattttatcccactagaattttgaggaaaacatgtcaatgactgaattagtatgatttttgacattcagattaatttggtttcctggctgttgcattatatatgcaacctacatcccaatgaaaccatggtaactgtcattacttgttttactaaaaactcaggtcacaaaatgatttctataggctgtttgattttcatccagttacaatttcacagcttttctatgttgtcaattctgatagccactttactcgttttgagggcccaatttatccacagagccattgtaacttttacaacttaggaattactaaccaagactgtcattaattaaacactttcacactttgctcctccttctacatgtactttaccctcaactctcaagagtaagagtctttgcttctccatgacatcatttatccagggagatgaaatatgccaattaataccagcaggaatcnnnnnnnnnnnnnnnnnnnnnnnnnnnnnnnnnnnnnnnnnnnnnnnnnnnnnnnnnnnnnnnnnnnnnnnnnnnnctgtcttnnnnnnnnnnnnnnnnnnnnnnnnnnnnnnnnnnnnnnnnnnnnnnnnagaacaatgcattttaaatatatttcctgaaataatattccttagaaaagatacagggtatttaattacctagattttaacaaaatattctttatagaagtaattatagtctttaccacagagtcaccaaatctgtacccaatcaaaacagagtcaaatagaccagctctcattcaactccattaggaaacaccaatttcacatagtacttctcttgatgtacagcagcaacctctgctggagaaaaaagggtatacttctaataacaaagcactgagctcaaacctgttttgaacaggaagaactgaaagttagatt

SEQ ID NO: 248134 - DNA, 814 bp, Homo Sapiens
  misc_feature (645)..(654): n is a, c, g, or t
ctttgtacaaaaaagttggctgcctctcttggaaagagattgaaaccttttttttaaagcacgatttagcatcctaagcttcctgagggtagagattgtatctttttgcgtctgcacaatggctagcacatgtcagcatttgacaattgttaaatgataacaagtgtgccccaattaaaacgtttttcctgggttgttttgttaaatttacaaagtaagccaagccttacggttaacattctcctctacaaccaagtattaaagccacatttaaaaagaccacatgaaatgctgattctaattgtgtgtaggtcttgaggattaagcacacaaatttcacaaacttctgtttgagtaaacaaactcagccttctgtaaatatacatgcaagtttggaaacagtaatactgtacctataaatatatgctgtctgttttgtgtacagtatgtaaaaactccttttctgccacactaaaaatgcaagccatttatgggaatcctaaaactagtattgaactaaaactttgctaatgatctttattagaggatcgtccaacttttcacttaccttgggttttcttttcaattcactcttacactagtctgcttatttccagctgtttattttattgagtcctgaatttnnnnnnnnnntattttgattcattttgtaaatacaagctgtacaaaaaagagagatttaatgttgtcttttaaatactccaattttcattctaatatgaatgttgttatattgtacttagaaactgtacctttaatattacattacctttattaaaagtgcattgaacac

SEQ ID NO: 248135 - DNA, 411 bp, Homo Sapiens
  misc_feature (19)..(19): n is a, c, g, or t
  misc_feature (63)..(63): n is a, c, g, or t
tgttcccaattgggttttnttttgaaaccaaaggggcttaaaaaaggcaattgggttaatggnccaaggccccctggatgaaatatcctgtgggcctggtttaatttctggtggcctcatggggtggttctaggactggatttcctggtgaggtccaagctgttgctgttgtcaaaatgtctggcccagcaggctctggacctgctgctgaaccctggcagaagccctggcaattttgcactgttgtgtacgcccctgctcctcgccctattctgccaccaggccacccgcaccctcttgccctctctgcccctccctgaaggatggtcttctcatctggacacccttggaagcaaatcctagttctcttcccacctgtcaacctgaattaaagtctacactgcctttgtg

SEQ ID NO: 248136 - DNA, 1239 bp, Homo Sapiens
  misc_feature (43)..(43): n is a, c, g, or t
  misc_feature (53)..(53): n is a, c, g, or t
  misc_feature (55)..(55): n is a, c, g, or t
  misc_feature (74)..(74): n is a, c, g, or t
  misc_feature (92)..(92): n is a, c, g, or t
  misc_feature (121)..(121): n is a, c, g, or t
  misc_feature (900)..(902): n is a, c, g, or t
  misc_feature (908)..(948): n is a, c, g, or t
  misc_feature (1163)..(1172): n is a, c, g, or t
aaaggaggggcccgagaccccacccagccccagtccagagttnggcaccacancngccagcatcttccgcacanccctgcagctcgacccgnagcaggagcagcagctgttccggcgcctngaagaggagttcctggccaatgcccgggcccttgcaggctgttgctagcgtgacccccactggaaccagcccctgacccagctcgggcccccgaccctccagctcctgactgtgcctattgttcctccagttcctcctcttcgtccctcagcgtcctgggtggcaaatgtggccaacctggggactctggccggacgcaattggggctgcctgggccccgaagccaagccctttccagctcctccgatgaaggcagcccctgccctggcatgggggggccactagatgcacctgggagccccctggcttgcactgaaccctcgaggacctgggcacggggtcggatggacacacagccagaccgtaaaccctcacgtatccccacgcctcggggcccccgccgccccttccggacccgcagagctggggacatggcatgccctgcactcagtcaccccgagggctgagccagattccctggatgtgatggacccagctcagctgtccccagaccccatcccttctccttttcctttgtggccttaacccttctgcatcagggagccccctctgcctcttgagtaccagacctcatgggaccagaccccttgggaccacatggcacaatgggacctctgttgtacattccggttgggggatgagcgttgctatttaattactaatattattgaatgccttagaggaagtggggcgagcccggtgttctgaagacctgtggcccagcagagcctctgacagtaaagttttgctcccagccnnnaaaaannnnnnnnnnnnnnnnnnnnnnnnnnnnnnnnnnnnnnnnnctcaaggcatctatgtcgggggcgggaaaaaaagtaatgaaatggcacctggcccatagttgtttcctgacccagctttcttgtacaaaggggaaaaatctgccgggcccccctaaagggagccgtattaatttccaaaagcccgggttaacctgcaattaatggaaccgggtggcgaaacccggggaatttaaccccccctaatggagggggcnnnnnnnnnnggggacccaaaggaatctttctgggaaaaccttttttttccggcgaataattcggcggcttgcaaac

SEQ ID NO: 248137 - DNA, 1455 bp, Homo Sapiens
ttggatccattcgccgtccctcatccggcacctgcgtgcactctccggcgtcccaagtgagtggaggggggatcccgactccagtccggggccttggccagcggagccgcgctattcggaagcgggaatcccactcagagcccgggcctgtaggggcggggcgtcccgggcacccgggattggggcgtctcccgtcgtgcaccggggcaccggcgactcacccggaaggagaagccgtgatctggctatatggtggggcgcgggcggtgtcgctgtggggagctggtgctgttctcaggagccagcctggatcatttgttggcagtacatattggctgaagtcagttttcatttcaagatgtttccttccaatgggcttttggtgtaggatgtcggagaaccaagaacaggaggaggtgattacagtgcgtgttcaggacccccgagtgcagaatgagggctcctggaactcttatgtggattataagatattcctccataccaacagcaaagcctttactgccaagacttcctgtgtgcggcgccgctaccgtgagttcgtgtggctgagaaagcagctacagagaaatgctggtttggtgcctgttcctgaacttcctgggaagtcaaccttcttcggcacctcagatgagttcattgagaagcgacgacaaggtctgcagcacttccttgaaaaggtcctgcagagtgtggttctcctgtcagacagccagttgcacctattcctgcaaagccagctctcggtgcctgagatagaagcctgtgtccagggccgaagtaccatgactgtgtctgatgccattcttcgatatgctatgtcaaactgtggctggtcccaggaagagaggcagagctcttctcccctggctaaaggagaccagcctaagagttgctgctttcttccaagatcgggtaggaggagctctccctcaccgcctcccattgaagaaaaaggaccattttacaagtgtggggctcccagtgttgactctgaagttccttccttgggaaaagtccattcttccccaccccttctctcacaattatggctgtgatttttggaagaacccaaagagggaaacctccccctctttcattcctgtgaaggaaggcttgtgggcaaggaaaaatccatgccggggccctttgggaaccccggggtccatttaaaaaaacacgtttttggaaaaaatggaagcttcggggattcctgctctggaaaagggccccacaaaatatgccgggcccagggagaactctacctccgggtgggggaattggagccacaggggccaggttattgttgggaaggcttgggactctcttctaaagggcctttttaaagccaccctttgcctttggggctggcattgtccccaaagggcccgatcctcttttacccgccccctttttttgcctccttttccaggtggg

SEQ ID NO: 248138 - DNA, 1513 bp, Homo Sapiens
ttgggtccaggcacgtgcaggcgccgcggggccggatcctccgcgcggccgagtccatctcctgggaaatggggcggacagtgtttccttgactgactattgtgagcgccctctctctccggcggagcggagaccatggcccccactcagggcccccgggccccgctggaattcggagggcccctgggcgccgcggctctgctactgctgctgcccgccaccatgttccacctgctcctggcggcccgttcgggccccgcgcgcctgctgggtccacccgcgtccctgcccgggctggaggtgctgtggagcccacgggcgctgctgctgtggctcgcctggctcggcctgcaggcggcgctctacctactgccggcgcgcaaggtggccgaggggcaggaattgaaggacaagagtcgcctgcgctatcctattaacggcttccaggccctggtgctgacagccctgttggtggggctggggatgtcagcggggctgcctctgggggcgctcccggaaatgctcctgcccttggcgtttgtcgccaccctcaccgctttcatcttcagcctctttctctacatgaaggcgcaggtagccccagtttcggccctggcacctggggggaactcaggcaatccgatttacgacttttttctgggacgagagctcaaccctcgtatctgtttctttcgactttcaaatatttctgtgaactgcgacccggcctcatcggctggggtcctcatcaacctggccctgttgatgaaggaggcagagcttcgaggcagtccctcactggccatgtggctggtcaatggcttccagttgctctacgtgggtgatgccctctggcacgaggaggccgtcctcaccaccatggatatcacacatgacgggtttggcttcatgctggcgtttggggacatggcctgggtgcccttcacctacagcctgcaggcccagttcctgctgcaccacccgcagcccctggggttgcccatggcctcggtcatctgcctcatcaatgctactggttactacatcttccgtggggcgaattccccaaaaaacacttttccgaaagaatccttctgaaccccaaatgggctgggccttgataacctcatcttaccgccacagggacggaaaattgcctgcgagtcccgagtgcccggccgaacgaatccccgcccccccatctaatatgaagacacgaacacgacgcccacccgacaagagatctatgaacagggaatgaagaacagcacatcgatagtcccaaatacaacgcagcttggcgatgtaaagaataccaactctaggccccctaccatcaggttgacgacagcggctatcatgctgaccctaacaccctcggatctataccgcgatccttttcacaaatcacaccccccgggcagaagaccagctaagaggtttatacactaatgagctctccctacaccggcagacatatgcactctcacaggcgcactccaaccacatcacc

SEQ ID NO: 248139 - DNA, 1084 bp, Homo Sapiens
  misc_feature (789)..(802): n is a, c, g, or t
tgggtgtttaaaagggggattttttgtggctcagtgtttaaaacccccatttttagtctgttaataggcagggaacgcggagaagctcctttgggtttgacgcctattaccgttcccttatgtccccttgacatatgtcccttgtcccccacctttaggttcataacgaaatttctggcagagatgtaacttcggtccgggtgatgaccaatactggctttttcctccaaactggaagagaagcctctctttgttctcatgcccctcagaaaagtcattcttgcagtctttttagcatttatcacaattgtgaataactatgattctgtgcttctatttaacgcctggctcctctatgagactaaagtttcatgagggcaggaatcacatctgtctttttcactactctatctcctataagaagggagctgagaaaatgtctgttgaaaagaagaaaatactatttcattgttgtggtgctgtgagaagtccttcttgcagtctaacctccaacagtcttgctgcagtaccagttcctctcactctatcctctatggagctagaacccttgctctcccaactgcccctgaagatttggacaccacctaccctccaaccacccctggtatcccagtcctcaaccctccccaccctcaggttggttggtgcagagggtgagactctaaagtcttctaaggagcagccctgagcacatggagatggagaggatggggttgcttaggcaactgtcgcctggcaaccagctccctggctgatctcctacaccgnnnnnnnnnnnnnngcctcatgctgggggagctgggacgagagagggatcagggctgagaaggcagggaagcaacagagattcactgagcatcgtctgacagagagaagtcagggttaaaaagactaggccccatctatccccactccctaccaaggtagcccaaagcactttttataattccatgcttcccaggcccctttccccactgctgctcccacttctgtgccaacactgccagaggaggagatgcccctgtcttagcctcgtgccgaattcgccacccaggcctcgctc

SEQ ID NO: 248140 - DNA, 1835 bp, Homo Sapiens
  misc_feature (1646)..(1654): n is a, c, g, or t
  misc_feature (1743)..(1743): n is a, c, g, or t
  misc_feature (1749)..(1749): n is a, c, g, or t
acgccaccaacccacccgagggtccccaagacaggagctcccagcagaaaggccgcctgtccctgcagaatacagcggagatccagcactgtttggtcaacgctggcgatgtggggtgtggcgtgtttgaatgtttcgagaacaactcttgtgagattcggggcttacatgggatttgcatgacttttctgcacaacgctggaaaatttgatgcccagggcaagtcattcatcaaagacgccttgaaatgtaaggcccacgctctgcggcacaggttcggctgcataagccggaagtgcccggccatcagggaaatggtgtcccagttgcagcgggaatgctacctcaagcacgacctgtgcgcggctgcccaggagaacacccgggtgatagtggagatgatccatttcaaggacttgctgctgcacgaaccctacgtggacctcgtgaacttgctgctgacctgtggggaggaggtgaaggaggccatcacccacagcgtgcaggttcagtgtgagcagaactggggaagcctgtgctccatcttgagcttctgcacctcggccatccagaagcctcccacggcgccccccgagcgccagccccaggtggacagaaccaagctctccagggcccaccacggggaagcaggacatcacctcccagagcccagcagtagggagactggccgaggtgccaagggtgagcgaggtagcaagagccacccaaacgcccatgcccgaggcagagtcgggggccttggggctcagggaccttccggaagcagcgagtgggaagacgaacagtctgagtattctgatatccggaggtgaaatgaaaggcctggccacgaaatctttcctccacgccgtccattttcttatctatggacattccaaaacatttaccattagagaggggggatgtcacacgcaggattctgtggggactgtggacttcatcgaggtgttgtgttccgcggaacggacaggtgagatggagacccctggggccgcggggtctcaggggtgcctgcggaattctgcacttagcaggactcaaggcagcgcgcccgcgttatcctcgtacctttgtcctctttccatctggggagaccccgggccgccacgtcgcctctgttgtggaaccaggtgcacccatggaggcggcacgccctaaggtacggacccctcaaaagatgggggccaccgtacacggagtggactcgagactccgcaccccgtgacccattcactcgatccacaacggaccctcactgcaggccactcgcatctcccgctcggccccggactcgccggtggcggacccagtgtagcagcccctcgcccgcgccgtgtgccgccggggcctcgcgcggcagcgcgcattctgtatcgccccgccacgcccgggttaggtggtctcgtggcgtcgtagggggccaccagagcggtgtctgtggtgccacgcgtgtgcgtggagcgccggggagggaactctcgaagcgagtcgcgactgtcctatgctctgttgtcggccccgggtatgacacgccgacctctactattattcgcacccctcaagcgtgctccacccgttctcgctgtggagggacgcgcagcgcgagactgggaatccgaggagtnnnnnnnnngagtggtgcggagagcggctgtcggcgcctccctactgtcaccaccaggcgctcacgtcccgtcgctctcgatgaccggccggacgagncgttantgcatgccgcgcaggcatgagcgcggctataggttgcgcagctattgcacccccgtgcctcgcccggccaggcacgagttacacga

SEQ ID NO: 248141 - DNA, 717 bp, Homo Sapiens
taccggggactcttcatttctggcctgcaaggaatcaccagccaggctgagggacacggacagccagcccagctggggcctgccaggtgactcacaaggctgaaaagggagccgctccgctctgggtggttcagtcccagccaggggttgggatgtcctgcctgcggaggggccacagcccccatggggggcccctcgcagcggggcacaccgatccctattctgcaaggtgtatcccacaaggcccttcctcttggtggcacctgggcactcaaggagccaggagatcctgccgagatggctagagtctggaatgtgaggtgtgcacaggcggggcaaactctggagacccagagacaagaagcaccaactcccagtgtgatgaggccagttcccaaggggaaggcccagaagagcctgggggatgggcaggtcggggagcccctctttccagagttccagtacagtgggaaacgtgtcagtctgtgactctggccaaagcacccgtcccctgctgcaggaggctcggcagacccaaggccagggcacagtggggtctgccgagcaccaggcaggagtggtgtggcaggcggtggctgggagggaggggacgcccacaggggtcctagaggtggatccacttgttccagttgacctcgtgggggaacacacggcccagccggagggtaccctcgtgccgaattcgccacccaggcc

SEQ ID NO: 248142 - DNA, 889 bp, Homo Sapiens
  misc_feature (808)..(808): n is a, c, g, or t
tggggaagggctagcattggtcaggactctgctgacagcactgagtaggcaggaatgtatttgagatttggaagtactgttaatttggtggagtcaggtgaatggataagaagcagatcggcagaaagcatcagtgtggtcccgaggctccctctgttttccttgccatggagtccccagcgccttgtgcctgtttccatttccctctctctttgaaaagtagaaatcagtggtttcttgactcctaaacagcctcctcactatagaaggagcctgagcaggtcagaagaactagaaaagtcctcagatacccccctctgtccagccccctttcccatacacagatatcaatggatgagcaggaaaagaggaggcctggactcactgaagtacttgaagaagcacaagtgtcatagatgtgccgccctttgccctgggtgttctagatcacacagaacacgtttcagctggactaagaatcagactagccaggggttcttctgaacagctcaggccagacctctgggctcctctgggggccctgggacatgatgccttgcagtttccattccattgtccccaggcctcctgacctggtgacagagagtgccctgcagaagtgagtctatttttcccaattcctcttcatgaccagaaaatggcagctgggccggttggggtcctggtgggaaagggctaacctgggctgttaggtagacactaggtttaaaggtagacaggggagatggcatcatcagggcaggcccaggcccacttccctgtgaccccagacctttggcaggcgggntcggtgcctgaaaaccaaggcatcttccctcacaccccggaggggaaaaggttttaagggcaaactttgtttggccctcca

SEQ ID NO: 248143 - DNA, 543 bp, Homo Sapiens
cgcagtgattattttgacagcaactctgaagaaacaggtgctgactctcgcgcggggttcctctcaccagaacgaccacacacaggaggagggatgcctgggcccaccacttctctcctctgaagggaaaaattcagaccgccagatgggaaatggctgaaatcactgcacttctattgggtggaagggttcaaacatcggggactcaggtactcagattcccttgccgcctccctctgaaacacgaaccttcctttatgagctggcttcagggaggccccctggcttctcttaccccaacacacagtgctcccacagccacagtgctgcagaggccacctcggccctaaagtcccatggctggaagccacagcaggctccacagaggccccacacaacctcgtctgcacccatcagtctgaagaggttaaaattcaactccatattcagccctatgtttattccttctaaatgccctttttcctttcccagataactgtcactaagggaaactgtcctcgtgccgaattcgccacccaggcc

SEQ ID NO: 248144 - DNA, 965 bp, Homo Sapiens
taatgcggcggtaaagaagataaatgtcttcgatgcccgtcacaggacgttttgccagtcatagtggaagtgcggcagaacgccaaccatcaagaataccaaaagccatgagtgttattttgtagtaggacaaggagtaggtgttttaccattctgatgatgcactgacttccatacgggaactagcgggcgccgaaattttttgggtttccagggggtgtatgcccacttttccgggctgagaggttcctttttcctggaaactggattaacgcaaaatccctaggcgtggagtgggtgttttccttgggggcagttttccagctgggaccactttgccccgcaaggacacatttcaacaatcttgaggcatttccgggtgtcatcacagtgttcacgcacgtgtatgtacctgcacacgctactggcacctcgcggatagagcccagggacgctgctcacatcctgcacggagactgacccgcccagcgtcctagggcaggctccaggcagggtctgcatgtgcctctgccagccacctagaccctgccagccggggcctttaaattctcccctcgtggtctccagggccactcactagcctgatttcaagctgtaaactgggaggacctatttcttttcaccttgcacggaacaccaaggctgaaaggcagtttttccggaggtgccagcctgtctcacatttccgcttcagctgcggggtccagctctatgtgggcggtctcctgatgaagtcaccccgggacagacactgttctgtctcctgcttccagtccagtaaagatgccaggatcccccagggcatggcaggcaccctcaaaggcagacgtggggagaccctggtgggcagaccccagcctgctgacggggggcttctccctggctgccactggcccacccactgcgctgcagtccacctggtgctggggctgtggggcacaggc

SEQ ID NO: 248145 - DNA, 1168 bp, Homo Sapiens
ttggggagctcggcggagggcgggccaggtgactggtccgggccatgccgaggaagaagccattcagcgtgaagcagaagaagaagcagttgcaggacaaacgggagcggaagagagggcttcaagatgggctgcgctccagttccaacagccgcagcgggagccgggagcggcgagaggaacagaccgacacctcggacggggagtctgtgacccatcatatccgcaggcttaaccagcagccttctcaggggctgggtccacgaggctacgacccaaatcgataccgactgcattttgagagagacagcagggaggaggtagagaggagaaagagagcagcccgggagcaagttctacagccggtcagtgctgagttgttggagctggacatccgggaggtgtatcagcctggctcagttctggactttcctcgacgtcctccttggagctatgagatgtccaaggagcaactaatgagccaagaggaacggagcttccaagactatcttgggaagattcatggggcttactcctctgagaaactcagctactttgagcacaatctggagacatggaggcagctgtggcgggtgttagagatgtctgacatcgtcctgcttatcactgatatccgacatccagttgtgaatttcccgccagcactttatgagtatgtgactggagaacttggactggccctggtgctggttttgaacaaggtggatctggccccgccagctcttgtggttgcctggaagcattatttccatcaacactatccccagctccacgtcgtccttttcacctcttttcctcgggacccccgcaccccacaggaccctagtagtgtcttgaagaagagtcggaggcgggggagaggatggactcgggccctggggccagagcagttgctgagagcctgtgaagccatcactgtggggaaagtggacttgagcagctggcgggagaagatcgctcgggatgtggctggggccacctggggtaatggctctggggaggaggaggaagaggaggatggaccagcagtcctggtggagcagcagactgattcagcaatggagccaactgggccaacccaagagcgctacaaggatggggtggtgaccatcggctgtgtgggtctccctaatgtgggaaagtcctc

SEQ ID NO: 248146 - DNA, 1117 bp, Homo Sapiens
  misc_feature (1009)..(1009): n is a, c, g, or t
  misc_feature (1067)..(1067): n is a, c, g, or t
  misc_feature (1082)..(1082): n is a, c, g, or t
ttggcactgatgcaggaactgtatagcacaccagcctccaggctggactccttcgtggctcagtggctgcagccccaccgggagtggaaggaagaggtgctagacgctgtgcggaccgtggaggagtttctgaggcaggagcatttccaggggaagcgtgggctggaccaggatgtgcgggtgctgaaggtagtcaaggtgggctccttcgggaatggcacggttctcaggagcaccagagaggtggagctggtggcgtttctgagctgtttccacagcttccaggaggcagccaagcatcacaaagatgttctgaggctgatatggaaaaccatgtggcaaagccaggacctgctggacctcgggctcgaggacctgaggatggagcagagagtccccgatgctctcgtcttcaccatccagaccagggggactgcggagcccatcacggtcaccattgtgcctgcctacagagccctggggccttctcttcccaactcccagccaccccctgaggtctatgtgagcctgatcaaggcctgcggtggtcctggaaatttctgcccatccttcagcgagctgcagagaaatttcgtgaaacatcggccaactaagctgaagagcctcctgcgcctggtgaaacactggtaccagcagtatgtgaaagccaggtcccccagagccaatctgccccctctctatgctcttgaacttctaaccatctatgcctgggaaatgggtactgaagaagacgagaatttcatgttggacgaaggcttcaccactgtgatggacctgctcctggagtatgaagtcatctgtatctactggaccaagtactacacactccacaatgcaatcattgaggattgtgtcagaaaacagctcaaaaaagagaggcccatcatcctggatccggccgaccccaccctcaacgtggcagaagggtacagatggggacatcgtttgctcagaagggcctcccagtgcccctgaaacagggactggntttgctatgaccaacaggggaagaaaccccccatctcccagcctgggaaacgtggaangaaggggcaacgaanaacattccaactttggacagagtgggaagccagaa

SEQ ID NO: 248147 - DNA, 931 bp, Homo Sapiens
  misc_feature (715)..(716): n is a, c, g, or t
  misc_feature (770)..(770): n is a, c, g, or t
ctgggtccgctgtgccaagttctcccccgacgggcggctcatcgtgtctgccagtgatgacaagactgttaagctgtgggacaagagcagccgggaatgtgtccactcgtattgtgagcatggcggctttgtcacctatgtggacttccaccccagtgggacgtgcattgccgctgccggcatggacaacacagtgaaggtgtgggacgtgcggactcaccggctgctgcagcattatcagttgcacagtgcagcagtgaacgggctctctttccacccgtcgggaaactacctgatcacagcctccagtgactcaaccctgaagatcctggacctgatggagggccggctgctctacacactccacgggcatcagggaccagccaccactgttgccttttcaagaacgggggagtattttgcttctggaggctctgatgaacaagtgatggtttggaagagtaactttgatattgttgatcatggagaagtcacgaaagtgccgaggcccccagccacactggccagctccatggggaatctgacagtctccattctggagcagcggttgacactgacagaagacaagctgaagcagtgtctggagaaccagcagctaatcatgcagagagcaacaccatgatcaggggagcaggaatcaggagctcggtggatttgcaggtggcaggccagggatttgtaccatgggacttgnngtaaataaaggggactgaactctgtgggaatcacatccatactggagccctggnatttttgcagttctgcccctcccctttgctatctgcaccaggaggctctccacctgggcagccagaaggtccccagtgggccggggctcacacacaaatgatgcttccgaccccgaatgagagggaccaccttttgggcttaatggtaaagggagccactt

SEQ ID NO: 248148 - DNA, 1853 bp, Homo Sapiens
  misc_feature (626)..(634): n is a, c, g, or t
  misc_feature (1579)..(1587): n is a, c, g, or t
ttggcaaaaaacagtgatcatttctaggtggtgggataattgagcagtgtttggctttttccttttgagggaaaacctctacaatgagcatgtatggcctcttcaaaagataacccacctttaatagcttctttgtgttaaccgggtgatgctcagggcgtaatgctctgctgatgtaacctgctgttgatggtgtcctgtttccccaggatggatgacatccagctctgcaaggacatcatggacttgaagcaggagctgcagaacttggtcgccatcccagaaaaagaaaaaaccaaactgcagaagcagagagaggatgagctaatccagaagatccacaaactggtgcagaagagagacttcctggtggacgatgcggaggtcgagcggttaagggagcaagaagaagacaaggaaatggctgatttcctgagaatcaagttaaaacctctagacaaagtaaccaaatctccagccagctcccgggcagagaagaaagcagagcccccacctagcaagcccacggtggccaagacggggctggcactgatcaaggattgttgcggggccacccagtgcaacatcatgtagcccccacgtggggtgccctgggccatggggannnnnnnnnaccctcttgtctttatagcccccatttcaccggggcccaagagctctccaaggcagaaggggttgaaggcaagcccgtgactgtcaccagaggccatgggcacggcaggcgggcctggccaccctgtacagagtgtagcagtagggagtctctcaccgtcgcatggtcctccccagagcatgccgaaacccaggagtctgtctcactgtttatccaaacaccaggaaaggtcctctcctcaaaaaagcatatctccacttctctctagctgtatctaacccaccgtgtgaatgaactgggagaggggcatgctccccagctgtgtgtagtcgtgacttctcaacaatctagcaccatgtcggacacgttccccatccaccctcctagctctgctctcagagctaggcacatgggcacaggtcccctcccgtctgtcctctcccagcaactgtgccctggagggctccacatggcccccgtgtctctcaggcaccacccatatagcagtcccagagggcccatctgtaaagatcgagcttgtgtgtggtgtcgtggtcacatctcccgcttccccccatcctgtgtctgggcacagttcacatcaggacagcgtccattgtgctctcaatctgcctcaggtgtgtgcctggacggggcctggactggcatggatccagtgtgcagaacagccaccagggaaccggaacctctgatggtcaaggcccatcaagtctgtcaatggggacccacagtacatgctggacctggggactgccgaccattccggggcccagtaccaaacatgccccatatggccggcccacttttggccagggcccaacatgattggacacttttggttaaacgaaacgatgctcacctggtcttccgaaggagggtcgggctgaggctcggacccagcatttggcgtgccccgcccgcttnnnnnnnnncaccattagcgggggcaatgaacctggtgccctagcaaaacggttgttgcgatccgtgccgaaattcttcgtgtcaaacattgttgctcaaccctctcctcatccccggggtcatccgccctgggggcgggaccctgtctctcttgctacgggcgggggacgctgggttaccgtcgcgtacccggccccctatcgcgtcgtcgctgagccctaccctccgacataatcttctctccgctggcgtccaagcagaccgcccctcttgt

SEQ ID NO: 248149 - DNA, 889 bp, Homo Sapiens
agacgctggccgagttctgggcccgcctgctcgagcgcctcttcaagcagctgcacccccagctgctgctgcctgatgactacctggactgcctgggcaagcaggccgaggcgctgcggcccttcggggaggccccgagagagctgcgcctgcgggccacccgtgccttcgtggctgctcgctcctttgtgcagggcctgggcgtggccagcgacgtggtccggaaagtggctcaggtccccctgggcccggagtgctcgagagctgtcatgaagctggtctactgtgctcactgcctgggagtccccggggcccggccctgtcttgactattgccgaaatgtgctccagggctgccttgcccaccaggccgacctggacgccgagtggaggaacctcctggactccatggtgctcatcaccgacaagttctggggtacatcgggtgtggagagtgtcatcggcagcgtgcacacgtggctggcggaggccatcaacgccctccaggacaacagggacacgctcacggccaaggtcatccagggctgcgggaaccccaaggtcaacccccagggccccgggcctgaggagaagcggcgccggggcaagctggccccgcgggagaggccaccttcaggcacgctggagaagctggtctccgaagccaagggccagctccgcgacgtccaggacttctggatcagcctcccagggacactgtgcaggggaaaaatggcccctgagccctgcccagtgaagaccggctgctgggaaccgggaatgggccaaaggcccggtatcctccccgaagggcctgggcccgaccggcacgcgccccaaatggtagtgacgcaaccttcaacaatcagaacacgcgcgccgccccaccc

SEQ ID NO: 248150 - DNA, 1546 bp, Homo Sapiens
cacccccccaaggggcccctttttccaagggtttggaagggtggaaattttaaaattaatcggttccgggggtggttaattttttgggcaaaaagtccaggtcctttgggcctcctgttccctgggggcccttggggcaagtttacccccccaccggggccctgggtacgtaaaggcccagaaagaggaggaggggcaggaggaaaggtcggggggctgggggcagctggcagccgaggttttctgtctttcctgctctgacaggcctggggagggcatgggtcaagggcgtccggggagctggagctcttcctgctgaccttccggctgcagaggtcatccagacagccatcaccgctgcccgagccgctgccgtcgtcacctgggaaggagaggaggctccggcaggcaggtccccacaggagaccccagtgcagcaccaccctgtaagggcccgtgccaggtgaccccaacatcctttcggtgtggaatcccaggaccagcagcacctgatccccgctgacccctgaggctgggagactctcactccctggggctgcctcccttggtccctggagccaaagccaacagacatcccggccaggcctccagggcgccgcagaggtgcagggctcggtgatcgtgcctgggcagcacagcgtcctcagactcactgtggtgatgccggagcagagggcccctcgggtgggggaacccggagggcagtcacacccctgtggcacccccaccaaccctggccccttggccgcccggccaggccctgccctcactggcgtcctggaagtccacgtcgttgccgttgtaggcgctgcgcagccggttggtcatgatcttcagctgcatgatctgctgccggatggtcatgtccggcttggtgatgtccacctccacctcggggttgttgatctggttggccaggccgtcacccatgacctcgggggaggtaccggcctctggccatcccgttccagcagcggtcatcactggcagtgctcagggccatcttctcactgcacagtgtccctgggaggctgatccagaagtcctggacgtcgcggagctgggccttggcttcagagaccagcttctccagcgtgcctgaaggtggcctctcccgcggggccagcttgccccggcgccgcttctcctcaggcccagggccctgggggttgaccttggggttcccgcagcctggatgacctggagagacactgcagggtccttggccgtgagcgtgtccctgttgtcctggagggcgttgatggcctccgccagccacgtgtgcacgctgccgatgacactctccacacccgatgtaccccagaacttgtcggtgatgagcaccatggagtccaggaggttcctccactcggcgtccaggtcggcctggttggcaaggcagcccttgagcacatttcggcaatagtcagggcagggcctggcgccggggactcccaggcagtgagcacagtagaccagcttcatgacagctctcgagcactccgggcccagggggacctgagcc

SEQ ID NO: 248151 - DNA, 693 bp, Homo Sapiens
  misc_feature (612)..(612): n is a, c, g, or t
  misc_feature (617)..(617): n is a, c, g, or t
  misc_feature (638)..(638): n is a, c, g, or t
tcttcttttctctttaaagaggcatgacagaggggtttgaccaacagcgtggacatggcaaggtgtggcatcattgccagtgtggggccagagggtgcccgagccccggtgcgcggccagcctgctgcatccctgccggctgacgtctggagtgaccgtcattccagtgaccacccccatagccacagacggcacgtcagtggaaacgggggtgcagcaggcatgacaccaaggcagagcccgcagcagggggcccggggttccacagctagggaagcttgctcagacaggcagcacacccagggcacggccactcacgcccccgcaccaggagacccatttggaagttagttagggtttgttttgttttctttttaatgtggacttcccctttatttaaattttctttcagtgtacaaattcacaaaactggctacaaaaatttggttgaaaagtaaggctttctgagaatgaaaatctgtacgtctggtcagaacaagctccccacgggcccaggtgcacgtctgcccgtgcaaatccggcctccaccgcgagtaaggcaagagggtatggcaacgaaaatgggcaaggctttgggcccaggccctgggncccangggtggacggcagcccctggnagtttggtggctttggaatgagtggggtgcatgtggcactaagccccccccaccg

SEQ ID NO: 248152 - DNA, 1445 bp, Homo Sapiens
ttggggtcccgtcaagcagcctggctcatggctgtgtgcggcctggggagccgtcttggcctggggagccgtcttggcctgcaagggtgcttcggcgccgccaggctcctgtatccccgtttccagagccgcggccctcagggcgtggaagacggggacaggccacagccttcctcgaagacacccaggatccccaagatttacaccaaaacgggagacaaagggttttctagtaccttcacaggagaaaggagacccaaagatgaccaagtgtttgaagccgtgggaactacagatgaattaagttcagctattgggtttgctctggaattagtcacagaaaagggccatacatttgccgaagagcttcagaaaatccagtgcacattgcaggacgtcggctcggccctggcgacaccatgctcctcggcccgggaggctcacttaaagtataccacgttcaaggcggggcccatcctggagctggagcagtggatcgacaagtacaccagccagctcccaccactcacggccttcatcctgccttcgggaggcaagatcagctcggcgctgcatttctgccgggccgtgtgccgccgggccgagagacgtgtggtgcctcttgtccagatgggagagaccgatgcgaacgtggccaagttcttaaacagactcagtgactatctcttcacgctagccagatatgcagccatgaaggaggggaatcaagagaaaatatactagaaaaatgacccatcggccgagtctgagggactctgaaatcacagaaagtgggagcttggaggatccctccatggcgatggccgtggagagaggagcttgcccttctggggtcctggttcctgaagagctcacccagagaggctcaaagctgccttttgtcccagctcagctttgatctacacctcttgccaccttcctcaagggactgtgaccctttggggattctgtccctgaccctgcttccccaagctctcctgggtcttggagggatgtgggaatgaattggcattgcaggaaagacaggcaaagtgattgctgcaatgagaaggacctgtgcggaaaaggaataaaagctggaaaggctggaaattcattaccctttctcccatcccccacttccgagcgaacactccaggcttctatgtcgggcgcggaaaaagacgtattgaaagggccccctggtcataccgtgtttccctgacccagttttccttgcacaaaggggggagaactggcccggctctccccaataggggagtcctgtacttatttcccgcataaccccagggtcaaacccgggcatcaaatggaaaatcccgcctcgcacattacccccgggggaaatttataaaccccggcccataacagggagccggggcgcttttttcttttcttctggggacattcccaccaagggagat

SEQ ID NO: 248153 - DNA, 991 bp, Homo Sapiens
ttggctcagctggatttggccggcgccccctgcccgcccccctttaatccccgtgacttccatgctctttcctgttcccgagacgtggggtctgcaggaaaggaggacccaccacgacagggcagacccccaatacctgctcctccttgaagtccagctccacccgaggacagacgcagccggcctccgccaggccctcctgagcagccatcgcttcagtggtgctgggtcaggcggacccaagagtcagcccgtacggaagccgcgctacgtcaggcgggagcggcccctggacagggccacggatcccgctgccttcccgggggaggcccgtatcagcaatgtctgacctggaggccgagaccacgccacgcacttggcggcagggacccggaggccgaccccttggcgggaaccagcacaaagtgttggcatcgcccggcgcccgggacagtcctgggcacagcctcggctctgggtccctccgcctcccagcgacggacgccaaagggtcccgggccgcctgaggctcctccccaccacagccatctcgtttatcggaccaggagcaggcatccatgagacctcagagcttcagatcgaggtcttggggggtcccgggccccctccaggaaacacggtgaggccccagcgccttgtagccaaagctggcacgatctatggggcaggtgccgctctgcctagaaaagccagggcctctgctgccgtgccctcccaaaccccatatgggcgaggaactctttccacgaccaaccataccccagtgggtcccgaaaaccccctctgagaaacaagtggagggtcggggcctcctgttggcctcgcttcccaggccgggtggccccgggaccaggtcggggggaaggaactcaccgtctctttggggaactccaaggctggcgctcttacaaaactcgcgcggctggtcctccctgtgggggttttggtcacctcccccccgctcgtaggc

SEQ ID NO: 248154 - DNA, 1049 bp, Homo Sapiens
ttggcacctacatcaagttcatcaacctcttccccgagaccaaggccaccatccagggcgtcctgcgggccggctcccagctgcgcaatgctgacgtggagctgcagcagcgagccgtggagtacctcaccctcagctcagtggccagcaccgacgtcctggccacggtgctggaggagatgccgcccttccccgagcgcgagtcgtccatcctggccaagctgaaacgcaagaaggggccaggggccggcagcgccctggacgatggccggagggaccccagcagcaacgacatcaacgggggcatggagcccacccccagcactgtgtcgacgccctcgccctccgccgacctcctggggctgcgggcagcccctcccccggcagcacccccggcttctgcaggagcagggaaccttctggtggacgtcttcgatggcccggccgcccagcccagcctggggcccacccccgaggaggccttcctcagcccaggtcctgaggacatcggccctcccattccggaagccgatgagttgctgaataagtttgtgtgtaagaacaacggggtcctgttcgagaaccagctgctgcagatcggagtcaagtcagagttccgacagaacctgggccgcatgtatctcttctatggcaccaagacctcggtgcagttccagaatttctcacccactgtggttcaccggggagacctccagactcagctggctgtgcagaccaagcgccttggcggcgccatgtggaaccggggggcgcgcaaggtggcagcaggtgggcctcaatattccaagagtgcctggcggggaaaattttcctgggacccccccggctgctgtccgtgctcttctcgcgcatggtggccgcccccctggtgccctcacccttgcaagccccccagctgacgccgtccaacagagttcgctgtccacgcctccccgccataatgcgacggacctccatgcccatttcccttcccaaccgcggccgcggtaaagaccaagacctgaaaccgccctcgccccgccaagcat

SEQ ID NO: 248155 - DNA, 951 bp, Homo Sapiens
ttggacttcttcgagtactttcgggccacctatccgctgctgaaggccgacccctccctgtggtgcgtctcggcctggaatgacaacggcaaggagcagatggtggacgccagcaggcctgagctgctctaccgcaccgactttttccctggcctgggctggctgctgttggccgagctctgggctgagctggagcccaagtggccaaaggccttctgggacgactggatgcggcggccggagcagcggcaggggcgggcctgcatacgccctgagatctcaagaacgatgacctttggccgcaagggtgtgagccacgggcagttctttgaccagcacctcaagtttatcaagctgaaccagcagtttgtgcacttcacccagctggacctgtcttacctgcagcgggaggcctatgaccgagatttcctcgcccgcgtctacggtgctccccagctgcaggtggagaaagtgaggaccaatgaccggaaggagctgggggaggtgcgggtgcagtatacgggcagggacagcttcaaggctttcgccaaggctctgggtgtcatggatgaccttaagtcgggggttccgagagctggctaccggggtattgtcaccttccagttccggggccgccgtgtccacctggcgcccccaccgacgtgggagggctatgatcctagctggaattagcacctgcctgtccttcctgggcccctccttgccacatcatgagctgaggtgggaccacagtccccaggctgcatcgggcctgcctgtgtttcccccctagggtgcccatatcctcctgcacctcttcccagcggtcacctcacccgcaccccctgtcaaccacgaaggaccatcccccccgctccccttgcccgcatccacatccccggggcaactacctttccccgatatgcttagctcctgcgatccaagcgtgcc

SEQ ID NO: 248156 - DNA, 992 bp, Homo Sapiens
actttttgccttcccaaggttcaaaaggagttttttccggcttaaagccttcccaaattaagtgggggacccccggggggtggggcccgggaagccccaacccaatttttgttttctttccagaaggaagtgggggtttcccccaatttcgccccaggatgggtctcaaatttccgggaagttcaaaggaattcccaccccgcctcaagttttccccaaaaagtggtggagatttccaggtggggagcccatcccgccccgcccaggccagcccagactgtccttttttaccataggtcaaaggctctagaaagggagctctgtggttgggctgtgtggctcaagttttctggaaaaccgacgtactgacagtgaggggaccgatgggtgggccccgtgctgcccccagcgccgtgagctctgccaaccctgggaatcgccagcctcagtttctccatcagtaacaccacttcctcaggcaaagcacggaaggaaatgacacaaaacccgacaccaaaggcattcacaaaatgggagtcgctgccacttccactgcagactgacgaggttttaaagtcaggacttccaggaagggaatggcgcacggcggggctaggaaaccgctctagcaggccactcaggcttctgacagctttcagagacagccggtcgggtgagccttccctgcctgggtgtgcacctgccagactcacacctcccggtacccacacctcccggggctcacacctcccggggcccacacctcccggggctcacacctcccggggcccacacctctggggtccacacccgctcaggggtgctcccgtcctctgcgtacacccgggggtctgctccgagcttcaggagcacctccacagctgccaggtggcccccaaaggctgcacggtacagcggcgtcggaccgaaagcgccctgcaagacgggccccccgagcaagatccaggccttgcccctgggggaaggaggcc

SEQ ID NO: 248157 - DNA, 970 bp, Homo Sapiens
tttttgggaaagaagatttaaccccccctttttattagtttaccgggggccgggagccccctccattttttccagccgaagaggggttaggaacctgggttaaaggaaggttaaattcccggaggagttccagggaataggcagaattcccctgattccactgacttttctgggacttggggctgcccaaaatataaaatcccagtactgggggcttccgatcagtcttggttgaccagcactaggcagctttcaacttcgggtgcctgaaagtgctggggtgtccagtggcataagtcttctttgatacccagtcctttaccaccaacaaagccgaggtccggaatgacagtcccccagagaagcggagtcaccccttctcccatccgggtaggccacaggaacctgaggaaaatcaagggttgctgccaggtgcccgccccccaccccgaatccccgacgttgtcgcgagtcccgcggtacaaggacagagggaaagtaggtacagtgttcaggtcccagccccaggctcctcacccaacaaagttcagtcatctggtgcaccagctgctggaagcgctgcttttgagtctctacctcgatgaaatgctgcaactgcgggtccactgcacccaaacccgccgcggaggaagaggaggaggaatccatcccagggcgaccaagcttgcagagacgaactccgcaccgaccttcacgtgtctccgcgacggaaccggaaccacagctagctgcctctgggaccgcccccgtgagtgcactgcgtcggcgcgaggcaggcgtccaactccaccccgccgcctcccacaccttggcgccggtgcttcgttcccggagtcggcgggttccactccccggaccccgcaatcccgtaaccccgcaaccctgccgttgcgcccagccttgcgccttgagatcgcagggcttacagcccagagccgaggtgccgttg

SEQ ID NO: 248158 - DNA, 1017 bp, Homo Sapiens
  misc_feature (250)..(311): n is a, c, g, or t
  misc_feature (894)..(941): n is a, c, g, or t
ttgggttagaaaagacctcccgttcttgctcctcggagagtccagggtacttcggccacaggtggcaaggagaaaggcggtgctgttgttatggtaacagcgagtactgcgggaagggtgggatccagtaggggcttaggttattcagggcttcccctgccaccctccggccaaacactgtcgacaggctttccttccacaggagaagccctggagttgagcctggcgggtgcccatggccatggagtgnnnnnnnnnnnnnnnnnnnnnnnnnnnnnnnnnnnnnnnnnnnnnnnnnnnnnnnnnnnnnncgccgggcccacgcagccgtcccctgccaagcctcagctcaaactcaaaatcaagcttgggggacaagtcctggggaccaagagtgttcctaccttcactgtgatcccagaggggcctcgctcaccctctccccttatggttgtggataatgaagaggaacctatggaaggagtcccccttgagcagtaccgtgcctggctggatgaagacagtaatctctctccctctccacttcgggacctatcaggagggttagggggtcaggaggaagaggaggaacagaggtggctggatgccctggagaagggggagctggatgacaatggagacctcaagaaggagatcaatgagcggctgcttactgctcgacagcgagctctgctccagaaggcgcggagtcaaccttcccctatgctgccgctgcctgtagctgagggctgcccacctcccgccctcacagaggagatgctgctgaagcgcgaggagcgggcgcggaagcggcggctccaggcggcgcggcgggcagaagagcacaagaaccagactatcgagcgcctcaccaagactgcggcgaccagtggnnnnnnnnnnnnnnnnnnnnnnnnnnnnnnnnnnnnnnnnnnnnnnnntgcggctccggcccccatggtgcgctactgcagcggagcacagggttccaccctttccttcccacctggcgtcctc

SEQ ID NO: 248159 - DNA, 991 bp, Homo Sapiens
ggtttggcctggaggtcttcgcctgtatggggcagacctaccgagatgggactgcctgtgcagaggtctcccgggcctgtgacttcctgctgtcccggcagatggcagacggaggctggggggaggactttgagtcctgcgaggagcggcgttatgtgcagagtgcccagtcccagatccataacacatgctgggccatgatggggctgatggccgttcggcatcctgacatcgaggcccaggagagaggagtccggtgtctacttgagaaacagctccccaatggcgactggccgcaggaaaacattgctggggtcttcaacaagtcctgtgccatctcctacacgagctacaggaacatcttccccatctgggccctcggccgcttctcccagctgtaccctgagagagcccttgctggccacccctgagaacatgcctacctgctgggtgccgtctgtgcgttccagtgaggccaaggggtcctgggccgggttggggagccctcccataaccctgtcttgggctccaacccctcaacctctatctcatagatgtgaatctgggggccaggctggaggcagggatggggacagggtgggtggcttagactcttgatttttactgtaggttcatttctgaaagtagcttgtcgggcttgggtgaggaagggggcacaggagccgtgacccctgaggagggacagcgccttctgccacctctgggcacggccttcaaggtagtgaggcttggaggttttttctgaccaatagctgaattcctgggagaggagcagctgtgcccggggtgattcccttagtggccaagtgggcttctgggctgggggttgggccctgggccggccttcccctgccccttttgttcggttgggttgaagggcaacgcagggcacccctgtggacaatggcagggaaagtggggcatcccgggaaatagcccaaggcgggggggtttcccccctggtcgcccc

SEQ ID NO: 248160 - DNA, 960 bp, Homo Sapiens
tttcttttctgagatgtttatatgaagagaaacagaaagaacacatccatattggggagatgaagcagacatcgcagatggcagcagagaatattggaagtgaattaccacccagtgccactcgatttaggctagatatgctgaaaaacaaagcaaagagatctttaacagagtctttagaaagtattttgtcccggggtaataaagccagaggcctgcaggaacactccatcagtgtggatctggatagctccctgtctagtacattaagtaacaccagcaaagagccatctgtgtgtgaaaaggaggccttgcccatctctgagagctcctttaagctcctcggctcctcggaggacctgtccagtgactcggagagtcatctcccagaagagccagctccgctgtcgccccagcaggccttcaggaggcgagcaaacaccctgagtcacttccccatcgaatgccaggaacctccacaacctgcccgggggtccccgggggtttcgcaaaggaaacttatgaggtatcactcagtgagcacagagacgcctcatgaacgaaaggactttgaatccaaagcaaaccatcttggtgattctggtgggactcctgtgaagacccggaggcattcctggaggcagcagatattcctccgagtagccaccccgcagaaggcgtgcgattcttccagcagatatgaagattattcagagctgggagagcttcccccacgatctcctttagaaccagtttgtgaagatgggcccttttggcccccccccagaggaaaaggaaaggacatctcgtgagctccgagagctgtgggcaaaaggctattcttccacagatactgcctgctttgaatggagaaaggaaaatcagaagctcccagccctctggaaaatggatttgctgaaccaaccggctgaaacctccattaatgaaagaaattactcc

SEQ ID NO: 248161 - DNA, 939 bp, Homo Sapiens
  misc_feature (312)..(321): n is a, c, g, or t
ccttatagccaactttgtacaaaaaagttggctactctggtggaactcagagttggttctggaggcggcggacgcggaggtccctcagaggatccagcgaggggtgccaacaagaggcgaagaggtggcaccagggcggcggcaggaagaggagcgggagcaggagcgcggagcggagcgtcccgacccgccgtgcgtactttctggagggaaggggcgggggaatcggcccctgagggaagcgcccggtggcgagggggttagccaagttccggctgcggcgccactccctcggttccacgagaggaaagnnnnnnnnnnccagacgcttccgccggctcgcgccctccgggcccagcctcccgagccttcggagcgggcgccgtcccagcccagctccggggaaacgcgagccgcgatgcctggggggtgctcccggggccccgccgccggggacgggcgtctgcggctggcgcgactagcgctggtactcctgggctgggtctcctcgtcttctcccacctcctcggcatcctccttctcctcctcggcgccgttcctggcttccgccgtgtccgcccagcccccgctgccggaccagtgccccgcgctgtgcgagtgctccgaggcagcgcgcacagtcaagtgcgttaaccgcaatctgaccgaggtgcccacggacctgcccgcctacgtgcgcaacctcttccttaccggcaaccagctggccgtgctccctgccggcgccttctgcccgccggccgccgctggcggagctggccgcgctcaacctcagcggcagccgcctggacgaggtgcgcgcgggcgccttcgagcatctgcccagcctgcgccagctcgacctcagccacaaccaactgggccgacctcagtcccttcgctttctcggggcagcaatgccagcgtcttcggccccca

SEQ ID NO: 248162 - DNA, 1076 bp, Homo Sapiens
ttggccagggccggcagcaggcggagcggaggagcgtgctgcggggcttctgcgccaactccagcctggccttccccaccaaggagcgcgcattcgacgacatccccaactcggagctgagccacctgatcgtggacgaccggcacggggccatctactgctacgtgcccaaggtggcctgcaccaactggaagcgcgtgatgatcgtgctgagcggaagcctgctgcaccgcggtgcgccctaccgcgacccgctgcgcatcccgcgcgagcacgtgcacaacgccagcgcgcacctgaccttcaacaagttctggcgccgctacgggaagctctcccgccacctcatgaaggtcaagctcaagaagtacaccaagttcctcttcgtgcgcgaccccttcgtgcgcctgatctccgccttccgcagcaagttcgagctggagaacgaggagttctaccgcaagttcgccgtgcccatgctgcggctgtacgccaaccacaccagcctgcccgcctcggcgcgcgaggccttccgcgctggcctcaaggtgtccttcgccaacttcatccagtacctgctggacccgcacacggagaagctggcgcccttcaacgagcactggcggcaggtgtaccgcctctgccacccgtgccagatcgactacgacttcgtggggaagctggagactctggacgaggacgccgcgcagctgctgcagctactccaggtggaccggcagctccgcttccccccgagctaccggaacaggaccgccagcagctgggaggaggactggttcgccaagatccccctggcctggaggcagcagctgtataaactctacgaggccgactttgttctcttcggctaccccaagcccgaaaacctcctccgagactgaaagctttcgcgttgctttttctcgcgtgcctggaacctgacgcacgcgcactccagtttttttatgacctacgattttgcaatctgggcttcttgttcactccactgcctctatccattgagtactgtatcgatattgttttttaagattaatatatttcaggtatttaatacg

SEQ ID NO: 248163 - DNA, 878 bp, Homo Sapiens
gcggggggtaagggccaatgatgaccccatccctcggggccagctgaccctctgcatgagggccaaggtcccgccgtcgcctccggaggtcggagccagcctgcagtttcaggtcccggttgggcttggcattgtccggcctctggccccccgggacagctcgtttgagccccagctctggctctggcctctgcctgggctcctggacagcagcgtcctccccgcctctcggctgctcgtgggacacaggcacatggtcccccccgcgggcctttctcatctccaggtgaccgccatggtccagccggtggccctgctgtccaccctgctcgccatcagagatgacccgcagttccggctggcgtaacacagcctggggctgtgcagctgctccttccgccccaccgggcaggtccgctgcaaggcccaggtctcggctcacttgcttgggcttcatgcgagggtcccccgtctctgctcctggccctgccacgagccagttggcttccttcagaatgctggtgccagtggctgccacctccttcccaggttttttcctgtcttgggaaccgccagtaacgtcctgactttgcccagggaattcctctgcgaggcgctcctctgggcccccggcttccctggcggggtctggcacgggcacctgctccgggcccttggggagctccttcacagtgccagctgccctgggggcggcatccttctggccatctctcagcttggcctgggctgcccgaggctctgtgtcagggccgccgtcaggagggccagcagggtctctgcccacaggcccctcagagtgctccagggagcgctggttaaggtcctgggatggagcagggcggcccccaggagctctg

SEQ ID NO: 248164 - DNA, 1178 bp, Homo Sapiens
  misc_feature (1142)..(1142): n is a, c, g, or t
ttgggaccctagggcccagcccgaggaggcactcagggttaggaggtctgggcgagaagcaactagggccctcatcacttcgccgccgaatccccggcgccgcccagcggggcagagccaggccagggccgcccgcccaacctggtccgctgcctcttcggccatggaagctgccggcagccctgcggctacggagacaggcaagtatatcgcgtcaacacagcgacctgacgggacctggcgcaagcagcggagggtgaaagaaggatatgtgccccaggaggaggtcccagtatatgaaaacaagtatgtgaagtttttcaagagtaaaccagagttgcccccagggctaagccctgaggccactgctcctgtcaccccatccaggcctgaaggtggtgaaccaggcctctccaagacagccaaacgtaacctgaagcgaaaggagaagaggcggcagcagcaagagaaaggagaggcagaggccttgagcaggactcttgataaggtgtccctggaagagacagcccaactccccagtgctccacagggctctcgggcagcccccacagctgcatctgaccagcctgactcagctgccaccactgagaaagccaagaagataaagaacctaaagaagaaactccggcaggtggaagagctgcagcagcggatccaggctggggaagtcagccagcccagcaaagagcagctagaaaagctagcaaggaggagggcgctagaagaggagttagaggacttggagttaggcctctgaggcctttggggaatagggaatggactgcagaacaaaccgtggggctctctggggtctgggggaatacgggcaacagcagtcatgaggggtaccccccatactggcttccacctcctgcggcccagctctgtcctccagagcctagcgtctccctcaatcctttcccttttcttcccaacttctactttttggactttccccctcccattcccagtgttcaaaatctcagtgactaccccaggtacctttgctgctgatttgggtgtcttgtttaaaagaaaatcaggtgggtgggaatctcttgggagaactgaggctgagggtagatggagtatgccctaggtcttggagtcttggttccctnttcgcgggggttaaggggtaatttccctctccctcc

SEQ ID NO: 248165 - DNA, 1252 bp, Homo Sapiens
tggccttcacgtccctcggagctcggatcccagtgtggacctggactcgaatcccgttgccgactcgcgctctcggcttctgctccggggcttcttccctgcccgcccggggccctgaccgtggcttcttccccggcctgatctgcgcagcccggcgggcgcccagaaggagcaggcggcgcgggggcgcgctgggcgggggaggcgtggccggagctgcggcggcaagcgggctgggactgctcggccgcctcctgcccggcgagcatttcagaccatgtcgcctgaagaatggacgtatctagtggtttttcttatctccatccccatcggcttcctctttaagaaagccggtcctgggctgaagagatggggagcagccgctgtgggcctggggctcaccctgttcacctgtggcccccacactttgcattctctggtcaccatcctcgggacctgggccctcattcaggcccagccctgctcctgccacgccctggctctggcctggactttctcctatctcctgttcttccgagccctcagcctcctgggcctgcccactcccacgcccttcaccaatgccgtccagctgctgctgacgctgaagctggtgagcctggccagtgaagtccaggacctgcatctggcccagaggaaggaaatggcctcaggcttcagcaaggggcccaccctgggggctgctgcccgacgtgccctccctgatggagacactcagctacagctactgctacgtgggaatcatgacaggtccgttcttccgctaccgcacctacctggactggctggagcagcccttccccggggcagtgcccagcctgcggcccctgctgcgccgcgcctggtcggccccgctcttccggcctgctgtttcctgctctcctctcaccttcttcccgctggagggcgtggcgcgaggacgccttctacgcccgcccgctgcccgccccgcctcttctacatgatccccgtcttcttcgccttccgcatgcgcttctacgtggcctggattgccgccgagtgcggctgcattgccgccggcttttggggcctaccccgtggccgccaaagcccgggccggaggcggccccacctccaatggccacccccagcagtccgggagaaagccgccttccttggagtatgactaatgagacatccgcaacatcgactgctaaagcacagatttctgcctggcgggtgccccaatggcatgccggtactggaaaca

SEQ ID NO: 248166 - DNA, 1366 bp, Homo Sapiens
  misc_feature (1266)..(1266): n is a, c, g, or t
  misc_feature (1271)..(1271): n is a, c, g, or t
ttggctcttgtctgacttgggctgcacagatcctgggccaagggacagaagaaagacagcctaggagcagagcctcccagatggctgagttggatctaatggctccagggccactgcccagggccactgctcagcccccagcccctctcagcccagactctgggtcacccagcccagattctgggtcagccagcccagtggaagaagaggacgtgggctcctcggagaagcttggcagggagacggaggaacaggacagcgactctgcagagcagggggatcctgctggtgaggggaaagaggtcctgtgtgacttctgccttgatgacaccagaagagtgaaggcagtgaagtcctgtctaacctgcatggtgaattactgtgaagagcacttgcagccgcatcaggtgaacatcaaactgcaaagccacctgctgaccgagccagtgaaggaccacaactggcgatactgccctgcccaccacagcccactgtctgccttctgctgccctgatcagcagtgcatctgccaggactgttgccaggagcacagtggccacaccatagtctccctggatgcagcccgcagggacaaggaggctgaactccagtgcacccagttagacttggagcggaaactcaagttgaatgaaaatgccatctccaggctccaggctaaccaaaagtctgttctggtgtcggtgtcagaggtcaaagcggtggctgaaatgcagtttgggggaactccttgctgctgtgaggaaggcccaggccaatgtgatgctcttcttagaggagaaggagcaagctgcgctgagccaggcccaacggtatcaaggcccacctggagtacaggagtgccgagatggagaagagtaagcaggagctggagacgatggcggccatcagcaacactgtccagttcttggaggagtactgcaagtttaagaacactgaagacatcaccttccctagtgtttacgtagggctgaaggataaactctcgggcatccgcaaagttatcacggaatccactgtacacttaatccagttgctggagaactataagaaaaagctccaggagttttccgaggaagaggagtatgacatcagaactcaggtgtctgccgttgttcagcgcaaatattgggacttccaaaactgagcccagcaccaggggaacagttcctcccaatatgcgtatgacatcacgttttgaccccggacacagcacacaaggtatctccgggctgcaaggaggagaanccgcnagggtcaccaaaccacaccccccctggggagcattccctacccgggaactcccccagcaaggtttcctggcacctgggcgggcaagggtgctgaa

SEQ ID NO: 248167 - DNA, 966 bp, Homo Sapiens
agggtgggcggcacccgaaggggaaagcgggggaaacagagcgcctttttgtcttgaaaaagggagggtaggcccacggaacccccagaagcctgtggggtggaaaaggaagggcccaaattggaagggaaccatccaggggaggggcggcctggctgggggcgggatgggggccctcccctggccctgctcccggactccaggactggggtcctgccctggggttgcctctccggccaagcccctggcgtcttcccacagtgactggcccccctcctagaccctaggacatctgaagggcaggggtcccaatggcccgagggggtatggggcaggggcagcaggctgacccacctgggcccaaaagccacttgtgtttgggggctggcatgccacctagagagagagcaccctgggaaaggggtgaatgggagtttctctcctgagcggccccatgggggtgggggcaaacgagggggctttacctgtcttgaggcagtgctccctaagtgaagcaggcctatcccagcagcacaggggcttggctggcgcctgaactccctgtgtgagcagcacctgctcacagagcccctcagcctgcaggtgcacacctgaattccaagttctgcctggggcatggctgggaggggggcggggcagacctggaacagaaccctaagaccaccccctcctcatacctgggggtccagggcttcctgcccagtggagccagcactggctagccaggcgcctcctgcctgacccccggaggccaagctcctctcctgcaatggtgccaccctgcccggcaggcagctctgggggcatgggcaagggagaagggagggccgcagccctctaggaatggcctttctgagccactctgtggctggactggggctctggcaggagttgggggcactaacacctctgtcctcccctgggctgcacctcatctgacgttcc

SEQ ID NO: 248168 - DNA, 603 bp, Homo Sapiens
ttatcgtttggagaagtttattaccacccctaccctccagtgggatctcaatgtcacgatgagtccggggctggctttccgccgggaccctcctgtcctggcacatggcccaccccagcacgaagcctggccgggagggctcaggtgggtggctgctaggccaggcctccccagaacgactgccccatgtccagcctgtatctcctgagtgccatgctgcactggggagggacagggctggctcggggctccagggaaagatgcctcacatgtgcctagaaatgtagggcgtcaagggaaggctgtgtgtgggggcacctgaggggctgggcttcccaggcatctgagttcttacggagccctaataggcacatccccaaatggttgtatgaggatgagcacaaaaatagcagatggggtcaccctcaccctccactgacaatggactgggatccgactcatgcaacattccttctcggccgtaggttccacatccatgggttaggtgtgctggcctggagcccgccggccccggtccccaccgcacaaggaccccatcacaagtgggtgcctcgtccgaaacgccacccaggcctcgctcct

SEQ ID NO: 248169 - DNA, 921 bp, Homo Sapiens
gcggggttcgcctcggatctcaccgagaggggcttagccccgcgccgcgcccgagaggaccggtcctcccaacgcccccgggccaggggtgccctttcgcccccccttgctggggtgccgccaccaaaccccagaaggcccccccgatgatggatacccccaggtggggcaggggcataagaaaggagggggttctgcttgagcagccaggttaggagagccagcccgtttaaggccggtgttgagtgaccgggccccccattgtagaaggcccccccgcaggtacttgaggcagaggttattgaaggtgatcatgccgatgaagaccaccgacaggggccaggacgctgcgggccaccctgaggtccaggcgcaagctggggaagtccacggcaccagggcagcaggcggccagagcgctgaggcctttgcacagcagcgtggtcaccaggcactggtagaaggtgacgaagatgggggtgtccagccgcagggaggggctgtccagcaggtacttattaaggaacaccatggagatggaggtgacccagtagagggagaccaccagcgcgatctgcaatgcccgcagcagaaagggcttctccccgttggcctctgcctctgcagaggggtctgaggccccggtcagcgccatgtgcaggatcctggaccgcttcagaggggccctattcatggtagcagaggagctgggtcaccccgcggccagaactctgattccctggagtccagggcagtgagctcacttgtgctctccgcaaggaagccgcagccctccattgtcacatgtgggctggcctaaaggcctccccattgtcctcatggattgagaagttctgctttggggtgagcccagttgtgctgctccacaacctactcccaccccgagggggctctgagaca

SEQ ID NO: 248170 - DNA, 1002 bp, Homo Sapiens
ggatgctgagcgccttccgtctccccgcagccccctcatgcccggctgcgagctgcccgtgggcacctgcccggacatgtgcccggccgccgagcgcgcccagcgcgcaagggagcaccgcctgcaccgcttggaggtggtgccgggttgccgccaggacccgccccgcgcggatccgcagcgcgcggtgtaggagtacagccgacccgccgccggcaagccccggcccccgcccagccagttgcgtccgccctccgtgctgctggccaccgtgcgctacctggccggtgaggtggcggagagcgccgacatcgccctcgccgaggtggcctgcttcgtggcagaccgcttgcgagctgtgcgcctggacctggcgctgcagggagcgggcgacgccgtaggcagcggtggtgctggaggcggcgctggccacgctgctggccgtagtggggcggttcgggcccgacgcggtgcgtggacccgcggacccggtgctgctgcaggctcaggtgcaggagggcttcggctcgctgcggcgctgctactcgcggggcgcccgggccgcaccctccctcaagccgccctcccatgggcctcttttctgcatcgaaaaaccctgggagatggggaatcttcagcagggttggccaactcggattttcatgggggcttcaaaatggattccgttccttagcacgcaacccctctgtaaagttagcctcggggggtgggttgctttcaatgtcccccgagggcaatgggtttaaaattttctggcccaacccccgggtaccctgtttgaagaaaaaaggccatggtcattggaatgcgaaaccccctcgccagtactggcggcgttcccctattgcgttagttagccccctgggtggcgccatgacccgaccgcccttccaaataaaagtctcttgcgacgcgaaggaacagctcggtgcgttttggaatacaagggaacaaagccggggcccgacccttgttctcggc

SEQ ID NO: 248171 - DNA, 943 bp, Homo Sapiens
ttggaaccaccttcttttaggaaagaagatgaaaatgactaacagagctgccaagaatgctgtcatccacatccctggtcacacaggagggaaaatatctcctgtcccctacgaagaccttaagacgaagctcaactccccgtggcgaactcacatccgagtccacaaaaagaacatgccaaggaccaagagtcatccgggctgtggggacaccgtagggctgatagatgagcagaacgaggccagcaagaccaatgggctgggggcagcagaggcattcccctctggttgtacagcgacagctgggagagaaggcagcagccctgaaggcagtaccaggaggacgatcgaggggcagtctccggagccggtgttcggagatgctgatgtggatgtgtctgcagttcaggcgaagttgggagccctggaactgaaccagagggatgctgcagctgaaactgagctcagggtgcacccaccctgccagcggcactgcccagagccgccgagtgcacccgaagaaaacaaagccaccagcaaagctccccaaggcagcaactcaaaaacccccatctttagcccttttcccagcgtcaagcccctgcggaaatctgctactgccaggaacttgggattatatggccctacagaaagaaccccaactgtgcactttcctcaaatgagtaggagcttcagcaaacccggcggtggaaacagtgggcactaaaaaacgatgatgtctccctcgaaacttttgtatctggactcaccttttcacagtagtattagggttgcagcttgaatggctctaaaagagttttattttgtccagtgaaaatgaataggttcagggatgagcaacagcccattaaaaaatgggaaactggaagatttataataggagttagaacaggcctgttttcccagctacttgctaactgac

SEQ ID NO: 248172 - DNA, 1586 bp, Homo Sapiens
ttgggtcagatatctaactaggtatttggctacatctggacaactgattgaagggagatgctctctccccagtcctcttcccttgtcctttttagaattgctgcaggcccaggttaaatatgaaattactccctaggctttgcagtttatgttaccaaccaccacattttatagctatgtagaggatgactcttaggaaataaatattagaagcctagaaatcatttagttgttctagcaccaaatctatccatttgcctaatgtatttaacattccatcctcatcaacatgatgaagcccctttcttccatctttgtagggcacattgtatataaatattttgtacataaagatcatcaaataccataatggggtatttggcttcatctggaaaattgactggagggagatgctgtctcccagccctgcttccctcgtccctgtccaagttgctgcaggcccaggttagaagattaccaacctggaggggcatgcagttcatcttacaataaaagcccattcatttaaaaactcagaaatcatcccagtgcctgtactcctcaaaccaatttccctaagggaagactggcacaccagcccaaagagcaggtgcttctcttccaacagaaacatggcccctgacagggcaccagcattagggaaaccaatgtcctccgaatagctgccatgagaacatttcagatgctcaaactgaaaattcttaaaaccaatattaagcatcagcatgctttaagtgtaagatagccctttggaatttacaaacacatgtgcagctatttccttcttcacagatatgatgtactcagccccctcctaggcactacgaagaagacagaggaagcataaaaattctggagctaatataattttatatgtgtttctgagattggggagtagactgagtgccttttttacaaagaagatcccatatttaattcaagtatttatagcatcagcaaaaatgggcagagggcgggaagttgagaacactaggttctgtgctatgttacctgtattcagtagaagtgtttctggagtcaggttttaagtcatgatcctgaagcttccttcccctcttccactaatgatgcaataatagctgttttcattttaacgagcagagaactaagaggaaaggtcctagctctgccttccacttgcagcttccctttacctcctcttatcgctttcatctcaaatatccctgctactcaaccaatcctaaagctaaagtactgagatgcacacaaaggaaaggtgtgagagtgcttggaagcatccagctgagcccactggatgaaaatcagacgatagggcctcctggtgtaactatactagccagagcaaaagcgccaagaacttcagggatattattcactgctttcttgctccctaagcctagatcagatcggcatttcaccttggtagttcaggaccttaacgaagtccaaatcgctgaccgaggtgggcgacgcgatgacggacatccaacggtccacatccggccactggccagaacctgagcatttgctcaggctcactctccttcccccatcttgtctgt

SEQ ID NO: 248173 - DNA, 1548 bp, Homo Sapiens
ttggcgttctcgcacgcgtcatggcggtcctcggagtacagctggtggtgaccctgctcactgccaccctcatgcacaggctggcgccacactgctccttcgcgcgctggctgctctgtaacggcagtttgttccgatacaagcacccgtctgaggaggagcttcgggccctggcggggaagccgaggcccagaggcaggaaagagcggtgggccaatggccttagtgaggagaagccactgtctgtgccccgagatgccccgttccagctggagacctgccccctcacgaccgtggatgccctggtcctgcgcttcttcctggagtaccagtggtttgtggactttgctgtgtactcgggcggcgtgtacctcttcacagaggcctactactacatgctgggaccagccaaggagactaacattgctgtgttctggtgcctgctcacggtgaccttctccatcaagatgttcctgacagtgacacggctgtacttcagcgccgaggaggggggtgagcgctctgtctgcctcacctttgccttcctcttcctgctgctggccatgctggtgcaagtggtgcgggaggagaccctcgagctgggcctggagcctggtctggccagcatgacccagaacttagagccacttctgaagaagcagggctgggactgggcgcttcctgtggccaagctggctatccgcgtgggactggcagtggtgggctctgtgctgggtgccttcctcaccttcccaggcctgcggctggcccagacccaccgggacgcactgaccatgtcggaggacagacccatgctgcagttaagtgggtcgcttggtgggtggggggactagggagcttatgggagagactcgaggagagggggtacccaggcctcactccctcctgccctcaccccccaggttcctcctgcacaccagcttcctgtctcccctgttcatcctgtggctctggacaaagcccattgcacgggacttcctgcaccagccgccgtttggggagacgcgtttctccctgctgtccgattctgccttcgactctgggcgcctctggttgctggtggtgctgtgcctgctgcggctggcggtgacccggccccacctgcaggcctacctgtgcctggccaaggcccgggtggagcagctgcgaagggaggctggccgcatcgaagcccgtgaaatccagcagagggtggtccgagtctactgctatgtgaccgtggtgagcttgcagtacctgacgccgctcatcctcaccctcaactgcacacttctgctcaagacgctgggaggctattccctggggcctgggcccagctcctctactatccctcgacccatcctcagccagcgctgcaccccatcggctctggggaggacgaaagtccagcagactgcagcgcggattgccggggccctgtgtggcctgcttactcccctcttcctccgtggcgtcctggcctacctcatctggtggacggctgcaggccaccggcacgccagtcttttcggcctcgagcggcgcccg

SEQ ID NO: 248174 - DNA, 1088 bp, Homo Sapiens
  misc_feature (986)..(996): n is a, c, g, or t
  misc_feature (999)..(1000): n is a, c, g, or t
  misc_feature (1007)..(1009): n is a, c, g, or t
  misc_feature (1013)..(1013): n is a, c, g, or t
  misc_feature (1016)..(1016): n is a, c, g, or t
  misc_feature (1026)..(1026): n is a, c, g, or t
agccctgcggccccgcctcgtgttccacacccagctggcccatggcagtcccactggccgcatcgagggcttcaccaacgtcaaggagctgtatggcaagatcgccgaggccttccgcctgccaactgccgaggtgatgttctgcaccctgaacacccacaaagtggacatggacaagctcctggggggccagatcgggctggaggacttcatcttcgcccacgtgaaggggcagcgcaaggaggtggaggtgttcaagtcggaggatgcactcgggctcaccatcacggacaacggggctggctacgccttcatcaagcgcatcaaggagggcagcgtgatcgaccacatccacctcatcagcgtgggcgacatgatcgaggccattaacgggcagagcctgctgggctgccggcactacgaggtggcccggctgctcaaggagctgccccgaggccgtaccttcacgctgaagctcacggagcctcgcaaggccttcgacatgatcagccagcgttcagcgggtggccgccctggctctggcccacaactgggcactggccgagggaccctgcggctccgatcccggggccccgccacggtggaggatctgccctctgcctttgaagagaaggccattgagaaggtggatgacctgctggagagttacatgggtatcagggacacggagctggcagccaccatggtggagctgggaaaggacaaaaggaacccggatgagctggccgaggccctggacgaacggctgggtgactttgccttccctgacgagttcgtctttgacgtctggggcgccattggggacgccaaggtcggccgctactaggactgcccccggaccctgcgatgatgacccgggcgcaacctggtgggggcccccagcagggacactgacgtcaggacccgagcctccagcctgagcctagctcaacagcccaaggacgatgtgtaaaggggaaggtggnnnnnnnnnnnccnnttgcccnnncccngancggcgacccnacagactcccgtggcgtcacccacattgggtaccacagaatctcccgcccccccgtttgccc

SEQ ID NO: 248175 - DNA, 885 bp, Homo Sapiens
  misc_feature (294)..(294): n is a, c, g, or t
  misc_feature (598)..(651): n is a, c, g, or t
aggaattgggcctgggggaatggacccttaaggcccaacatggccccaggaataaaaagggggccggggcaaaaatccttgttctggcccaccaagatccttcctaagaaaagttgggtgggggctgtggaagatgtttccttttgaagaggtaagggcaagcccccactgtggcccaggtcccaggtcccttccttgggagccagcactcagagagaagctaagtgctggtacccccatttctaacttgggtgcaggcagggaggctcggccttcagacaggcctccctcacncccactggacaccaataaatcctggatgagatctgcagagggcccaaggccctggggcagtggagggctcagaggccatgaggcagggcctgcagccagcccagacctaggccatggtggcccctgcctgattagtggcgttacctgagtggtttggttgggcagggtggtctctggggccagcaaggtagcagtggagatatggtgaagaggggactaagggaggaagcaaagggccaggaagggcataagagggaagtgggggccaggggggaggccagatgaggacggtgtggggggcgannnnnnnnnnnnnnnnnnnnnnnnnnnnnnnnnnnnnnnnnnnnnnnnnnnnnnagacacacgggaaggggagtggggttggacgaggcctctgtcccaccccagggtccaggctccagcaggtggagaacaggctcttcctgtgaggatgccaccagcatgggggtaaggggtgacacctggagggacttgctggctctgcagctgcacagaagtcccatgtgattctgagcgtgaatgatgggggtcgtgagcagaaaggggtgaaaggagcaggcaaggtggggc

SEQ ID NO: 248176 - DNA, 1333 bp, Homo Sapiens
  misc_feature (907)..(907): n is a, c, g, or t
  misc_feature (1045)..(1077): n is a, c, g, or t
ttgggacccatttccctcggatccattcacgaaaaacccttccttaccttcgaagctcgacccctttgaatccagtgatcccttttcatcctccagtgtctcctcaaaaggatcagatccctttggaaccttagatcccttcggaagtgggtccttcaatagtgctgaatgctttgccgacttcagccatatgtccaagtttggcaatgaggagcagcagctggcgtgggccaagcgggagagcgagaaggcggaacaggagaggctggcgcggctgcggcggcaggagcaggaggacctggaactggccatcgcgctcagcaaggctgacatgcctgccgcctaggcgagggccgtgtgtaggcgggacagggcacgggcgggttccagagagggggcagtgcagatgtctatatatacacacacacaccgtcgccaccgtactccaaggaccgggactcgggggcttgttcagggtgagcagactcggctgcaagacctggaaaggtcacatctcctggggaagcccttacagaggccttggccaccacttctgcaggtccgtctctccactgtgccatcccccccggggctgactgcctcccgctcttcctctggggacgaacacacagcggtcagtcgaggagaggaagcacccagggcttccccgcctcctccctactcatagctgcagacatcccccgcccgcccttcccacgcatcgaggcaggacactccccccagggggcgtatgcgcctcccttgctatcacaacggaagggttcggacatgacttaactactcaaaatgatcctttaaaccacccccccacccgcgaacgacaatgaaaatcctcccgagcggccccgccccacacgcccgggggtgggcgcggctacaaaaacgngggggggttaagtcgataaaacaatgtggggccacactataggggaaccaaacagagaaagctggtacagttatcccggcgaggccccccaggacctttctccccctcggggcgccccgacaagcgggcggcgtagannnnnnnnnnnnnnnnnnnnnnnnnnnnnnnnntagaatcagcggggccggaccgccggcgacgcccacgcttctcgcgccacacaacaggcagaggcgccaacacaccccggtgggcctccgcgggggcccacctcacagtattatccactcccacccccggcgggagaaactttactacccccccgcccagctaaacggacggcgcgggcgccccctgttcttgttttgcgaccgaacaccccaaaccgccgcatccgtgtctcttgtgggcacccccgtgtgttat

SEQ ID NO: 248177 - DNA, 1287 bp, Homo Sapiens
gctggcggagcggctgggcggcgggccgggcccggggccgcttggaatggcgcctcctccgccttcgccccaactgcttctcctggcagccctcgcgaggctcctgggtcccagcgaggtgatggctggaccggcggaggaggcgggagcccattgtcccgagagcctgtggcctctgcctccgcaggtgtcaccaagagtgacctacacacgagtgagcccagggacaggctgaggatgtcaccttcctctaccacccctgtgcccatccctggctgaagctccagcttgccctcctggcctatgcttgtatggctaacccttccctcacccctgacttcagcctcacgcaggatcggcccctggtgctgactgcatgggggctggcgctggagatggtctcgggtagagccagcctgggctgcccactggctgatgaggaggcggaggaggaagcagaggaagaagaaggcatggcatctactgtgaacagcctttcagggcctgctccctccgagccaactcccggtagagggaggctgtgccgaagagggtgtgtgcagggcctggcatctggccttttgctctgcggagctggcggccccctggcacagaggtgacatctcaagggcccaggcagccctcttctagtggtgccaagaggcggaggctgcgggctgcccttggtccccagcccactcgctcagccctgaggtttccctctgcttccccagggagcttgaaggccaagcagtccatggcgggaatccctggtagggagagtaatgccccatctgtgcccactgtctccctgctgccgggggcgcctggaggcaatgccagctccaggacagaggctcaggtgcccaacgggcaaggcagcccagggggctgtgtctgtacgagtcaggcttccccggcccctcgcgcaacagggcctccacgggcagcccgggggcccaccccacgcaactggaagaggccgcctgggctgccagggtcctgaccttcctgctggggctgctccccccggccaggctcggccaagggcctgccacagaaactttcgaacgcggggagatcctctacgggggggcccacggggggacagtccaggacaccttggcctggcgtgtctggaagcggcaggctggtggcgacccgttcgccatccgggacgtggggattgttaaacggaaaagcgccttcctccctggccaaggcggttacagtcggcgcatgccagagtacacacctttcatgtgcacggacctggggtaaccgggc

SEQ ID NO: 248178 - DNA, 405 bp, Homo Sapiens
  misc_feature (316)..(316): n is a, c, g, or t
  misc_feature (318)..(318): n is a, c, g, or t
  misc_feature (369)..(370): n is a, c, g, or t
ccttcttcccctggccaacctgcccctggaacaaccaacttcccccaacaggctcccaggccccactgtgcccgggacccctgcacttcaagtggatatagcagtgtgcccagatgggaagccgctggtccgcgaagccctgccgcagctgtgccgtggtgtccagctccggccaaatgctgggctcaggcctgggtgctgagatcgacagtgccgagtgcgtgttccgcatgaaccagtgccccaccgtgggctttgaggcggatgtgggccaggcagcaccctgcgtgtcgtctcacacacaacgtgccgctgncntgcgcaactattcacactacttccagaaggcccgagacacgctctacatannatggggccagggcaggctcatggaccgggtgctcg

SEQ ID NO: 248179 - DNA, 978 bp, Homo Sapiens
  misc_feature (258)..(258): n is a, c, g, or t
ttggcttccgtaaacaaacggagctgcggaggagcgggtcccgggatgtgaccggggctctgcttgtggctgcggcggtggcttctgaggctgtcgggtctttgcgggttgcggaagggggccccaatacccttcttcttcaggtcttaagaagctggccgtggtgcaataaggaacttaaaacaatggaagagcggaaagtgaagaggaggagtcctaagtcttttagtgcccactgtactcaggttgtcaatgccnaaaaaaaatgccattccagtgagtaaaagcacagggttttcaaatcctgcatcacagtcaacttcacagcgaccaaagttaaaaagagtgatgaaagaaaagaccaaacctcagggtggagagggcaaaggcgctcagtcaactccgatccagcactccttcctcactgatgtctcagatgttcaggagatggagagagggctgctcagtcttttgaatgatttccactctggaaaacttcaagcatttggaaatgaatgttccattgaacagatggaacatgttcggggaatgcaggagaaattagctcgcttgaatttggagctctatggggagttagaggaacttcctgaggataagagaaaaacagccagtgactccaatctggataggcttctgtcagatttagaagaattgaattcttccatacaaaaactccatttggcagatgcacaagatgttccaaatacttctgctagctaaaatgaaatgtagtttgctttcttgtgatttgaagagaagcagcagtctttacttttccagccaaatccagtagcagaatcatcttccacaacaaggaattaaagtaattaaagtgcaagttcaatgatcgttttcacttactgcttttaataaatgggactcgctgtaattcgccctaactggaaggctagggccttgttgaaagccttcattcaggaatggtgacgcaaagattgg

SEQ ID NO: 248180 - DNA, 803 bp, Homo Sapiens
  misc_feature (667)..(667): n is a, c, g, or t
tgctgcgcgggttggtacgcgtgctgaaccgctccttcgagaaggcggtgcacgtgcgggcctcacacgacggctgggcttccttttgcgaccacccagcgcgctacgtcccgcgcagcccgccgtgggcaggagcgggaggaacaggagcaggagatcccatcctggatccggggctcggcctgggtcccggccaggcatccgcctcctcgcccgacgacggcggccgcaccgaccgctttgccttccagctgccctttgctgagggcgcgggcgatggggcgcgcctcgacttcgtggtgcgctatgagacccctgagggcactttctgggccaacaaccacggccgcaactacacagtcctgctccggatcgcacccgctcccacacccactgatgccgaagggctgccccagcagcagcagctgccgcagctggagccacagcccgagtgccagggtcccgtggaggctgaggccaggcagctgaagagctgcatgaagccggtgaggcgcaggcctgccgaggaggaactgaagacgaagaacatggatgataacacctttgccatggcagagcatcctgatgtccaggagtcagtgggtccactggtagcccccacccctctccgtccatggccccagatgacacttcaggtttctgacgnttccgatgactggcaaacccccgcaaaaagaaagggggatgtccccccagaaaaccaggtcccccccgggggggtttttttaaaaagaaaggggtcccctccccaggggcacccgcgggggcctatataaggggga

SEQ ID NO: 248181 - DNA, 1375 bp, Homo Sapiens
  misc_feature (792)..(800): n is a, c, g, or t
  misc_feature (953)..(979): n is a, c, g, or t
ttggatccccttcaacctggtcatgccacccatgccaccgcctggctattttggacaagccaacgggcctgctgcagggcgaggcaccccgaaaggcaagactggtcgtgggggacgccagaagaaccgctttgggcttcctggacccagccagactaacctccccaacagccaagccagccaggatgtggcgtcacagcccttctctcagggcgccctgacgcagggctacatctccatgagccagccttcccagatgagccagcccggcctctcccagccggagctgtcccaggacagttaccttggtgacgagtttaaatcacaaatcgacgtggcgctctcacaggactccacgtaccagggagagcgggcttaccagcatggcggggtgacggggctgtcccagtattaaaaggtggcggcggaagagctaagcaacgtggcttagtccatcagcatcttattctgggtaataaaaaataaaaataaacggatacctgttttccactgctaaaactgaagcaccactgtgtgagcaacaggaagggagagcgcacgagggagaggagccgaggccgagcgccccctgctggcccgcggcggcgaggagcagagggagcggaggaggggccggcccgcgggagccgcggccaccaggaggccccgctccgtcccatcggggctgcggccagggcggagggaggaagaccctcatctcagagtagccctttcctctgttcttttatttctttttctctttgattgaaaggggactacgtcttagcaggnnnnnnnnncttcgcatttctgtgcccgagcaggctccttgcaaagacagcagcgtgcggggcagagccccgggagggcgcggtctgtccacgcctaccggacgcgccgaggtcgcgctgcctgtgttctccgagggccttcatttaaagaaaataagggtnnnnnnnnnnnnnnnnnnnnnnnnnnncaagattcttttaaaggagtactgaagaatactttcctaagtttgtctgtaaaaatctttagcggtggacctgggagatttgagaagcttccagaaacggtttaaacaagccagcgctactggagaagaggagcaacacctgtgccgcggccgggaggagttttgtttgtggtttttagcttccagtggcttcctttctgcggggcatcaagcctgcttggggtaacccccccgcccgagccctggaaaactggctcgtttctccgcttgggaactcaaaagaccaaagctgctttcccggcctaaaaccctcggggcaaggcgccccccccacccggtggaagggaaaggggggcctttttgggccccacattggcggaggggggcctcttggcc

SEQ ID NO: 248182 - DNA, 889 bp, Homo Sapiens
  misc_feature (386)..(435): n is a, c, g, or t
  misc_feature (731)..(731): n is a, c, g, or t
  misc_feature (799)..(799): n is a, c, g, or t
ccgagtgtcccccagcaagagcaccagcaacatcaccaagctgaatggcatggtgttactgtgtaaagtgtgtggggacgttgcctcgggcttccactacggtgtgcacgcctgcgagggctgcaagggctttttccgtcggagcatccagcagaacatccagtacaaaaggtgtctgaagaatgagaattgctccatcgtccgcatcaatcgcaaccgctgccagcaatgtcgcttcaagaagtgtctctctgtgggcatgtctcgagacgctgtgcgttttgggcgcatccccaaacgagagaagcagcggatgcttgctgagatgcagagtgccatgaacctggccaacaaccagttgagcagccagtgcccgctggagactnnnnnnnnnnnnnnnnnnnnnnnnnnnnnnnnnnnnnnnnnnnnnnnnnntgctccggtcccctcacccctggtgggcttctcccagtttccacaacagctgacgcctcccagatccccaagccctgagcccacagtggaggatgtgatatcccaggtggcccgggcccatcgagagatcttcacctacgcccatgacaagctgggcagctcacctggcaacttcaatgccaaccatgcatcaggtagccctccagccaccaccccacatcgctgggaaaatcagggctgcccacctgcccccaatgacaacaacaccttggctgcccagcgtcataacgaggccnctaaatggtctgcgccaggctccctcctcctaccctcccacctggcctcctggccctgcacaccacangctgccaccaagtccaaacaggcaacggggcaccggtctatgccccccaccccaccgtggtatgccagcccccccagaagggcaaggccc

SEQ ID NO: 248183 - DNA, 2265 bp, Homo Sapiens
  misc_feature (311)..(435): n is a, c, g, or t
tacaaaaaagttggggaggctctagatggcggctgtgccttagagagagcgcgctctgctccctgcctttgcctcactttacgcaactttccctaactttcgggcagcctcagggggcccccgtagccccctgcctttcctagggacttactggggtcgattcgaacctttttttgggagaaaagcagcttttaggagctttcttttcgtgccttgttggaaagaagcagccgtactgagagcccaggtcgttgttttttccagcttagaagccatggcgcacctccatttttgtgcgctctcctaatgannnnnnnnnnnnnnnnnnnnnnnnnnnnnnnnnnnnnnnnnnnnnnnnnnnnnnnnnnnnnnnnnnnnnnnnnnnnnnnnnnnnnnnnnnnnnnnnnnnnnnnnnnnnnnnnnnnnnnnnnnnnnattatttgggatctgatatttttctactagtagataggactcttggtttggacatactacatggatcaggtaagttcacgatcattggtgataattttaaagatttatttgtttaagtttgccttgttttctgtaaatacgagaaattcttggatgacgcaataagatacagagattgttatctgtatctagtgtgctactttgagaaagtttccttattgatagtgatgcttccactgttcggtttatcctgttgttttttcttttaaggaaaaaatagaaatatttagttttttggtgcttaccgttgttgtgttataacaatatcgttaacatcgtcaggactttgttcctgataataaaaagcatcgatagaagccgggaccttacctttctttcaacttttgacagtaaatacctgggcacaggacttcaaagcaaacacagattccccctcccccttaatatttaagaattaaaagatgatgagaaataaggacaaaagccaagaggaggacagttcgctacacagcaatgcatcgaggtgaccaagaatatggcccaggtgaccaaagccctggacaaggccctgagcaccatggacctgcagaaggtctcctcagtgatggacaggttcgagcagcaggtgcagaacctggacgtccatacatcggtgatggaggactccatgagctcggccaccaccctgaccacgccgcaggagcaggtggacagcctcatcatgcagatcgccgaggagaatggcctggaggtgctggaccagctcagccagctgcccgagggcgcctctgccgtgggcgagagctctgtgcgcagccaggaggaccagctgtcacggaggttggccgccttgaggaactagccgtgccccgccggtgtgcaccgcctctgccccgtgatgtgctggaaggctcctgtcctctccccaccgcgtcttgcctttgtgctgaccccgcggggctgcggccggcagccactctgcgtctctcacctgccaggcctgcgtggccttagggttgttcctgttcttttaggttgggcggtgggtctgtgtcctggtgttgagtttctgcaaatttctgggggtgatttctgtgactctgggcccacagcggggaggccaagaggggccctgtggactttcacccagcactgtgggggccttcagactctggggcagcagacatgctgcttcccatcagccagagggggtcagggctgccctgttgccaaacaactccctgaggcctctccgcaccacctcagcgggcaggaggtcccaccatgtggacagacatagcccaaggaggcaccacaggtctatgtgtgctgggggatgtcaggtgccacccaacgctgtcctggtggtatttacaatgacatcctcctcctccatcactccaggggtggtgtctcggccgcccctaccagctggctgagccccctggcctcctgcgctccctcacttccctcagttcccaaagctgcccagtccatggggacagaaccgtcactcagatccacattcaagtgtgcccaccctgcagtcttcatcctcactcagctgctgcctctggaggtgcctttggccacatgtgcttgtgctgtttgtctcctcgacagggagcctgtcccaccaccaggctgcgggtcccagcggggttgcgtctgccagctccctcccccttggggcaacgcctggttttctccccgggaaggaacccttttccctttggggggcccctggctttccatagaacccaatatcttgccccttggggaccaaccctctctttaccaattccttgg

SEQ ID NO: 248184 - DNA, 1858 bp, Homo Sapiens
  misc_feature (1173)..(1205): n is a, c, g, or t
caataaagggcaactttgtacaaaaaagttggctcctggccaacctatagaaacacacaggcaccactgtgaatattctcctctgaaccactagagggcaggccaggcaggccaggcgggcccgtgcagcttgtgggcaagaaggagctggcaaggaccggcgctgctggagactgacccagccctctggctgaggacatgcagcagctcctaaatgtagagatgcctgtggctgagggggcctctctacctgtgtccccactcactccaggagcactggctttggtcacgtcttagcagcagggccttgctccgttgttcccttgccctggtggtgggggggccagaccgcctccggaatcctgccacctgtgactgtctgactgcttagtgcttcagctgtcccttccttgtgtcctgggggacctgctggcggcctcttcctgggagccatgacctcagaccccacccacactccagatcgagacccctgcctccccccggcaattgtcctcccgctgccttgcagcctgcactttgcacatgctcacccccagcacagtcccactggcccctcacctccccttccctgagctccttcccaaggactcctggtcactgcctgctgtgcagtcagaggcccagggtccagcagcccggcgggaacgggtgctgcctcttcctccagttagctccagctcaggtctgagacccgtgctgagaaaggtctgagcaccgaccgtgccctctgcccagggctgggtcctgagcagctggttttcctgcaggaaggttggagcaagcaaagtccttctctgccctcagggtcagctgcccagactggggcggatgccagagaggcaggtgggctgtggctggactggtccggagctggcttccttaccagaaaagcctcagccttcctctggaagcatcccccgttctgggcaagggggaagggctcctttaaggggtgtgctttcccagtggggagcagtctggccctgccccctactaaagcctctgctctcagcactttcccccaagtccttgtaacttgcttgaaggtgggttctggctgccagccagtccctggacaaactctcctgccccttttaaatttcactcattttgtataaacccagcaggctggtgtttacttagccctgtagnnnnnnnnnnnnnnnnnnnnnnnnnnnnnnnnngagttcacggttcaatattgcctcctcgccctggtgaggggaggtgctgcttttctgccccacctgccggctggttccagcagcgctggggcccagctggggggccgggatgggggcttctctctctgggaggggtgcaggtgccctccccaggctgggagggttccttccctagctccccatctgcccccgctggtgagagttgggcttcttggtcttggaactccctggcattgggaacagagcatttccagcatttgttgttgttgttttactcacctagcccttagaaaatgaatgttagaaggtgcctgccgaggcgggacagagtgtttgctcgcgctggagaaggctctgctcagccctgagagtcccttcctgccccaccgatactggcactttaaaaaggaagctgaccgcacagtgtccagacgaattggccccagaagatggggagttctgtcctgcccttctgtgtctgcgtgacctcacccagcctaggagggaggtgcatccaggctagattagcctctcattcaaagttctggggctatgggcaggaaacaagcagctatggcgctagtaggggagactcctccagaccaggaaccccagaaggagacagaaactgccacatcctcccacgccaggcc

SEQ ID NO: 248185 - DNA, 924 bp, Homo Sapiens
  misc_feature (539)..(570): n is a, c, g, or t
  misc_feature (824)..(834): n is a, c, g, or t
cctccggagaacgtggctcctccaccccaaatcacatctctgccctcaaacatcgcgctgtcccctaccttgccgcagtccctggccccctcctaggaaggcccgggtcccacaggcaacacctaagtggaccaacccctctgcctgtcctgccccccagacgatgactgaaggctcctttgacaccttgagatgattctgctactttccagacttttcttacaaagcaaacacttttattttctatgcaaaggtgattcagagaatttatataaaggcgggcgaggggcagccgagcagggagctttgggacagggctgggcccccatatcccccccgggccacctgctttccctcctatggctcccctggaacaggagggagagccaagggggcggcccagcctgggacagcgcccgttcctgcctgggtgcagacacggcgggcctgagctccagcatctgagtttgggggtatgagaaacaggggagcagaaggagaagaaaactgcctgtgctgcaacacgtttcctcatttannnnnnnnnnnnnnnnnnnnnnnnnnnnnnnnggagggagaggtccctgcaaggtcccttcccgggcaggggagggatggaaatgccgtcacagtagtagggactggagcgtctacaaggatggaggggagctactcaggcctaacgttagctacaaggaaaaaggacgcctttccgtgacagattctttgaggtgtctggtgtctgcccccagtgggccggcagttggccttcccctccggggcccaaggccctgcagccaacctgctcttaaactctttggaannnnnnnnnnnccaggtcagggaaacacttgaaggggggcctccgggtgaaagagagacattgaacgactagataagggctagcgggacacccggagggac

SEQ ID NO: 248186 - DNA, 801 bp, Homo Sapiens
  misc_feature (76)..(76): n is a, c, g, or t
  misc_feature (620)..(681): n is a, c, g, or t
cccctttttttcccacttccccaatttttaaaaaaaatccccgatgcggcataaaccagtgtcagcaaccctccanctaattaaaggcttccaaccagaaggaaagctgaagtaagtaccagcgatcagcatcaaatcatcacttttaggggctgacctaaaagaccccaagctgaaatgccccagcacccactgggcaaggggcagccagtccccagcatggcctaatccaggccaagcaggaaatttctggaatcagctgctttttccacatttctctatctagaccccctcctcctggctgcctctctggttcagtggtggcgttcccctgagcttgaccgggctctgcagatgggctggcatgcatggaagaagctggcgctgtgaggagtcctggcttcccgctcacagccattgggccttgggtgagtcagtcagtctctccagaccttgaggtcttcacccaggacatgtggaggctcagaaaggagcccaggttcctgcccatctggaaaatctgcatgttcctggttgcagcaagagtctgccaggctcacacttgcaaagtactggtccatataaaagcataaagcaggccaggcacagcggctcacacnnnnnnnnnnnnnnnnnnnnnnnnnnnnnnnnnnnnnnnnnnnnnnnnnnnnnnnnnnnnnnaagcctgggcaacatagcgagaccccatctctacaaaaaatacaaaagttatctggatctggtggcgcatgcaagcggtccctgctacttgggagaccgaggtgggaggattgcctgagc

SEQ ID NO: 248187 - DNA, 1316 bp, Homo Sapiens
  misc_feature (1088)..(1098): n is a, c, g, or t
ttggcggaggactgcaggggcctgagccgctgctgccgccgccgccgcgcagccccacatcaacgcaccggggtcctgtcaccgccaccgccaaaaaagtcaccgccgctagggtcgccgttgcatcggtgcagggcaagatggcatccgccacagactcgcgctatgggcagaaggagtcctcggatcagaacttcgactacatgttcaagattctcatcatcggcaacagcagcgtgggcaagacgtccttcctcttccgctatgctgacgactcgttcacgcctgccttcgtcagcaccgtgggcatcgacttcaaggtcaagaccatctatcgcaacgacaagaggatcaagctgcagatctgggacacagcagggcaagagcggtaccggaccatcaccaccgcatactaccggggcgctatgggcttcatcctcatgtatgacatcaccaacgaggaatccttcaatgcagtgcaggactggtccacccagatcaagacctactcatgggacaatgcccaggtgctgctggtaggaaacaagtgtgacatggaggatgagcgggtggtgtcatcagaacgtggccggcagctagctgaccaccttgggttcgagttctttgaggcaagcgccaaggacaacattaacgtcaagcagacctttgagcgcctggtggatgtcatctgcgagaagatgtccgagtcgttggacacggcggaccctgcggtcacaggcgccaagcagggcccacagctcagtgaccagcaggtgccaccgcaccaggactgcgcctgctgagagccatcccactccctttcccctcttccctgtcttccccaccttcccccaactacccgggcctgacccggcccctaccagccacgggcacaagacccctgctcctgacttagcccgtcacccttatttattattgtagctatttatttatttattgaagatgtcccccaggggcccaggctcccctgcccgccccaagccctgcccctcctgtacatatagccctttccccactcagctgtggtgtctcgtggccccgtgaactcaccgctcaccctcctgaannnnnnnnnnngccttttttttaaaattcacccccatccacagttgtcagttgtgaagaggggccagatgacaccctaaagcaggctgatcgggcaatgggaggtggccaggcctgccagcccctcggctctgccgcggtgggccgaggccgctgttgggggtttccctgtgtggaccatggggatcagagtctggcctgccaggctcctctccccgtttctctttttt

SEQ ID NO: 248188 - DNA, 966 bp, Homo Sapiens
cggcacgagggtccctgcccatgaggatgagatgacccatctgttgcatcccggctgctgataaaacaagaccctcggagccaagaaacaacactgagttccagatttcggaaggttcacgagtgttgccgacacgccctcccaactgcagacatcctccctggaggacctgctgtgctcacatgcccccctgtccagcgaggacgacacctccccgggctgtgcagccccctcccaggcacccttcaaggccttcctcagtcccccagagccacatagccaccgaggcaccgacaggaagctgtccccgctcctgagccccttgcaagacttcactggtggacaagaccctgctggagcccagggagatggtccggcctaagaaggtgtgtttctcggagagcagcctgcccaccggggacaggaccaggaggagctactacctcaatgagatccagagcttcgcgggcgccgagaaggacgcgcgcgtggtgggcgagatcgccttccagctggaccgccgcatcctggcctacgtgttcccgggcgtgacgcggctctacggcttcacggtggccaacatccccgagaagatcgagcagacctccaccaagtctctggacggctccgtggacgagaggaagctgcgcgagctgacgcaacgctacctggccctgagcgcgcgcctggaaaaactgggctacaagccgcgacgtgcccccgggcgttcagcgaaggtccccatccacacccaagggaaacctgaaagcagcgggcccgaacttgggcgccaacccccctgcacaagaagccccgggccgggcctgggccaaggctgggccctccgaacgtggggggcccccccaaggttcccttggcgcgacctccgatggttgtctggcccccaacctggcccggggggcggcacgcctccctccttaggggaagggaacgggctaaaggccc

SEQ ID NO: 248189 - DNA, 470 bp, Homo Sapiens
  misc_feature (422)..(422): n is a, c, g, or t
  misc_feature (441)..(441): n is a, c, g, or t
  misc_feature (449)..(449): n is a, c, g, or t
agatgcctgactccagggaaacctgaaagcaagaagttaatggactgtttattgtaacttgatcctcccgagctgtgagcgcagtctgaggtgtgaggacacggcctcctgttggagtcccattttctccatcagggcacgtgggcggcttcctcaagcccggagagctcccaggcgcacaggggccgccggtaacaggggccgccgcaaaaggcccttttccagtcatagcactgaagttgcaacttttttcttgtaattgttttgctactaagataatttcagaagttcagtctattttttcagcggatactgccgccaccaagaatccaaaacctatttttgacttggagagacttgcttttgttggttccgcccgtgggagacgacgatagtgtttctgtataataaagtttctgccngcttgtgggccagggtccntttcggtngggatggggaccacagacagg

SEQ ID NO: 248190 - DNA, 780 bp, Homo Sapiens
ttggtttgcttttccccacgagtgaccacggctagataggccgccggccagatgtggcgggggagagccggggctttgctccgggtgtgggggttttggccgacaggggttcccagaaggagaccgctaagctgcgatgctgcgtcgcaggcgggaagcaattatccccgctgttggaactgcggcggcccatggggccccgggcgggaggacaggttcttctgcccacagtgccgagcgctgcaggcacctgaccccactcgagactacttcagccttatggactgcaaccgttccttcagagttgatacagcgaagctccagcacaggtaccagcaactgcagcgtcttgtccacccagatttcttcagccagaggtctcagactgaaaaggacttctcagagaagcattcgaccctggtgaatggtgcctataagaccctcctggcccccctgagcagaggactgtaccttctaaagctccatggaatagagattcctgaaaggacagattatgaaatggacaggcaattcctcatagaaataatggaaatcaatgaaaaactcgcagaagctgaaagtgaagctgccatgaaagagattgaatccattgtcaaagctaaacagaaagaatttactgacaatgtgagcagtgcttttgaacaagatgactttgaagaagccaaggaaattttgacaaagatgagatacttttcaaatatagaagaaaagatcaagttaaagaagattcccctttaattgtggatagtttaaagttta

SEQ ID NO: 248191 - DNA, 1110 bp, Homo Sapiens
  misc_feature (574)..(603): n is a, c, g, or t
  misc_feature (697)..(697): n is a, c, g, or t
  misc_feature (812)..(812): n is a, c, g, or t
  misc_feature (817)..(817): n is a, c, g, or t
  misc_feature (903)..(919): n is a, c, g, or t
  misc_feature (1065)..(1065): n is a, c, g, or t
ttgggcatgcccggccgccaagcccggtggggggcccccttcgccacctccaggcatcccaggccagcctctgccttctccaactcggcttcacctggggggtgggcggaactcaaatgccaatggttacgtgcgcttacaactaggaggggaggaccggggagggctcgggcaccccctgcctgagctcgcggatgaactgagacgcaaactgcagcaacgccagccactgcccgactccaaccccgaggagtcatcagtatgaggggaacccccaccgcgtcggcgggaagcgtgggaggtgtagctcctacttttgcacaggcaccagctacctcagggacatggcacgggcacctgctctgtctgggacagatactgcccagcacccacccggccatgaggacctgctctgctcagcacgggcactgccacttggtgtggctcaccagggcaccagcctcgcagaaggcatcttcctcctctctgtgaatcacagacacgcgggaccccagccgccaaaacttttcaaggcaagaagtttcaagatgtgtgtttgtctgtatttgcacannnnnnnnnnnnnnnnnnnnnnnnnnnnnncacgcgcgtgcgcgcttgtggcatagccttcctgtttctgtcaagtcttcccttggcctgggtcctcctggtgagtcattggagctatgaaggngaaggggtcgtatcactttgtctctcctacccccactgccccgagtgtcgggcagcgatgtacatatggaggtggggtggacagggtgctgtgccccttcagagggagtgcaggncttgnggtgggcctagtcctgctcctagggctgtgaatgttttcagggtggggggagggagatggagcctcctgtgtgtttggggaaaaannnnnnnnnnnnnnnnnctcccactttgcccccggtggtttcaggggtaattttatacctgggcctccctccctggaacaggggctctggggaaaagagctttttgctaaaggggtcacaataaacgcaaataacggttttggtgcctctagtccgtctggangcaatgaggagagtttacatcctttttgtctacatattctccgaa

SEQ ID NO: 248192 - DNA, 538 bp, Homo Sapiens
ttaaaacaaaacagaaaaatttagtttaaggctgtgaattgtaaccattttagggtatttcatggagactttattgagataccattaaagccatggtaaagctctaatgagaaatatatctagataacattttcttaaaaagtgtagccaaattatggctgattgcctgggtttttctcctgtacatcagtttcttaatcttgcattacaacctaaattattctgggcctggaagtatcttagcaggttctcaagcgattcttagaaaatacttgtgcagcagtctcttctagacaaattcagacagcaacggtgtaagtttttatgatgcggtggattaattaggtttagaataatttcttgcctccaaagtaagcaatagcatcctcagtagttgcgaggactccttttcccacacggacaagttcaccatgaaatctgaaagttaggtgctgcttggcagtgtgctacactttatgtgtcggtgaccaggagtcacagatgggatgagcacactgggattcaacatacaaacggc

SEQ ID NO: 248193 - DNA, 920 bp, Homo Sapiens
  misc_feature (748)..(748): n is a, c, g, or t
acagcagctgccgtgaccgctccacctggccctggcgcagctgcaggggcggctgccagctccgccatgacctacgcgcagctggagagcctgatcaacaaatggagcctggagctagaggaccaggagcggcacttcctccagcaggccacccaggtcaacgcctgggaccgcacgctgatcgagaatggagaaaagatcaccagcctgcaccgcgaggtggagaaggtgaagctggaccagaagaggctggaccaggagctcgacttcatcctgtcccagcagaaggagctggaagacctgctgagcccactggaggagttggtcaaggagcagagcgggaccatctacctgcagcacgcggatgaggagcgtgagaaaacctacaagctggctgagaacatcgacgcacagctcaagcgcatggcccaggatctcaaggacatcatcgagcacctgaacacgtccggggcccccgccgacaccagtgacccactgcagcagatctgcaagatcctcaatgcgcacatggactcactgcagtggatcgaccagaactcggccctgctgcagaggaaggtggaggaggtgaccaaggtgtgcgagggccggcgcaaggagcaggagcgcagcttccggatcacctttgactgagcgacagcagccctggggcccgcaggtcccctagggagttcatgaggggaatgcgccctgttgtctgtaatatttggggttgtggcaagatacnttggtttgtttggtttctttttttcacatgactgcccttgacatgatcgctggtgtgctttgcgtttttccattttaggaaagggaattctgggggccttctgcccaggcagcaagccttcatgggtggtgggcttctgtggggctttcattttggaagtatccttttggcc

SEQ ID NO: 248194 - DNA, 483 bp, Homo Sapiens
tattattttctaaagtggaaacaaagtttcaaatgagaaagaaaagttgtaagccagtccagtgatgatgtccagaatttattactcctggaagaacagactcaaaacgcaggtgagagccacacaggtgtccaccaagacggatggagggggactcaggccaggggtggaggctgcagagtggcaccggtgggcatgccaggcacctcaggctttctcatccaggcgtgtcctgggctgtgaaagggaccaggtagcccctcccatgccacacgtggcctccaaaggcccagatatgtacagatctacagacgtgcactccctggtcccccggcgaggtccaggctacaggtctgacaagaccaaacctcacggcaggcctctcactgctgtcagcatcctggaccagggcacaggacggagaggcgctcccatcgcccccagcagcaaaccacagcagaggtgtccacgcacccctgagca

SEQ ID NO: 248195 - DNA, 1195 bp, Homo Sapiens
ttggatcaatcctaggtttttctgcctggttaggtggggaagcagatttgagagaaagaccttagtttggataaacggggtctgaactcgcctcggatttgccgggggtggagctcaggacgtcctggttggggagggcattcagagagtagatgccagtcctgggaaaggcaggggaggagaggagagccacggctgacgcttggggacagaaggaggagcctgaggaggagacaggacagagcgtctggagaggcaggaggacaccgagttccccgtgttggcctccaggtcctgtgcttgcggagccgtccggcggctgggatcgagccccgacaatgggcaacgcgcaggagcggccgtcagagactatcgaccgcgagcggaaacgcctggtcgagacgctgcaggcggactcgggactgctgttggacgcgctgctggcgcggggcgtgctcaccgggccagagtacgaggcattggatgcactgcctgatgccgagcgcagggtgcgccgcctactgctgctggtgcagggcaagggcgaggccgcctgccaggagctgctacgctgtgcccagcgtaccgcgggcgcgccggaccccgcttgggactggcagcacgtgggtccgggctaccgggaccgcagctatgaccctccatgcccaggccactggacgccggaggcacccggctcggggaccacatgccccgggttgcccagagcttcagaccctgacgaggccgggggccctgagggctccgaggcggtgcaatccgggaccccggaggagccagagccagagctggaagctgaggcctctaaagaggctgacccggagccggagccagagccagagctggaacccgaggctgaagcagaaccagagccggaactggagccagaaccggacccagagcccgagcccgacttcgaggaaagggacgagttccgaagatttcctgaaggccagagcttctgacaggcgggtgcccacgcccattgctggataaggacccggggaagcctgcctgggagctggaactcggaatgccaccctaaggcctccgggtccaagcccccagataaccgccctgggtaagatggaatccaaccatcccgcggcagggggccggctcaccttacttcacctgccgcccttcctatgttccgcggcggttactccctttgtgc

SEQ ID NO: 248196 - DNA, 287 bp, Homo Sapiens
  misc_feature (176)..(176): n is a, c, g, or t
  misc_feature (183)..(183): n is a, c, g, or t
  misc_feature (191)..(191): n is a, c, g, or t
  misc_feature (229)..(229): n is a, c, g, or t
  misc_feature (250)..(250): n is a, c, g, or t
  misc_feature (265)..(265): n is a, c, g, or t
tctctatacaaggctgtttatttctgtacaaaaccatgtttctattttacacaaagaacaccccaccctttcccctcacaccagcaccctaacctggggagcatcccccaggaggagggggctgaaggaggccccaccccccaggccctagcttctgcctgccctggctgggccancctgagntgccactntaaagaaaataaataaggaggctcaggcagaatctgtnttggaccaggcagaatctgtnttggaccagccagantccagcccagcccagtggccag

SEQ ID NO: 248197 - DNA, 893 bp, Homo Sapiens
  misc_feature (92)..(92): n is a, c, g, or t
tgccgccttagccccctcctttttggccccccggcccgtggcatccttcccccagtgcatttcatttccacagggcattttattgagcattntactgtgtgcccagaggcaaaagaagaacagtgggataactgggcaaggagcattccaggcagagggaacagccagtgcaaacatgggagatgcgggtgcagtgagaagcagcagaggagaccaggagttgaggcgactgcagagcgattgcagagctcatagacgtgatgaagaccagctgggcactgcagcggctctggcttctgctgtgagggacggggagctgtggagactccctctgtttggtcccatttccatattgctgagcacctgctgcatgctctctgtcctgctcagagccagtacctggatggaggctgtgtgttctgggtggactgggggagaatgcattctttgcataagagacaaccaaggtgctgaggcctgaaagtcataaccagacctggggcactcagacaaggactggtggccaggccagaggagcagagctcagggtgtgcacagaactcagaagtcagaccactgaacagtgacagaacctttcagcccattggcaatgaggctgcccaggcagccagaggcctggtcaaatctgaggtctgcagagatggagctgtcattctgtgtttcctttggcagtcccaacaccagcctcgttgcaccctcctcttagcttccctgggttctccagccctaagggtggtagcagcttcctgcaagtatccaactctgagattctgcaacatccacttttgctctctgagccttgcaaaacctgcacaatcagtccctaacttatatcccctctgtttgaaatacctagtgtggtttctattcct

SEQ ID NO: 248198 - DNA, 1601 bp, Homo Sapiens
  misc_feature (1115)..(1115): n is a, c, g, or t
  misc_feature (1130)..(1131): n is a, c, g, or t
  misc_feature (1450)..(1450): n is a, c, g, or t
  misc_feature (1507)..(1507): n is a, c, g, or t
  misc_feature (1533)..(1533): n is a, c, g, or t
  misc_feature (1555)..(1555): n is a, c, g, or t
ttggggagaaccccggcgtgttgaaggctccgcgaaaccggagcgcctcttccgcagggatggtggcgccgcggcggccgcggagcccggggaccccgcccagagagcccgcaagccccggggtcgccggcgcccagacctgcccgcgccagagctgtggaccgagctgaccggcctggccgccagctccgagcctgaggatgggtcggaaggcgcagccgagggtcgcgcggccgcggtgtccctggaagaggccctactgcgcctcgccgagttcctctccgtccagctgggggcggaagagagctgcgggggcccggcggacctgggccagtctggcgaggtcccctcactgttgacagtgaccagtcagctcttggcccttctggcatggcttcgaagccccagggggaggcaggccctgctccaggggactcagccagcccctcgggtccggcccccctctccagatggatccacatcccaataagaaagcccttccctcttcaccgcagtcccaggcgagccactgggggatgagacccagggacagcagcccctccagttggaggaggatcagagggcgtggcagcggctggagcagctcatcctgggacagctggaggagctgaagcagcagctggaacagcaggaggaggagttgggtcgactgcgcctgggcgtgggggcgacggactcagagaaaagggttcagcatctgactctggagaacgaggccctgaagcagagcctgagtctcatgcgggacctccttgctgcactggggccccgggccccccatcagggctccgcaggaggaggcggaggcattgctagagctccagggccggcttcaggaggcccaagacaccacagaagccctccgagcccagctgggggtgcaggaggtgcagctgcagggccttcaaggggccctccagcagctccagcaggagacggagcagaactgcaggcgtgagctacagcagatgcatgggcagctggcaggacttcgggcacggatggccagcctgcgtcagggctgcggggacctccgaggtttggtcagcacctttacccagaagctgtcaggggttcgctgagtgaggcccggnggccaggtgtcctgnngccttgggggcactgtcatctggagggcctggcactcagctccctgaggggcagcaagggcccccagccggatgcccagggcggctgccagaactcaagggaaatatccgggtgctgtgtcggctgaagccagggacatcttccacccttgtgagtgtggagcctggtccaggtccctgctggcggaaggcggagtaaagctcccggtacccccgccccccagggcgccagcttccctaacctccttcggtaccatggcccccttagtccccaaagtatacccttttacctccgaaaccccgggaaaggggcgtgcggnccagctccgatgtgtcaccttcacggaccccaaggcccttgctcacacgcaaaaagntccccgccctctagccccgccttaancatctcccatgcttgatccggntccccgggcaacgccaaatttctgtgggccgcttcccgaccccacg

SEQ ID NO: 248199 - DNA, 1476 bp, Homo Sapiens
ttggggcgcgaccgcgttgctgaggaggaggttagtcagtggcctgccccgaaggcctgctccagcccaggcctcctggcctagccagctccccagggagctgcatctcacctagaacagggtccttttcctgagagagtcccccttctccagtcttatgtgagccctgccatgaggcagggccagccccatcttcacatgagccgtgggcccccaacttctaccctacacttggccacctaggaggagaatggagtctgcaggagccaggagcgccgggcggccctcctgcccggcgctcatggccgccctccccgcagaggcccagcgccggccctactatgccgactactcgcccacgcgccgctccattcactcgctgtgcaccagccactatctcgacctcttcatcaccttcatcatctgtgtcaacgtcatcaccatgtccatggagcactataaccaacccaagtcgctggacgaggccctcaagtactgcaactacgtcttcaccatcgtgtttgtcttcgaggctgcactgaagctggtagcatttgggttccgtcggttcttcaaggacaggtggaaccagctggacctggccatcgtgctgctgtcactcatgggcatcacgctggaggagatagagatgagcgccgcgctgcccatcaaccccaccatcatccgcatcatgcgcgtgcttcgcattgcccgtgtgctgaagctgctgaagatggctacgggcatgcgcgccctgctggacactgtggtgcaagctctcccccaggtggggaacctgggccttcttttcatgctcctgttttttatctatgctgcgctgggagtggagctgttcgggaggctggagtgcagtgatgacaacccctgcgagggcctgagcaggcacgccaccttcagcaacttcggcatggccttcctcacgctgttccgcgtgtccacgggggacaactggaacgggatcatgaaggacacgctgcgcgagtgctcccgtgaggacaagcactgcctgagctacctgccggccctgtcgcccgtctacttcgtgaccttcgtgctggtggcccagttcgtgctggtgaacgtggtggtggccctgctcatgaagcacctggaggagagccaccaggaggcacgggaggatgcggagctggacgcccagatccagctggagatggcgcacggccccgggaagtgcacgcccgggtgggaacccggacagggcctcccctttgccccaagaaaagctccgggccgcccagggaatgcccccaaaacctgggttggcaactcaagggtggtccgggggcccaaggaatggcccccgcctggcccacaaccaacccggttccattggtctccccgccttcgtgtgggggccctgggcgcttggagggtgcccccaaaccccaccggcccctgttttatcttggtagaccgctgcacaccaccccccct

SEQ ID NO: 248200 - DNA, 1486 bp, Homo Sapiens
  misc_feature (477)..(531): n is a, c, g, or t
  misc_feature (697)..(697): n is a, c, g, or t
ttggccctcgctgcggccggagccccccaagcacccggagagcatcaaggcccccgtccacctgccccagcggccggaaatgaagcctgtggatgtcgggaggcctgtgatccggcccccagagcagaacgcaccgccaccaggggcccctgacaaggacaaacagaaacaggagccgaagactccagttgcgcccaaaaaggacctgaaaatcaagaacatgggctcctgggccagcctagtgcagaagcatccgaccaccccctcctccacagccaagtcatccagcgacagcttcgagcagttccgccgcgccgctcgggagaaagaggagcgtgagaaggccctgaaggctcaggccgagcacgctgagaaggagaaggagcggctgcggcaggagcgcatgaggagccgagaggacgaggatgcgctggagcaggcccggcgggcccatgaggaggcacgtcggcgccaggnnnnnnnnnnnnnnnnnnnnnnnnnnnnnnnnnnnnnnnnnnnnnnnnnnnnnnntgcggtggctgccgccgccaccccacaggcccagagctcccagccccagtccatgctggaccagcagagggagttggcccggaagcgggagcaggagcgaagacgccgggaagccatggcagctaccattgacatgaatttccagagtgatctattgtcaatattntgaagaaaatcttttctgagcgcacctaggtggcttctgactttgattttctggcaaaacattgactttccatagtgttaggggcggtggtggaggtgggatcagcggccaggggatgcctcagggcctggccctcctgcatgctatgcccggggcaggcctgacgggcagctgaggattgcagagcctgtctgccttacggccagtcggacagacgtcccgccacccaccacccctcacaggacgtccgctcagcacacgccttgttacgagcaagtgccggctggacccaagccctgcatccccacatgcggggcagaggcccttctctccgccaaatgtctacacagtatacacaggacatcgttgctgccgccgtgactggttttctgtccccaagaacgtgacgttcgtgatgtcctgcccgccgggagtctttccccacaccccagccatcgccgcccgctcccaggaggccagggcaggcctgcgtgggctggaggcgggcgaggccggcccaccccctcgctggcactgactttgccttgaacagaccccccgaccctcccccacaagcctttaattgagagccgctctctgtaagtgtttgcttgtgccaaagggaaatatctgccgtggcaggtgtgttgtgtccatgggcatcccggaagcgaaggcgactgtccctggcgtggggttaccccctccggcccgtggagagtggaaggccacccaaaccaaaaggtccattttcccttccccacccctggggcgtttctgggttttccg

SEQ ID NO: 248201 - DNA, 845 bp, Homo Sapiens
  misc_feature (203)..(237): n is a, c, g, or t
  misc_feature (781)..(781): n is a, c, g, or t
ttggcccccactcacgccagaggtcgccggtctgcatgggccccgaccgctgtgaccaccatgcctggggcaggggctgtgcacagacggaccccccacccccacacgcactttatgagggagaccccgacagaggacgcttgagccagaatctcaggaccccgcccagggagctgccagcccagggctcagcttcccatggnnnnnnnnnnnnnnnnnnnnnnnnnnnnnnnnnnnacagtccgcctggccaggcctcctggccgccacgcagaatacctcgaaccaggcgggctgtgaaccagccccgctcacctgccagccccaacacccgacgggggccgaggcccggctgcccctccctgtgggctcagggtctcctgcgggctaggcagccaggagctctgtccgcaaaaccaaatctgggtgtcagaggccaagaccctggggtgggatcagggaccacccctcacggggcataaggtcagtttttcccccagagcccgggtccctgtcccccacagggcagggggggtccctggagccctggtgtggagcggcgagtcccggggcggtgcctgtctcagaagaaggggcccttggccagccccccagcgacactatgcaaatcctggagtgccccgccaggatcgaagccatgactgggtgcaggcgggcgccaggcccgctgtgggtgggcaccagttctcagcaccgctcactgctggcgggcacactggggacagcaggctcctcagccaaccctgtccctcggcccggncctgccagagagggacccaacacatctggggcaccggggaagggctcagccgctcccacctccc

SEQ ID NO: 248202 - DNA, 1014 bp, Homo Sapiens
  misc_feature (767)..(767): n is a, c, g, or t
  misc_feature (818)..(818): n is a, c, g, or t
  misc_feature (889)..(889): n is a, c, g, or t
ttggcgatttcttccggagaggttccctgtcgcgcccaagtctgggaagtgccctttctctcttaggtaccacctcatggagacccccgcggccgccgcccccgctgggagcttattcccctccttcctgctcctggcctgcgggacgctggtggccgccttgctgggcgccgctcaccgcctggggctcttctatcagctgctgcacaaggtggacaaggcaagcgtccggcatggcggagagaacgtggccgctgtgctgagggcccatggtgtgcggttcatcttcacgctggtcggtgggcacatttccccgctgctggtggcctgtgagaaactgggcatccgtgtggtggacacacgccatgaggtcacggccgtctttgctgctgatgctatggcccgcctgtccgggacggtgggcgtggcggcagtgacagcaggccctggcttcaccaacacggtgactgcggtgaagaatgctcagatggctcagtccccaatcctgcttctgggtggggctgccagcactctgctgcagaaccggggtgcgctccaggctgttgatcagctgtcccttttccggccactctgtaagttttgtgtgtctgtgcggagggtgcgggacattgtgcccaccctgagggccgcgatggctgccgcccagtcgggcaccccaggtccggtgtttgtggagctgccccgttgacgtgctgtacccctacttcatggtccagaaagagatggtgccagccaagccacccaangggcctcgtggggccgagtggtctccctggtatttagagaaattacctggncaacccctcttgcaggaagcctgggaagcctcagccccgaggggaccgctgccccctggaacatcccccanggctccccccgcagcagggttcagcgccttgtggtgggagaatcttggaagccggggcccaagaaggctccctggaatgggggcttggggggaaattccaggggccctggtttcaaccccccaag

SEQ ID NO: 248203 - DNA, 845 bp, Homo Sapiens
ttggggaggcagtgctcacacaggcaagctaccaggccacaacaacgacacccacctcacctctggcacctctgagcatccacgtacttgcaagaactcttgctcacatcagctaagagattgcacctgcttacctagagattccggcctgtgctcctgtgctgctgagcagggcaaccagtagcaccatgtctgtgactggcgggaagatggcaccgtccctcacccaggagatcctcagccacctgggcctggccagcaagactgcagcgtgggggaccctgggcaccctcaggaccttcttgaacttcagcgtggacaaggatgcgcagaggctactgagggccattactggccaaggcgtggaccgcagtgccattgtggacgtgctgaccaaccggagcagagagcaaaggcagctcatctcacgaaacttccaggagcgcacccaacaggacctgatgaagtctctacaggcagcactttccggcaacctggagaggattgtgatggctctgctgcagcccacagcccagtttgacgcccaggaattgaggacagctctgaaggcctcagattctgctgtggacgtggccattgaaattcttgccactcgaaccccaccccagctgcaggagtgcctggcagtctacaaacacaatttccaggtggaggctgtggatgacatcacatcctgagaccagtggcattttgcaaggacctggctggttggcccttggccaagggggggcccgtggacagcctaactcctgggaaacctttgaactaataaatccggggcaaaaaacaaagaatggtccccaggcaccttgccaaacgggggc

SEQ ID NO: 248204 - DNA, 1025 bp, Homo Sapiens
  misc_feature (443)..(480): n is a, c, g, or t
  misc_feature (794)..(803): n is a, c, g, or t
  misc_feature (905)..(905): n is a, c, g, or t
  misc_feature (918)..(918): n is a, c, g, or t
  misc_feature (926)..(926): n is a, c, g, or t
  misc_feature (937)..(937): n is a, c, g, or t
  misc_feature (993)..(993): n is a, c, g, or t
ttggcacggacccagccgacacaagatgtcccccccgcccagtggcttcggcgaacggagcagcggtgggagtggcgggggccccctgtctcacttctattcaggctcgcccacttcctacttcaccagcggcctgcaggctggcctcaagcagagccacctcagtaaggcaatcggctcttccccgctggggtccggagaagggctcctgggcctcagccccgggcctaatggtcacagccacctgctgaagaccccactgggcggccagaaacgcagctttgcccacctgctgccctcgcccgagcccagcccagaaggcagctatgtgggccagcactcccagggcctcggcggccactacgcggactcctacctgaagcggaagaggattttctaagtggctggcaccagagataactcaagggcctgcaccaaatcgnnnnnnnnnnnnnnnnnnnnnnnnnnnnnnnnnnnnnnaaaccattttctctctttcggtaatagaaaaatctctgaaagactttactgaccaatcagccggagccccaggagcccaaggggtgtgggggagtctggaggcctcattatgtctctggcttgctccccacgctgaaaccctgcagccttaagagagaggggccccggcctgctctccctccctccccccatctcctcctccgctgtgcccgtctctccggagccctcctgcctcattgctcctgtaattttggcctttcgagtgccttggaggtttcccctgacctcccgtgaagatacagagactgtctccnnnnnnnnnnaactttgaccactgacttctgtttccttttctaagttttatttttcaaaccaccccggacagcccccagctctgattccttcaaggcccggcctggtcgggncaccattccacanccttgcgntttgaaacagnttggttttttcccacatttgctggcagggcatggcttgttcttcttgccccctgtncttggcccatctgggcctatacccccagccgg

SEQ ID NO: 248205 - DNA, 1436 bp, Homo Sapiens
  misc_feature (1256)..(1256): n is a, c, g, or t
ttggcgaagcgcggcccgtgacctccttcctgagcttgtcccaggtgtccgggccgcagctgcccggggagggcgaagaggaggaggaaggggaggacgatggggccccgggcgacgaggccgcgtcggaggacagcgaggaggccgcgggcccggcgctcggacgctggcgtgaggacgccatcgactggcagcgcacgttcagcgtgggcgccgtggacttcgagctgctgcgctcggactggaacgacctgcgatgcaacgtttcggggaacctgcagctgccggaggcggaggccgtggacgtgaccgctcagtacatggagtggctgaacgcgcgccacggcgggcgcttcgcgcttctgcgcatcgtgaacgtggagaagcgccgggactcggcgcgagggagtcgcttcctgctggagctggagctgcaggagcgcgggggcggccgcctgcgactgtccgagtacgtcttcctgcggctgccgggagcccgcgtaggggatgcagacggagaaagtcccgagcccgctcccgccgcctccgtgcgccccgacggccgccccgagctctgccggccactgcgcctggcctggcgccaggacgtgatggttcacttcatcgtgccagtgaaagaaccgggcccggtgggtggcaccgttcctggcggacgtggctgcgctgcacacgcgcaccggggactcgcgtttcagcatcctcccgaaggatttcgagagcaaggatatggacccgcagcgggacctgcgtccccccattccctgccgcggcacccttacctggttacctaaccccgcaacctccgagcggctcccgtccgggctcctctcgcagtgcaatttgaacgcgatcccctagcctccccactcgcgcgaccgggatttcctcccacccccacccatgttgctcccaatctgtcgcaatccccttacaatccttggatcaggttttctcaggtataggtgcctgtctttgctctgctcccgctcgctagcccaacttactcttccagcacgcgcacataatactgagtcacaacctcctcacccgctcatgccgaactgcctaccgtgaacccttcttcttccctccccctaacatccgcgtctccctcgctttcccttcgctgcacgaagcatccacctctttccttccagttctgtcactcgctctcgcaaactcgccaaatcatcatcccgtcacggcccgctcctagcgcctctctgcttagcccntcgctccactgtgtgcgcggcggagtttgcaatcctctcgcttatcccccgttctcgtcgcgcctcggccacatctcagcatagcgcagctacctcgtagacccgactcggtactctccactgcccatgtacgcccagttactaagacgcggccgcctcaacatcgccgacctgcggcct

SEQ ID NO: 248206 - DNA, 1606 bp, Homo Sapiens
  misc_feature (1381)..(1391): n is a, c, g, or t
  misc_feature (1460)..(1517): n is a, c, g, or t
gtggatgtcgaacctttgtgagccaaagccccctccggaaacggcgctcgctgcctaataacctggagggtgactattactgcgcctgccctgatgactttggtggcaagaactgctccgtgccccgcggagccgttgcctggcggggcctgcagagtgatcgatggctgcgggtcagacgcggggcctgggatgcctggcacagacactccggcgtgtgtggcccccatggacgctgcgtcagccagccagggggcaacttttcctgcatctgtgacagtggctttactggcacctactgccatgagaacattgacgactgcctgggccagccctgccgcaatgggggcacatgcatcgatgaggtggacgccttccgctgcttctgccccagcggctgggagggcgagctctgcgacaccaatcccaacgactgccttcccgatccctgccacagccgcggccgctgctacgacctggtcaatgacttctactgtgcgtgcgacgacggctggaagggcaagacctgccactcacgcgagttccagtgcgatgcctacacctgcagcaacggtggcacctgctacgacagcggcgacaccttccgctgcgcctgcccccccggctggaagggcagcacctgcgccgtcgccaagaacagcagctgcctgcccaacccctgtgtgaatggtggcacctgcgtgggcagcggggcctccttctcctgcatctgccgggacggctgggagggtcgtacttgcactcacaataccaacgactgcaaccctctgccttgctacaatggtggcatctgtgttgacggcgtcaactggttccgctgcgagtgtgcacctggcttcgcggggcctgactgccgcatcaacatcgacgagtgccagtcctcgccctgtgcctacggggccacgtgtgtggatgagatcaacgggtatcgctgtagctgcccacccggccgagccggcccccggtgccaggaagtgatcgggttcgggagatcctgctggtcccggggcactccgttcccacacggaagctcctgggtggaagactgcaacagctgccgctgcctggatggccgccgtgactgcagcaaggtgtggtgcggatggaagcttgtctgctggccggccagcccgaggcccctgagcgccagtgcccactgggggcaagggtccctggagaaagccccaaggcagtgtctgccaccacccctgtgaggcctggggggaatgcggcccaaaagaaccaaccgaacacccccctggctggccaggttccgggcaacctggaaaaataacttgggccccgccttcacctttgctttttcaaccccggaacccccggggcccccaggggcatccannnnnnnnnnnccccattttggttcccgggaaattccgcttccccttggcaaaaccaaaaaaaggggcttttggggaaannnnnnnnnnnnnnnnnnnnnnnnnnnnnnnnnnnnnnnnnnnnnnnnnnnnnnnnnntcccttcgcggggggccccaatgcccccgtggaaggggggcccttggtgcttttttttccccctttggaaagggggaatcttcctcttg

SEQ ID NO: 248207 - DNA, 1290 bp, Homo Sapiens
ttgggtcatggcccgcccccagccatgggaaagcaaacttcatcctaaggtgtgcagcccaggccctgcccctttacagtctaggccgcctgccatggggtgcagcctctccaggggctgcgtcagacttgcacgctgcccacatccagattcctgcaaagacgaattgggtgcacagcaccccaaccacatacacgaggaagaagatgcggtcagcagtctcaggccagcttctctgtgacccctttactcctctggagggctctgtggggagagatacagggaaaggagctgttcttcaaggtcccctcaacatgagcggaagagcgaaccccaggggtcatcagcctgtatcgcttcctttcttagattctcagctgatgaaaatttgggtctggcccatttcaggccatcttcagttgaagaaacaccctcttaggctgtgcaaggcatgggttatcaggggattgaggtcacctgggacttcagggaggctcagcttgctccctgccccagacctgtttcttctaagggaggaggacatggtggagaccagggacaggagagccagcagggtggatgcaaggggcctctacccacacctggacctccgtgccctcaccccagccctaggtgtgcacctaggcctcattccttaccccccagcccctgcccaccttcagcaggatgaggccctgggttgccgtgctctcgctgttcccctctcggggctgggctggggccgctcttggccccaaggttgccccgggccagcagcccagccagcagcacagtctctatggtgctgaggaagagcagcagcagcaggatggtgaagtagtaaactgggggaggcagggccacagggagatgctcaggggccagtccctgtgtctctggtgcccagcgagctgagcaccagtgggtgaccggggagaaacagggcagactgggtaagggagcagggcttactgagcagtgggttgcaggaggaggagctgggcagggcctgcaccagggaggagtggaggacgaggtaactcagcagcaatgtcaccttgtagcctatgcgctcaatggccccggaggggcagcaacccccccgcaccgtcagccaaaagcagtggctttgcagggaaccaagagaagcgaagatgggacttgaacgcccatggtcttccatcctccagctgggaaggggaaaaaggctagggccctttcccggccgggggggaaaagcaggcgggacgtttcaggggcctgtggtcgccgggtaccatgagacacgta

SEQ ID NO: 248208 - DNA, 903 bp, Homo Sapiens
gagcaatgcttttcttataagagggcaactttgtacaaaaaagttggcgaggaggcggatcccccggcgtcagatctgccgacaccccaggccatcgagccccaggccatcgtgcagcaggtcccagcccccagtcgaatgcagatgccgcaggggaacccgctgctgctgtcccacaccctgcaggagctgctggccagggacaccgtgcaggtggagctcattccggagaagaagggcctcttcctgaagcatgtggagtatgaggtttccagccagcgcttcaagtcctcggtatacagacggtacaatgacttcgtggtcttccaggagatgctcctgcacaagttcccctaccgtatggtgcctgccctgccacccaagagaatgctgggagctgacagggagttcatcgaggccaggaggagagccctgaagcgcttcgtcaacctggtggcgcgacaccccctgttctccgaggatgtggtcctcaagctcttcctgtccttcagcggctcggatgtgcagaacaagttaaaggagtcagcacagtgcgtcggggacgaattcctgaactgtaagctagctaccagggccaaggacttcctcccagctgacatccaggctcagtttgccatcagccgggagctgatccggaacatctacaatagctttcacaagcttcgcgacagggcccgagcggatcgcgtcgcgggccatcgaccatgcggcagatcttctcatattccgggaaggagctaattggcaatagggtctgacacgacccccgctggccctcctggggccgctctgataacccacccccggggggggtccccctgaaaccaaggcttctgaaaaggccttggtctgggggaatttctccgcgtactcccccaaaaa

SEQ ID NO: 248209 - DNA, 1605 bp, Homo Sapiens
  misc_feature (379)..(423): n is a, c, g, or t
  misc_feature (1295)..(1303): n is a, c, g, or t
ttgggttttgtttcgttcacctctgtctagatgcaacttttgttcctcctcccccaccccagcccccagcttcatgcttctcttccgcactcagccgccctgccctgtcctcgtggtgagtcgctgaccacggcttcccctgcaggagccgccgggcgtgagacgcggtccctcggtgcagacaccaggccgggcgcggctgggtcccccgggggccctgtgagagaggtggcggtgaccgtggtaaacccagggcggtggcgtgggatcgcgggtccttacgctgggctgtctggtcagcacgtgcaggtcagggcaggtcctctgagccggcgcccctggccagcaggcgaggctacagtacctgctgtctttccannnnnnnnnnnnnnnnnnnnnnnnnnnnnnnnnnnnnnnnnnnnntgatggtgcctgggagcctgcgtgtgcagccggtgcttgttgaactggcaggcgggtgggtgggggctgcagctttccttaatgtggttgcacaggggtcctctgagaccacctggcgtgaggtggacaccctgggccttcctggaagcctgcagttgggggcctgccctgagtctgctggggagtgggcattctctgccagggacccatgagcaggctgcatggtctagaggttgtgggcagcatggacagtcccccactcagaagtgcaagagttccaaagagcctctggcccaggcccctccgtgggacagccccgccgcccctccccaccagggctttgcagatgtccttgaaagacccaccctagagccctttggagtgctggcccctcctgtgccctctgccctggtggaagcggcagccacaagtcctcttcagggagccccaagggggattttgtgggaccgctgcccacagatccaggtgttggaagggcagcgggtaaggttcccaagccagccccaacacccttcccacttggcacccagagggggctgtgggtggaggcctgactccaggcctctcctgcccacaccctctgggctgagttccttctttcccttggacgcccagtgctggccttggaggacggtcagctggaggatggcggtgggggaggctgtctttgtaccactgcaacatcccccacttctccacggaagccccatcccaaagctgctgcctgggcccttgctgtaaaagagtgcaagggggcggctgagttctcttagggaccagaagcagggcctttcaacttacatcctgccggacggccttggtctggacaatggcccgtgtccttccacaannnnnnnnnaacggacccacggcaggaatccttgaccccctgcccgcgcttccagggccccacataggggttcctttggacaccatcctcccctcttccccgctcaagaagagccccgaggataggaagatatgcaacctggggaacgggcaaatcccacgggaagcgtgccacgccccgaggtgtctaccgaggggagactccacaacacggaacagctaaagaactatcggtgccgcctacgccatctccgctacatggagtgccagagccttatccaatcatacacgttgactcgtcaaccgacaaag

SEQ ID NO: 248210 - DNA, 1003 bp, Homo Sapiens
ttggggcagggagtagcagcaggtgggaggggttacccatcagcccttgcaagtcccccactcaggcctctggaaggtccagggatgggctctgatgagagggtaaaagatgctcagggaaacacaggcctcagctgcctagaggaccctccccctgccttgcagtgggctcgggtagagcagtatcaggagctagggttgtctgctgcccacactcctgctttttgggatatctaactgctaaggagggagttgacatcccccttctggctcatgtgtctgacaccaacaacatggtctctgtccctctctctttgactctccctttgtcctccccatagagctggggtggggtggatccctatacctggggcaggcagccccaaagtgggggagggggatggcagagactgtaaaggcgccactggactctggcaaggcctttattacctttactcccctccctctcccatcaccagcctcaaggcctgaggggtgcaggggctcctggcagctactgggtgaggtttcctggcacagactcacccttctttctggcaccacctctttcccttttgaagggacagcaacagccgtagcaaaagcagctgctgctcctgctatgagggtgtatatattttttacccaaagctctggaattgtacatttattttttaaaactcaaagagggaaagagccttgtatcatatgtgaacattgtatcataggtaatgttgtacagacccttttatacagtgatctgtcttgttcctgcagcaaaaatcctctatggacataggaggtgctgtgtcccatgccctcttgccctgacagtgtcccatgggcccccttctgctccctgccccctccctgctactgctgatgcactggtcctctccctgcagcccctgggcttccccgcccttcctcctgacccccttcccaacagccttgggaactcccagctgccaaccacccttctgggttcggaacactggggacc

SEQ ID NO: 248211 - DNA, 710 bp, Homo Sapiens
tgtgcaccgggccatggtttttaaagactccctgaaccttccaggggggttccaaccgtgcttttgggccttcccaaaaagtgtttggggatttccagggggtgaaagccacggacaaccggggcaattcccttttaatgcctttccccgcaccataccccggaggggggtagaaattttggtttaatttgtcaatctttctaaccagtcattagctcttcactggagggttaacattctgaaatggaggtacaccttacctggtagggggaggactttgagaggagcgggacacttggggcaggcagcaggtgccttagctttttatgaaaagagcccttcagcccctcatggagagctgccctgaatttcaggcttttaccactttataaagagacgcgtcgaggacaacagaatctgtccaaggccagaatgtcatgggaaaacggttttgcttccaatggtttaagacagaaaatctaaataagaagactctggcagcatcaaggaaggctctgagtggcccaaagcttcagatctattaatcctttcagagaaaagagaaacacagacacaaggcacgccattttttctttatgaggaaattcagtctggtcacattgtcagaaaaaaaatctaccaaaactaaatagtttctatatttttttcatttacaatctctgaatacaatgatctacacttcatgaaat

SEQ ID NO: 248212 - DNA, 1582 bp, Homo Sapiens
gtttcagaatattgtgtggaaatcttaattgaaaaccatgaaaagatttttcggacgccgcccgatactacattccctgagcccacctgcctgtcagcatcacccccaaatgcgccaccaaggcagtcgaagagacaaggccagagaaccaagaggcccgtggccgtctacaatctttgtctggagctggaagatggtgacaatccttacccttccaaggaggacacccctaccagcagtctggactcactttcctccccgtctcccgtgactacagctgtccctgggcctcctggaccagacaaaaaccaccttctggcagatggagggagctttggagactgggcatccactatcatccgcagtcggaaggctcgagccgtgtatccgtgtgaagcagaacacagctcggaattatcttttgaaataggagcaatttttgaggatgtacaaacctccagggaacctggctggctagaagggactctgaacggcaagagggggctgattccacagaactacgtcaagctgctgtagctcctggcctcagagcccctgctgaccctggcacccagggacctgcctgggggcagagagctgtcttcctcctccgaggctctgggctgcacccacaggtacctccacacttggcgagttaccatcatcacagtcagccctgggggtggggggtggtgggcagggatgggacgcaccacacagaactgtgattgtggatcaggaggggaatgtccggattcgcccaatggacttttcatttgtcaagtattgggacttgtgatttttaattatccagcatatagaatgagagggagggcagccttctgccacctgtgtcgcctccactggcagtcacgccaccagagccaccctggctccctctcctccctgagcacctgctgctgcgattttaaagggaactgtactactcgcagtgataggtttgcagagtgtgtgcttggctgtggcagcctatcttggagaagctgctgttggtgcaagggagatggtctcaagtcagagggaagcagagacgcgcgtctcaagcctgcccttcctagacggccacctgaaggaccccacactcactgcactggcaccgtgcactgacgcatttgaacacgattctcggggctacctaacccctgcggctgattcccgacacacaccattctctccccgtccggcctactctccaccaatcataccacctcccttcactacaactgcattaccaataatacccctcacaacacttatacataggccacccaaccccacccttccttacaccgccccccgtcccattcacgttacctaccacctaccccaacactccttcaaacaaacccgcaattcgcgatccagattacctttcccgaagacagacagatgcgcaagcaactagaccaccaacgccaacccccgtagacacaccatctctcacacccgccatccccacacacataactccaaaccgtctccgccacgacggtcgtcgctacagtgagatgacctacacagttcataaccttcgcacggccgccattaaccggaatacccc

SEQ ID NO: 248213 - DNA, 1088 bp, Homo Sapiens
ctccgccatgggcatgggtcacctactggcctcggtggcaggcggcggcaacggcggaggtggcgggcctgggaccgccgcggggctggacgcaggcgggctgggtcccgcggccagcgcagcaagcaccgccgcgcccttcccgttccacctctcccagcacatgctggcatctcagggaattccaatgcccactttcggaggcctcttcccctacccgtactcctacatggcagcagcagccgcagccgcctcggctttgcccgccactagtgctgcagctgccgccgccgcagccgccggctccctctcccggagtcccttcctgggcagtgcccggccccgactgcgtttcagcccctatcagatcccggtcaccatcccgcctagcactagcctcctcaccaccgggctggcctctgagggctccaaggccgctggtggaaacagccgggagcctagccccctgcccgagctggctctccgcaaagtaggggccccatcccgcggtgccctgtcgcccagtggctcggccaaggaggcggccaatgaactgcagagcatccagagactggtgagtgggctggagagccagcgagccctctccccaggccgggagtcgcccaagtgaggggctgcccagctgctcccctgccacgcaggccacccgggctgcctgcccctgctgcttgggacgtgtacagcacagaatgagtatttatttaaataaaggagaaaagtgggctgcagcagccggaatagagcctcgtctggcaagtcggggcctgggacacttccctgggcctcaacaaggatcaggctgctggaaacacagtctcttgggagctgctgggctaggtccagatccgctccagcgtcaaggtggcatccgaaggtgtctctggtcttcccgcgaggtgggagaggcctcatccagggcccagcggtccctgcagaagccagaaggtgcagggggccagggggtggggagcatcggaagggaggccccagagcccctgggaccctggggccctaggaccgcggtgaataaaaacttggggtttgaaggggatgcctggggaccccat

SEQ ID NO: 248214 - DNA, 629 bp, Homo Sapiens
atggggggttttctacatttaagcccaaggctgggcttttccttccccaaggcacaaaatggaatgttccaaaggcacccccaaggctcggggccaccctccaccaaaatggtgggtccagttaaaatgggtaaatccccaaccccctaccccttaatatggtggacttagaaacactttatggcaagtctccgggaggttcatgggaactcctcatggctccttcctcatgctggaggaccacggcctgccccatcccaccccaacacactcttgaaactgaggccctcggcctagagcagctcacacagacgtggaacagctgtgctaagcaggtgcaagagtctgggaggcgaaggctggacccagggccccagctgggcttcgggtaaccacaggcctcaactgtccagttggccagagggacctatcacctggctctgggcccccaggatgctttagccacttgagccggctcccaggtgaccgtgtaagtgagataaagcaaaggtgtcctggactgcaccactcactagctcagcaccccaggcaccaggctggaaaccacatctcgcacccaattctccatttaaaaattttacaggaaggggccaggcacagtggctcat

SEQ ID NO: 248215 - DNA, 2363 bp, Homo Sapiens
gatccgtgggacaccggcggtggacgagctgccaggaccaagaaggggctgagcagcatactgggtgcgcccgctgaaccggggagagccccaggttccagattttcgacacctcaaagcagaggttgatgccgagaagccaggtgctacagaccggaagggaggcgtggggatgccctctcgggaccggaatatcggggctcctgggcaggacacccctggagtctctctgcaccctctgtccctggacaggcccagaccgggaaccaggtgctgacgcccccctggagctgggggactcatccccgcagggcccaatgagcctggagtccttggcgcccccagagagtaccgacgagggggccgaaaccgagagccccgagcctggagatgagggggagccggggcggtcgggactggagcttgaaccagaagagcctcccggctggcgggaactcgtccccccagacaccctgcacagcctgcccaagagccaggtgaagcggcaggaggtcatcagcgagctgctggtgacagaggcggcccacgtgcgcatgctgcgggtgctgcacgacctcttcttccagcccatggcagaatgcctgttcttccccttggaggagctgcagaacatcttccccagcctggacgagctcatcgaggtgcattccctgttcctcgatcgcctgatgaagcggaggcaggagagtggctaccctcatcgaggagatcggagacgtgctgctggcccggtttgatggtgctgagggctcctggttccagaaaatctcctcccgcttctgcagccgccagtcatttgccttagagcagctcaaagccaagcaacgcaaggactctcggttctgtgccttcgtgcaggaagctgagagccgcccgcggtgccgccgcctgcagctgaaggacatgatccccacggagatgcagcggctgaccaagtaccccctgctcctgcagagcatcgggcagaacacagaagagcccacagaacgggagaaagtggagctggcagccgagtgctgccgggaaattctacaccacgtcaaccaagccgtgcgtgacatggaggacctgctgaggctcaaggactatcagcggcgcctggacttgtcccaccttcggcagagcagcgaccctatgctgagcgagttcaagaacctggacatcaccaagaagaaattggtccacgagggcccactgacgtggcgggtgactaaggacaaggcagtggaggtgcatgtgctgctgctggacgacctgctgctgctgctccagcgccaggacgagcggctgctgctcaagtcccatagccggacactgacgcccacgcccgatggcaagaccatgctgcggcccgtgctgcggctcacctccgccatgacccgcgaggtggccaccgatcacaaagccttctacgtcctttttacctgggaccaggaggcccagatatacgagctggtggcacagactgtgtcggagcggaaaaactggtgtgctctcatcactgagactgccggatccctgaaagtccctgcccctgcctctcgccctaagccccggcccagcccgagcagcacccgagaacccctcctcagcagctctgagaacggcaatggtggccgagagacgtctccagctgatgcccggaccgagagaatcctcagtgacctcctgcccttctgcagaccaggccccgagggcgagttcgctgccacggcccttcggaaagtgctgtccctgaagcagcttctgtttccggcggaggaagacaatggggcggggcctcctcgagatggggatggggtcccagggggcggccccctgagcccagcacggacccaggaaatccaggagaacctgctcagcttggaggagaccatgaagcagctggaggagtttggaggaggaatttttgccgcctgagacccctcctgttctcagctttgggggaactctgttccccagcctggctgcacttgaggttcccgcccaggaaggccttttgcaagaaggagaggaatgggggagaggacgtgagggaccacccccacccacacagctgccgcagcatctcacaccccgagggccttaggagagggagctgtgggccacgccctgggaggggcccagctggggttactggccccgcatgagcctcggccatctctccctcctgccctctgcttgggggactcagggctccattctggagggcaccacggtgacccgggccatctcagtattggcctggtgggggccacccctccacccccagccccaagtgccttcgctctgtttttataccctggaattggaggtttattttttaatatatattatctaag

SEQ ID NO: 248216 - DNA, 926 bp, Homo Sapiens
caaccagccaaacctaggttagctgagcggatgaccacacgagaaaagaaggttctggaagcaggcatggggaaagtcacctcggcatcatttggggaagagtccactccaggccagactaactcagagacagctgtggtggccctcactcaggaccagccctcagaggcagccacagggggagccactctggcccagaccatttctgaggcagccattgggggagccatgctgggccagaccacctcagaggaggctgtcgggggagccactccggaccagaccacctcagaggagactgtgggaggagccattctggaccagaccacctcagaggatgctgttgggggagccacgctgggccagactacctcagaggaggctgtaggaggagctacactggcccagaccacctcggaggcagccatggagggagccacactggaccagactacgtcagaggaggctccagggggcaccgagctgatccaaactcctctagcctcgagcacagaccaccagacccccccaacctcacctgtgcagggaactacaccccagatatctcccagtacactgattgggagtctcaggaccttggagctaggcagcgaatctcagggggcctcagaatctcaggccccaggagaggagaacctactaggagaggcagctggaggtcaggacatggctgattcgatgctgatgcagggatctaggggcctcactgatcaggccatattttatgctgtgacaccactgccctggtgttcccatttgggtggcagtatgcccccatacctggcagcaggcctagacgtgacccaacccttgtggggactgtggaaacatccaagaggaatggggggtgtctctcttgctatcaaggtctactgtgggccggttacatcaatgcccccatgctt

SEQ ID NO: 248217 - DNA, 1315 bp, Homo Sapiens
  misc_feature (208)..(208): n is a, c, g, or t
  misc_feature (315)..(315): n is a, c, g, or t
  misc_feature (967)..(1015): n is a, c, g, or t
ccgggtggcaggttgggggctccccttttccgggggcccttcaattttgcctccccgggaaaggggcggcccagtgcccccttcaggagccaggttggggaggtgacctggcgggccccctcacaaagtacattttcatgccttcgtgcgtcgtggggcagtagcgggcatgcagctgggccagcagtgccctggacgtggcctcganccgcgtgccctggctcttcttgttccacacgtggacagcataggtggcactgagcagccgcggcagctcctcggggttgatgtcctcaaagtacttcttccagtccntgccaggggatggggtagaaggcctcagggggcagggtggtgacgccgcggcaggcgcggctctcggccaggctgcggatggaacaccacttctttgaagacccgcgtgagccagctgcgggcccctggtgaccccagatccccagccgttgtagtggtccacgaagtccccgcatgcacagcgccatgaactcgtgccggcgctcgaaggccaggaacgcgccgttgaggacgtagcgggactgggtgcccagcacgttgttcaggttccgcaggttcttgagaacaatgaagtccgtgtccaggtagatgccgccgactttccacatgagtgcgatcctggaggcgtcggagagcacgggcagcaggtagggctcccagcgcccctgcacggccgcgtaccagtcggccaggggtgtgtcccggaacagctcccgcaggtccagcgggagcatctggacattcgggaagcagctcagaagtgagatgcccaggtgccggggcagagaggcgttgccacccggaagccctttcatcaggaccagcacgtgggattcggggtgagttctggcggccgactccaccgagcacatgaacaggaagttggggttggtccggtctgaagtctccaggaagaagatgttgcctggannnnnnnnnnnnnnnnnnnnnnnnnnnnnnnnnnnnnnnnnnnnnnnnntctctgctggcaggttatagagctgccctttctccttgggctctcccacaacgtgccagtagatcatgatggagacgaaaaacgtgaacttgaagccgatgatgaacagggtgcagacccgctgccttggggcgccccggagcagccgcagcaggaggtcggggggcttggacatggtatccccagatcagaccaggagcttccagcaggaaccggctggtctcgatattctgcagtggagaagggacgctgtcacccctgggacccgggtcggcctgatcccaccgcctcctgccggga

SEQ ID NO: 248218 - DNA, 1417 bp, Homo Sapiens
ttggctcccggggagcgggagcccgccgtggcgccggactttgtgcccttcgtgcagctgcgcccgctgagcgcgctggctgaagctggagaggcggtgctgctgctgcgggaggggcttctgcgccgcgtgcgttgcctgcagctggggtccccaggtcctggccccgtggccgccggccccgggcccgcctccgtctctggccttgccgcggggtccggccgcgactgcgtgctgctgcaagaggactttctggcgcacaggggccgaccccacgtctacctgcagcgcatccagctcaacaaccccacggagcgcgtggccgcgctgcagactgtggggcccactgccggcccagcccccaaggccttcaccagtaccctggagaaggtcggagaccatcagttcctcctctactcaggccggtccccgcctacgcccactgggttggtgcacctggtggtggtggccgccaagaagctggtgaaccgcctccaagtggctcccaagacgcagctggatgagacggtgctgtgggtggtgcacgtctctggccccattaacccccaggtgctcaaaagcaaagcagccaaggagctcaaggcgctgcaggacttggcacggaaggaaatgctggagctcttggacatgccagcggcggagctgcttcaagaccaccagctcctctgggctcagctcttcagcccaggagtggaaatgaagaagatcactgacacccacacgccgtctggcctcaccgtgaacctgacgctctattacatgctctcctgctcgccagccccactgctcagcccctccctgagccacagggagcgagaccagatggagtcgacgctcaactatgaagatcactgcttcagcgggcacgccaccatgcacgccgagaacctgtggccggggcggctgtcctccgtccagcagatcctgcagctctctgacctgtggaggctgaccctccagaagcgtggctgcaaggggctggtgaaggtgggtgccccaggcatcctgcaggggatggtgctcagcttcggggggctgcagttcacagagaaccacctccagttccaggccgaccccgacgtgctgcacaacagctatgcattgcatggcatccgctacaagaacgaccatatcaacctggccgtgctggcggatgccgagggcaagccctacctacacgtgtccgtggagtcccgtggccagcctgtcaagatctatgcctgcaaggcagtctgcctggacgagccagtggagctgacctcggcgcccacgggccacaccttctcggtcatggtgacacagcccatcacgccactgctctacatctccaacgaacctcacacaccctgcaagaacttggcggcacacgccttcaccctcaagggccaatcctggt

SEQ ID NO: 248219 - DNA, 1171 bp, Homo Sapiens
ttggagatcttcgtgggcggcctgccgtaccacactaccgacgcctcgctcaggaagtacttcgagggctgtgggcgacatcgaggaggccgtggtcatcaccgaccgccagacgggcaagtcccgcggctacggcttcgtgaccatggccgaccgggcggcagctgagagggcttgcaaagacccgaaccccatcatcgacggccgcaaggccaacgtgaacctggcatatctgggcgccaagccgcggagcctccagacgggctttgccattggggtgcagcagctgcaccccaccttgatccagcggacttacgggctgaccccgcactacatctacccaccagccatcgtgcagcccagcgtggtgatcccagccgcccctgtcccgtcgctgtcctcgccctacattgagtacacgccggccagcccggcctacgcccagtacccaccggccacctatgaccagtacccatacgccgcctcgcctgccacggctgccagcttcgtgggctacagctaccctgccgccgtgccccaggccctctcagccgcagcacccgcgggcaccactttcgtgcagtaccaggcgccgcagctgcagcctgacaggatgcagtgaggggcgttcctgccccgaggactgtggcattgtcaccttcacagcagacagagctgccaggccatgatgggctggcgacagcccggctgagcttcagtgaggtgccaccagcacccgtgcctccgaagaccgctcgggcattccgcctgcgccctgggacagcggagagacggcttctctttaatctaggtcccattgtgtcttgagggaggactttaagaatgactgagaactatttaaagacgcaatcccaggttccttgcacaccatggcagcctctccttgcaccttctcctgcctctccacactccaggttccctcaggcttgtgtccccactgctgcatcgtgggcggggtgtcacagacccctctgcagcccctggctggcctggactgtgcagagatgcctgactccagggaaaccctgaagcaagagttaatgggactggtttattgtaaacttgatcctccccgagctgtgagcgcaattctggaggtgtgaggacacgggccctcctgttgggagtccccatttttctccattaaggg

SEQ ID NO: 248220 - DNA, 945 bp, Homo Sapiens
  misc_feature (890)..(890): n is a, c, g, or t
ttggggaggttgagcaaacagagcagcagaaaaggcagttcctcttctccagtgccctccttccctgtctctgcctctccctcccttcctcaggcatcagagcggagacttcagggagaccagagcccagcttgccaggcactgagctagaagccctgccatggcacccctgagaccccttctcatactggccctgctggcatgggttgctctggctgaccaagagtcatgcaagggccgctgcactgagggcttcaacgtggacaagaagtgccagtgtgacgagctctgctcttactaccagagctgctgcacagactatacggctgagtgcaagccccaagtgactcgcggggatgtgttcactatgccggaggatgagtacacggtctatgacgatggcgaggagaaaaacaatgccactgtccatgaacaggtggggggcccctccctgacctctgacctccaggcccagtccaaagggaatcctgagcagacacctgttctgaaacctgaggaagaggcccctgcgcctgaggtgggcgcctctaagcctgaggggatagactcaaggcctgagacccttcatccagggagacctcagcccccagcagaggaggagctgtgcagtgggaagcccttcgacgccttcaccgacctcaagaacggttccctctttgccttccgagggcagtactgctatgaactggacgaaaaggcagtgaggcctgggtaccccaagctcatccgagatgtctggggcatcgagggccccatcgatgccgccttcacccgcatcaactgtcaggggaagacctacctcttcaagggtagtcagtactggcgctttgaggatggtgtcctgggaccctgattacccccgaaatatnctctgacggcttcgatggcatccccggacaacgtgggatgcagcccttggccctc

SEQ ID NO: 248221 - DNA, 947 bp, Homo Sapiens
  misc_feature (18)..(18): n is a, c, g, or t
gtctaagagcgagcctgngtggcgattcggacgagggtgggtcgccgggcccgcccggcgccagattaggagtggggctagagaaggggcgaggacgcgaggtgtggcgtcctggggtctggggatgtgaggccagggcctccgaggtgaactggtcctgccctttcgaccccgtgtgtgccctccctcaggccaagtttgagctgatcacctccgaggcctcctacatccacagcctgtcggtggctgtgggccacttcttaggctctgccgagctgagcgagtgtctgggggcgcaggacaagcagtggctgttttccaaactgcccgaggtcaagagcaccagcgagaggttcctgcaggacctggagcagcggctggaggcagatgtgctgcgcttcagcgtgtgcgacgtggtgctggaccactgcccggccttccgcagagtctacctgccctatgtcaccaaccaggcctaccaggagcgcacctaccagcgcctgctcctggagaaccccaggttccctggcatcctggctcgcctggaggagtctcctgtgtgccagcgtctgccccttacctccttccttatcctgcccttccagaggatcacccgcctcaagatgttggtggagaacatcctgaagcggacagcacagggtctctgaagacgaagacatggccaccaaggccttcaatgcgctcaaggagctggtgcaggagtgccaatgctagtgtaccagtccatgaagaggacagaggaactcttcccccttgaaccacaacgacccccctttgaggggcaagatttttcccggcgtgaatcttctcaggcccccctgtgttgggttcggccaatgcacaagtttgccctaccaacctggtctccctcttgtcctcttactatcccctccggacccaatgctggaagcgtgtctcccaccaca

SEQ ID NO: 248222 - DNA, 1008 bp, Homo Sapiens
  misc_feature (870)..(870): n is a, c, g, or t
  misc_feature (903)..(903): n is a, c, g, or t
tggtacggtccggccgttttgtatatcgtcgacccacgcgtcgactagttctagatcgcgatcaggagacgcagtgcgacgccacacgccggggtggccgactgggtcagcgcgggctgcgcctcctcgccatgggccccctctcggcgcggctgctaatgcagcgcgggcgccccaagagcgaccggctggggaagatccggagtctggacctgtcaggattggagctgctttccgatcacctggaccccaagctcctgtgccgcctgacgcagctgcaggagcttgacctgtctaacaaccacctggagacgctgccggacaacctgggcctgtcccacctgcgtgtcctccgcatgcgccaacaaccagctgggggatgttactgccttgtgccagttccccaagctcgaggaactcagcctggagggcaaccccttcctgacggtcaatgacaacctgaaagtctcctttctcctgcccacgctccgtaaggtcaaatggcaaggatgcgtcctcaacttactctcaggtggagaacctggatcgggagctgaccagcagggtcacagctcactgggagaagttcatggccacactgggtcctgacgaggaggctgagaaggcccaggcggactttgtgaagtcggctgtcagggatgtccgctacgggcccgagtccctcagcgagttcacccagtggcgggtgcggatgatctctgaggagctggtggccgccagtaggacccaggtgcaaaaggcttacagcccagagaagcccccagaagctggagctgcccacaggcccagggccggactggcggccttgaaacggccagacagacgtcccagtcagcctcatctcccagnaaagcgggcgtgtgcctcccggtcggcccaggntggagggcagcccctgtggcagggctccgatggcaagccccctgctgtgaaagctggagcccctgcactttcctgcagtgccacagcaagaaccacagcccccct

SEQ ID NO: 248223 - DNA, 929 bp, Homo Sapiens
  misc_feature (162)..(182): n is a, c, g, or t
  misc_feature (339)..(623): n is a, c, g, or t
ttggagaaatcttagtcttatcacaaatatcaagtaatttattttttccattttcaaatgcaaaagttagcctaggaagcctcccagtcatcctgaaggaccttttgactttgcttttataattctgttaaaaattgaggaggggattaatgagtacaatgnnnnnnnnnnnnnnnnnnnnnttaagaagaggaaagctcaaaagaggataagagactgaaaaggcacctcagaatggctgctgtgggcagagtctgtgacatgacttttccccgccctgcccctctgttcagagcagctggaaagatgggatcagtaagattaaaaaacttttgttcnnnnnnnnnnnnnnnnnnnnnnnnnnnnnnnnnnnnnnnnnnnnnnnnnnnnnnnnnnnnnnnnnnnnnnnnnnnnnnnnnnnnnnnnnnnnnnnnnnnnnnnnnnnnnnnnnnnnnnnnnnnnnnnnnnnnnnnnnnnnnnnnnnnnnnnnnnnnnnnnnnnnnnnnnnnnnnnnnnnnnnnnnnnnnnnnnnnnnnnnnnnnnnnnnnnnnnnnnnnnnnnnnnnnnnnnnnnnnnnnnnnnnnnnnnnnnnnnnnnnnnnnnnnnnnnnnnnnnnnnnnnnncaaacaaacaaaaagaaacttttgttcaagctgcatcttcacattgaatgaaagcattcagacgggtgactgctgctgtccacaactgtgggcggaagtgtgccttttcccagtttctcgtccaggaggttgcatagcaaatactcaaagtcactgggatatatgctttccaaaatgctggcccccatggcacctttccccatgtctttctaccaagccctcttatgtttaatctgtgcagggaagacaagagtagaccatattctctgtgtgctgtgcatgtcctgggattgggctatcaagggt

SEQ ID NO: 248224 - DNA, 842 bp, Homo Sapiens
  misc_feature (483)..(483): n is a, c, g, or t
  misc_feature (497)..(497): n is a, c, g, or t
  misc_feature (690)..(708): n is a, c, g, or t
  misc_feature (720)..(798): n is a, c, g, or t
  misc_feature (815)..(815): n is a, c, g, or t
ttctttcggccgttcacgtcattgtgtgcacctcagctgaaagttcgtgctacttctgtggcctctcgtggctggcggcaggtggggtgatggtgctggcctcggcgctgctgtgtgtgattgtgtctgttctgaccaacgtgctcgtgggtggaaacaccccaaggaagaaccccatgcatcccagctcaaggtggtcagagctagaccttcttattctgttggggacggcgggccacgtcttgagcctgggcgccagcagcttcgtggaggaggagcaccagacctggtacttcctcgtgaacaccctgtgtctagctctgagccaagaaacctacagaaactactttctgggagatgacggtgagcctccgtgtggcctccgtgtggaacaagggcatgacggggccacagcagcgtggcaggacgggcctggctgtgatgtcctggagcgagacaaaggccacggaagcccctctaccntccgaagtgctcanaaggccgcgaagaaatgggatggtggctgggcccagtcccggggggctaaataactgggttttgcttcccggctgctggccttcccaaaacaaaaaaggtgtcgcaagggggtttaccgggcctggacccccggcccattggtttcaccaatttttgaccccaaaaaccgaagttttcttattccggggtggnnnnnnnnnnnnnnnnnnnaaaaattttttnnnnnnnnnnnnnnnnnnnnnnnnnnnnnnnnnnnnnnnnnnnnnnnnnnnnnnnnnnnnnnnnnnnnnnnnnnnnnnncttctccttttgggggntttttttatatggttgttctcgggggt

SEQ ID NO: 248225 - DNA, 1083 bp, Homo Sapiens
ttgggattggcctcagaggcagccttggtgtggacggggaaagtggcttcctccttcacgtcaccaggacaggtgcccactacatcctctttccctgcgcaagctccctctgcggctgctctgtgaagggtctctacgagaaggtgaccgggagcggcggcccgttcaagagtgacccgcactgggagagcatgctcaatgccaccacccgcaggatgctttcccacagctctggagcagtgcgctacctgatgcatgtcccagggaacgccggtgcagatgtgcttcttgtgggctcagaggccttcgtgctgctggacgggcaggagctgacgcctcgctggacacccaaggcagcccatgtcctgagaaaacccatcttcggccgctacaaaccagacaccttggctgtagccgttgaaaacggaactggcaccgacagacagatcctgtttctggaccttggcactggagccgtcctgtgtagcctagccctcccgagcctccctgggggtccactgtccgccagcctgccgaccgcagaccaccgctcagccttcttcttctggggcctccacgagctggggagcaccagcgagacggagaccggggaggcccggcacagcctgtacatgttccaccccaccctgccgcgcgtgctgctggagctggccaatgtctctacccacattgtcgcctttgacgccgtcctgtttgagccaagccgccacgccgcctacatcccttctgacaggcccggcagactcataggcacccggcctggtctctgtgatcaagcacaaggtgcgggaaccttgtcccaagcagcagggtggtccgcctgggtgagggtgggccagacagtgaccaagccatcagggaccggttctcccggctgcggtaccagagtgaggcgtagaggcacgccagccagagcctgtggagagactccgcctgctgacactaaacgtcctgggaagtgggcccttccctgggtctctgcactgactcccccaatcctgaacctggtgatggtcgccactgggcagcagcagccttaccagtcctccatgatcacaccca

SEQ ID NO: 248226 - DNA, 1083 bp, Homo Sapiens
ttggcattcacatacgtcaaggaaattgaggtctggaggcggctggtggaaatccaattccccgcggagcatggctggaaggagtcgttgctgggagacatggaatggaggctcacaaaggaggaacccctctcccagatcactgcctactgcaatagttgctgggacaccaaaggcttagaggacagtgtggccaagaccttcgagaaatgcatcattgaagccgtgagctcagcctgccaggtgaacaatctctcctcctgggaaacggattcgggctcacagctgtgttctgccatgacccagctaagggctatgatgcacccgctgggtctcagctcctccgctaactcagagattgggaagtgggcaccctcctccctcgccaagggcaatggcgctgaaatctagttctctccggattcctcagtgtgctgcacagtccctgctgctcgcaccatcctgcatgtgttccatatggaatcacggccgtgcgcgtgtggcacaagtcacacgggcttgcaggccgttcctcagatggccctgtcatcactgtggctgctggtttgattgattgttaacacttgctcagtaggtgtgcgggaagagactccaaaggttgacagaacatttatggaagcaaaatatgtgaaatggaaaattgtatcaatttatttagctcttttcggcaaaggggaagagattgtgcccccctgtctcccaggaacagtctcgcaggcaatgccacatgaggaagctccctgctggccacggctgccctgctcacatttcctaattggacacttaacccctgtacaagcacagccttgcgggcaacaggggaagtccagaaaacattgaggtcattgaattccggggaccaaaggggttctaattttttaagtgactgatacctttgataaggttttcctttccccttttcgttaactctttgttgagatattgttcgtatgccatacggtacatctgtcaaaagttccagttcaccagggtttgggggtagtccccgaatatgtacagtccatcaccacagttaatgacagaaccttttttctcacttcc

SEQ ID NO: 248227 - DNA, 1788 bp, Homo Sapiens
  misc_feature (1702)..(1704): n is a, c, g, or t
  misc_feature (1732)..(1732): n is a, c, g, or t
  misc_feature (1763)..(1763): n is a, c, g, or t
  misc_feature (1768)..(1768): n is a, c, g, or t
ttgggctccgagtcagaagccactctggtgggcagctccccatccactagtcccccgagcgccctgccccctgacgtggaccccggggagcccatgcacgcatcaccccctcgcaaggccagggtccgcattgcttccagctactaccctgaaggagatggggactcctcccacctgccggccaagaaatcctgtgatgaggacctcacctcccagaaggtggatgagctggggcagaagcgtcgccggccaaaatctgctcccagttttcggccgaagcttgctccagtagtgattcctgctcagttcctggaggaacagaagtgtgtcccggccagtggagaactctccccggagctccaggagtgggcaccttactcgcctgggcattccagccggcacagcaaccccccgctataccctagcaggccgtctgtgggcactgttccccggagtttgacccccagcaccactgtgagctccatcctgcggaaccccatctacactgtgcgcagtcacagggtcggcccctgcagctctccacctgcggcccgagatgctggcccccagggtttgcatcccagtgtccagcaccagggacgcctgagcctggacctgagccacaggacctgcagcgactactccgagatgagagccacccatgggtccccctcactgccctccagcgcccgcctgggttcttcgagtaacttgcagttcaaggcggaacgcattaaaatcccatcaacaccaagatatccgcggagtgtcgtgggctccgagagaggttcagtgtcacattctgaatgcagcactcctccacagtcacccctgaacatcgacaccctgtcctcttgtagccagtcccagacctcagcctccacattgcccagaatcgctgtcaaccccgcgtccctcggggagcggagaaaggacaggccttatgtggaggagccacgccacgtgaaggtgcagaagggctcagagccgctgggcatctccatcgtgagtggagagaagggcggcatctacgtctccaaggtgaccgtggggagcatcgctcaccaggctggcctcgagtatggggatcagttactggagttcaacggcataaacctgcggagcgccacggagcagcaggcgcggctcatcatcgggcagcagagtgataccatcaccatcctggcccagtacaacccccacgtgcaccagctcagcagccactcccggtccagctcacacctggaccctgccggtacccactccactctccagggcagtggcaccaccaccccggagcatccatctgtcatcgacccactgatggagcaggacgaggggcctagcacccccccagccaagcagagcagctccaggattgcgggagatgccaacaagaagaccctggagccacgcgttgtcttcatcaaaaagtcccagctggagcttggggtgcacttgtgtggtgggaacctgcatggggtgtttgtggccgaggtggaggatgacagtcctgccaagggtcctgacggcctcgtgccaggggacctcatcctggagtatggcagcctggacgtgcggaacaagacagtggaggaagtctatgtggagatgctgaagcccaggggatggcgtccgccttgaaggtgcagtacccgccctgagggagttcacgaaagggccaagggccctgccctgggtnnnacagcttctacattcaaggggcccctgntaccaacccgggcctgggccagaatgggggnaagcnaaggaagttgaaggcttttt

SEQ ID NO: 248228 - DNA, 1561 bp, Homo Sapiens
  misc_feature (388)..(440): n is a, c, g, or t
  misc_feature (1144)..(1195): n is a, c, g, or t
  misc_feature (1455)..(1455): n is a, c, g, or t
ttggcgtcgggggaggagtcgctgggctttctgtccaggctgccccctggcccggccggcctggactgcagcgccctggatcgcgacccggacctgcagcctccctcgggcacgtcgcacttcgagttcccggactactgcacccccgaggttaccgagatgatcgcgggggactggcgcccgtctagcatcgcagacctggttttcacctactgagcccaccgtcagcggggcgcgcacgcccccaaaccagctgtttacatacaggaatcaggtattggggcccctcggaggccgaggctggcaccccatctcccgcgcagcctgccccctcctggacgtgcccatcccccctcagatccagacatgcccctcccccgcagacacnnnnnnnnnnnnnnnnnnnnnnnnnnnnnnnnnnnnnnnnnnnnnnnnnnnnncgtcgccccctcctgcacagccaccagcagccagccccctccgatacacctcccgtcctctcctacagacctgcacccctccccccttttgcacacgcccctcctcgtggccggaggacccgccccctcctttgctccggaatctctcctccctcgcccggcccgccttctctgggttaggggggcgatgcggccgggtggcaacgcacgcgcctcctgcgcccctcccttccctggggggaggggcgcaccccttttatccccggagcgctagggcccgcccctccgctggggcccacccccttcgtgcgcatgcttaatgcttctggggaggagggggctggtcccagcggagccgcactcttcgcccgctccgggcaaaagcgggggcgagcgcagagcgatcctgcgaaatcctttgatccgggagccctaggtttcctctccagccaacggggcgtcactgccttcatgggaacgaaacccgttaacgcccggctatgtccccgccattttccttcgctggtgtaattcccttttcccggtactggcgtccgctccacacccaccctcaccgcaaatcccacaaacgccgtggacccatatccccttccgacctccccccataacgcccacgttaccaccctcccaaaaataacaaacccaataatacacccacgccaccccaccacactccataatannnnnnnnnnnnnnnnnnnnnnnnnnnnnnnnnnnnnnnnnnnnnnnnnnnntctactcccctacgccgtctcctgcggctccctctccttttatcttccccgcccccaactcacctctatcatgcccttttttgtttaccacctcatgtagccacaattaccgtatcaaatgccatgtacccccattccaaaggagtcttagtgctcccgctcgctgtcttatcaaccaatgtcctcttatgcattgtttcagccaccagtccccacggcaattccatgaacccattctccatcctcttacctactcaccnccttctcccatctttcaccgcctcccccttattgcagcccaccttcgatccactccccccacataccataagcccgccgaactcttctcacacaccgcccctctcg

SEQ ID NO: 248229 - DNA, 1405 bp, Homo Sapiens
  misc_feature (1246)..(1246): n is a, c, g, or t
gtcccagcgcctagccccagggggctgtggtgcctacctcagtcattgcccgagtgttagagaagccggagtctctactgctcaattcagcccagtcaggcagcgccgggcgccccttggctgaggatgtctttgtgcatgtggacatgagtgagggtgttccaggtgatccagccagtcccccgggccctggcagccccaccccacaacccaatggggagtgccactctctgggtactgccaggggctccccggaggaagagctgcccctgccagcctttgagaagctgaacccctacccaaccccgtctccaccacacccactgtatcctggccgcagggtaatagagttctctgaggataaggttcggatcccccgcaacagccccctgcccaactgcacttacgctacccgccaggccatttccctgagcctggtagaggaggggagtgagcgggcccgccccagcccagtgcccagcacccctgcctcagcccaggcctcaccccaccaccagcccagcccagcacccctaacactcagtgccccagctagctctgccagctctgaagaggacctgctggtcagctggcagcggggcatttgtggaccgtacttcaccacctgctgctgtggcccagcgcacagcctttggacgcgatgccctccctgagctgcagcgccattttgcccatagccccgctgacagagatgaggtggtccaggcaccttctgcccgacccgaagagagtgagcttttgctacccacagaacctgactctggctttcccagggaggaagaagagctgaacctgcctatcagtcctgaggaagagcgccagagcctgctgcccattaacaggggcacagaggaggggccaggcacttcccacaccgagggcagggcctggccactccccagctccagtcgcccccagcgcagccccaagaggatgggggttcaccacctgcaccgcaaggacagcctgacccaggcccaggagcagggcaacctgctcaactagggcccctgctggccttcctgccattgctgcaccaggactgcaaggagtccccacaccttggcagctcagggtccccagtccaagcccttgacctctcctctatccagacccgcacagctgtttcctgtgtggatggggtcaggttgtgggccatgccaggcctgtcagctgcgttgactgactgcagcagcttgcctcatggtttttccctttttcttanaatatatattccttcaaaggtaacatgcaagttggggcctcagaccttttccctccaatcagcccaaaccccagccccagacttgggccttttctggggggagcttgaggagttttatccaggaattcctccttcccatccctttcataagccaccaaa

SEQ ID NO: 248230 - DNA, 1894 bp, Homo Sapiens
  misc_feature (1706)..(1706): n is a, c, g, or t
cagaatcctcccctcccattggtgggccctgtgaagctgctccttcatcctcactgcccactccaccccagcagcccttcattgctcgccgtcacattgagctgggggtgactggtggtggcagccccgagaatggagacggagcactgctcgccatcaccccacctgctgtgaaacgtcggagggggaggccccccaagaagaacaggtctccagcagatgctgggagaggtgtggatgaggcaccctcatccaccttgaagggaaaaaccaatggggctgacccagtccctgggcctgagaccctaattgttgcagatcctgtcctggaaccacagcttattcctgggccccagcctcttggaccccagccagttcacagacccaatcccctcctgtcacctgtggagaaaagaaggcgaggacgaccccctaaagcacgagatttgcccatccctgggaccatttcctctgcaggggatggcaactccgaaagtcggacacagccacccccacacccatcacccctaaccccactcccaccactgctagtttgtcccactgctactgttgccaacactgtcaccactgtcaccatttcaacgtccccacccaaacggaagaggggccgacctcccaagaatcctccatcacctcggcccagccagctccccgtcttggaccgtgacagcacttctgttctcgagagctgtggattggggaggcgacggcaaccccaggtccaaggggagagtgagggtagttcctctgatgaggatggaagccgccccctcagccgcctggcccgccttcggcttgaagcagaaggaatgcgaggacggaagagtggagggtccatggtggtggctgtaattcaggatgacctggacttagcagatagcgggccaggcgggtcggcaatggacaccacctgtggtctcactaaccccaaaactgcgctcgacccggctgcgtccagggtctctagtccccccactagagactgagaagttgcctcgcaaacgagcaggggccccagttggtgggagtcctggggctggcaaagcggggccgcctacagcccccaagtccccttggggcctgagggttcagtagaggagtctgaggctgaagcctcaggtgaggaggaggaaggggatgggaccccacgccgacgtcctggcccccgccggcttgttgggaccaccaaccaaggggaccagcgcatcctgcgcagcagcgcccctccctccctggctggccctgctgttagtcacagaggccgcaaggccaagacgtgagtgggctgcccctccacctaggctttccaccgtggccactccctccatgaccaggcctgactctgttaaccactacttgaagtcttgagggggaaagcctccagggagacataggggccttctcccttcttcccaccaaagtagggggtaggcaactggttgtcatggaaatggggatcatcacagtccccttccccttcaccccacgtggctgggcagtgttaagggtggcaagatagtctctgtccccacccccttgtacttgatttcccagcttgctttcacacagccccccacccttaggggaaggggggagggctttccctacaaagagggttttattcttttcttttcttttcttaagaaaggaaaaagttatatagcttattctcctggttgacgggncatccaatatcagataggcgagcaaacaaatatgcactgatacactcagatagagcccccgggcgctactctatggtagggtcgcaggtagaatatggcggtgacttgcaactgggacgcaatgaagagaatacatcgggccttcccttagtaagccgcctgtttctcctctgcgacagggagtgggc

SEQ ID NO: 248231 - DNA, 1479 bp, Homo Sapiens
ttggcgaatgagcacctagacagtcttgtggaccacaataaactaaattctgaagcctctccctccagggaggcaataaatggccagcgagaagacactggggatcagcaggggttgttgaaggccattcagaacgacaagttggcatttcctggagagaccctttcagacattccttgcaaaacagaggaggagggtgttggctgtggaggtgcagggaggagaggcgactcccaggaatgttcgccacggagctgcccggagctgacgagtggcccgagaatgtgccccagaaaggagcaggacagttggagtgaagctgggggcatcctgttcaaagggaaggtgcctatggtggtcttgcaggacatcttggctgtgagaccaccgcaaatcaagtcccttccagccacaccccaaggcaagaacatgacccctgagagtgaggtgctggaatctttccccgaagaagactctgtactcagccattcgtccctgagctctccctcttccaccagctcgcccgaggggccgcctgctcccccaaagcagcacagcagtaccagtcccttccccacctccacgcccctccgcagaataactaagaaattcgtcaaaggctctacagagaagaacaagctcagactgcaaagagatcaggagcgtctgggcaagcagctcaagttacgtgcagaaagggaagaaaaggagaagctgaaagaggaggccaagcgggccaaggaggaggccaagaagaagaagaggaagagaacgagcttaaggaaagcggagaggcgggagaagcgggagaaggatgagaaggagaaggcggagaagcagcggctcaaggaggagctggcgcaaggagagacaggaagccctggaggctaaacttgaggaaaaaaggaaaaaggaagaagagaaacggttaatccagaagaagagaatgcgcattacagcagagaaggccgaaagtcacgaggttcttccagaaaccaaatgactccacaggtccccaagagcctggctggatcctgtgggaagtttgcccgctttgaaattaaagaggcacatggtcctggtcccctcggacgtcggaccgctttccatccagacctctgcagtcagctggaccagctcctccagcagcagagcggcgagttctccttcttgaaagacctcaaaggcctggacagcccctgaggtccggaaccaacgcacgtatccacccggaatgcagatattttaacagtgatgtcgacatcgtggagacgtgggaagggctgacggtgttcccgacgaggaggaaagtattggcacggatgaaggctcctgcaagatctgtgagaaccaacggactgctactggggtacctggaataacgaagacggactcatccgagcgcaaagacccctgggcccaggacaacgaagcatcctggactatagaggtggacagtgatgacgagtgggaagaaga

SEQ ID NO: 248232 - DNA, 939 bp, Homo Sapiens
acagcattatttcatcgcatgggagtctcaagtcctccaactgtgtggtggatagtcgttttgtgctcaaaatcacagactatggcctggccagcttccgatcaactgctgaacctgatgacagccatgccctctatgccagcatgcagaaggctgacgtctatagctttgggatcatcctgcaggagatagcacttcgcagtggtcctttctacttggagggcctggacctcagccccaaagagattgtccagaaggtacgaaatggtcagcggccatatttccggccaagcattgaccggacccaactgaatgaagagctagttttgctgatggagcgatgttgggctcaggacccagctgagcggccagactttggacagattaagggcttcattcggcgctttaacaaggagggtggcaccagcatattggacaacctcctgctgcgcatggaacagtatgccaataacttggagaagctggtggaggaacgcacacaggcctatctggaggaaaaacgcaaggctgaagctctgctctaccaaatcctaccccattcagtggcagagcagttaaaacggggagagactgtacaggctgaggcctttgacagtgttaccatctacttcagtgacattgttgggcttcacagcattgtcagcagagagcacccccatgcaagtagtgacacttcttaatgacctgtatacctgcctttgatgccataattgacaactttgatgtctacaagggtggagaccattgggggatgctttcctggtgggtatctgggcctccccaggcccgaatggtccaagcccatgcaccaaaaaattggctcctatgggccccttacctttacttagagggcagttttcttcccttttcgattccggcaagcgaaccccaatgaaccagcctggagggctacccaat

SEQ ID NO: 248233 - DNA, 1023 bp, Homo Sapiens
ttggctgagtccccgctagctctggcacctggtgcatcagtgctacggctcagagctgggcctcaccagtgaggatgaggactatgtctcccccttgcagctgaacggtctggggacccccaaggaagtgggagatgtgatcgccctgagcgacatcacctcctcgggggcagctgaccgcagccaggagccaagcccagtgggttcgcgccgtggccatgtcacgcccaacctttcccgagccagcagcgacgcagaccatggggcagaggaggacaaggaggagcaggtagacagccagccagacgcctcctccagccagacagtgaccccggtggctgaacccccgagcacagagcccacccagcctgacgggcccaccaccctgggccccttggatctgctgcccagtgaggagctattgacagacacaagtaactcctcttcatccactggggaggaagcggacttggctgccctgcttcccgacctctccggccgcctcctcatcaactctgtcttccatgtgggcgctgagcggctccagcagatgctcttctcggactcgcccttcctccagggcttcctacagcagtgcaagttcacagacgtgacgctgagcccctggagtggggacagcaagtgccaccagcgccgggtgctgacgtacaccatccccatcagtaatccactgggccccaagagcgtctccgtggtggagacacagacgctgttctggcgcggcccccaggccggcgggtgtgtggtggactcctaggtgctgacgcagggcatcccctaccaggactacttctacactgcccaccgctactgcatcctgggtctggcccggaacacgcgcggctccgagtgtcttctgagatccgctaccgaaagcagccgtggagcctggtgaagtcgctcattgagagaactcgtggagcgggcattgaagactatttccaccatctggagcgagagctcgccaaaggctgaaagctgtctctggaggaaggcgggaag

SEQ ID NO: 248234 - DNA, 1014 bp, Homo Sapiens
ttggggaggagcctcgaggccggtttggaatttttggcgcgagcagctccgcgcgcgttcacgggccgttccccctcacgggagtcctccgcccgggcgtccggaacagtcgacggcagactccggcccgctgagccacccgaggggtcccgtggcctccgcggacccggaatctgggccctcgcggacccgcgccccgcccagtcgccccagggcttccccacacccacggagtgaagtcagccgcggccctgcctgggaggaacttaccgtctaccgggaaaggtggccagcagatgtgtcgggcctggtgagagggtgaggcgagacggcccgatcgcccagggccccggaagctgcggaggtcacccccgcctggccttagctcagggacaccctggattcacgtgggagcccctgctcctgcctcccccgtcccaccactgaggctgttgggccaggccagtcatgctagaacggcctcctgcactggccatgcccatgcccacggagggcaccccgccacctctgagtggcacccccatcccagtcccagcctacttccgccacgcagaacctggattctccctcaagaggcccagggggctcagccggagcctcccacctccagccccttgccaagggcaagcattcccatcagccgcctcttccctcctcggaccccaggctggcaccagctgcaggcccggcggggtgtcatttccggggcgaggcctcagagactctgcagagccctgggtatgaccccaagccgggcagagtccttcttcccagcagagcttccaggaggcttcagccgctggggccatggctcctaccggagagagtcttacaagggtgcgctccaaagggaggacgggccggatcctattgcggttaaaagcgttcacatggtcagcccaattcgcgggcgcccagacggaaccggggccccgcaaagtatggaccgacgctgagacaaggacacggagaacggtagcgagcaagcacccg

SEQ ID NO: 248235 - DNA, 1231 bp, Homo Sapiens
  misc_feature (644)..(644): n is a, c, g, or t
  misc_feature (650)..(650): n is a, c, g, or t
  misc_feature (652)..(652): n is a, c, g, or t
  misc_feature (654)..(654): n is a, c, g, or t
  misc_feature (676)..(676): n is a, c, g, or t
  misc_feature (940)..(1003): n is a, c, g, or t
  misc_feature (1102)..(1163): n is a, c, g, or t
  misc_feature (1184)..(1184): n is a, c, g, or t
ttggggcggaagatgttccgggagaaggacctccgaggcgtaactcccgactcagctgagatgttgccccccaactttcgttcggctgcagcgggagccctgggctctccggggctccctctccgcaagctgcagccagaaggccagacttctgggagttcccgggcagacggcgtttcggtccggacctattcctgctagtgcaggcctccaggtgacctcactcggacggaagaatcttcccgaggctgggctgttccctctcctgcccggactgtggcctcgccggggagagcgggcgggggagctcgcgccgaggactggaccatctgtacagaccagcgggagtgcgcgcgcccgcctcgcacagggccggggcctggaccaaaccacatgaactggactgagagggggaagaagcggggaggaagaaatcccgccccaaacgtccgctttccttttctctactttgtaatttattgatcagtttctgttgggagacgggtgtcctttacccgcgggaagggggcggggcttccctcccgggccgcatgcggggagaggctgctccctcccctttttcctgcccagtcgcggggcccaagtcttccttcttcgtccgaaaggaggggaggggggactcnctgctncnancctcgccccctgtgccactcanctccgagccgccgcggccggtcgccggtcccccgggctctctgcgggcggggccccctccccctccctcgtgggttggggtccgcggtgtcccccttctcccccgtggcggtttgcgggcctttgctcccggggtccctcgggggggtcctggcccgccttccgcgttcctcgccgtgttgtcccggtttttgcctgcggcgcgcggcccggtctctcggttcgcccgcgccgttttggtcggcccccgcgccgtctttcctcnnnnnnnnnnnnnnnnnnnnnnnnnnnnnnnnnnnnnnnnnnnnnnnnnnnnnnnnnnnnnnnnccggcgtgtttgtcggtttcgcccctccgcgctccgtggcgcccccttcctcgcttgtggcggccccccgcccgcctggctggctggcttgctcgccgnnnnnnnnnnnnnnnnnnnnnnnnnnnnnnnnnnnnnnnnnnnnnnnnnnnnnnnnnnnnnngcgctcccgctcctcggcctntcggccgctctcctgctctccctgccgccgcgccggcgctcttcctc

SEQ ID NO: 248236 - DNA, 1328 bp, Homo Sapiens
  misc_feature (679)..(679): n is a, c, g, or t
  misc_feature (691)..(691): n is a, c, g, or t
  misc_feature (695)..(696): n is a, c, g, or t
  misc_feature (700)..(701): n is a, c, g, or t
  misc_feature (703)..(704): n is a, c, g, or t
  misc_feature (708)..(708): n is a, c, g, or t
  misc_feature (711)..(712): n is a, c, g, or t
  misc_feature (715)..(717): n is a, c, g, or t
  misc_feature (730)..(730): n is a, c, g, or t
  misc_feature (737)..(737): n is a, c, g, or t
  misc_feature (741)..(741): n is a, c, g, or t
  misc_feature (781)..(842): n is a, c, g, or t
  misc_feature (926)..(989): n is a, c, g, or t
  misc_feature (993)..(993): n is a, c, g, or t
  misc_feature (1022)..(1074): n is a, c, g, or t
  misc_feature (1118)..(1178): n is a, c, g, or t
  misc_feature (1302)..(1302): n is a, c, g, or t
ttgggttttctgtaactaaaatgtaatcaactctttttccttccctttttgaatcaaaatgttagacttatacaagcactagcaacaactctatatctggatcattgaagcgcttggaagatactactgcacgatttacaaatgcaaatttccaggaagtctctgcacacacctctagtggaaaagatgtttcagagactagagggtcagagggcaaagggaagaaatcttcagctcacagctcaggtcaaaggggaagaaagcctggtggtggaagaaatccaggaacaactgtgtcagcagctagcccttttcctcaaggtattagtgatgttttagttaaaatacttgtgtttaagatggttaataatagttatgctttgtaaataattggtttgtttttgaacttataactaatggatgttctagattattatatgattagttgctttagtaagattactttaaagatagtgtttcctattaaatttttttaatagggactttttctttccttttataatatgatttgtgcttccagagttgaattgtaattttaatgtttaactagatatggaataatgcttaaaattggggagaaaaataataaaagctggagctttgctttgagttctgtagaacagtccttctttttgtttgagacggaatctcgctctgnttgcctgggctngganngcanngnncggntcnntgnnncctccgcctctcngggtcgngggnttcttgtgcctctgcctcttgggtggctggggttccgggnnnnnnnnnnnnnnnnnnnnnnnnnnnnnnnnnnnnnnnnnnnnnnnnnnnnnnnnnnnnnntcgccccccgccggcgcgtcgctcccgcggctcccccgtgttcggcgggggccggtggtcgtcgcgccctgggcgcgcgggggnnnnnnnnnnnnnnnnnnnnnnnnnnnnnnnnnnnnnnnnnnnnnnnnnnnnnnnnnnnnnnnngtgngccttgctcgggccccgcgttcgtcgcgnnnnnnnnnnnnnnnnnnnnnnnnnnnnnnnnnnnnnnnnnnnnnnnnnnnnnggttccggcctgcgcgtccccctcgtgccgccccttcgtctccnnnnnnnnnnnnnnnnnnnnnnnnnnnnnnnnnnnnnnnnnnnnnnnnnnnnnnnnnnnnnggcctctccttttcccgccccctgctcgcggtgctttccccgcgctcttcccgcggccgcctcgcttgcccgcgcgtcggcgggtgtggtcttctgtgtgcgcgcccgccgccgcctgtgttcntcttccccctcttttccttcgtcccg

SEQ ID NO: 248237 - DNA, 1491 bp, Homo Sapiens
ttggcgcggcgcaaagctcgagcggacggcgggggcggccggagcctctctcgggggagccgcgcctgaggaggcggaagaacccccctgacgcgactggcgtgtgcttctgcccgccaccgcccctcccgctctcacccgggccgtccctggccactgcccctgccgcggaggcagcggcggcagcggctctcctttccacagccggcgctccgcgacccgcttggctcctgagcccgtcgggtaggctctcctcgagttcccgctcttcaccccttccctcaccctcttctttcgtcacccgtccccgaccccacccgagcccggcgcctcagctgcccccggccatggcgtgcggagccactctgaaaaggactctggatttcgacccgctgttgagcccggcgtccccgaagcgcaggcgatgtgcgccattgtcggcgcccacctcggccgctgcctccccgttgtcggcggccgcggccaccgccgcctccttctccgctgcggccgcctcgccgcagaagtatctccgaatggagccatcccccttcggcaacgtctcctcccgcctcaccacagaacaaattctgtacaacataaaaacaagagtataaacgaatgcagaagagaagacatttagaaacgagtttccaaacagacagatccgtgttgtacttctgatgcacagcccacatgcatttctcctcagtggaccagcttcaccagggacttcatctgcagcatcctcaccattaaaaaaagaccagcccttatttactctacggcaggttggggatgatctgtgaacgtttgttgaaagaacgtgaagagaaagttcgagaagaatatgaagaaatattgaacacaaaacttgcagaacaatatgatgcgtttgtgaagtttacgcatgatcaaataatgcgacgatatggagaacagcctgctagctatgtttcatgaatcacgtatcctgcatttgtgggctgccttgttccttgttgagttgttgcaagaggtcccaattatgacatgcagcaatgccaataccccttctgtgaatacaggttatttcaagctttcgtcagtggcaaccactcttaggcagcagcaactggttttggaaatttccctgatgtcagtaccacctggatgtggacctttgctacctgtattaataccagtggcctcattttgctgtatcattacaatttggcttcttatattaatgtttgaaaaggattaaagctggtattctagaacatgcccttcactggttgtgtaaataaaactgtagaatgacacttcagatgaagttagtgtgattttaattgtgcactacaaccgagctgtaaccagttactaattttagaatgtaatcccaggacaatattatttctttttgcctgcagtgcttcctgtgaaatagtgaaggaggagggcatttctgtattccaggacttcttggggtttcagaatgggtttgtatga

SEQ ID NO: 248238 - DNA, 295 bp, Homo Sapiens
  misc_feature (14)..(14): n is a, c, g, or t
ggtcagttagtganttgtttactgttggcaacagcacagccctgtggcacccaagggtagcgggtggggtggcggccgggtctcctggggccccgttctccctcccattctctaggtccctggaggccagacccctgggtacggcccatcctagcagtggttctggctgggtctttcctgggcaggagaggagggtccctgggagaggcagtgatggctacagcgtctgtagggagctggggacacttccggccagccatgacaggcccaagcctgctcagtcctcgttccgaat

SEQ ID NO: 248239 - DNA, 611 bp, Homo Sapiens
  misc_feature (157)..(182): n is a, c, g, or t
ggttttctataaagggcaactttgtacaaaaaagttggagaagaaatgtcgagaccctgaataataatgatcactaacaactattgactactttagatggtcttgatattctaccaagctttttacatgtatcgtctcattcccattttatagacgnnnnnnnnnnnnnnnnnnnnnnnnnngtgaagtaacttgcccaaagtcatgcaaagttgggatatctaaagcagaagccttagaaactctgcaaattatcagaagagaatgtctcacaaataaaccaagatatgctggtacatctgagtcacacaagaagtgtacagcactggaacttcttgagcaggagcatacccagggcttcataatcaccttctgttcagcactagatgatattcttgggggtggagtgcccttaatgaaaacaacagaaatttgtggtgcaccaggtgttggaaaaacacaattatggtaaaataaagtgttctccttttaagggtgggtttaataacatattatgaaagtagtattttgtactatcgtcaggaaaccaaataagatatatatgtgctcttagttttaagtgtgtatgtgcattaaacaaaaattagctt

SEQ ID NO: 248240 - DNA, 953 bp, Homo Sapiens
ttgggtacgggtgttttacgccaggacgctgatgcgtttgggttctcgtctgcagaccctctggacctggtcacgattccataatgtaccacaacagtagtcagaagcggcactggaccttctccagcgaggagcagctggcaagactgcgggctgacgccaaccgcaaattcagatgcaaagccgtggccaacgggaaggttcttccgaatgatccagtctttcttgagcctcatgaagaaatgacactctgcaaatactatgagaaaaggttatggaattctgttcggtgtttaagccagcaatgccaagatctgtgtgggtacggcttgtatgtatttcaaacgtttttatcttaataactcagtaatggaatatcaccccaggataataatgctcacttgtgcatttttggcctgcaaagtagatgaattcaatgtatctagtcctcagtttgttggaaacctccgggagagtcctcttggacaggagaaggcacttgaacagatactggaatatgaactacttcttatacagcaacttaatttccaccttattgtccacaatccttacagaccatttgagggcttcctcatcgacttaaagacccgctatcccatatggagaatccagagattttgaggaaaacagctgatgactttcttaatagaattgcattgacggatgcttaccttttatacacaccttcccaaattgccctgactgccattttatctagtgcctccagggctggaattactatggaaagttatttatcagagagtctgatgctgaaagagaacagaacttgcctgtcacagttactagatataatgaaaagcatgagaaacttagtaaagaagtatgaaccagccagatctgaagaagctgtgttctgaaacagaagtcggagcgatgtcattctggtgagcttgcacttaacgtaatcacga

SEQ ID NO: 248241 - DNA, 814 bp, Homo Sapiens
  misc_feature (46)..(55): n is a, c, g, or t
  misc_feature (137)..(354): n is a, c, g, or t
  misc_feature (401)..(423): n is a, c, g, or t
  misc_feature (439)..(649): n is a, c, g, or t
  misc_feature (678)..(715): n is a, c, g, or t
  misc_feature (724)..(764): n is a, c, g, or t
aacctaaaaaacattttcatttacatagcaccaaatataagagccnnnnnnnnnnaacctagaaagagtattttggagagagaaactaaggatcagaaggtttaagagtatcaaaaatctgaggccaggtgcctcannnnnnnnnnnnnnnnnnnnnnnnnnnnnnnnnnnnnnnnnnnnnnnnnnnnnnnnnnnnnnnnnnnnnnnnnnnnnnnnnnnnnnnnnnnnnnnnnnnnnnnnnnnnnnnnnnnnnnnnnnnnnnnnnnnnnnnnnnnnnnnnnnnnnnnnnnnnnnnnnnnnnnnnnnnnnnnnnnnnnnnnnnnnnnnnnnnnnnnnnnnnnnnnnnnnnnnnnncactccactgcactttagcatgggtgatggagcaagactctgtctcnnnnnnnnnnnnnnnnnnnnnnngagtatctaaaatttnnnnnnnnnnnnnnnnnnnnnnnnnnnnnnnnnnnnnnnnnnnnnnnnnnnnnnnnnnnnnnnnnnnnnnnnnnnnnnnnnnnnnnnnnnnnnnnnnnnnnnnnnnnnnnnnnnnnnnnnnnnnnnnnnnnnnnnnnnnnnnnnnnnnnnnnnnnnnnnnnnnnnnnnnnnnnnnnnnnnnnnnnnnnnnnnnnnnnnnnnnnnnnnnnnnggcttgaacccgggaagcggagactgctnnnnnnnnnnnnnnnnnnnnnnnnnnnnnnnnnnnnnnactcatctnnnnnnnnnnnnnnnnnnnnnnnnnnnnnnnnnnnnnnnnntaaatctttcacacattttctctttatatcaaaggtactaagtgacccaa

SEQ ID NO: 248242 - DNA, 721 bp, Homo Sapiens
  misc_feature (436)..(456): n is a, c, g, or t
accacacctggctgcatagtgttttaaatgtttgtgtgaagaatgagtttgtggaacaatttgatttgctgtggcctctatgcctaatgagctagtgtttctggcagctctctctacccaactttgcacttgtagttttgagtctttgtctctctggaatatgaacaggtttataaaacattccatggtgaacaattctgtcggctgcattatagccatgagtgaatagacagcattggctggtccaagctctgttattgagtatacaaggaactgatttttcttatgttagcactaagggcaaaaaccaatatttataatgtaagcactatccaggtaaaacactggcccaagatttggtaaagagatttcattgcaatgtaataactacagttttttacaaattggaacagctttggtgtgtcgtaatcaaggnnnnnnnnnnnnnnnnnnnnncaaataagccatctgattgtggtgactggggcccatgtccaagacaattcctggcatattctgtcaccctcccgtggggcgatcactgtgtggggaccccattccccagttaaagtgtgtctctgtaccttacaacagcgattcagacccaagtgtgaacaacactcagcccgccctctggagcgtgtgctgtcttaaggccctacccaaagtcactgtaacagttagtgtgtcattaacctttctgtctctttgcgcctaaaaa

SEQ ID NO: 248243 - DNA, 528 bp, Homo Sapiens
  misc_feature (114)..(114): n is a, c, g, or t
  misc_feature (119)..(119): n is a, c, g, or t
tattaaaaatgtggatgtgctagaattggatatgtccaggaacatgggaagggctcactattggaatcccatgggtttccattttgtctctacccaaacgtattccaaagctgnactgncatttgtaccatcttatttcttttggggattatacacctcagccgcctgagatgggggtcagctctttatataaagggaaaccagaaccaggcctaaagcccaccccctaccctcacccccacaatcctctcctgaaacttaaaaacagtgggaatataggaaagggaaccaaatctcattaattaattgttctcccccattaccccactgaatgaatggccatacaggctaagctgaataatgacaaagttgaaaggaccaatacagccccttttataaggattttgaatgttttgcaaatgtattggtccctgtgttgtattttgtagccttttcctgggcttcagctcccctacttcttgtatgtgtatgcatactgtagctaaccattaaattacattacacaca

SEQ ID NO: 248244 - DNA, 441 bp, Homo Sapiens
  misc_feature (42)..(42): n is a, c, g, or t
  misc_feature (49)..(49): n is a, c, g, or t
  misc_feature (73)..(73): n is a, c, g, or t
  misc_feature (99)..(99): n is a, c, g, or t
gtcttaaaaaatccctgaccctcgggtgaatctgccccaccntcagccntcccccaaagtgcctaggattacngggataagcccactgcaccccggccnagctcctagtccttattttgcctgaaaaaagggaggcaattgagggaaaaagcctgctggcccgggacactggagaccgtgggtttacccacacagcccttgggaaatttatctaactctctgggcccctttgtacttttcagcttagagatttgggggttaaagtagatcagtaatttccaaactcttcacagagtcccagggtctgtagagatgcctcacaggcctccatgacaggccaagaagatggcctatgatctctgaaaccagcccccacttcaatcagatcaaagtaattccattctgttttatatgctgggattctgcttaagatttcatttg

SEQ ID NO: 248245 - DNA, 792 bp, Homo Sapiens
tacaaaaaagttggcaaaaggatgaggccagaactcttccagaaccatcacctttgggaacctgctgtgagagtgctgaggtaccagaagtgtgagaacgagggggcgtgctgggatctttctctctgactatacttagtttgaaatggtgcaggcttagtcttaagcctccaaaggcctggatttgagcagctttagaaatgcaggttctagggcttctcccagccttcagaagccaactaactctgcagatggggctaggactgtgggcttttagcagcccacaggtgatcctaacatatcaggccatggactcaggacctgcccggtgatgctgttgatttctcaaaggtcttccaaaactcaacagagccagaagtagccgcccgctcagcggctcaggtgccagctctgttctgattcaccaggggttccgttcagtagtcattgtccacccgcggggcacctccctggccacacgcctgttcccagcaagtgctgaaactcactagaccgtctgcctgtttcgaaatggggaaagccgtgcgtgtcgcgttatttatttaagtgcgcctgtgtgccgcgggtgtgggagcacactttgcaaagccacagcgtttctggttttgggtgtacagtcttgtgtgccttggcgagaagaatattttctatttttttaagtcatttcatgtttctgtctggggaagggcaagttagttaagtatcactgatgtgggttgagaccagcactctgtgaaaccttgaaatgagaagtaaaggcagatgaaaaga

SEQ ID NO: 248246 - DNA, 1076 bp, Homo Sapiens
  misc_feature (133)..(134): n is a, c, g, or t
  misc_feature (148)..(148): n is a, c, g, or t
ggaatccccgggcatttaaatgatgccctgaagtttgttttgaaaaagcaatatttcattgccccttttcaattgtgaagcaacctgctcagcaaatattacctcatttttttaaaaagttgaattaaagggnnatatatttttaaanccaaaatagatcaaaatgatcccagttttaagggattttgcctattttggaagaataaaactaaaatgttaaaactgttgaattacagagaacagatgtactctgagacataattttaaacaaatatttaaaataaggcaggttaacatttgcgtttaggcacaataaatctgtattaaagggaagcacatcaaggaaatatatacatgttgaataatgtaactgaaaaatattttttaaaaaccacttaaaaagaaaaataatttgatgggtactttaagcattgtagatagaaattaatgtataatagtgtcctcccagtctttgtatgaaaaattaaaactctctagtcctttaatgagcatgaatttatacttctacatttgttgcttagtaaaattatcctcagtactttgagttattcagatttatgtttaatattgttaaattcttcatcagagagcataaatatattgtcttctatactttgtaacttgtgcatatctaaagaaactaacaacgaacattttgggagatgtttttgtgtttttttatagtagagttttagagtacatttgtcttaataggaagtttttaccataaacccaagattttatttcacgtattgttgctttctcttatatggaacttattgtgtacctcttacctttatttctaatcatttagtgatactaatcttttcatagtaaatatatttgtttctaattgtattcctagagtttacattcctaaagaataaacgacgactttggctatttttgtgtgttccctaccttcttaaggctatggaaataacttggagtttagttttttgaatttttgtatatttgtgtaaatgttctccatatgtagtacttgttatacaacaagtgttgcctcttgttttattgaaataaaaactgaaaaa

SEQ ID NO: 248247 - DNA, 1125 bp, Homo Sapiens
ttggataatagttaataaggtaaaggaaaccacctgtgattagaagcgaaatgggagactgcatggggaaagatgaaactagtgaagtaagcaagagccagattaatgccggattctgaaaagccatgtattctaattctgtgtgtttgtaattgacctgtgctataaaacacttaaagtctctgggtgtcagagtatctagagctgaacttggtttaacttgaaagagaaatgttgacttccaaaatgaatatttcagacaatgtgattcttttgtattatcgaattctgttgataatcagatttcttgtccttaagtatggtcattgactgtaaatataaatgaatgtacatcactgtacttgatagatggattaaccaggttctaagagctgtgaattccaaaacaatagaaaagccttgtttttactttgtaagattcagttcctcattaacatttctttttctcatttctctctctgttttagtcttgtgaaaatgccattgtgtgctggaaacctggcaagatggaagatgatatagataaaattaaacccagtgaatctaatgtgactattcttgggcgatttgattacagccagtgtgacatttggtacatgaggttttctatggatttctggcaaaagatgcttgcattgggcaatcaagttggcaaactttatgtttgggatttagaagtagaagatcctcataaagccaagtaagtatttagaaatttctgttcaaaatttcaggctttttctccacacttgtatgccaatgtagagaagatcatttatatttgcagtgccatccttaagtcatttttaacatttactgttttcagagttaaagttattcttttttattccaataatttttgtttctcctaagtaccttggtgacaagtcatttcttgtttttatacaaattatgtagtgcttgttgaacttaaaatatatctaaattttataaaatttgagactgagctcttagtgaagtatattctggttttaagtgcttttcgtatgacttggaacatctgcttattttctaatccgctgttttagggtagacactgacaacgttatgtgtggtctttaacctgttgtcatgttttttccc

SEQ ID NO: 248248 - DNA, 590 bp, Homo Sapiens
ttggctttcttacaccggaagtcaatgaagcgggtctttcctacgctaaaaaccactgagtggagtatttagtacacaggaagtcggccagagaaacatttctcatatttgaaggccggaaagagggacatttctgacaccggaagtcagtgagaggactctttcccacacaggaagtcagctagagagccgtctcccctctctggagccgagagaggccggtttcccccaccgtagcccacctgggaggaattttccagagatcactgtctgatgaccctgtcttggaattggagccatgcaagttacactgaccacgtttgggttgggatattgaggaggttatggttaaaagcatacgatgggagatcatattgtacttgcgagtgagacccggctggaggaatgttttaattcttcggaaataccaagtggtctctacagaacactgaagattctgctctcagggtgttgattgacgtctggaaggcagagactcgtggattagcaagcatgtgtaagaaagtgctctggatgccacagggtggtaatttgtgcatggaaaatggctggggtgaagaggagactag

SEQ ID NO: 248249 - DNA, 356 bp, Homo Sapiens
  misc_feature (21)..(21): n is a, c, g, or t
  misc_feature (47)..(47): n is a, c, g, or t
  misc_feature (82)..(82): n is a, c, g, or t
  misc_feature (126)..(126): n is a, c, g, or t
  misc_feature (274)..(274): n is a, c, g, or t
  misc_feature (279)..(279): n is a, c, g, or t
tttggccataatagggccaanttcctacctcctggaagtcatctcantcccactgttggtattatataattcaaggagaatntgataaaacactgccctcttgtggtgcattgaaagaagagatgngaaatgatgaaaaggttgcctgaaaaatgggagacagcctcttacttgccaagaaaatgaagggattggaccgagctggaaaacctcctttaccagatgctgactggcactggtggtttttgctctcgacagtatccacaatagctgnacggnctgggtgtttcagtttgaaaatattttgttgcccttcatcttcactggcaattttgtgtaaatttctcaaagatctg

SEQ ID NO: 248250 - DNA, 1122 bp, Homo Sapiens
  misc_feature (540)..(550): n is a, c, g, or t
gaccacattctctctggtttggtatgctctatgcccaatgcccagtcttctctctgttcttaggacaaaccaagttcctttcccactttatggtctttgcctcacatgctttatacttagatcccaacagcctctctctgagaggcattccttgaccacccaatgtgaactagtcatccctttgcattctagaatacattatcttaattctttgcatagcactcatcaaattatatttccttgtttatttgcttagttgcctcaccctgcttctaaaactataagctctttgagagagaatcttaccattacttcatcctcagtgcctagaaaaatacctggtacacagtgagtactcaacaaatatttgtgtcttagacatgaatctgatggcacaagtactaactgtacccttcccaaaaactaagggtttgaattctgggcccctcaggacaaacaggaggaaggacatcattgccctttgcaaattacaatataaatgcctctctggaggaacttcttgattatactgacattgannnnnnnnnnnaagtctgctatatgggaatgcaatattgtatttattctattcattaacaatacttgaacatttacaatattcattgaacataatctaagagaaggtcaagttacattttttacttctctattaataagagagatggtcaaattaatttatggtcaaaattataatggcaaaaacttataaataaatacgtgcttggtgttactatggttacacacagttcagtttttggtgtaaagttctttggctgcaagaaagaacatttggtttacttcactaatagaaatatctcttaaggctggaatggcctcctcttggtatttcttctgctgttgattttttgcatagttatctgtgattgtatggatggagtcgagtggagaggtactcatcatgttaatcccaaacaagagcacgtagccaattactatagcaataaggaggtagacaggtaatgcaactgcccaatattgaagccaaattgggagcttaagaaaagaacaaagccataaatcgctctttctggcaatggcgacggtgaattttccaccatttttcctggggctttagacccc

SEQ ID NO: 248251 - DNA, 864 bp, Homo Sapiens
ccacatacaaaaaaactttatttacacagtcttggattctgaatctccagtacttccagggtctcttgatcaaatggggcagcagcaggcagggaagcaaagacgggggccagtccagattatcttactcaagaacaccaccaagaagaagggaaggcctgattcagtctttgtctggactacatctccccgcactttgagatcaccacaggtagtttgggcttattgttggggcctgtgggaacattctgaatctttctcatcactagaagtccatcggtgatttttccaaacattacatgcttcccatccagccaatcgcacttagagcaggtgataaagaactgacagccatttgtacttggaccgctgtttgccgtggaaagcaggcctggagctgagtgtctaagtttaaaattttcgtctgcgaatgtctcctggtaaatactggcgactccagtaccatctccattaacaaaatctccaccctgaatcatgaaatcctttatgaccctgtggaaggtgcttcctttgtatcctattggaaccccatcttttctgaattctctggtgcagaactgcctaaagttctcggtcgtcttaggcacaacgtctgcagagagctcgatctttgtgcggccaacttcctgactgccattgctgacatcaaagaacaccatggggttagcagggcttgaagttgccaccacccatggctctgacccggaaacggaagtcagggggatcatatttcagcatgagatttggaggggacagacatccaagctgtatcataggtgtcaagtgctgtctgttgaatgaaagtcccagttggtgttcttttgacatgtggtgatctatttt

SEQ ID NO: 248252 - DNA, 990 bp, Homo Sapiens
  misc_feature (657)..(667): n is a, c, g, or t
  misc_feature (937)..(937): n is a, c, g, or t
  misc_feature (951)..(951): n is a, c, g, or t
tagtttaatccattgaagagcgcctgctcccctacccagattgtcaagtgacttctactgtaaagggtgagctatggtttaaaacattaacctctacacctcagcaatgcgttccctccctggaacaccaggtgctttcaaaatcacggactccagaaatgaatgcagggttttgaaacctttagtgataccatgcaggataaataacaaggcctaaggggaattactgccttgcagaagttccatttacatccactaaagtgagagttgttatccatggatcagaaaagagctcccatgaaaaacaccgtctttggggaaggtgcaaaaactcaattttgatttcagttcaacaatgatatttacttggctaacaacttaagaactagagtttaacaagtaattttctccatgcctaaggtcagtgtacagaatgacaagccagaaaatgtccattttccccatgcgtccttagcaagcactttaaaggtgacagctcagaagaggcgggggagagggcaatggttaaatcatttatcaaaagtcattttattgacaaaatagaatacttatatctgttcttacaggggtaagcctctaaactttttacaaaaaaatgtacacactatatctttggatatatacatattttacacnnnnnnnnnnnacaatttaacaaataattatataaatacatcctctaatgtaagaaacccgtatttacgtggggtgtataattaagacatttcttgtttgtttacttaaggcatttgcctggtcattaagaatacccaaaccgtgcaatcccatcaggtggcggtcacccctcctccagggtaagtcaggggtgggagtttacgtaggaagagtcgagggagaaaaagaggttctcccaggtgaaatctgtgtatctgactgcaaacccagccaagtgcanccagggagggctcnaaatctcgggttctggaaacgccgcagagtccaccctcc

SEQ ID NO: 248253 - DNA, 971 bp, Homo Sapiens
  misc_feature (58)..(58): n is a, c, g, or t
  misc_feature (96)..(96): n is a, c, g, or t
  misc_feature (118)..(118): n is a, c, g, or t
aataaaaagatgcatttgacaggacagcagactagttcaagcaggaggttagaccagnaacaacaaccaagaaagcaaagtgctcgtttccatctnggctttaccacacttacaaacngatacccaaataacaggaattgtttttcaaaggtgcacaagaattttaaggattcatgaccccactttcattaaatagtcccagaagatagctaaaataacattttcagatagaacctcacagtggcataagtttcataacaaacaaacctaagatatgctgacaggaatcacattgagtttgcaagcactcaaataggaaacccaagacctccggcaacaaattagaaaatatgaacagaaatattttaaaccacaagtatttcatcccaactaaattccaatttcttcaatgttctctgagttgttagatttcaaagtgaagagaactgaaatctctttttattcatagcagagccaaaactggaagtcacttattaaatacctgtgtacaaaacaccatacttggggctatatgcgatttcaggttggataaacgagtcatgttgaatgacaaaaagttagactggggagatttatggagagaagcaagcacctgtgatttgttggtttggcgttacaataaacactgtaagtgaaaatgagtcacaggcagttagaatggcgttaaggaaaccatttaggtctaaaaatcaggactgaagtgatcaacagttaacagatgaagccatgagaactggcatgctctggaaaggctggtgcagagagcaggacggtgagcctgagtgagcctggagttagtcaacagattcctcaacagaaaaggagtgaggagcagggtcaaagaaatgaaggtgaatttggggggtggtggtcaatgggttaaacgtacaattttgaggccgaggaactgaggctgaagaaggttctggcaagtggagaaccatgagatc

SEQ ID NO: 248254 - DNA, 564 bp, Homo Sapiens
  misc_feature (169)..(169): n is a, c, g, or t
  misc_feature (199)..(199): n is a, c, g, or t
  misc_feature (487)..(489): n is a, c, g, or t
  misc_feature (492)..(492): n is a, c, g, or t
  misc_feature (499)..(499): n is a, c, g, or t
  misc_feature (529)..(529): n is a, c, g, or t
  misc_feature (547)..(547): n is a, c, g, or t
gcagtgaagcattagatgctggtaaaagctagaggagacacaatgagcttagtacctccaacttcctttctttcctaccatgtaaccctgctttgggaatatggatgtaaagaagtaacttgtgtctcatgaaaatcggtacaatcacacaagggggatgaaaacgccnggaacaaaaatgaggtgtgtagaacagggntcccacaggtttggggacattgagatcacttgtcttgtggtggggaggctgcctgaggggtagcaggtccatctcccagcagctggtccaacagtcgtactcctggtgaatgtctgttcagctcttctgtgagaatatgattttttccatatgtatatagtcaaatatgttactatcaattacatgtactttataagtattggtttgggtgttccttccaagaaggactatagttagtaataaatgcctataataacatatttatttttatacatttatttctaatgnnnaanacttttnaattatatcgcttttgtggaagtgcatatnaaatagagtatttatacnatatatgttactagaaa

SEQ ID NO: 248255 - DNA, 949 bp, Homo Sapiens
  misc_feature (89)..(89): n is a, c, g, or t
gccaattttagggggtaccttagtggaaaacaaacgtgttaaaaagcggctgtacggtccggaatccgggatatcgtcgaccacgcgtncgagaaaaatccctttggttccagaaaatctcctgaaaaagaggaaggcttatcaagccctcaaagccacccaggcaaagcaggcacttttggcaaagaaggagcagaagaaaggaaaagggctcaggtttaagcgactggaatcattcctacatgattcctggcggcagaaacgtgacaaggtgcgtctcagacgactagaagtgaaacctcatgccttggaattgccagataaacattccttggcctttgttgtacgcatcgaaaggattgacggcgtgagtttactggtgcagagaaccattgcaagacttcgcctaaaggaaaatttttagtggtgtctttgtaaaagtcaccccccagaatctaaaaatgctgcgtatagtggaaccttatgtgacctggcggatttccaaatctgaagtctgtccgagaactcattttgaaacgtggacaagccaaggtcaagaataagaccatccctctgacagacaatacagtgattgaggagcacctggggaagtttggcgtcatttgcttggaagacctcattcatgaaattgccttcccagggaagcatttccaggagatctcatggttcttgtgccctttccacctctcagtggcccgtcatgctaccaaaaatagagtgggcttcctcaaggagatgggcacacctggctatcggggtgaacgcatcaatcagctcatccgtcagttgaactagacccaggtgccaaactgcggtaaattttttatcagtgaagtggaagcatgtgttttgttttggaaatttttatcaagtatcttcagagaagattatttcctgctttatcttcagaaactggaaagggtcaaag

SEQ ID NO: 248256 - DNA, 520 bp, Homo Sapiens
  misc_feature (12)..(12): n is a, c, g, or t
  misc_feature (35)..(35): n is a, c, g, or t
  misc_feature (56)..(56): n is a, c, g, or t
  misc_feature (137)..(137): n is a, c, g, or t
  misc_feature (152)..(152): n is a, c, g, or t
  misc_feature (315)..(315): n is a, c, g, or t
  misc_feature (408)..(408): n is a, c, g, or t
  misc_feature (414)..(414): n is a, c, g, or t
  misc_feature (434)..(434): n is a, c, g, or t
  misc_feature (463)..(463): n is a, c, g, or t
gggattttgctnaaacagacttgccgcaagtggangaggaggttttatttatcccnacagtttctcctgggccttctgaatgaccatgttttcctgtggcggtgggtgtgtcaattgcgcccgccgtcttcccaaangccttaacttccccnaagctgcccagcccaggaggtgataaccaccctccccagagtttctctcggctctttttttaaaagtcccccaacaaataggattcttgcctgggaaaggaagttcggtaaggaaatgtcaaatctggtttttaaacaaggtccaaccctgcaatgaagcagnccacttcagacccagagagattataagaactgatgtggaccagagtgcctacccactgtggccccggtgctctgcccccacgccccgaccatnctggtncttggtagatgtccctagancgggctgagccatgtgcaataagaacatnagatcctaaaggatcctctggaagctgtatttcttgaattagtttttcttaaattgt

SEQ ID NO: 248257 - DNA, 366 bp, Homo Sapiens
  misc_feature (15)..(15): n is a, c, g, or t
  misc_feature (38)..(38): n is a, c, g, or t
  misc_feature (61)..(61): n is a, c, g, or t
  misc_feature (354)..(354): n is a, c, g, or t
aatgttatgtttgcnaaacttcacaatgtatattgggnctttgtacattttgcctgacttnccttaaatttaaaatattttttgcctatataaactttaacagttattaaacagtgttttctttttgggtacgtattgtttctggatatcaagatgttaaatatatttcttgctattgtgatatgacaagagacttaacttatcttgctctgtcttccactgtacacgctgtatataggggtcaatgtgatgctgctggagacgagaataaactggactagaatagtgcattgtatttagtctgtattgatcatggatgccctccttaatagccatatgcaataaaataaagtncattatttatga

SEQ ID NO: 248258 - DNA, 675 bp, Homo Sapiens
ccttttttgtgcataggaaatgcagtacttgcttccagtaattgtattgtaatgtgagaaggtggtagcactaatggttgaatacaagagttaaactaatccacaccagctcaaaaaacctgtggagatttagttgaataagaatggacgcccacagtgattctcaaccaattacaaattttcacagaacacagtaaaactaaaagggtaactatgagagtcaatacaagtatactagaggcacagggggcccggctcataaaaacagatttcagaccaagttattaacacggggggtgtttcgtttcataacagatctcttaccatcactggaagtgttccatcccctccccctacaatttgaaatggaaaacagaggtattccgagtggacagatttccatgtgtggtgggaaaagtccccagtgaattttgctctggtgagagggcagggctaagggtggggcgggggatcagggatttgcctttgagagtcttcctaaaggacctcctagaacctgataaagctcctagtctaggtctagttagtatctcagtggtgaggctaccaaatgccttcgcagtgcagagacgatggtctgagaccagggagaaggcaccgagccgttagttctctcaagcctctgtcccagcggagctagcggccttactccct

SEQ ID NO: 248259 - DNA, 453 bp, Homo Sapiens
  misc_feature (33)..(33): n is a, c, g, or t
  misc_feature (44)..(44): n is a, c, g, or t
aacaaaccccaagcgcaacgggccaaccgccancgtgggcggcncccccgggtggccggctcccaaacatcaaccaaccctcggttgaaacgtggaagccgcggaaggaacctaaccctgaaaggattctgggaatcatgtcccaccccttttccctgtcagtgtttttgaaacccacagttttagttggtgctgatggagggagggggaagtcgaaggatgctctttcccttttctgtttaggaagaagtggtactagtgtggtgtgtttgcttggaaattccttgccccacagttgtgttcatgctgaatccacctcggagcatggtgttttcattcccccttcctagtgaaccacaggttttagcattgtcttgttctgtcccttccacttctaactccactggctccatgattctctgagtggtggttcctttgcaccctgtagatgtt

SEQ ID NO: 248260 - DNA, 1024 bp, Homo Sapiens
  misc_feature (367)..(375): n is a, c, g, or t
acaaaaaagttggcgctgccgcatcccaggctaagcgctgcgcgcaaagccgtgcggagattggaggccgcgcgggtccctggtctgggccatgtctggctgtgatgcttgggagggagactgttgttcccggagatgcggcgcgcaggacaaggagcatccaagatacctgatcccagaactttgcaaacagttttaccatttaggctgggtcactgggactggaggaggaattagcttgaagcatggcgatgaaatctacattgctccttcaggagtgcaaaaggaacgaattcagcctgaagacatgtttgtttatgatataaatgaaaaggacataagtggaccttcgccatcgaagaagctnnnnnnnnngccagtgtactcctcttttcatgaatgcttacacaatgagaggagcaggtgcagtgattcatacccactctaaagctgctgtgatggccacccttctctttccaggacgggagtttaaaattacacatcaagagatgataaaaggaataaagaaatgtacttccggagggtattatagatatgatgatatgttagtggtacccattattgagaatacacctgaggagaaagacctcaaagatagaatggctcatgcaatgaatgaatacccagactcctgtgcagtactggtcagacgtcatggagtatatgtgtggggggaaacatgggagaaggccaaaaccatgtgtgagtgttatgactatttatttgatattgccgtatcaatgaagaaagtatgacttgatccttcacagctctcagttggagaaaatggaattgtctaagccaaaagaaagtctaattatatacagagataaagctaaacgtaattattattttaaatgaaagctatttttttaaatgaattgacaatttcttcatgatgctactaatttgccactaaatactgcaaatggtcaccctgaatctcttctgacattggatgttatttgcttatattcttataatcttaaatgagggcacagcg

SEQ ID NO: 248261 - DNA, 380 bp, Homo Sapiens
  misc_feature (334)..(334): n is a, c, g, or t
ggcttcatattattttacctattagtacactcatagttagctttgtaataaatttatgttttctttaataattttagttcttcaaagaatggctgatgctggcctgtaatttttctttcaaggatgataatttgtgtgttgtttgatttgtttatattttacatctctgtagttttatttttagaagttgtgagatattggatgtgtggctatttttcctttctctgtattctttatgaaacataacttttgaaaaacctatgtattattcatacagctttgggtttgtatattctgtataggcctaactacacacatccaaaatgtatgtcanccaagtgtttagaatgaaattataagtgtttaagtccaaataaagc

SEQ ID NO: 248262 - DNA, 425 bp, Homo Sapiens
  misc_feature (300)..(322): n is a, c, g, or t
  misc_feature (371)..(371): n is a, c, g, or t
  misc_feature (396)..(396): n is a, c, g, or t
  misc_feature (405)..(405): n is a, c, g, or t
ttggggatgattcacgaagctgacattgtttcctcaaggcagaattttcctggttctgttttctcagccagttgctgtggaaggagaatgctttctttgtggcctcatctgtggtttcgtgtccctctgaaggaaactagtttccactgtgtaacaggcagacatgtaactatttaaagcacagttcagtcctaaaagggtctgggagaaccagatgatgtactaggtgaagcattgcattgtgggaatcacaaagcaaatagtactccagaaagacaaatatcagaagcttcctattcnnnnnnnnnnnnnnnnnnnnnnngagacagggtctttctctgttgcccgggttagagtgcactgggtgttcncggctcacttttgccttgaattccngggggcccnaggcattttttccccacctt

SEQ ID NO: 248263 - DNA, 1395 bp, Homo Sapiens
  misc_feature (1337)..(1345): n is a, c, g, or t
ctttgtacaaaaaagttggttttatgattccttaaagtagaaatatccattccaggtgcattttttaagggtttaaaattttaatcctcagtgaaccagggcagagaagaatgatgatatccttgagagttttactggtgatcctgtggcttcagttgagctgggtttggagccaacggaaggaggtggagcaggattctggacccttcagtgttccagagggagccattgtctctttcaactgtacttacagtgaccgtggttctcagtctttcttctggtacagacagtattgtgggaaaggccctgagttgctgatgtccgtatactccagtggtgacaatgaagatggaaggtttacagcacagctcaatagagccagccagtatgtttctctgctcatcagagactcccagctcagtgattcagccacctacctctgtgtggtgagctgctactcaggaatctagaattttgtctttggtcccggcaccaggttgtcggttttagcaaatatccagaaccctgaccctgccgtgtaccagctgagagactctaaatccagtgacaagtctgtctgcctattcaccgattttgattctcaaacaaatgtgtcacaaagtaaggattctgatgtgtatatcacagacaaaactgtgctagacatgaggtctatggacttcaagagcaacagtgctgtggcctggagcaacaaatctgactttgcatgtgcaaacgccttcaacaacagcattattccagaagacaccttcttccccagcccagaaagttcctgtgatgtcaagctggtcgagaaaagctttgaaacagatacgaacctaaactttcaaaacctgtcagtgattgggttccgaatcctcctcctgaaagtggccgggtttaatctgctcatgacgctgcggctgtggtccagctgagatctgcaagattggtaagacagcctgtggctccctcgctccttcctctgcattgcccctcttctccctcttccaaacggagggaactctcccacccccaaggaggtgaaagctgctaccacctctgtgcccccccggcaatgccaccaactggatcctacccgaatttatgattaagattgctgaagagctgccaaacactgctgccaccccctctgttcccttattgctgcttgtcactgcctgacattcacggcagaggcaaggctgctgcagcctcccctggctgtgcacattccctcctgctccccagagactgcctccgccatcccacagatgatggatcttcagtgggttctcttgggctctacgtcctggagaatgttgtgaggggtttannnnnnnnnaatagtgttcataagaaatacatagtattcttcttctcaagacgtggggg

SEQ ID NO: 248264 - DNA, 1378 bp, Homo Sapiens
ttgggtctcggtttgtggtggcttcgctgaggcagtggtggccgcactataccgttagaaactcaatttcccggaggttgtgaggccctttgaggcgaaatcgctctgggcgtgaaaggagcaggcgttggcaatggaaggaccaccgcgacctcaggctgaccgtagggagggatcttgagggccctccgagtcccctgggcttgcgctttctttctttgcagccaccgtgcctaccgcgaggatgagctcggcctcggtcaccgctttcgagaaggagcatctctggatgtatctgcaggcgctcggcttcgagccaggcccggcaaccattgcctgcggaaagatcgtgtcgcacacgcacctcggagtgaacatgtttgacaagctgaaccgtgatgcctttcatataatttcttattttttgtttcaagttctggaccagtctctcaccaaagaagttttcaaattttgttggcccccatttgaccaaaaaagtgacactgaattccgaaaacattgctgtgaatggataaaaaggatttctggtgaatgtggaagtagctttcctcaagttgttggttcactatttctttctcctggtggtcctaagtttattcatctgatgtatcattttgcaagatttgttgcaatgaaatatattaaatccaattctaaaaattcttctcatcattttgtagagacatttaacataaaaccacaggacttgcacaaatgcattgccagatgccatttcgcacgtagcagatttttacaaattttgcaaagacaagattgtgttacccaaaaatatcaggaaaatgcacaattatcagttaagccaggtacgaaacttgagatctgaatgtactaggattggaaaaccaacataacgcaccacatggaaccctatgatgaccacagtaatatggcacagaacaaattcacaaaggttcggtctttgtgggccttcactgacctgacacgctcatgtcttcgccccccgcgagacaagtcgtcagtccggtcctctagtctcgttcaccacatatgctctcccactcgcactactgtagctatccatacttccacggctccttaccttgaccacccctcgccgcaaaccccactgtcccaacgttgcccctacggcccatgcttctatgagcgcttgcccccttgacccctctctcacacgctctctgcaggctccttcaccttgaccgttctctggcagcgtgcctgcccttctgcccccgtcgtccgcggccgcatcccgccccgatcgcaccgccgccctttccttaccttccaccaccagcccccgttcccccacgcacgtttcccagctctgcacctctgacgcttgactcccgtg

SEQ ID NO: 248265 - DNA, 901 bp, Homo Sapiens
  misc_feature (189)..(189): n is a, c, g, or t
  misc_feature (191)..(228): n is a, c, g, or t
actttgtacaaaaaagttggactcaagatggcggacgagagtgagacagcagtgaagccgccggcacctccgctgccgcagatgatggaagggaacgggaacggccatgagcactgcagcgattgcgagaatgaggaggacaacagctacaaccggggtggtttgagtccagccaatgacactggagcncnnnnnnnnnnnnnnnnnnnnnnnnnnnnnnnnnnnnnnggcagtgagacagattcagcccaggatcagcctgtgaagatgaactctttgccagcagagaggatccaggaaatacagaaggccattgagctgttctcagtgggtcagggacctgccaaaaccatggaggaggctagcaagcgaagctaccagttctgggatacgcagcccgtccccaagctgggcgaagtggtgaacacccatggccccgtggagcctgacaaggacaatatccgccaggagccctacaccctgccccagggcttcacctgggatgctttggacctgggcgatcgtggtgtgctaaaagaactgtacaccctcctgaatgagaactatgtggaagatgatgacaacatgttccgatttgattattccccggagtttcttttgtgggctctccggccacccggctggctcccccagtggcactgtggggttcgagtggtctcaagtcggaaattggttgggttcattagcgccatcccagcaaacatccatatctatgacacagagaaagaagatggtagagatcaacttcctgtgtgtccacaagaagctgcgttccaagagggttgctccagttctgatccgagagatcaccaggcgggttcacctggaggggcatcttccaagcagtttacactgcccggggtggtactaccaaagcctg

SEQ ID NO: 248266 - DNA, 1300 bp, Homo Sapiens
ttgtacaaaaaagttggaacaagtgtacccataaacacataacaagtgtagaagtatatattacatacatacactcactctgtctggtataggctaattttgaacaactcccataagtttctgctgcttctcccataactgctgccaccaccatcagaattcataatcaaacctaacctttttgtttggggcaccaaatctgaagacaaaattaatttgcaccagtaaacttcaagctgctttctttcttgaaaactaaacgtttaacgtataatgtctgtttggatactgttccaaattgttgattgcatgtggttaatgttgcattatagcactttgcaattgcataattcattaatgttttgtgagcttgcatttgtgagttattggatgatcagactgaattttgtcaagtatcacattgtacatcttgcctagatgtcgatgactgcaagtaataatacagtttataatgaaactatctacaattcttgttttagcacatctgttatccgtaaaacacctgtaactagcttttttaatttattatttgaattttaggatagcgaatcactaatttttagttgctgaggttggcattttagtgattattaagcacttctgtcagtctttgaaaaaagaacgtattttttgtgctttgaagatctctgaagaatttcttttataatagaatgggcatgtattgtaacagttttatgtcaaatgatctgtgctgtagaaaaacattaacccttgttcaaaaaagaaatggataaacttggcctttctaagtggtaagaatgacctgtcactataatatactgtatgtttacattttatttaaatttaatctcttatgtatagggtgataaccttccccagaaacaacagtgattgcgattgttttctagaaacttctttaaagtgccacatttggcagtacaaatgagtctgagtgtaatagcccagagatttatatatagttgaatgtctaaaatggtaaaatgtgccactgtgtcaagttacagtggcttatgtttttcatagtaattcaaatgaacttcctatttttgatagtaaatgtcatttaatagtatactttgccatttgagcctcactgcaaaattagtgcagaggagaaaacaatttttaatgtaatcttgattttacctcatatactgtacattccaaaaactctaaaactttttaaagattatagataacactagcaaaatatcaccttaaaatgtatacggctgaatgaacttcatccaattgaaaaaatctcataaaaatacta

SEQ ID NO: 248267 - DNA, 1326 bp, Homo Sapiens
ggggtagaatgttgttggtactgcagtgagaggcatgcttccttagaccaggcaacatttcatttgttgcatttccagtttccaataccaactcacctacaaagattttaccaaaaaccttaggaccaataaatgtgaatgttggaccccaaatgattataagcacaccacagagactaaccagttcaggaagtgttctgattgggagtccatatacccctgcaccagcaatggttactcagacacacatagcagaagctactggctgggtccctggtgatagaaaacgggctagaaaatttatagactctgatttttcagaaagtaaacgaagcaaaaaaggagataaaaatgggaaaggcttgagacacttttcaatgaaagtgtgtgagaaagttcaacgaaaaggtacaacatcgtacaatgaagtcgctgatgagctggtgtcagagttcaccaattcaaataaccatttggctgctgattcggcttatgatcagaagaacattaggcgaagagtttatgatgctttaaatgtgctaatggcaatgaacataatttcaaaggaaaaaaaagaaatcaagtggattggcctgcctaccaattctgctcaggaatgtcagaatctggagatagagaagcagaggcggatagaacggataaagcagaagcgggcccagctgcaagaacttctcctacagcaaatcgctttcaaaaacctggtacagagaaatcgacaaaatgagcagcaaaaccagggcccgccggctctgaactctaccattcagctgccattcataatcatcaatacaagcagaaaaacagtcatagattgcagcatctctagtgacaagtttgagtatcttttcaattttgacaacacctttgagatccatgatgacatagaagtactaaaagcggatgggaatgtcgtttgggcctggagtcaggcaaatgctctctggaggatctgaaacttgcgaaatccctggtgccaaaggctttagaaggttatatcacagatatctccacaggaccttcttggttaaatcagggactacttctgaactctacccaatcagtttcaaatttagacctgaccactggtgccaccttaccccagtcaagtgtaaaccaagggttatgcttggatgcagaagtggccttatcaactgggcagttcctggccccaaacagtcaccagtccagcagtgcggccctctcactgctccgagtcccgaggcgagaccccctgttcgttcaatgatgaagatgggaagatgatgaggaggatccctcctccccagaataaagacaagagaaagc

SEQ ID NO: 248268 - DNA, 596 bp, Homo Sapiens
  misc_feature (237)..(237): n is a, c, g, or t
cttgtaaaatggcttttattgagacacttgtagggattctgcaacatttccagttgggaatctttatttccaactcttagggtggctaaacccttttctgaatgccaaaaggcacactctcaccaccttaatgaggaaacacacttatctgtgtctgttccgatatccaactgggacctggaccccaagccccgtggtgtcttgtacaagtctcattagtcctccacgtacaactcnagaagcctgttaatcagggagggtaatttcccaaataaatgtgagctggcctaaatccagctggttatttctgatttggtaatctgtagtatcttaatttggggacatcctgtcctaagttttggctggtgcatgtagaacttataatctacctgtataacaacagatgcaacatagctccgttccagccccaaattccttaaaggttctagtctactcttgcacttcttcctgtactgttgttgagaagcttacattttagggagaggctggtcaaatctctactctctggtaacagcattaacaagagtctttcttttggaaacagactcagaagttatggaccctcgttccgaatt

SEQ ID NO: 248269 - DNA, 1815 bp, Homo Sapiens
actttaaggccaactttgtacaaaaaagttgggtcagctcctcctttccagcagatccaaagaagtagccttagtaataaccctcttttccagtataagtatttggctcttaatatgcattatgtaggttatatcttaagtgtggtgctgctaacattgcccaggcagcatctggttcagctttatctatattttttgactgctctgctcctctatgctggacatcaaatttccagggactatgttcggagtgaactggagtttgcctatgagggaccaatgtatttagaacctctctctatgaatcggtttaccacagccttaataggtcagttggtggtgtgtactttatgctcctgtgtcatgaaaacaaagcagatttggctgttttcagctcacatgcttcctctgctagcacgactctgccttgttcctttggagacaattgttatcatcaataaatttgctatgatttttactggattggaagttctctattttcttgggtctaatcttttggtaccttataaccttgctaaatctgcatacagagaattggttcaggtagtggaggtatatggccttctcgccttgggaatgtccctgtggaatcaactggtagtccctgttcttttcatggttttctggctcgtcttatttgctcttcagatttactcctatttcagtactcgagatcagcctgcatcacgtgagaggcttcttttcctttttctgacaagtaattgcggaatgctgcagcactccttactctcttttgggtttggtcttcacggtttcttttgttgccttgggtgttctcacactctgcaagttttacttgcagggttatcgagctttcatgaatgatcctgccatgaatcggggcatgacagaaggagtaacgctgttaatcctggcagtgcagactgggctgatagaactgcaggttgttcatcgggcattcttgctcagtattatccttttcattgtcgtagcttctatcctacagtctatgttagaaattgcagatcctattgttttggcactgggagcatctagagacaagagcttgtggaaacacttccgtgctgtaagcctttgtttatttttattggtattccctgcttatatggcttatatgatttgccagtttttccacatgtatttttggcttcttatcattatttccagcagcattcttacctctcttcaggttctgggaacactttttatttatgtcttatttatggttgaggaattcagaaaagagccagtggaaaacatggatgatgtcatctactatgtgaatggcacttaccgcctgctggagtttcttgtggccctctgtgtggtggcctatggcgtctcagagaccatctttggagaatggacagtgatgggctcaatgatcatcttcattcattcctactataacgtgtggcttcgggcccagctggggtggaagagctttcttctccgcagggatgctgtgaataagattaaatcgttacccattgctacgaaagagcagcttgagaaacacaatgatatttgtgccatctgttatcaggacatgaaatctgctgtgatcacgccttgcagtcattttttccatgcaggctgtcttaagaaatggctgtatgtccaggagacctgccctctgtgccactgccatctgaaaaactcctcccagcttccagagattaggaactgagccagttctacagcctcatgctggagctgagcaaaacgtcatgtttcagaaagtaggtttgtgaagaaaattcaaccctcaccaacttcagaaactgcccc

SEQ ID NO: 248270 - DNA, 927 bp, Homo Sapiens
  misc_feature (443)..(473): n is a, c, g, or t
ttgggattgtttcgcgcaggaagcaggctccattttagcgccgcccgccgtcgccatctgtttcccttccctcccccatacctagcccgagtctgagccctaacgagaaggctgggcctaggccgctggatgctggagtgaaaggaagggagaaagggaaaaagcgggaagagtcgagaaggctgagtgttaagaggccaagtgcgacgcgcgtatccgggcagacggactgacggacgggcccgtgcttctgccgcggctgcggcgcccgcgcgagtcgcgtctaagcggcggcggcggtggcagcggcggaaaccgaaggggagccatggcggctgacagtcgggaggagaaagatggagaacttaatgttctggatgatattttaactgaagtaccagaacaagatgatgaactgtataatccagagagtgaacaagatnnnnnnnnnnnnnnnnnnnnnnnnnnnnnnngtgatcgaatggaatctactgataccaaacgacaaaagccttctgtccattcaagacaactggtttctaagccactgagctcatctgttagcaataacaaaagaatagttagtacaaaaggaaagtcagccacagagtataaaaatgaggaatatcaaagatctgaaagaaacaagcgtctagatgctgatcggaaaattcgtctatcaagtagtgcctccagagaaccttataagaatcaacctgaaaaaacctgtgtccggaaaagggatcctgaaaggagggccaaatctcctacgccagatggttctgagagaattgggcttgaagtggatagacgtgcaagcagatccagccagtcttctaaggaagaagtgaactctgaagaatatggctctgaccatgagactggcagcagtggttcttctgatgagcaagggaacaacactgagaa

SEQ ID NO: 248271 - DNA, 452 bp, Homo Sapiens
  misc_feature (26)..(26): n is a, c, g, or t
  misc_feature (40)..(40): n is a, c, g, or t
  misc_feature (50)..(50): n is a, c, g, or t
  misc_feature (69)..(69): n is a, c, g, or t
  misc_feature (80)..(107): n is a, c, g, or t
  misc_feature (302)..(335): n is a, c, g, or t
ctgttggggcccaaaatttgtccttnaccctgtgggacanccctggcccntccctccctagccccttcnagcctgggaannnnnnnnnnnnnnnnnnnnnnnnnnnngcacgcaaacgcacacatcttacctctcatgcgtgttttaccttttgatgttcagagtggctcactggctgggagtccttacctcggggagagggggaggttggttccttggggggccaaagaaggcagggaatgcctggagggtaactggggggccaccatgaccccttctctctccagaaacagctgcttctnnnnnnnnnnnnnnnnnnnnnnnnnnnnnnnnnnaggtggcccttgtttacagtgaggactcggccactgtgtctctgtttcctgaaatataaactgtagcgaccccagactgtagagatttttatgtgtttggatatttctgctgtgtgg

SEQ ID NO: 248272 - DNA, 421 bp, Homo Sapiens
  misc_feature (83)..(83): n is a, c, g, or t
  misc_feature (409)..(409): n is a, c, g, or t
tttattgaacttggagatggacacccttataagggcaataacaaacaaaaatagaaataggtttaagttataacacacaagantaaaattagatgtaaagacgactttcctcagttttaaggtggataagtgggttgttaaattataacagatttctctaggagggtctggtgtactccagggctcgctgggaggcagacctgggataatctctgagtatatctgtccccacctgggcattgttgagacccttcagagtacttctttagggtccatgattgaaaattaaggagggcagccagtgcctccattgttataaggggccataaggtttgggttatctttggataaaggggaattgggaaacatattaacagagctcttcctcaagtcccggcattggggaccntaggcacacacc

SEQ ID NO: 248273 - DNA, 488 bp, Homo Sapiens
ggctctgatgtcctcctataaccaaaggagctggggggtccaggcctggtgaccaacctttctcagcccactcaatcagggtgctccccacctgcaggcaggaggcaacaccctatctgctaccatcagccccttccagagcccatctgccccgcccagccctgccctgcccagccataccctgctctgccccatctgggggtgccctgctcagggatgggctggcagggctgtacccagcctccctggtaagcagatactcaagaaacctctggggtcctgttttctggtcgtgtgatcccaggggtgcacattggccccttgggtgtctgaacataagggcatgggagggagggctgcactcctgcagtcttactctgctggtgtagcggcagctgcccactcccaccccaccctgcaccgcgggctcctgagtcggcagattaagcattttataaattgtattttaaatacatgttttaaacttg

SEQ ID NO: 248274 - DNA, 368 bp, Homo Sapiens
ttggccccctggtccagagctttcagctgtactggtagggggtgggtggtggagtgctgaatgaccttcctgggtgggcctttcccactctagggtcttatgggtgtcggtccgcagaaccacggtttttaggttgtgtgtcttgggctatgggaacctgtcccccatgatggatcttggtagagacacttccctctgtcatcgtgcccaggaggatgctgcaggtgactacctgcagccctgttctcattcatttggatgccctccagaaatctggggagccatacacctttagagccttttttgctccttatcaagttggcaaggcttggccaattcctgttcaaggctgcattaaaggcatgttc

SEQ ID NO: 248275 - DNA, 668 bp, Homo Sapiens
gataccatctgcgagccctgcccagtcggcttcttctccaatgtgtcatctgctttcgaaaaatgtcacccttggacaagctgtgagaccaaagacctggttgtgcaacaggcaggcacaaacaagactgatgttgtctgtggtccccaggatcggctgagagccctggtggtgatccccatcatcttcgggatcctgtttgccatcctcttggtgctggtctttatcaaaaaggtggccaagaagccaaccaataaggccccccaccccaagcaggaaccccaggagatcaattttcccgacgatcttcctggctccaacactgctgctccagtgcaggagactttacatggatgccaaccggtcacccaggaggatggcaaagagagtcgcatctcagtgcaggagagacagtgaggctgcacccacccaggagtgtggccacgtgggcaaacaggcagttggccagagagcctggtgctgctgctgctgtggcgtgagggtgaggggctggcactgactgggcatagctccccgcttctgcctgcacccctgcagtttgagacaggagacctggcactggatgcagaaacagttcaccttgaagaacctctcacttcaccctggagcccatccagtctcccaacttgtattaaagacagaggcag

SEQ ID NO: 248276 - DNA, 867 bp, Homo Sapiens
  misc_feature (435)..(472): n is a, c, g, or t
tctattacattttcagtgagtaattttggattttgcaaggtgcatttttactattgttacattatgtggaaaacttatgctgatttatttaagggggaaaaagtgtcaactctttgttatttgaaaacatgtttatttttcttgtctttattttaacctttgatagaaccattgcaatatgggggccttttgggaacggactggtatgtaaaagaaaatccgttatcgagcagcattttatttacccctcccctatccctaggcacttaaccaagacaaaaagccacaatgaacatccctttttcaatgaattttataatctgcagctctattccgagcccttagcacccattccgaccatagtataatcatatcaaagggtgagaatcatttagcatgttgttgaaaggttttttttcagttgttctttttagnnnnnnnnnnnnnnnnnnnnnnnnnnnnnnnnnnnnnntcacaccattgctcacagaattggcatctcatttttgggacctcccatctttctgttttgaaaagtgtacagtagtgcagtgttcctgatgtaactttatggcttacaatgttgacatgtctcaggttcatgtgttgcgattggtgttttccgtctcaggtagattgcaaagtgtaggccccacacattgggaaaaaataataataaaacaaagcaaaaacaggaaattatggattttagttgtatattggtttatgtattttttcttaagtatacagtgcactgtttgaaatgtattgtttgagtattacttttgtacagggttgatcacttttttttagagtgaagaaagaacaaccttgttttttgtgtttttaaggaatataaataatgaa

SEQ ID NO: 248277 - DNA, 1093 bp, Homo Sapiens
  misc_feature (297)..(297): n is a, c, g, or t
  misc_feature (335)..(335): n is a, c, g, or t
  misc_feature (1010)..(1035): n is a, c, g, or t
tgaaaggcacccaagaataattacttttgtgaaccaaaactatataaaactgtacagaataaatatttcatagaaatctaactatgccttcttgtaaaataaagctacattgtccctctcttgaggcaacttaaaccacttacctttagaagtgccttttgctactgatttatggcatctatcaatgtacatcaataaaaataaaataatttttcttatttactttacaactgtgaattacttgccacaggaaatgtatttctattatgggtcattcaggatttacaaaggatttanggcctatggaaataagggcaaacccaatatattctctnggtcatatttacagcagaatctcagtagcatttttaaaatatcccaagaagaagaattaaactttgagccataaatgacatactttagttcacagcagcactggacattaaaattgtctacacaaaatgtgtagaaaacccaaaaagtatgcttatttcttccacctgaactattaatcattttaactttttaatttagaatgcatgagagtggcatttgtttaagctcaaatgttcaaagttttgagccacccatggcctatataattgcaacctttctattttttcttcactattactatttataattgtcaagttccagtttcttttgcatttattgcaagaaagttaggtatgtttgacaatacacatttttgaagtacatactggttataaacaatgtattccttacatattataactacatatacaagtatggtttttaaatgatgaaatccaattgtaattaatctatagggaaagcaattcaagaaaattcgggatacttaaatgttcagcctttttagatgtgcaagaggactcctatgagacacttttcagtatatgaaatattactataacccttgaatgatttacatgcaaggatttattttatttgggacagactaaattgcctgaagataatgccatggcttctcccagtgatccctgagnnnnnnnnnnnnnnnnnnnnnnnnnncccatagtttactgctgtgcttaggttctgattgatgacacactcacgtaaggcccaa

SEQ ID NO: 248278 - DNA, 406 bp, Homo Sapiens
  misc_feature (390)..(390): n is a, c, g, or t
ggataatgtttaagaaatttaccttaaatcttgttctgtttgttagtatgaaaagttaactttttttccaaaataaaagagtgaatttttcatgttaagttaaaaatctttgtcttgtactatttcaaaaataaaaagacagcaatgactttatatccaagaaaggaatgtgaatgagtcacttaacagggaatctaaagagctgtgttagctgtgtacatacacagattatctgaggaaaaggtcaagggttccacttggggccacagtttttttgttaatcaaacaccactctcttaagaggctgcatcacaaaaggcaacaaagggcccctctaaggcttgagattaaaactagtctttatccattactgctgtggacacttcttgncttagtatatttaagg

SEQ ID NO: 248279 - DNA, 479 bp, Homo Sapiens
  misc_feature (206)..(206): n is a, c, g, or t
ggacatttttacccaaacctgttggtaaagtgcccatctggtgctcaagagagcctgggggtctaacagggagcccggctgcctcacctggccacagcctccacaccagatctccacattgtcttgatccagaccagctctgtgatcagaaggaaattgggtccagtgtaggagcgagctggtcctgggcctggcaggcaagagtntgggcatcctttcctggcctttctccactctccctcaagcctgtgctcaggttgccttgaatgtggactctggaagagccaggggcccagaatgccgggggaggccttctgagtggccctcatggaacaccgtccctctgcccagccataggccctgcctccagtgtccagggaatggaggctgggctgcgagagtgttgctgcccccctgtgtcattcttctaatcccaatgtagaaattgtacgtaatgtatttaaatcaacgcaaatgta

SEQ ID NO: 248280 - DNA, 2266 bp, Homo Sapiens
  misc_feature (1039)..(1039): n is a, c, g, or t
  misc_feature (1276)..(1327): n is a, c, g, or t
  misc_feature (1395)..(1395): n is a, c, g, or t
acaaatgaggttatagatattaatgcaaattttctggtaggtatctctttttttgctatgatgattccaacttatcagagacctcccatttgccttttcattacggtgaaagctttgccctcatctactaaagtacaaaggaattctttggaagcagattattctagtcttatgctagagatgaatttgatcattttaatgtgtgatctttttgctctatcaggtataattgttttcctttcctttataatgggtaagttttctcacctttgagtaacagtaaagttcatttatatgtccatacctagaagaccagtgcaaatactttgagagcacctgggtctacaggacataattggcatctaaatcctcatttcttgctattagtaggaaaacagatatagtattgtaatacccttattctttttgaatcctaattactcatttcggttttttttctctcttttgaatctagttgctggttttcgtttaatgattttagtttaacaatcccaaccaacaatacatttgatttatttttttctgtctaacctgacaacctttttcttgtgcttcttgtttgttggttagtttttgtgaaaggaatcattgtttaagatcactgttttcatacttgttttacacttcacgtatttttgaagtacatttatttactaagcatttgtgacttgaataattttcaccaaatgaatacattttggtagtttgtaatgagttcttctaattgttacactttgcttgggtacttaacaataaatatgtaaaggtaaaagaaataattttctgtattctgccaatcttaattttatataataaatcatccatttttttcttaaaatagtatggattgactgtttctaaaataccaatctgtggctgtggtttttcttttcttcagcatttccagcatccaagtaaacaatagtcccttatagtcctgctacttgatgggtaaatttggttgctgggttttttaagttgcactcacaataaatcgtgcaaagcatttgtcatgccnttatttactccctttttaatcctgcatcccagatttatggcagcaacacatatctacaggatacttttatgttgtccaaatattgctgtcagtcatatgtacttataaaatgtctccactcatgtatatttatagaaatgaaatgtcaaatttctcagactgttaaagtgcagtataaagttgcttaatgcacacttaaaaatgatatataatttctgaatcctatgaaatatgtgnnnnnnnnnnnnnnnnnnnnnnnnnnnnnnnnnnnnnnnnnnnnnnnnnnnnattgttaatgattttgtttactctttgccaaattttgtcatgtaggttattttacaatagcacctttnaaaaaaaatgtatatgctaatttactaagcatattcatgtccatttttatttgatcatctgatttgtgaaataacttgaaatttgtactgtttggtttgtgaaaataatattaccaaatctctgtcattagaatgtgtactttatgttcagaagtgactgtgggtttattcagagccagccattctctcccttgatgcactttgtaaccagctacacatgcttttaggtggcttttccctgatagggtcaagtatatgactataaaacatttttcttgtgaagctattaagttcattagttactcttatttccccttgttgtaactaagtggtgcaggtataagcatatccccagcattcctgtgtgtgtgaatgtgcactgctgatttggactgttcttgagaaaggtgctgtgacatatgtcaatatttgttagctctggggatatctttagaatgcttgagaaagttgctaggtgtgtgccacattggtgcaggtaaatccatgctgttcacagccaagcagcatttgcagagaaaaggagagttttacatagactcgaggaaaaacagtactaacctggttgatggccttggtggtggaattttgtttcagccagaggctactcattatatcagaatgatgttcagtataacactatctgatttttagattggtcgatttctgttgtaatcaagtatttaggatgtaatctttttaaagtcattgctttaatctgaaaagccattagaagggagaggaatcactgttccacaggatatttaaaactcagagttcaaataatctcacatattgaacataaactgttaacttatttcacaactaaattctaactgatacttatgaattg

SEQ ID NO: 248281 - DNA, 348 bp, Homo Sapiens
  misc_feature (48)..(48): n is a, c, g, or t
  misc_feature (60)..(60): n is a, c, g, or t
  misc_feature (83)..(83): n is a, c, g, or t
  misc_feature (90)..(90): n is a, c, g, or t
  misc_feature (95)..(96): n is a, c, g, or t
  misc_feature (99)..(99): n is a, c, g, or t
  misc_feature (110)..(110): n is a, c, g, or t
  misc_feature (119)..(119): n is a, c, g, or t
  misc_feature (127)..(140): n is a, c, g, or t
  misc_feature (142)..(142): n is a, c, g, or t
caaattggggtttcctttcccctttggggccctttccacaactggggncctgagaatgtntgtaaaagttctgtgacggtacngaggggnaaacnnccnttttatgtatngccttcctnaagggggnnnnnnnnnnnnnngngaaaccctttgacttcccacgtgccccatctcaagacattcccactcacagatttgaggttctggattcccaggtctggagttttccaatgttaatgtaaacagaactggcacacacacattaagatgaatgtaattattattcctcttgctggtcactaccgtcgctttctatttctctttctttgtgtgaatttatttaaaaga

SEQ ID NO: 248282 - DNA, 522 bp, Homo Sapiens
actgctttctttagaacaagaaaatttataaatgacatgatattgctttttctgtcaaagacttcttcaagcaagatagtatacatggtcacttttgtttcaaataacatgatggtaaacagtggatattaatatttttgtcatgcctcaaccatttaccaacaattaggcgttcaaatcctcatgttgaccacttgctaagacataagtgttcaggagaaaaagtcaagaaaagataaaaacttttactcatatctcctttaaaatttgtgaaataaatcctttgcaacatcttcttcacatgaatcagacctaacatagttctttccaacatgtaaggtaaatacattgattaactttctcttttccaaaattaggtttaaggatttaacagtaggatactttagctggctgacttgattctctaatacaatgagtctctgtattctttatatagtaagaaattccattttccataaaactagctcattatagattaaaaagaaacagatgttaaagtta

SEQ ID NO: 248283 - DNA, 486 bp, Homo Sapiens
ccctttaaagaactttgtacaaaaaagttggccaattctgctgggggtgggggacacccccctttcctcgctgggtgctggaccccttttgcagcctgggctctgccttgcactatttccccttcctggcctgacggctcctccccctccttaaaaggggcaggttcaggggcccggtgctcttcctcccttccatgcacccccatgcccatttgcacagctgcccaggtacccctaacagtggggaggggtcacagggagggggtagcgggaccagtccctgttatctatttaaaaagtgatgatgtaatatattggggtggcggggagatcgggttgtcctgttgtctcatcttagcatttcaggtgatggggggagcccagggctggggagatctggggcccagccccagaaagtggggacaatgtggcctcccttctccctactttcggctttcccagtcagtgccttagggggagaggcac

SEQ ID NO: 248284 - DNA, 326 bp, Homo Sapiens
  misc_feature (220)..(220): n is a, c, g, or t
tccctctaagtgccttttttaatgtctatttttttaataaaacagaaatgcattcttgtacaattctgttgaaactggaccaaggctctcagaagaggacccccgagttccttcccctcccccgagcctctgcatgattgtttcaagtcagcctggaattcttactttcacgccgctattcttttcctttctccgtgattgcttggctagccatttaaanaaaaatattctctgttcagtgtatatgttgcttgtttgttttatttattgagatatttttacaagctaagtgactgcagtgtggctgtgtatcctgctccccaccc

SEQ ID NO: 248285 - DNA, 224 bp, Homo Sapiens
ttggcagtgtgtgacggaggcccccgggagtcagcagagccgagcgtacagtgcacatcaggcagagcaggccacgggcagggacgacgcatcgggacagggctctgcaggggaccgtgactacaggccagctgtgagtggtcccctacagaggctgcccacccaaggtttggttggggtgaaacatgatgacaactcatacacttaagaaggtgggaaccggg

SEQ ID NO: 248286 - DNA, 385 bp, Homo Sapiens
  misc_feature (50)..(50): n is a, c, g, or t
  misc_feature (183)..(191): n is a, c, g, or t
  misc_feature (286)..(286): n is a, c, g, or t
  misc_feature (332)..(332): n is a, c, g, or t
  misc_feature (372)..(372): n is a, c, g, or t
ggcataaaatacaattacattactacgaagatgcaacaaaattttaaaanagaaaaaggggtgcaatttttttcagagaggacaggtgatcaaatatttataattttctaaaccatgcagttcattttttattacaattccaaacaaaactcattattatggggatgggagtcagggagaggnnnnnnnnnaagcatgatatccagcgctgtcacacagtgcttatgttcaaagtgcttacaaatgggtgtcttcacagcataggggaagctgaagccttattccnggggaagggagaggtgagtcagtagccagtgtccaatgcaggctcnggaagcttcgggcagtgactttgctccaatcaggtttttngggccccggtttt

SEQ ID NO: 248287 - DNA, 786 bp, Homo Sapiens
tgttttcctacaggcctatttaacaagatgtttcattttactgtatattttgtagttaatataaatgttgctctaatcagattgcttaaaagcatttttattatatttatgttgttgaactaatatatgaaataagtaaatgtagctcccacaaggtaaacttcattggtaagattgcactgttctgattatgtaagcatttgtacatcttctttggaaataaaagataaaagagcgatacacaaagctttcttttctaacttttccaagcaaaatctaaagatgttttatgacatttttctggctgtgatcttaaaataattcatatctaaatagtattttgtctaggagatgctttctctctagtagttagaaatgaaatctgtgtcagcattcctattaatgtctcactttactttcaaggtaatatgggctgctacttgtaacagttttacaggtaaactggttacttctgagtacgtttagtacaagtttcaagctacagcggacttcagtgtagagagaccaggggagcttggtcaactcgggctactggagatctacgatgcataactctagagctaactagacaggctacaaagcctgttacacgcatgttctcctaactactccggctatgctaaactacagcggataccacgcttcagttgcttggttcactctcctggaactggtcaccagtgccgtatttaccggtgtcgatggacatccgctggttgggctctcgccaaagaatctccctgattctctgtggccgggcctggc

SEQ ID NO: 248288 - DNA, 1474 bp, Homo Sapiens
ccaagtctctctcgtgcgcagagcccaggctgcgcttccctggtcaggcacggcacgtctggccggccgccaggatgcaggccccgcacaaggagcacctgtacaagttgctggtgattggcgacctgggcgtggggaagaccagtatcatcaagcgctacgtgcaccagaacttctcttcgcactaccgggccacaatcggcgtggacttcgcgctcaaggtgctccactgggacccggagactgtggtgcgcctgcagctctgggatatcgcaggtcaagaaagatttggaaacatgacgagggtctattaccgagaagctatgggtgcatttattgtcttcgatgtcaccaggccagccacatttgaagcagtggccaaagtggcacccaactgattttggactccaagttaagtctccctaatggcaaaccggtttcagtggtttcgttggccaacaaatgtgaccaggggcaaggatgtgctcatgaacaatggcctcaagatggacccagttctgcaaggagcacggtttcgtagcgatggtttgaaaccatcagcaacggaaaatataaacattgatgaagcctccagatgcctggtgaaacacatacttgcaaatgagtgtgacctaatggagtctattgagccggacgtcgtgaagccccatctcacatcagccagggttgccagctggctctggcctggtgccaaatcctagtaggcacctttgctggtgtctggtaggaatgacctcattgttccacaaattgtgcctctatttttaccattttgggtaaacgtcaggatagacgataccacatgtggcaagccaaagatctatgcctctgttttttcaatgagagagaaatagcaaatgttctttctatgctttcctcaccatcatcacagtgtttacaaacttttgaaaatatttagtctgttacaaacttctgtcatgtagctgaccaaaactcctgcagggccacagtcgcgcactgctcatttgcttcttcttaactcagcaaaggcctcaagtcttaaacatacaacggggagaagaacaaactagctgtcaagctcaaggactggctttcaccttgccctggctgtcttcctcccagatttcaatatattctctgcatggcctgacaggcctacttaagctacatgttgatacttttctccccaagaatgaccctccatttctcgggcagacctaagagttgcctctgaagttaagctccttggacactcgtgaacaccggtgtgcttactactgcccttgtcctaacctgatcaaccttgcccatggaaccctgaaactgtctgcgccctacaccatgcaacactctggtatggacaccggaccatgcccctccactaatgctgccccactccagtcaaaacctcaactacgaacccaagcccagaaggagaacaccacataaacatgcccaaacctcctaacta

SEQ ID NO: 248289 - DNA, 1852 bp, Homo Sapiens
  misc_feature (676)..(692): n is a, c, g, or t
  misc_feature (763)..(772): n is a, c, g, or t
tcttgcttcagtcatcagccagcaagagggaacaaaactgttcttttgcattttgccgctgagatatggcattgcactgcttatatgccaagctaatttatagcaagatattgatcaaatatagaaagttgatattcaacctcacaagggctctcaaagtataatctttctatagccaactgctaatgcaaattaaaacatatttcattttaacatgatttcaaaatcagtttttcatactaccctttgctggaagaaactaaaaatatagcaaatgcagaaccacaaacaattcgaatggggtagaaacattgtaaatatttactctttgcaaaccctggtggtattttattttggcttcatttcaatcattgaagtatattcttattggaaatgtacttttggataagtagggctaagccagttggatctctggttgtctagtcattgtcataagtaaacctagtaaaaccttgttctatttttcaatcatcaaaaagtaattataaatacgtattacaaacaagtggatgtttttaatgaccaattgagtaagaacatccctgtcttaactggcctaaatttcttctggtagtgtcagttcaactttcagaagtgccacttaaggaagtttgatttttgtttttgtaatgcactgtttttaatctctctctcnnnnnnnnnnnnnnnnnggttttaaaagcacaatcactaaactttatttgtaaaccattgtaactattaaccttttttgtcttattgnnnnnnnnnntgttgagaagcgtttttaacctgttttgttaatgctctatgtttgtatttggaatatttgaataatgacagatggtgaagtaacatgcatactttattgtgggccatgaaccaaatggttcttacttttcctggacttaaagaaaaaaagaggttttagtttgttgtggccaatgtcgaaacctacaagatttccttaaaatctctaatagaggcattacttgctttcaattgacaaatgatgccctctgactagtagatttctatgatccttttttgtcattttatgaatatcattgattttataattggtgctatttgaagaaagaaaatgtacatttattcatagatagataagtatcaggtctgaccccagtggaaagacaaagccaaacgaaaactgaaccacaaagaaaaaaggctggtgttcaccgaaaaccaagacttgttcatttagataatttgaaaaagttccatagaagaaggcgtgcagtagctaggggaacaatccatgtgattaactgttgttcattatgttcatgtagagaagccccttatgttgtagccataattttggcatactgaagagatccaataatcagaaaagtaattgttggtgcacagtttgtttaacttaggagaatggtttctgcaaagataccgcatgtgatggtgtggtgttgttgcggctcggacattgtcgtgtttcgctcgtcggacggggtggtgccgggtcgcgtgtgatgggggtgtcgttggtgttgctgtgctgcgtgtggggcggatcttggtcttctcgctctcgtggtgtcgccgctggttcgctgcctagttcggttgcgtgttctctctttcctcgctgggtcttggcttgtcttgtctgggctgctgcctgtggggctttggctggtcggacctggatgccgcttcttcgggtaggcgtgctcggcgcgtctgggtcgtgatgtgcgtgggagacggttggtggcagtgatcgtgctgcctgatggtgctcggtgatgctccgagcgctgctcgctcgactcgcggctgccgtctgcgttcgctgtctggtggcggg

SEQ ID NO: 248290 - DNA, 1452 bp, Homo Sapiens
ttggggatggaccgcgagacgcgcgccctcgccgacagccacttccgaggcctgggggtcgatgtccccggcgtcggccaggctccgggccgggtagccttcgtctcggagccgggcgccttctcctacgccgactttgtgcggggcttcttgctgcccaacctgccctgcgtgttttccagcgccttcacgcagggctggggcagccggcggcgctgggtgacgcccgcggggaggcccgacttcgaccacctgctacggacctacggagacgtggttgtaccagttgcaaactgtggggtccaggaatacaactcgaaccccaaagagcacatgactctcagagactacatcacctactggaaagagtacatacaggcgggctactcctctcccaggggctgtctctacctcaaagactggcacttgtgcagggactttccggtggaggacgttttcaccctgcctgtgtacttctcgtccgactggctgaatgagttctgggatgcactggatgtggatgactaccgctttgtctacgcggggcctgcgggcagctggtccccgttccatgctgacatcttccgctccttcagctggtctgtcaatgtctgtgggaggaagaagtggctcctcttccccccagggcaggaagaggccctgcgggaccgccacggcaacctgccctacgacgtgacctccccagcactctgcgacacacacctgcacccacggaaccagcttgctggcccacccttggagatcacgcaggaagcgggcgagatggtgtttgtgcccagtggctggcaccaccaggtgcacaacctggatgacaccatctccatcaaccacaactgggtcaatggcttcaacctggccaacatgtggcgcttcttgcagcaggagctatgcgccgtgcaggaggaggtcagcgagtggagggactccatgcccgactggcaccaccactgccaggtcatcatgaggtcctgctcgggcatcaactttgaagagttttaccacttcctcaaggtcatcgctgagaagaggctcctggtcctgagggaggcagccgctgaggacggtgctgggttgggtttcgaacaggcagcctttgatgttgggcgcatcacagaggtgctggcctccttggttgcgcaccccgacttccagagagtggacaccagcgcgttctcaccacagcccaaagagctgctgcagcagctgagagaggctgttgatgctgctgcggcccatagcacctgtcgtgaggatagaaggacgggtggaagagaggcagctcctgctccggggccttccagaaaataaggaccggcctctcttgtacctgggggcccaccctggtatacaactataacactccaaaacaagggggcgcgcaaaaagtttccctggggggcccaatgggcccccgttttgtgcaaggggccc

SEQ ID NO: 248291 - DNA, 1040 bp, Homo Sapiens
  misc_feature (896)..(896): n is a, c, g, or t
  misc_feature (937)..(937): n is a, c, g, or t
  misc_feature (947)..(947): n is a, c, g, or t
  misc_feature (965)..(965): n is a, c, g, or t
  misc_feature (972)..(972): n is a, c, g, or t
  misc_feature (978)..(978): n is a, c, g, or t
  misc_feature (997)..(997): n is a, c, g, or t
  misc_feature (1010)..(1010): n is a, c, g, or t
tcccgtcattaatattaataccttataataaggcactcaaatccagagaagtcaaagggcaaccacagaacacacagccaattcagtagaacccaattagcaagaaatctgcatatgttgggacttgaaaatccttgggccccaaataacaggggtccctgttagtagtcaacaggcagctgttggtgatatgctgactcaattcacctttcaccctgtacccacacagacacatttgattaagacgagtcgaatttctagaatttggaattaggaagggagtgaagagttactctgagagaaacctgcctgtctctaagtaacaggtacctgcccttgtcctgagaggcctatctagaccacccttcagacccaactccactcattgtcactgtcctgggctttggggctctgcattcaggcaatgtgaaggactaaagccactgcctccaaagtgaggattcctgtagccctttcctcatacccagacttcaagttcataaggtagacgatgtcaggaaagggcatcatagacaactagcactcaactagacggtcacaagccttcccacgcaagtatatgtagtaggcagacgagataaatatgaaattttactcgacaacagaaaaggagaaacaggaaaaaaggtgcctcgagcaaagtcaatgacttggtggtggcagagattgtttcctccaaaacgagaatggtagtaactagggcaaatttcacaggcctaccaccaatctcaccagtccaggaattatataggaatggtcacattcctaatgatggtgaagcagaaagccctccccacagagagacagcccactggggacccagctcaagctcttcaaaacgtgggcagctacagggtcacaagactttgggcagngatgtccgaaattctttcaaggaagggcgttcacgattcanaggggacggnttccagcttcaaataggnttttctnggggtnacagggggggagaggaccncagaggctttttncatgttggaccccttaggttttgggggctt

SEQ ID NO: 248292 - DNA, 333 bp, Homo Sapiens
ttgggacaaaattacgatttttaagtatttgcgccatctttatctcagcaatggtggagaggctgcccataattcttctccacatggagccaagtttaatgtttctagttcacattttgtagtggagtcaagcttatttcaaactcccggattgatgggtaagaaatcaaacattgcctcagtggtatctcgagaactttggtggtggtttcttcagaatcatgaagttcttttgccagatacatattttgatattattttcctttttaatataaaggatagggttgaattgtacttaaaatgcatagcattattaaaaacaatcttttaaaa

SEQ ID NO: 248293 - DNA, 404 bp, Homo Sapiens
  misc_feature (307)..(307): n is a, c, g, or t
  misc_feature (374)..(374): n is a, c, g, or t
  misc_feature (385)..(385): n is a, c, g, or t
ggagaacctctcacttgagggcatagctttccacctgcctcgtatccctgttgctgactccgtccaccctgttcctgttagatgaggatgctgcagggtccccggcagagcctctcctccagcagcatctggcgaactctggagaaggtgcctccctcggggccgggcctgctgtgcgtgtcagggagcagcagccactcagcagcctgagctccgtgctgctctaccgctcagcccctgaggacttgcggctgctcttctacgatgaggtgtcccggctgggagagcttttggggcactccgtgtnggtgtttcagggagcagctgacagccctgcttgcctggatccgggaaccatgggaggagctgttttncatcggacttncggacaagtgatccaagag

SEQ ID NO: 248294 - DNA, 905 bp, Homo Sapiens
  misc_feature (348)..(348): n is a, c, g, or t
ggtcattatcttaggggattttggccaaggcagagcagcaatgactatgatatcctgaggaaagaaaagttccaccacctgatccccgcgcacaccttcaccaacatcagcaccaagaaccctcaaggctcgaagtctctggacaacatctggatcagtaaaagcttaaagaaggttttcacaggtcactgggctgtggtgagagaaggcctcacgaacccttggattccggataactggtcttggggcggggtggcttctgaacactgcccagtgctagccgagttctacactgaaaaggactggagcaagaaggacgcccctcggaacggcagcggggtggccttnggagcgaagtgaagccaacatcaagcacgagcgatgatgacaccaaatccatgtgtccaccctggggacccaggagggcacagccaaggaatgagccctgtggggtgacgcttcagggcagagctgccttttaatttttattctcagagcatcagcacttgaggccttgccccacgccttctctgtggaccattcaggacctccagtgggggtggcgtgccaggcgcgtaccccaccaggtgggcaaagcagaaacctgcggggaagcggagacgccttttatctctggatgccacagacctgagcagcattgggctggctgtccgctgctgactggatggcagcacaaggacaatatgagcagagggaggagaagaaggggtgctcaggctgcgggccacagtccagcagcgccagaagcactcatttctgaccaccaggctatgacgttcccctgcgcattacagaaagcttttaactgtgatcaggcactctgctcagatacattgagtggcgatttttagttttgttttgaaaaaataaacagattaacctgc

SEQ ID NO: 248295 - DNA, 355 bp, Homo Sapiens
ggaagcagcactggtggtgcctcagccatggcctggaccgttctcctcctcggcctcctctctcactgcacaggctctgtgacgtcctttgttctgactcagccaccctcggtgtcagtggccccaggacagacggccaggattacctgtggggcaaacaacattggaggtaaaagtgtccactggtaccagcagaagacaggccaggcccctgtattggtcgtctatgatgatggcgtccggccctcagggatccctgagcgattctctgggtccaactctgtgaacacggccaccctgaccatcagcggggtcgaagccggggatgaggccgactatcactgtcaggtgtggg

SEQ ID NO: 248296 - DNA, 1308 bp, Homo Sapiens
cccagtaggaaaatcagaacccttttcgaggcatggatggaacctcaccgtcctccccaataacacagggtccatcctgcgtcacctcggtgctgtgcctggagtgactattccctggctaaatattggcatggtcttttctacctcatgctggtctcgagaccaaaatcaccttccatacattgactacttacacactggtgctgactgcatttggtattgcattcctgctgaggaggagaacaagctggaagatgtggtccacaccctgctgcaagccaatggcaccccagggctgcagatgctggaaagcaacgtcatgatctccccggaggtgctgtgcaaagaggggatcaaggtgcacaggaccgtgcagcagagtggccagtttgtcgtctgcttcccgggatcctttgtgtccaaagtgtgctgtgggtacagcgtgtctgaaaccgtgcactttgctagcacccagtggacaagtatgggctcttgagaccggccaaggaaatgaagcgtcgccatatagctaagccattctccatggagaagttactctaccagattgcacaagcagaagcagaagaagaagacggtcccactctcagctaccagtcttcagccctccgtggatgagctcagggagtacagagctacggtcagcgcgggcagctgttcgaggctgggctccactcctccggacgctatggcagaccacgatggcagcagcacggtggcggacgggaagaaaaagcctcgaaagtggctgcagttggagacgtcagagaggaggtgtcagatctgccagcacctgtgctacctgtccatggtggtacaagagaacgaaaacgtcgtgttctgtctggagtgtgctctgcgccacgtggagaaacagaagtcctgccgagggctgaagttgatgtaccgctacgatgaggaacagattatcagtctggtcaatcagatctgcggcaaagtgtctggtaaaaacggcagcattgagaactgtctcagtaaacccacaccaaaaagaggtccccgcaagagagcgacagtggacgtgcccccctcccgtctgtcagcctccagttcatccaaaagtgcttcgagctcatcatgaagatgccaacgcccgtggtcgatttatatatattgtcttcgtaattattatattctaagttggagtactttgctgtaggattcaagctgtctttgcactagctctaaagaagattttcttctggtattagaagaactaatttaggtatcagcattaaactgttgacactttttatgtactttagacac

SEQ ID NO: 248297 - DNA, 565 bp, Homo Sapiens
  misc_feature (478)..(478): n is a, c, g, or t
  misc_feature (517)..(517): n is a, c, g, or t
acttacaaatgccaactttgtacaaaaagttggcaaggtcatccccttgaaaggcctgtgggaggatgtggcacccaccctgcctgacggtcactttgatgggatcctgtacgacacgtacccactctcggaggagacctggcacacacaccagttcaacttcatcaagaaccacgcctttcgcctgctgaagccggggggcgttcctcacctactgcaacctcacctcctggggggagctgatgaagtccaagtactcagacatcaccatcatgtttgaggagacgcaggtgcccgcgctgctggaggccggcttccggagggagaacatccgtacggaggtgatggcgctggtcccaccggccgactgccgctactacgccttcccacagatgatcacgcccctgggtgaccaaaggctgagcccccaccccggcccggccacacccatggccctccttccgtgccttcctggggncggggagttccaggggtgttcgcaccagccttggggttnatttcccagttgttgttgttcaaccagaaggtttttcccgggtttttt

SEQ ID NO: 248298 - DNA, 1167 bp, Homo Sapiens
ttggatttgtcagccataagtgagtgacctgcaggaagaaggcaagaatgccatcaactcaccgatgtcccccgccctggcggatgttcaccctgaagacacccagcttgaggagaacgaggagcgcacgatgattgaccccacttccaaggaagaccccaagttcaaggaactggtcaaggtcctcctcgactggattaatgacgtgctggtggaggagaggatcattgtgaagcagctggaggaagacctgtatgacggccaggtgctgcaaaagctcttggaaaaactggcagggtgcaagctgaatgtggctgaggtgacacagtccgaaatagggcagaaacagaagctgcagacggtgctggaagcagtacatgacctgctgcggccccgaggctgggcgctccggtggagcgtggactcaattcacgggaagaacctggtggccatcctccacctgctggtctctctggccatgcacttcagggcccccatccgccttcctgagcatgtaacggtgcaggtggtggtcgtgcggaaacgggaaggcctgctgcattctagccacatctcggaggagctgagcacaactacagagatgatgatgggccggttcgagcgggatgccttcgacacgctgttcgaccacgccccggataagctcagcgtggtgaagaagtctctcatcacttttgtgaacaagcacctgaacaagctgaatttggaggtgacggaactgggagacccagtttgcagatggcgtgtacctgggttctgctcatggggccttctggaagactactttgttcctctccaccacttctacctgactccggaaagcttcgatcagaaggtccacaatgtgtccttcgcctttgagctgatgctggacggaggcctcaagaaacccaaggctcgtcctgaagacgtggttaacttggacctcaaatccaccctgagggttctttacaacctgttcaccaagtacaagaacgtggagtgacgggggagctgtggatggtggcaggagtgtcccagcaagaaaggcggcatccgtctgtgccctgtgcctttccagggagccagggggccatgggcttctggttccaagctgtgttgactgtcatccccatccaaagtacacacgctgagctaacatccgcg

SEQ ID NO: 248299 - DNA, 1317 bp, Homo Sapiens
  misc_feature (1027)..(1041): n is a, c, g, or t
ttggcttcaacagcaacatctttattgccagcaaaaccctggggaggaggaaaccagcttagtgccagcaccaactgccactcacaggctggggtaatcatgggactgggagggagggatctgggtggtagagcttgctgcccagcaggatatggcaaggatgtccctgcagtcaggctgttgggcactttgcccgggaggacgcgataaggatgtttctgcagtcacgtggttaggaaggatgtttctcatggcccaagttcccatggaacgtttcactgtgatcagagtctgcaaaatggctggaggtttacaaaatggtacaggttagactaacagtaacatctcccaggtaagtggttctacaaagtaaacttcccttgagcatctacactgtaccagacatggtgctaggacccaggccacaggaggaacaggacagatgaggcccctgccatcctggtgctcacgtctgatgaagaaagttaacgggtcataagaccaggtcagatggtggtggtaatcaaagacattaccagagtgagatgagctagaaagaaactgaaggagctcttacaaacacagtgacaggtggagacccctccaaaaggtgacttttgagcagaaacctgagaaatgtggaggggactatggagaatgacaagcccctgaagcaaccccaggattgggagggcaaacccggcaccaggagggcaatggaatggcctgacctgtgcgtcccttcatgcttccttctctcagtgatgccacaaacagaaacttggggcaatttcgtgcagggtcccatggatgaaacaagaagcagccgcactgcagagctggagtggggataaaatttgaccccaacagtaaggctagaagcaggtgctgcttaccactgacccacagtgcaggtcatgaagcataaccagaccatgaaggcacgtcccgggccagaccagctggccgggctgccaacattttagtagagatccccaggagatcagttgagctggttagggggagnnnnnnnnnnnnnnncaggaaagcttcagaaaattccagaggacccatgacacttaacatcaacttcccccaagtgggatctgtttgtcattgctggttctaaagagttggttccaccacccccacctgcccgttgcctaaccaggggaaaactcagggtggggtccacagaaacaatccctctggaaggggaaagggtgtttctcatccaaaaccaagggaaaacaccactcataaggagcagaggggcctgaagggagagacaggattttgctggtcatttggatccaa

SEQ ID NO: 248300 - DNA, 387 bp, Homo Sapiens
aaaaaaatcaccttagctttttctcttagaatcttctctaaaatgtattctttgtggcattctgaaataggattcatgatgatgcctgttgatcttagggacactacctcacctgccagtatctttggggctgtgtccttcaaggacatgtccccagactgctgtgcagtgtcattttttgtgtttggtttggtggtggcttcttcccccttgctaggctatcaacctcttatcaccacttgttggtgtcagaactaactgcttctggtctggagagggactgaccgatgcctttgggtagagagaattatgaaagaaattttggtatttttctactttatattttctgaggtttctgtaataagcatatttcacttttccaataag

SEQ ID NO: 248301 - DNA, 1008 bp, Homo Sapiens
gggattccaagtcgctgctgtgcagagcagcaagtgctccgtgcagggctgttgctatcacttggaggtgaacagcctcttttgccggtattcagtgaagaaagcaagtctaaatatgcagttctctcactggagtgaaagatgttttgttcatttctaatcaactatgctagacagctgcaagctgaaaagtgcctgcaatttgccatttatttgtaataagaaaataataaacactgctggaaccagtaatgcagaagtccccttggctgatcccggaatgtaccagctggacattacattaagaaggggtcaaagtttagctgctcgagatcgaggagggacgagtgatccatatgtgaagtttaaaatcggaggaaaataagtttttagaagtaatataatacacaagaacctcaaccctgtgtgggaagaaaaagcttgtattctggttgatccatcttagggagccatttgtataataaaggtatttggacctatgatttttggactacaggatgactttatggggctcagccttttctggatctggacacaattggaagttaaacagggcccccagatgtgacccttactctgaaagatcctcattatcctgaccatgatcttggaatcattttgctctcagtcatccttacccctaaagaaggagagtccagggatgtgacaatgctaatgaggaagagttggaaaagatcaagtaagtttcagacccaaagtttacgcctatcagacctacacagaaaatcgcatctttggagaggaatagtcagcatcaccttgattgaagggagagacctcaaggccatggattccaacgggttgagcgatccctacgtgaagttccggcttgggcatcagaagtacaagagcaagattatgccaaaaacgttgaatcctcagtggagggaacaatttgattttcacctttatgaagaaagaggaggagtcattgatatcactgcatgggacaaagatgctgggaaa

SEQ ID NO: 248302 - DNA, 751 bp, Homo Sapiens
  misc_feature (75)..(75): n is a, c, g, or t
  misc_feature (723)..(723): n is a, c, g, or t
gcgggctcaagcaatcctcccgcttcagtctgagtagctgggactgcaggcacgtgccaccgggcccagctgatntttgtgtttttttagagatgaggttttgccatgttgcccaggctcgtcttgaacaccggggctcagggaatctgcccatcttcgcctcccaaagttctgagatagcaggtgtgagtcatcatgcccagcctccttgaagtttactaacaattgggataactgagggaagagaagtgacaattccactcagtctattagaggtctggatataaggtagccacacaataactctaacttgacttctaaccattctatcttattgatttggaggctgtcttctgccagattttttgtggcttgagatgatattttcgaacccttctttcactacctttcttacccttaatgtgccaagcttgaaacaggatttgatttcctgagctacttgttcgccttctgtgcgtcaccaagtaatctggttcatctttcgtctcattcatgttattttcaagtgaaacaagacattttgggggtcaagtctctttgggtgttttgtttttatgtatataaaaatggattttgtgttccctttccatgtaagtaccaacttatatggaaactcacaatcataatgtaaagaacaaatgaaagcctggtgtattgtacttcaagatgcctccctgatgtatagaatctccttgtaaaatnaataattgcattgtatatcagtcttccc

SEQ ID NO: 248303 - DNA, 772 bp, Homo Sapiens
  misc_feature (83)..(198): n is a, c, g, or t
  misc_feature (695)..(695): n is a, c, g, or t
  misc_feature (703)..(703): n is a, c, g, or t
  misc_feature (716)..(716): n is a, c, g, or t
  misc_feature (726)..(726): n is a, c, g, or t
  misc_feature (731)..(731): n is a, c, g, or t
  misc_feature (737)..(737): n is a, c, g, or t
  misc_feature (746)..(746): n is a, c, g, or t
gaaacttccctgaatattccagccctcctgagcctagtccctttgtgagatttgtccccatttcttggacaccatataagagnnnnnnnnnnnnnnnnnnnnnnnnnnnnnnnnnnnnnnnnnnnnnnnnnnnnnnnnnnnnnnnnnnnnnnnnnnnnnnnnnnnnnnnnnnnnnnnnnnnnnnnnnnnnnnnnnnnncagccaccaccaaaaactatcttgggatttgaataggattacgttaaatttgtagattaatttgagaatttacatctgtacgacattctaggaacgtggtatttcatgtcatgtattcatttcttgttaatgtctttcagaagagctttagtgtttccatatatagatcttatacatcttttgttagataaaagatctttgtatttttgttcctaaattcttcatacatttgtattgccattgtaaatgggatctttcttccattttctaattagttattggtggtacatgggaaaagtatttgaggtttgtgtgctgatttcttgattttgtagatagccactgtattgaattctcattacttccagtaaaatcttagttgattctcttaggcttctttggctaacatttatcatttaatatgcaaataatgatagttttgtctcttcctttccaatacttgctactctttccttcctttcccttttgcccttttnccttgccntgcccttgccttnttttgccccnctcanggggcntggtggcanccggggtgggagagcagtgggggtga

SEQ ID NO: 248304 - DNA, 775 bp, Homo Sapiens
ggaacttgggaggatcccacctcagccttcgtgactagtgaggtgcgcaaacgcccgagttttccctggtgcgcgggttccgcctttgcagtgccctccacccttcctggtgtctgacccgcctccttcccaggcctttagttcctgtcccggaaagccggcgtcctgccgcgcgatgcccctgctcggacttcttcccaggagggcctgggcttcgctgctcagccagctcctgcgaccgccctgcgcttcgtgcaccggggcggtccgttgccaaagccaggttgcagaggcagtgttaacatcccaactgaaagcacatcaagagaaaccaaattttattatcaagaccccaaagggtaccagggatcttagtcctcagcatatggttgtgagggagaaaattcttgatttggttatcagctgctttaaacgtcatggagcaaaggggatggacaccccagcatttgagctgaaggaaaccctgactgagaagtatggagaggactctgggctcatgtatgatctgaaggatcaaggtggagagctgttgtccctccgctatgaccttactgttccctttgctcgttatctggccatgaataaggtgaagaagatgaaacgttatcatgttggaaaggtgtggcggcgagagagcccaaccatagtccaaggccgttatagggagttctgccagtgtgattttgacattgctggtcagtttgaccctatgatcccgatgcagagtgtttgaagattcaatgtgtgaaatcta

SEQ ID NO: 248305 - DNA, 889 bp, Homo Sapiens
accacgcgtccgatcaagtgttttctttaatgtaatccatagcagttattgcattggagcagcagtccctcactttgaaaccttcgcaatagcccgaggagctgcctttcatattttccaggttattgataagaaacccagtatagataacttttccacagctggatataaacctgaatccatagaaggaactgtggaatttaaaaatgtttctttcaattatccatcaagaccatctatcaagattctgaaaggtctgaatctcagaattaagtctggagagacagtcgccttggtcggtctcaatggcagtgggaagagtacggtagtccagcttctgcagaggttatatgatccggatgatggctttatcatggtggatgagaatgacatcagagctttaaatgtgcggcattatcgagaccatattggagtggttagtcaagagcctgttttgttcgggaccaccatcagtaacaatatcaagtatggacgagatgatgtgactgatgaagagatggagagagcagcaagggaagcaaatgcgtatgattttatcatggagtttcctaataaatttaatacattggtaggggaaaaaggagctcaaatgagtggagggcagaaacagaggcatcgcaattggctcgtgccttagttcgaaaccccaagattctgattttcagatgaggctacgtctgccctggattcagaaagcaagtcagctgttcaagctgcactggagaaggatacccccaggtattccatttgacctaatttcacctcaaagtggagaatcgctgaccttgaaccagcgcccttcgacaagtctgggccctcaaactcaacctgacctcctgctgctatgagctactgggatacctcaagg

SEQ ID NO: 248306 - DNA, 389 bp, Homo Sapiens
  misc_feature (305)..(305): n is a, c, g, or t
  misc_feature (321)..(321): n is a, c, g, or t
  misc_feature (333)..(333): n is a, c, g, or t
  misc_feature (366)..(366): n is a, c, g, or t
atgagccaccgtgcccggcttcacacccatttctttaaaaaggatcccgtagcaggcagaaaagccccttccatcctgctcctctgatactgtgcccccttggagatatttccgtcctccacccacgtgtctgtggctggaactgcccagcctgctcctgggccccctgggaagcctccccacagctggtaatctgggatttaaggatttgctggggccaccgcttcttttgcctaaccaccattccatatttaaagttgggagcccttacgtaggaaagggccccggggttttatttttaagtnttcctttttaaggggnttttgttggggncgggggaaggggttttttgggtgttaacagccnttttcccaaccttaaaggggacg

SEQ ID NO: 248307 - DNA, 743 bp, Homo Sapiens
  misc_feature (697)..(697): n is a, c, g, or t
gacccggctattgtgaaagacccgctgttctatctagatgcccagaagggccgctacgtcccgctggaccaagaggcctacagccgcatccaggcaggcgaggagaagctgtgattccccccatccctctgagggccggcggatgctggatccggagccccaggttccgccccagagcgttcctggacaaggccagaccaaagcaagcagggcctggcacctccatcctgaggtgctgcccctccatccaaaactgccaagtgactcattgccttcccaacccttccagaggctttctgtgaaagtctcatgtccaagttccgtcttctgggctgggcaggccctctggttcccagggtgagactgacgggttttcttcaggatgatgtcttgggtgagggtagggagaggacaaggggtcaccgagcccttcccagagagcagggagcttataaatggaaccagagcagaagtccccagactcaggaagtcaacagagtgggcagggacagtggtagcatccatctggtggccaaagagaatcgtagccccagagctgcccaagttcactgggctccacccccacctccaggaggggaggagaggacctgacatctgtaggtggcccctgatgccccatctacagcaggaggtcaggaccacgcccctggcctctccccactcccccatccttctncctgggtggctgcctgattatccctcaggcagggcctctcagtcct

SEQ ID NO: 248308 - DNA, 1565 bp, Homo Sapiens
  misc_feature (12)..(12): n is a, c, g, or t
tgatatgaacantcgtttaaaagcaggctggtacggcccggaattccgggatatcgtcgaccacgcgtcgggtgagtcgggctccgtggcgcgtgctgggaggagactggagcccggttaggaagaatggagttggcgactcgctaccagatccctaaagaagtggctgacatctttaacgcccccagtgatgatgaagagtttgttggcttccgagatgatgttcccatggaaaccctctcgtcagaggagagctgcgatagttttgactcactagagtcagggaaacagcaggatgtgcgctttcattccaaatacttcacagaagagctaagaagaatttttatagaggacactgactcagagactgaggattttgcaggatttacgcagagtgatctgaatggaaagactaacccagaagtaatggtcgtggagtcagatttgagtgatgatggcaaagcatctttggtgagcgaggaagaggaagatgaagaagaagataaggctacccctagaagaagcaggtctagaagaagtagtatggtcttcgagtagcctttcagttccccaccaagaagctggccaacaaaccagataaaaacagttcttccgagcagttgttttctagcgcacgcttacagattgatacaaaaacaattcttgagagaaagaaagactgtcgacaggtgatacaaagggaagattctacctctgagtctgaggatgactctcgggatgagagccaagagagttcatatgctttgctgaaaaggaccatgaacatcaaggagaacaaagccatgcttgcccagttattggcggaattgaactcgatgccagatttcttcccagtacgaaccccaacctcagcttctaggaagaagacagtgaggcgggccttctcggagggacagatcacgcggcgtatgaacccaacccggagtgcgcggcctcctgagaagtttgctctagagaacttcactgtctcagccgctaaatttgcggaagagttttacagcttccgaagaaggaagacaattggggggaaatgccgggagtacagacgacgtcaccgtatatcttcttttcggccagtggaggatatcaccgaagaggacttataaaatgttgccataactgttcgagataaaatctatgataaagttctgggtaacacgtgccatcagtgtcgacaaaagaccatcgacaccaagacagtgtgtcggaaccagggttgctgtggtgtgcgaggacagttctgtggaccatgcctgcgggaaccgctatggggaggatgtcagatcggcattgctgggacccggattgggtgtgtcccccctgtcgtggggatctgcaattgcagctactgtcggaagcgtgacggccgctgtgctacaggaatcctcattcatctggccaagttttatggttatgacaatgttaaggaatatctggagagcttacaaaaggactggtagaagacaattaagaggaaaacaaacagaacccagccaccttaaccatagagtacttcaaccaggacatgccttcccatttggggg

SEQ ID NO: 248309 - DNA, 914 bp, Homo Sapiens
tggctcgtgggccacttttaaaataatctctgatagccgggcagaggctccggagccatgcaggccgaaggccagggcacagggggttcgacgggcgatgctgatggcccaggaggccctggcattcctgatggcccaggggcaatgctggcggcccaggagaggcgggtgccacgggcggcagaggtccccggggcgcaggggcagcaagggcctcggggccgagaggaggcgccccgcggggtccgcatggcggtgccgcttctgcgcaggatggaaggtgcccctgcggggccaggaggccggacagccgcctgcttcagttgcacatcacgatgcctttctcgtcgcccatggaagcggagctggtccgcaggatcctgtcccgggatgccgcacctctcccccgaccaggggcggttctgaaggacttcaccgtgtccggcaacctactgtttatgtcagttcgggaccaggacagggaaggcgctgggcggatgagggtggtgggttgggggctgggatccgcctccccggaggggcagaaagctagagatctcagaacacccaaacacaaggtctcagaacagagacctggtacaccaggcccgccgccacccgagggagcccagggagatgggtgccagaggtgtcgcctttaatgtgatgttctctgcccctcacatttagccgactgactgctgcagaccaccgcaactgcagctctccatcagctcctgtctccagcagctttcccctgttgatgtggatcacgcagtgctttctgcccgtgttttgggctcaggctccctcagggcaagaggcgctaaggcccggcttggcgccccttcctagggtcatgcctcctccctaggggattggtccaggcacgagtgccagtcattgtgggggcg

SEQ ID NO: 248310 - DNA, 1364 bp, Homo Sapiens
  misc_feature (1012)..(1012): n is a, c, g, or t
  misc_feature (1035)..(1035): n is a, c, g, or t
ttggggcgtcggtgcagacctggagacgggcatgggggggctgcggctgctggctgtggccctcacgtgctgctggtggccgcagggcagccagggtaagaccctgcggggcagcttcagcagcaccgcggcccaggacgcccagggccagcgcatcggccacttcgagttccatggtgaccatgctcttctgtgtgtcagaatcaacaacatagcagtagctgttggaaaagaagctaaactctacctgttccaagcccaggaatggctaaagctacagcaaagcagtcatggttatagctgtagtgaaaaattatccaaagctcagttgacaatgaccatgaaccagaccgaacataatctgacagtgtcccagattccgtctccacaaacgtggcatgtgttttatgcagacaagtatacatgccaagatgacaaggagaattctcaggtggaagatatcccatttgaaatggtgttactaaacccagatgccgaagggaatccatttgatcattttagtgctggagaatctgggttacatgagttctttttcctcctagtcctagtgtactttgtgattgcttgcatttatgctcaatcattgtggcaggctattaagaaaggcggacccatgcacatgattttaaaggttctgacaactgcattgctgttacaagctggttcagctttagctaattacattcatttctccagttactccaaagatggaataggggtaccatttatgggaagtttggcagaattttttgacatcgcttcccaaattcagatgttatacttacttttgagtctatgcatgggttggacaatagtcagaatgaagaagtctcaaagcagacctctccagtgggattctacgcctgcatccactggcattgcagtattcattgtcatgacacagagtgttttgctactttgggaacagtttgaagatatcagtcatcatagctaccattcacaccacaacttagcagggatcctcctaatngttctaagaatttgcctagcatngtcattaggctgtggactctatcagatcatcacagtggagagaagtacactcaaaagggagttctacatcacatttgccaaaggctgtatcttgtggtttttatgccatccagttcttgcatgcatttctgtcatttttagcgactaccaaagagacaaggttattcacaataggttgttatcctttgccagtctgtttccatggttattctctacagactctttctgtctcacagtctatactgggaaagtttcttcactttctttcagtaacaactaagcactggaccatatcatcgggacacaaaagtcgccctcatttctgatac

SEQ ID NO: 248311 - DNA, 1160 bp, Homo Sapiens
  misc_feature (1047)..(1062): n is a, c, g, or t
catgtacaatgacacattaaatggcagtacagagaaaaggagtgcagaattgcctgatgctgtgggacctattgttcagttacaagagaaactttatgtgcctgtaaaagaatacccagattttaattttgttgggagaatccttggacctagaggacttacagccaaacaacttgaagcagaaaccggatgtaaaatcatggtccgaggcaaaggctcaatgagggataaaaaaaaggaggagcaaaatagaggcaagcccaattgggagcatctaaatgaagatttacatgtactaatcactgtggaagatgctcagaacagagcagaaatcaaattgaagagagcagttgaagaagtgaagaaattattggtacctgcagcagaaggagaagacagcctgaagaagatgcagctgatggagcttgcgattctgaatggcacctacagagatgccaacattaaatcaccagcccttgccttttctcttgcagcaacagcccaggctgctccaaggatcattactgggcctgcgccggttctcccaccagctgccctgcgtactcctacgccagctggccctaccataatgcctttgatcagacaaatacagaccgctgtcatgccaaacggaactcctcacccaactgctgcaatagttcctccagggcccgaagctggtttaatctatacaccctatgagtacccctacacattggcaccagctacatcaatccttgagtatcctattgaacctagtggtgtattaggtgcggtggctactaaagttcgaaggcacgatatgcgtgtccatccttaccaaaggattgtgaccgcagaccgagccgccaccggcaactaacctatgaccttctgacctctgaactcttcacccaatgatgacctgaccatgcctgcctgctgatcagttaactggtaatcgcctttgcttgcctgtcgtcagtgcagcgagctgaggcacttgtccgttcgtcttaccatctaaccaaacaaaagacaaagaaattgttgtcctccaactcagcnnnnnnnnnnnnnnnncctgtttgggtgaaagtggttctagaaactgcactgaatagtagtaaagcaataagggcccaattcatcccacagcactgatcatcttttaatatccc

SEQ ID NO: 248312 - DNA, 909 bp, Homo Sapiens
cgttcaaactccaggggcaacatcctgacgctggagtcctgccggcagcagccggccacacaatcccggacactggggcaaccagttgcaaatagtggagcccgcagccctccggccatccctggccttgcgtggcacgcctctccagcctgggcctcttgcattggcctgtgtggcttgggccagaatctcccacggggagtttttcggtcccccggccatgtggctggcagagagctgcttacagctgtggctgaggtcttcccccacgtgactgtggcaccaggctggcctgaggaggtgctgggcagtggctacagggaacagctgctcacagatatgctagagttgtgccagggggctctggcaacctgtgtccttccagatgcaggccatgctgctgggccacagcacagctggagccataggcaggctcgctggcatcctccccccgggccaccgtcacagtggagcacaacccagctgggggcgactatgcctctgtgaggacagcattgctggcagctagggctgtggacaggacccgagtctactacaggctaccccagggctaccacaaggacttgctggctcatgttggtagaaactgagcacccaggggtggtgggccagcggacctcagggcggaggcttcccacggggaggcaggaagaaataaaggtctttggctttctccaggcactgtatgtgtgtccttggggacaggatggagtgggagtgggcatgatgtggccactgagggcatctagagggtctggaggctgggggccagatcattccggttgtccaagagaaactgctcacaagccttgaaggtggtgtagaactcagaggagaggccggccacgcttggtggtcacatagttgagaacacctggggtggcctgg

SEQ ID NO: 248313 - DNA, 1030 bp, Homo Sapiens
  misc_feature (273)..(282): n is a, c, g, or t
ttggattttatccattatttcacttgctggtcgtcatttcacagccagctttgacatgcccgtgaggacaggagccgccgcttcagttgtcactgcagagccatcgtatgtcagttgcaatattccatctgaagctatgtctttgacttcactttaagcagaaaattttgtaccctggtggtcgagtcttcccttaaaaattgttaaatcatttggctttaatggttcaataatttggggtggcttcatggtgtttcttttcttcccagtttnnnnnnnnnnctttttaagcgtaaaatctttaaggggtacacatttataagtctggctaatttctaatatgctaattaaacatttcccattttaaggttatatacagtgaggctcttcaggacaattattttctgggttgattgggcatatgtttgccgtgtaaacatggatatgataaagtgtcagtaacaatggaaaaggtcccagaggcattaggcatctaagaggatgccctcagaaacgtattctggcttgatttgtgttattaacttcagaagaaccttttcaaatgtcccagtatcgttcttagtgctttgggaaaaaatatttaacacactgttaataaatttgttatcagaagtttacaagacgaagggcttctctcgtctgaatttctagatttaagtcatgaagtgtaaaactgtttcacccagaagtgtaactaagcagaactaggagttttctctggcttcacctttttcagagccagcagtgctgttttctcaagcacagcgtttgctcttagactctgatctgcttgtgcctaagcattgcacaggtttccgaagacgggcagcttcagagaagaggattattcgggagattgctggtgtggcccatagactctttggcatagactctttcgcaggcagcctctctgggtgtggccagttctatagccatccccaaactagctggagcctgatggataggaacgggtagtctgtcctcttcccataaaaatgttccaaaagtt

SEQ ID NO: 248314 - DNA, 1139 bp, Homo Sapiens
ttgggtttaatgattattcttacctgagaaaggaagaaatttaattctaccagtgatgaatacttgaaattaattgaactcataccaaaagatgtaatccagtttctcagtttgaaggagaacgtttgactcactttcattgttcatgctagctgaatataatcaagacttttgatttgatttgcttttattattcaatgcagatagagcctgataagttttagaacatttaaagaagattgaaatctcagtcagtaactaaatgataaaatgagattgattggcttatactaggtacatttatttttgaaagaattaatgtaaaataatagttatttttaaagcagctaatattacactgataatttgttgctaaatttagtgctgtccacatcataggtgcttaaatatgtactggttaactagaggggggtaggaaagcaagcggttttatcttgttcttacctttttgcaggaaaagtggctttaaaaaaatttatataataaaactattttggaaattcattcttttagaaagagaccttgagataaatattttttgactctggatatttctatagttctgaacacagattttaaacccactatcaaaatgaaaacaatataaagctatattagtgagtctccatgtagcagtttgtttttatagttattgtttcatgcttaaaacttcattcttactttcattaatgttacccttcactggtatagccactcactaaataagtatatttaaaacatcaaaattttgaactaaagtttgtgattctcttattcagcaatccttatcttatgctggctgcgtgagttaattcaacatccagattaaatatcctgaagtagggttctatatatttcctcatacaacagacatggaatggaaatgccactagaaactgccctgctacttttaagtctgacctttgcaggaggtacactttgctgttctatgattgtattcacctacctaaaatacaaatgaagacagaacatatcatttactgcacgatgaatttttcatttattaaatgaaaaacgtttgctagacattttaaatattaagtattttgactacacggattaatttaaatgattctatcaggcattctgatattggg

SEQ ID NO: 248315 - DNA, 843 bp, Homo Sapiens
tgtcttgtaccagcccatgctctctatggtcgcatccggggctcgctccaggagcctgtggggaacgtcagaggatgccatttgataagttcgggtagagcctcactccattatatatgggaggtaagtagaggacacgtctgtgaacctggagtgattcatcccatcagggcacttagagatgctcctctttgaaaggggagagtaccatcctcagatgtggggtgatcgcacatctgctgtatgtttgaaggtgataagcaatggacagttcacgctctggaatgcctgaggaaaagagaccctccccaccatctctgaggggcagcccttagtttcttggatacattagggataccctgccctaggatctgagggttacgcagtctccactccaggtgcctgctcactctcctggagcttctggccgtcgcaccctattgcagctcctgggtttggctggggcacaggattaaccatccccaggtaatgcctccctccggtccaggcagggatcaccagcagtacagcacccactggtggtggcagtgggggagaaagggggaaggtggaatgcattccttctctccaggtcagggaagagatctggggaccacctgggggcccttgcccctcctgcctccttgctggggaagtgcccagtccagtgccccctccatggccacctccctccctctagctgtgcacggggcatgaatcagctctcacagcttgttaaagctagacctcttgttttcatgccctcacctgcgacgcgtggatcgacgatatcctctgttaaaacatcttccggggatgctcgggttatgccatgtccctggg

SEQ ID NO: 248316 - DNA, 863 bp, Homo Sapiens
  misc_feature (176)..(219): n is a, c, g, or t
  misc_feature (383)..(422): n is a, c, g, or t
cagccaccgtttcttcctgccagcaggggtgtgatgtaccagtttgtccatcttgagatggtgaggctgtcagtgtatggggcagcttccggcgggatgttgaactggtcattaatgtgtcccctgagttggagctcattctgtctcttttctcttttgctttctgtttcttaagnnnnnnnnnnnnnnnnnnnnnnnnnnnnnnnnnnnnnnnnnnnngggtccccgagtgcctaggttttggagagtttgcctgttctatgcctttagtcaggaatggctgcacctttttgcatgatatcttcaagcctgggcgtacagagcacatttgtcagtatttttgccggctggtgaattcaaacaacctgcccaaagattgattnnnnnnnnnnnnnnnnnnnnnnnnnnnnnnnnnnnnnnnnagtggagttgaggtgtcagagaaaatgaattttttccagatttggggtataggtctcatctcttcaggttctcatgataccacctttactgtgcttatttttttaagaaaaaagtgttgatcaaccattcgacctataagaagccttaatttgcacagtgtgtgacttacagaaactgcatgaaaaatcatgggccagagcctcggccctagcattgcacttggcctcatgctggagggaggctgggcgggtacagcgcggaggaggagggaggccaggcgggcatggcgtggaggaggagggaggccgggcggtcacagcatggaggaggagggaggcgctgctggtgttcttattctggcggcagcgcctttcctgccatgtttagtgaatgacttttctcgcattgtagaattgtatatagactctggtgttctattg

SEQ ID NO: 248317 - DNA, 1030 bp, Homo Sapiens
gtgaactatagaaacaagcgttgtttaatacagctggtacggtcggaatccgggatatgtcgaccacgcgtcgggcgatgagggtgttggtgcggcgctgttggggtcctccgctggctcatggcgccaggcgtgggaggccgagtccccagtggcgagcactggcccgactcggctgggaggactgccgggactccagagtccgcgagaagcctccctggcgggtgctcttcttcggcacggaccagttcgcccgcgaggcgctgcgggcgctgcacgccgccagggaaaacaaagaagaagagttaatcgacaaactggaggtggtcacaatgccttccccatcaccaaaaggactgccagtgaagcaatatgctgtgcagtctcagcttcccgtatatgagtggccggatgtgggatctggagaatatgatgttggagtagtggcttcgtttggccgacttttgaatgaggctcttattcttaaatttccctatggcatattgaatgttcatcccagttgcctcccgagatggcgtggcccagcccctgtaatccatacagtgcttcacggagacacagttactggagtaacaattatgcaaattagacctaaaaggtttgatgtaggcccaattctcaaacaagaaactgttcctgtgccacccaagagcactgcaaaggaattggaagcagtgttgtcaagactgggtgccaacatgctcatttcagtttttgacagaatttgcctgaaagtctgagcaatggaaggcagcagccaatggaggggggcgacttacgcccctaagatttctgctggtaccagttgtataacatgggaggaacaaacttcagaacaaatattcagactttaccgtgccattggacatattattccgttgcagccgctctggatggcgaataccattaaacttctggatttggtagaagttaacagttcagtccttgctgatccaaaataaacgggacaggctcttattccaggatcagtaatataccacaaacagtc

SEQ ID NO: 248318 - DNA, 1167 bp, Homo Sapiens
  misc_feature (514)..(537): n is a, c, g, or t
ttggggaggatgtcaggaatggaatctacccactgatgaactttgcagccactcgacccctggggctgccccgtgtgctggccccacccccggaggaggtccaaaaggccaagaccccgacgccagagccctttgactctgagaccagaaaggtcatccagatgcagtgcaacctggagagaagcgaggacaaggcgcgctggcatctcactctgcttctggtgctggaagaccggctgcaccggcagctgacctacgacctgctcccaagacgaccggatgaagctggctgccttcctggagagcaccttcctcaagtaccgtgggacccaggcctgacccggagccccagccccaggggaccatgccggggtgctgcctgggcaggccatgttggggagactccagcaccgtggggctgccctcctccatgcgcctgggagcacaaaggccccggtagtgaaggaaccccccgtctcctgagagtggggctgaccctgccttgggcgccgannnnnnnnnnnnnnnnnnnnnnnnagccgttaggcctcccaggtccttaggatcagggttgcccccagaaccccttcccatatcctccattctccgccctgagttcctacccaggctgcctggccggggccactgcctcctcagcatgcaggaggctgccctgtagggaaccccagctctggggcttgggggtgagggtcagccctggacagacctctgcccagggaactgctccatggggtctgggagagcagccatcccctgctggcaccatagacccacacaaggagcctgcacagcaagccagcggtgacacacctgcaggtgtcaggcatggcactgggcacaacagggacctggcaggagaaacagaccacagagaggtctggagttgaggctgttgtcagcaaagcccctggtcccacacagctctgccctagagccacctctttgaccctttaccaccctgagaccagaacttgcagcccctctgcagatctcctctggccactgcagcccctccaatgggctttttctctcattgcattccctggcctggaggcgtcaggaaccccacatcctccctgttcctcagactcacaggccctccatgttacttcccgaacttcctccggggcactgtccctgggcttg

SEQ ID NO: 248319 - DNA, 410 bp, Homo Sapiens
  misc_feature (15)..(15): n is a, c, g, or t
  misc_feature (40)..(40): n is a, c, g, or t
  misc_feature (69)..(69): n is a, c, g, or t
ggcgccccggtaaanacttgttgaaggcaaacccaagttncccccaagtccctcatccccttatagtgncccaagacatctttctcctctgaagggcttggcagttgtggctaaaaaataagcagtatcattatttgcttgaaatcatatatacagtttgtatgaatttcagtatgttgccaagacatgattttttcttattgtattttctgtaaatatttctggcactgaactgtaaagtaaaggcaaagtgtaaatatgaaggcgtgcccgtgccccttgcctcctgtgtttcatcttcgtcggttagggaagaaggtccagaggtttgtttgtatttatgccgatcctttgtccagaagaagcccatggaatattgaatgtaatacatttagtcaattaaattttaa

SEQ ID NO: 248320 - DNA, 1613 bp, Homo Sapiens
  misc_feature (257)..(265): n is a, c, g, or t
  misc_feature (546)..(599): n is a, c, g, or t
  misc_feature (986)..(1059): n is a, c, g, or t
ttggggttaatgatttattttttgactaaatgtgcaatttcttatcactagataactttcagtatcagtggtggttacttattacttaaatcagaggaaggattttataaagattaataaatttaattttaccaataaatattcccataatttagaaaaggatgtcgacttgctaatttcagaaataattattcatttttaaaaagccccttttaaagcatctacttgaagattggtataattttcataaaatgtcnnnnnnnnnagtgtcccaaagatatcttagataaactattttgaagttcagatttcagatgaggcaacattttcttgagataattacccaagtttcatccatgttgaatggtacaaaatatttctgtgaaactaacaggaagatattttcagataactaggataacttgttgctttgttacccagcctaattgaagagtggcagaggctactacaaaaagcaaccttttcattttcactaagagtttaaaagctattgtattattaaaaagtctttacaatgcttgtttnnnnnnnnnnnnnnnnnnnnnnnnnnnnnnnnnnnnnnnnnnnnnnnnnnnnnnttaaatttagaataagaatgatttctttaatttgtcctttttttctttggtctaaaacattattaaatttttgtaaatattttgatttaatgtgtcttagatcctcattattttaatacaggaaaagaaaagatttagtaatttcttaccatgctaatatgtaaagttcatgccatccaggcatttaagagcgatcctcatcccttcagcaatatgtatttgagttcacactatttctgttttacagcagttttgaaaaacacatactatgccccccagttgtcatattatttttagatgatgtaacatagccatcaaaattaatattatgtaatgcctaatacttagtatgtaaatgtcacgagatcatttttacattaaacgtgnnnnnnnnnnnnnnnnnnnnnnnnnnnnnnnnnnnnnnnnnnnnnnnnnnnnnnnnnnnnnnnnnnnnnnnnnntaaactaaaagaaccacataaggcaaccaataaaagataaaaaacaaagcgatataatcaacacacagaaaacaataaactagagtggtgcgggtgtggtcctctttattctgaatcactgctgggctgtgtgcgcctttctgcgagaggtctcatgtgactcgtaatttgtcgagacgagacagactcgacactccaatcgagtgtgatgtatattcacactgcacaacacgctcctcgtgaacccagtagtgatcaattaatcatcatcgcgatgggtatctgcaagaattatgcgctgctatggcacagctgtacatcggaaagaacatactcgctcttcgttcttcgtgggtgtcggcgtgtgcaaggtatcatgactgaactctcatatatcagtagacgagaaatgaatcgatcggactcatgtgcaatcgttcctccacacttacagatccgtcaggggcttgtgtgtctattaggcgagagaaggtaacaacgataatgacaatgtggcgaggggacggcgaagtgaggcatggagtggttagatc

SEQ ID NO: 248321 - DNA, 1419 bp, Homo Sapiens
ttgggtggcgttctgtgaagagttcggtgctaacctccctcacgcggcggtggctgccgggaccctagcaggtttcagctggagcggcggcggcggcaacatggcagagaccgcggccggagtgggccgcttcaagaccaactatgctgtggagcgcaaaattgagcctttctacaagggcggaaaagcacagctggaccagactggccagcacctcttctgcgtccgtggccaccatggccttcgaccccacctccactctgctagccacaggtggctgtgatggggccgtgcgcgtctgggacatcgtgcggcactacgggacacaccacttccgaggctcgcccggtgtcgtgcacctagtggccttccacccggaccctacacgcctgctgctcttctcctcggccacggatgccgccatccgcgtgtggtcactgcaggaccggtcatgcctggctgtgctgactgcccactacagcgccgtcacctcactggccttcagcgccgacggccacaccatgctcagctccggccgtgacaagatatgtatcatctgggaccttcagagctgccaggccacgaggaccgtgcctgtgtttgagagcgtggaggctgctgtgctgttgccagaggagccagtgtcccagctgggtgtgaagtccccagggctgtactttctgacagctggcgaccaaggcactctgcgcgtgtgggagtgcagcttctgggcagtgtgtgtacacgcaggcccagccgccgggccctgtgcaggagctgacccactgcaccctggcacacaccgccggcgtggtcctcaccgccaccgccgacccacaacctgttgctctacgaggctcgctccctgcggctgcagaaacagttcgctggctacagtgaggaggttttggatgtccggtttcttgggcccgaggactcccacgttgtcgtggcctccaatagcccctgcctaaaagtgtttgagctgcagacgtcagcctgccagatcctccacggccacacggatatcgtcctggccctggatgtgttccggaaggggtggctctttgccagctgtgccaaggatcagagcgtccgtatctggagcaatgaacaaggctggccaggtgatgtcgcgtggctcagggttccggtcacacacacagtgtgggcaccgtctgctgctctaggctgaaggagtccttcctggtgacaggcagccaggactgcactgtgaagctgtggcctcttcccaaagccttgctgtccaagaacacagccccagacaatggccctatcctcctgcaggcccagaccactcatcgctgccatgataaggacatcaactgcgtggctattgcccccaacgacaagctgctggccacaggctcacaggaccgcacgagcaagctctgggcc

SEQ ID NO: 248322 - DNA, 770 bp, Homo Sapiens
caaaaaataacaaaatgtgcttggggtcaggtgtggagatcagggtcggggaggtcatgaggtaggtaggggtcaggatgtggacagtcatgggctggtgggtgtggcagccgtgaggggtgggtggtggcctgggaggcagggcctgggcagggcttctgcacttctgctgcttacccagccccctctgggttcgaggactctccttgacaagggctgagctctcgggcactgcgttggactcagctgcctactgggaggctggggagaatggacctgtgagaccttgtttgtcctcttccctgcccagctcttgtagaccccaggcctggctgtccgcagggccaggagctgcagccatggcagccaccagcctcccacatgagccccagctcccagccccacacgcccactccttttgcccatgtggtgtcagctctggcctctgcttccacacatggaccctcagaccttgcacatctgttgtttcccttgcagggcaggtgatgatgaccttgaaatgacggtggggtcactcctgtttagggatgagactggggcccagggaggggcaggtgtgaagttgctgagggcagagggagacccaggctaccgtgctcctaatgaccagcctcacgttctccactgctcactccctgctgttcaccagctgcatgaccttgagcagtgcactcaactgtaaacagaggtgaaaacactcctttaccaactgttttaggggccactcttgtttgaggccttgaaacctg

SEQ ID NO: 248323 - DNA, 1037 bp, Homo Sapiens
  misc_feature (964)..(964): n is a, c, g, or t
ttgggcaaaactaaatcattttgtataaaaaacccaacaaatgtgatgagacaataatgggaaggaagggaatgagaaatattaaattctggatggtggttatctttgagggaggggaatgatgtgattggggaaatggactttcaaaggtaatggtaacttccttaagctggatggtaggtccactagtgtttgctgcatagttataccttttatcttaaatacattttgtatctattgtaacaaccactttaaagacaaccgtgctgtaaggcagtagctaaaaacagaaaatagtccatcgggaagggtaagatggctttctgctgagcacagggctagaagtgacagcccagtgggccttccaactatatgccagggtgttagatgagtagagaggagaccacccaggaagtctggacaaggggtctggcatgagctctggagaagatatatttgaggaacatggggtatgctagtttgttgtcctgaattgctgtagagaagataatttaaattgcatcttagaagacgaccctgagggtgaatttcaacttagggcaattgttttagtttgtttcttattggtttaaatggatacttgaagctggataatttataaggaaaagagatttatatgacttacagttctgcaggctgtacaagaaacatggcaccagcatctgcttcttccccggctgcttccactcatggtggaaggtgaaggggagccggatgtgcagagatcatatggcaagagaggaagcaagagagcgagggagaaggtgccaggctctttttaaataacccggctcttgagggaactaatagattgagaactccttgcttctcctccccagcacacccccaccccccagggacggcattaatgtattcatgaggggtctttccccatgacccaaacacctcccatcaggccccacctcacaaactgggatcaaantcaacatgagatttgggggacaaacatgcaaactatagcagcaaccagctaccattctaaaactgccatatga

SEQ ID NO: 248324 - DNA, 841 bp, Homo Sapiens
  misc_feature (123)..(178): n is a, c, g, or t
  misc_feature (522)..(530): n is a, c, g, or t
gatgtgtgtcttcagttctcaattttgcccgggcatcgtggtgggccccttataatcgcagctacttgggagcctgatggcatggaggtctgtttgaaccccggaggccgagggttgccgttnnnnnnnnnnnnnnnnnnnnnnnnnnnnnnnnnnnnnnnnnnnnnnnnnnnnnnnncgccaggttaccttttaaccacacatttaatccctaagcataaaagattaactggaggcaaactaagattgagccgtcaatctgaagtattttactcaataagggtaaccccctattgggctgtcactagcgtgtcacctcagccgagaccagcatgaaggtcaaaggcgaagccacctctgtagacccacctcacctgcccctcccccatccagtcacctgtgcagctggctagtccctcggcccctaaagacctaatcaagttggtgagttcagacccaacatcatcaggaaatctgtaaatttggagaaacttgttttcaaagcaaaaacccagatgaagnnnnnnnnnttttttaggccaggcacgatggctcagccagaaaatctttaattgacaaatatttaagggacaagagggttttaagaaattaaaaggatgtatgaagtgaagtgagttgtgaacagaacctgggtgccctcctcatccacgtgcctcagtcgccctcgtgcctgaccggctttgccaatggagcctggaccctcagcacgggtcagctgtgggtgcgaacatggtggtctgggtcaggcctctttcaagtccccacaacaggcctgacttgtgcgtgagacgctttcaccttaaaccccacgccatcctgg

SEQ ID NO: 248325 - DNA, 493 bp, Homo Sapiens
  misc_feature (234)..(242): n is a, c, g, or t
  misc_feature (351)..(360): n is a, c, g, or t
  misc_feature (400)..(414): n is a, c, g, or t
tgtaaagaaatatacttttctattaaagatctgtacatatttttacagtaaaatgctttatggaactagttttagagccctctatggctttaaggccttgcttactgcctgcaaattttgagaaatttaaaaataagcattctaacacttttattcccacagaaaaattccaagtcaaattatcaaatcaaacacaaaaataagtcttacctcttgtataagcatgttgtactnnnnnnnnnttttgaaacatttgtatattggagatctctctcatcttactgttctttgctttaaattcctggcacttctttttactgtctataagagaaaacctatcataagcccaannnnnnnnnnccacttagggtaaatgttggctcttctcatttcattatcnnnnnnnnnnnnnnnaaagacagattctcactcagttggcccaggctgggattggcgggggcgctgtctcagctcactggcaacctccgcctcc

SEQ ID NO: 248326 - DNA, 1268 bp, Homo Sapiens
actttgtacaaaaaagttggactaaactttctctgattagggcgcctactggatgatggctgtgtgcatgaagcaagtagagtatgccggtattttcatttttataatccagatgtcgccttggtattgcactgcagagcactggcctcaggggaagctagtatggaggatctgcacccagagatccatgctctcctacaaagtgctgagctgcttgaggaagaagcacccgacattcccctaaggagagtccacagcacttcaagtctggatagtcagaagtttgtgacagtgccctccagtaatgaagtggtaactaacctggaagtgctgacaagcaaatgcctccatgggaagaactactgtcgacaggtcctctgtctgtatgatcttgccaaggagttgggctgttcctacacagatgttgctgctcaggatggtgaagccatgctccggaaaatcttggcctctcagcagcctgaccgatgcaaacgagcccaggccttcatcagcacacagggccttaagccagatactgtggctgaactcgtggcagaagaggtgacacgggagctgcttacttcatcacagggaacaggacataagcagatgttcaacccaacagaggaaagccagacatttcttcagctgaccactctgtgtcaagaccgcacattggtaggcatgaagttgttggataagatttcctccgttccccatggggaactgtcttgcaccacagagctcctgatcctggcccatcattgcttcaccctgacgtgccacatggagggcatcatccgagtcctacaggccgcccacatgctcacagataaccacctggcccccagtgaggagtatgggctggtggtacggctcctcactggcattggaaggtacaacgagatgacatacatatttgatttgctgcataaaaagcactactttgaagtgctaatgaggaagaagttggatccgagtggtaccctgaaaacagccctgctggactacatcaaacgctgccgtcctggagacagtgaaaagcacaatatgattgccctgtgcttcagcatgtgccgggagattggcgagaaccacgaggcagctgcccgcatccaactgaaattgattgagtctcagccctgggaggacagcctcaaggatgggcaccagctgaaacaactgctgctgaaggccctgactctgatgtaggatgcagcagagagttatgccaaggactcctgtgtgcgacaggcccagcactgtac

SEQ ID NO: 248327 - DNA, 817 bp, Homo Sapiens
ctattatctcagattaataggcgaggaaacaaaggttgaaggagattcagtgacttgctcaaagtcagaccgtgagtgtgttgagttgcgtggtcttgaacataggcctgcttgcctccagagcccatgtctcagcctccacttcagtgcctgcagaggcaggctgtgaaagtctggcttgctggctaagacgattgttccctctcttttaatgtttcaaggacaacatcccttgccgaatcctcttctttcaacctgcctcatggtgttacccaactttttgttaaattgggactagtgggtctgatgttgacaggttttctgagtcttggttctagggttcaccttcctttttatccagccaatcagtaatccagaagtcttcaaataaaatctttatgtgcccaaccacgtgtgaagaggggagaagattcatctcgtttctcaaaagatcccaggtttatttgtgagcccaggtagtgcctgcgaatcctttaggtttggagaaacactttggggactggaacaggaaccatcacagctggctggaggaacgtggggtaatgggccttgagctgtccctttaaggatgagtaggagttgggaaggtggagggcataacatatgagcaaaattatgtctcacttaatggtgaatgggacatcttttgcctattctccccatcctccaagataattcctgggttagagttggctctcgggtaggagaggcagtatggggaattcattcatggcaaaaatcaagattattgaaactaattaactggatcccaaagacagatgatgaaactacctca

SEQ ID NO: 248328 - DNA, 1455 bp, Homo Sapiens
  misc_feature (422)..(447): n is a, c, g, or t
  misc_feature (702)..(714): n is a, c, g, or t
ttttataccacagatttggtatctgtttaagtactgtgtgtatattcatgctttatacatcaagtttttgtcccccagaacaatcttgacaaggactgcgtggcgctaacaatgaaaagtttatagtattaaaactttttttatttgaataagtggggagaagagaaatatatttcagcacttagatatataaattatttccaaaacagtttaatactcaactagtcggttctatcaaaatcagttttccctgaagtaagcactgttcccagctacaagcgatcctcatttcacatggtactgtgggaccataaaaatggtcctgcaatcttaatattcaatagggaaaatgatgattgttccatgacctttaaggttctgctcaaatattaaaaactcttaagaccagttataaatgtagnnnnnnnnnnnnnnnnnnnnnnnnnnatttagtacactgtaatttaaaacattagaaatagaattaaagtgttttatttcattgtaaaaacaaagtagtttgaatagggcttgcctttttttctggcaagtaacttaccatactgagtaagcatcttttatgttcacggcaaactgccatactccttctaagtttgggtcagcttccacccttttattgcttgtgctttcaatgttgtgaaatatttctatattcacattaaatatcttttaatgtaaagnnnnnnnnnnnnnaaccatcacttcctctgggacgtatctgtctttattgcaaccactttgcttatttgtgttggtaagtttgccttcactaagctcctatgaatacacagcagcaagaacaacattcccatggtcagtgacttcttctacaaattcatttatgtttgattaaaatttcacttccagtgttatcatttttcattgctttgctgcactttcatctttgttgaccagttctttcgagtgttcacttctatagaatgtcaagtagatgacagagagacagcataactacatgctctgctgtacgtgaactgaattaacagatgcacagggacaaaccactggaagaatttgaaagaaataacatgactggtcacaatcatgaagcatatctgttatttacatagcgatttgtagactgaagagctagcagagaggtttgtacttcatgtaattactcagttacatgtgctaactaaaattttaacctagattttaacacaacagtttccttaccagttttctttccttcctggtaaggaaactggtatttaaactaaatctaggtcactgaaatttgtgcccatgggaaacatgcaatagaggactgcctacaccctacttgtttatattgatccagacaggcttaacgctgactactgaaaaatagcctatctgaatttatatcaatagtgaatcttaaagcacccagatgaaaaattagggcacactgagatggttttaaaatct

SEQ ID NO: 248329 - DNA, 1565 bp, Homo Sapiens
  misc_feature (152)..(213): n is a, c, g, or t
ttggccacaacttctgcggggcctgcatccgggactggtgggaccgctgcggaaaggcgtgccccgagtgccgggagccctttcccgacggcgccgagctgcgccgcaacgtggccctcagcggcgtgctggaggtggtgcgcgccgggccnnnnnnnnnnnnnnnnnnnnnnnnnnnnnnnnnnnnnnnnnnnnnnnnnnnnnnnnnnnnnnacgggcggccgctggagctcttctgccggaccgagggccgctgtgtgtgcagcgtgtgcaccgtgcgcgagtgtcgcctccacgagcgggcgctgctggatgccgagcgcctcaagcgcgaggcccagctgagagccagcctggaggttacccagcagcaggccacccaggccgaaggccagctactagagctgcgcaagcaaagcagccagatccagaactcggcctgcatcttggcctcctgggtctccggcaagttcagcagcctgctacaggccctggaaatacagcacacgacagcactgaggagcatcgaggtggccaagacgcaggcgctggcacaggctcgagacgaggagcagcggctgcgggtccatttggaggctgtggctcgccatggctgcaggatccgggagctcctggagcaggtggatgagcagaccttcctgcaggaatcgcagctcctccagcccccagggcctcttgggccactgacccctctgcagtgggatgaagaccaacagctgggtgacctgaagcagttgctaagccggctgtgtggcctcctcttggaagaggggagccaccctggggcaccagcccaagcctgtggacttagcccccgtggaggccccaggtcccctggcaccggtcccaagcacagtttgtccactgagtaggaaactctggcagaattatcgcaatctgacctttgatccagtcagcgccaaccgtcacttctatctgtcgcgccaggaccagcaggtgaagcactgtcgtcagtcccggggcccaggcgggcccggcagctttgagctctggcaggtgcaatgtgcccagagcttccaggccgggcaccactactgggaggtgcgcgcgtcagaccactcggtgacactgggcgtctcctacccgcaactgccacggtgcaggctggggccccacacagacaacattggccggggaccctgctcctgggggctctgcgtccaggaggacagcctccaggcctggcacaacggggaagcccagcgcctcccaggggtgtcagggcggctcctgggcatggatttggacctggcctcaggctggctcaccttctacagcctggagccccagacccagcccctgtacaccttccatgccctcttcaaccagcccctcacccccgtcttctggctcctcgagggtaggaccctgaccctgtgccatcatgccaggggctgtgttccctctggggccccaggaagaggtgctcagctgaagaaggcatgggcatggagccctggcatagctgcaccatgcctatgtgcccaagagctgccagcttcagcttggggactggaggacca

SEQ ID NO: 248330 - DNA, 1458 bp, Homo Sapiens
ttgggatggagcccgagcccgagcccgcggccgtggaggttcccgcggggcgcgtgctcagcgcccgggagctcttcgccgcccgctcgcggtcgcagaagctgccccagcgctcgcagggccccaaggactttctgcccgacggctcggcagctcaggccgagcggctgcgccggtgccgggaagagctctggcagctgctggcagagcagcgcgtggagcgcctgggcagcttggtggctgccgagtggaggccagaagagggcttcgtggagttgaagtctcccgcgggcaaattctggcagaccatgggcttctcagagcagggccggcagcggcttcacccggaagaggccttgtatcttctggagtgtggctccatccacctcttccaccaagacctgccactgtctatccaggaagcttaccagctgctgctgaccgaccacactgtgaccttcctgcagtaccaggtcttcagccacctgaagaggttgggttatgtggttcgacgattccaaccaagctctgtcctgtccccgtatgagaggcagcttaacctggatgccagcgtgcagcacttggaggatggagatggcaagagaaagaggagcagctccagccctcggtccattaataagaaggccaaggccctggacaactccctgcaacccaagagtctggcagcctccagcccacctccctgcagccagcccagccaatgcccagaggagaaaccccaggagtcaagccccatgaagggcccagggggcccctttcagcttctggggtccctgggccccagccctggcccggccagggagggggtggggtgcagctgggagagtggcagagccgagaacggagtcacgggagccggtaagcggcgctggaacttcgagcagatctccttccccaacatggcttcagacagccgccacacccttctgcgcgccccagccccagagctgctcccggccaacgtggctgggcgggagacagacgctgagtcctggtgccagaagctgaaccagcgcaaggagaacctctccaggcgggaacgggagcaccacgcggaggccgcgcagttccaggaagatgtcaacgccgatcccgaggtgcagcgctgctccagctggcgggagtacaaggagctgctgcagcggcggcaggtgcagaggagccagcgccggggcccctcacctgtggggccagcccgtcaccccgctgctgagtcctggccaggccagctccccagccgtggtccttcagcatatctctgtgctgcagacaacacaccttcctgatgggaggtgtccggctgtttggaggaagtctgggggcttggaaatcatctttgatgtttaccaggccgacgctgtggccacattccgaaagagtaaccctggcaaaccctatgcgcggatgtgcattacgtggatttgatgagcctgtccc

SEQ ID NO: 248331 - DNA, 743 bp, Homo Sapiens
  misc_feature (96)..(107): n is a, c, g, or t
  misc_feature (109)..(229): n is a, c, g, or t
  misc_feature (236)..(366): n is a, c, g, or t
ttggcattgacgcacagacaaatgtttaaagcacagtaaatacaaatatatgcctttggatattaaattaatgcttgatgataaaagaatcaaacnnnnnnnnnnnngnnnnnnnnnnnnnnnnnnnnnnnnnnnnnnnnnnnnnnnnnnnnnnnnnnnnnnnnnnnnnnnnnnnnnnnnnnnnnnnnnnnnnnnnnnnnnnnnnnnnnnnnnnnnnnnnnnnnnnnnngtgcagnnnnnnnnnnnnnnnnnnnnnnnnnnnnnnnnnnnnnnnnnnnnnnnnnnnnnnnnnnnnnnnnnnnnnnnnnnnnnnnnnnnnnnnnnnnnnnnnnnnnnnnnnnnnnnnnnnnnnnnnnnnnnnnnnnntgagccaccgcgcctggccaaaacaacattttaagtagaagatccaggttttagtgcagcttctgccgttaactaggttaataaatcacaaccttggggccacagttgccttatatgtaaatgaagtgtttagaataaaatagttaaatttccttatttttcccttggtggctgccctgtggaaacagtttagaatatttgttttgtgtgtaggaacctagttgtgttagtttacctgggtgttccacagctgatagtgattgccttgaataaattcaagggcaatttattcatttttactagggagatagacctttacagcaatcaagatatttttgtccatatccaggttagctggtaagaggatttttttggag

SEQ ID NO: 248332 - DNA, 776 bp, Homo Sapiens
  misc_feature (250)..(262): n is a, c, g, or t
  misc_feature (653)..(653): n is a, c, g, or t
  misc_feature (696)..(696): n is a, c, g, or t
  misc_feature (716)..(716): n is a, c, g, or t
  misc_feature (763)..(763): n is a, c, g, or t
cggacgcgtgggctttttttaaaataaattaatctatatgggttgacaaacaagccaccaaccactgactgcaaaactgcctgatgcagttgggttcctcctggttttcttttgttacaaccacccttgcctgtttacattaattgcaaggagcataacgtacaggctgtatgtacaatcctgggcattgactctgtgacatttctagcatatccaaggcaccaccagtgatttctcctgtttcttggtnnnnnnnnnnnnnaaggtacgtattctgcaatatggctaaaccctttcctgattgagagttaaagcaataggagtcaagttactggtgccacagatctggaggtatgataggtcaggggctaggtgtcgaacttagttaatggaagactgagagcagaacaggtttgtcatctccgcaaggccagaaagtgatcacaaaaagaggcagatgatagacactggggtagggtcataccacagggaaatacctttcctgggcttgtcttctagcatatcactgacctgggatctttgggtgatcaagggtgtggttagtggaggctctgtgctgcacgtatgcagtatcctatctctttctacatcagatcaaaacactaagttggtgtactgcctcgacctttttncagctcatcctggaacatatacagagttgagagttttagacantctctaggtagaggagacangatgtagacccagacagaagaaatctgcttccctaccatggctattnccagcaccccaac

SEQ ID NO: 248333 - DNA, 1697 bp, Homo Sapiens
atttaacccagaaaatgagactcatgctgtaagcaacctgcaaatcctgcttgttctgcaactagaatactttaacatgtaaaggatctttcaaaggggaaagaaggctcttaacggtacctcccagagtaaatccttgccccaggggctgccctgcctatctgcaagactaaaatggtcatgacaattcgaagctaaaaaaagaaataacctgttatcttcagtgtatttgcctgggttcaagtggttatctgcagatttataagtaggtaaatagaacaatattgataagatttctgaaaactaaattgtatttggctctggtactaaggagttgagagaataaaacacctatgttaattatcaaccgcaaatgacaactttttgtgaggtttctattctaaggcttactttattcgtgtattccatttagaatcttaaaattttttgacaacttcctttaaacaagaagtaattcacaaatggttaacacagcactaaactaataagataggtcctcacacccatcttgaattatttaagaaagtattgccattgaaacatctttttcctgagaaattcatattgcagaatggcacaagacaatacacattttctccaattttctgcatgaatacaagataggaaaatcagattacaatatattttgtgaggaaaacatgtttcttaaaattgtgctttcagttactctccaaactacaaatttttagagggtgagagccaaatgtaagttaagaagtgatctttaaggcaagagaatgaatacatatggtaaattttggttggtgtttaaacaatttttataggaaattgtttacgagtggagaaactaaggcacagaaacaaccaagctcaggttcaaggttgagtttaatagtataggtagaaatagaatctagggatctgattctcatattagaggataatatctccccaaaggggaaaaataaaattatttctgtttggtagatgacattgatggatcatttttgaaatatatgatatgaatttccttgaaaatctttggcatttctgagagtctttgtagggctgaggttttttaggtattcttttcccaggatatatataaagttaggggagctagctttaaagttaaacgacggaaatattaatattaatttcaaaatgacctgagttcattttgcatttttatataaatcaattgtacacttgagtactctgaaacataaaaggccaccacacttcacttcatagagttcacacacatgcattctacatatttatatgaccagaacttatttcacatttacataaagtataaaataaaatgtcttagtcaaatttttcataagcccaactatttgaagatgtcagttattacagtgggatgattaattcatatacagtattaagtctcaaattcaagtattataatattcaccccatgtgaaagtttctttgtactggctaagatgtgagctgtgaaatttatattgctcagtttggtatttttccctatgtgtatgttttccatcacagaacctctgtctcacaattctgtacttgtaagagctcaggtaggtttatgtagtcataatgcagtagtctagaacacaccatgtaaaggtaaaaaataaaattattttcaagtttccttgtttttaaagtgctccacgtgctgtattatatcaact

SEQ ID NO: 248334 - DNA, 1258 bp, Homo Sapiens
  misc_feature (416)..(425): n is a, c, g, or t
cccacgcgtccgccaatattttcagaaagaaaagatccaaggagaatataagtacacccaagtgggtcctgatcacaacaggtttgcttgtttcattcttttccttctgtagtaagttaaggtggttttggatattcactgttgaatataatctatttttgtacgttgtctggttaattgtgtggattagaattgaattgttaaaagataacgttaatttgcacaagaataattattgatttgtgcagtttccatggttttcacatgagtgaattttagctgtgtaagaagttcagcgtaaatctttttgacatgctagacatttaagatgctcatttgaatctgaaaggcaaaagtcatgaccacaattgctggtttgtccctagttgatgtaaaagccagccaaaggtggtgannnnnnnnnncaccttggtattgttagaggcagttactatttctttaatgggtcaggttagatacttaagctttgagtcccagaattagattgtattgcatctacatccacatttcacttaatccttgaaaactgccagctttcctaggagtcctagtgaaatttaagggcttatcgtaaggtcgaacaaggaacagccttggtctttgtatgtgggggtgtactttttttcctgttaaatgtataaaacaatataaagggaggtcattttcacagtatgtttctcagcctgcttgcttgttcttccttgagagcattccagggtgtagtaattattactcccaggaaggcttcatatggattagacttttctggggagcgatgtatttttattagaacggaggggaggttgtactggaaacctttttgattgattccgtttgctgtccgtacttatgacctaaattatccaaatacattaaaaatatttttctcgaaaatcaaagtgttctccattggatgcatctagcgaccctgaaataattagtattaatacaaaattttgtcactgatcaaaatgatatttagagcatggttcccccttcctcccactgttttgttcaatcctgaattctcagatatttctggtgtcagcctttttaaaaccgtcaggttgcaaaggagtgatacatttgttgatgatttgttttctttcatattttgtctttctgaacgcattgggcttggtagcacttggtgactttaagaacaatgagataccgaagtgtgcctgaagctcatcgttgcagacattttttgttatcagtatcttatcatagattt

SEQ ID NO: 248335 - DNA, 1271 bp, Homo Sapiens
  misc_feature (1094)..(1094): n is a, c, g, or t
  misc_feature (1125)..(1125): n is a, c, g, or t
  misc_feature (1186)..(1186): n is a, c, g, or t
  misc_feature (1215)..(1215): n is a, c, g, or t
  misc_feature (1258)..(1258): n is a, c, g, or t
ttggcaagaactcaactggcaaggctgcttttctgtgctaaaactggggagctagtgggcaccatgaagatcttctgcagtcgggccaatccgaccacggggtctgtggagtggctggaggaggatgaacactatgattaccaccaggagattgcaaggtcatcttatgcagatatgctacatgacaaagacagaaatgtaaaatactaccaaggtatccgggctgccgtgagcagggtgaaggacagaggacagaaggccttggttctcgacattggcactggcacgggactcttgtcaagtgatggcggtcacagcaggtgccgacttctgctatgccatcgaggttttcaagcctatggctgatgctgctgtgaagattgtggagaaaaatggctttagtgataagattaaggttatcaacaagcattccaccgaggtgactgtaggtccagagggtgacatgccatgccgtgccaacatcctggtcacagagttgtttgacacagagctgatcggggagggggcgctgccctcctatgagcacgcacacaggcatctcgtggaggaaaattgtgaggccgtgccccacagagccaccgtctatgcacagctggtggagtccgggaggatgtggtcgtggaacaagctatttcccatccacgtgcagaccagcctcggagagcaggtcatcgtccctcccgttgacgtggagagctgccctggcgcaccctctgtctgtgacattcagctgaaccaggtgtcaccagccgactttacagtcctcagcgatgtgctgcccatgttcagcatagacttcagcaagcaagtcagtagctcagcagcctgccatagcaggcggtttgaacctctgacatctggccgagctcaggtggttctctcgtggtgggacattgaaatggaccctgaggggaagatcaagtgcaccatggcccccttctgggcacactcagacccaagaggagatgcagtggcgggaccactggatgcagtgtgtgtacttcctgccacaagaggagcctgtggtgcagggctcagcgctctatctggtagcccaccacgatgactactgngtatggtacagcctgcagaggaccagccctnaaaagaatgagagagtccgccagatgcgccccgtgtgtgactgccaggctcacctgctctngaaccggcctcggtttggagagatcaatnaccagggacagaactgatcgatacgtccaggctctgaggaccnttgcttgaagcca

SEQ ID NO: 248336 - DNA, 1442 bp, Homo Sapiens
  misc_feature (260)..(407): n is a, c, g, or t
  misc_feature (838)..(846): n is a, c, g, or t
ctcaaccttagattttccttctcagtgtccttctagaaagtgccgcctctactaaatgatttcatgttatttcctcaggtctagagctatttgatttccaaaattctatactcactcttctgttctcattcccggtcatggctcattttccctcagcagctaatgatgctaatcatgtatctaccccccattgtcacaaaaaagagagatggaagagttccttagataaatacagggttagcaaagaaaagtttcattannnnnnnnnnnnnnnnnnnnnnnnnnnnnnnnnnnnnnnnnnnnnnnnnnnnnnnnnnnnnnnnnnnnnnnnnnnnnnnnnnnnnnnnnnnnnnnnnnnnnnnnnnnnnnnnnnnnnnnnnnnnnnnnnnnnnnnnnnnnnnnnnnnntgagccaccgcgcccggcccactactggtttttaacaggatgattcaaagtacatcccgtgcacatttacttcgtcacctggtgcaccacactgtcttcatgttggccctcgtttcttgtatacttagcttactgcccagatgcaactgagaaaatacaggaaaagcaggtccaaattcagccttcgacttctgcaaaagtccataaacagaaagtctgtgagcctccaccctgccagaaagaactcttcatgaagaagtcacgtatttgctcttcctttcaaaggatggcattttaatgttgctttgctgccagatgttcatctgcttgctgtgaagtgattctttttttaaaatgttttttaatgatgtaagttttctaaaaggcagggctgaatggagaaccaagaatttgcttggtagaaaaattannnnnnnnnaatttcagacttatcaaaaatttggttgagggaatttttattagctgccctgactttataatgctacgctcttaacagtgccaaaaatcctacatagttactgacaaatgtgtgatctttttacagtcacaacacctgctgcccggaaagcacaccgtccacgtagaatggagaaggcagaaagttaccgtgtgttcccactgtatctgcactgttcttacttcctcttgtcccttttcatatcttggtctattcagccttaacatttcaaaggcttatagtaaaataggaactgaagatctgtatcaaaatgtaacactttcatcctttggaataattgaagtttaacataacctctacatgtatataagatagctggtgaaaatgtggcatgaaacttcacaattgtgcttcaggcctaagtgactgctacctatgatttaagtgacagtaaaatgtcttgctacatttttctatttcatcctctacaatcatatgtcatggaatggagctatgaaatgtgctaacttggtattcaggattctcattgtgataaagtgatacattagttttaccttgttagaattttacaaaaa

SEQ ID NO: 248337 - DNA, 895 bp, Homo Sapiens
  misc_feature (688)..(700): n is a, c, g, or t
tttcaaatgccaaaatgacaccacatgcacagcactaaaggggtttaaaactggctgtttctttgaaaatgatgactagggagatggagagaacaatgatctatctccattgcctggctaatgccttttagaagtaacagggtactacatttgtgaaatatttgcacatattaagtttttatataattatatcaatcgactaaattttcacaaatgaaatgaaaatacagcagttaagataggtcaattgttatactttgattgacttatagctaccagacatagtatatcttgatttccaatggttagaaaaaatatctgtaaaatctgtcatcacatacaaagtgtgatccaacagaatggacccaattgtgctcctcagtgaggttgcattgccttatcacatatgcttatacatatattaatttaatgtagttttttgagaatgtaagaaataagattttcttcacagatttttcagaagactacaattttttgcacatggaaagctaccatatttcagaagcaaaatttgttagtgttttaaagcactgtcttgaaatggcttttcctccaaggttctagaagttgactgttggttgcattatcttctgcctagactttttgagtgttttcagatacaagaatctaattgcaaatctgctctaaatacttatatgtgtgcacnnnnnnnnnnnnnggtataagtcctggaaaactggcagccacttgtgcttataatttctgtattctaaaagatatttaagcgcaaacaaaaaggacacacaacattgctttgcttccaaacatcacagacactgtatcaaatgctaggagccaggttggatggatggtggaaacaaaggagaaacagccagttttatttcagtctatg

SEQ ID NO: 248338 - DNA, 785 bp, Homo Sapiens
gacccacgcgtccggtgccaaagccactgctagaccacttaagtgtgtattatttcactttaattatattttaaatgtgcttccttggtaattcttaagctcgagaaagagtttgagaactgctgctagcgaaatagagattcacatttaaccctgtggtacttttaacgaagcaggtacgttgttgcatatatacttgggtagagattggtaactatctgatagggaagctcaagttggccacccaagtctgagaaacccttaattactgagaatcaaaagagcagaatgtctgtagacattttggatttgtaaaaatcacattgttgagttatacctgtgatgggctgaaagtttttggcattctttcctgttcttcatatgccagtaccataaacaaaaagtatctcagatctgtcactttcttctcctaaaccaatgtgattgcagctttttgccttcagccttttccctatccagtatctcctacatagttaccttttgatcttaaggaactgttttgattgggtcacttccttgcctaaaattccattgattgttcattgttaattctaaaatagatttcaaatttaaaggcatgtaagttcccctgtaacggatttcctctactcccccttccgctgtaatctcccatttttttactgaaatgcttcagtgagcatgggtctttagcaggtcttgatatacaattttcctgaagcaggaataccttgctttcctctactagtttaccacaattaccagctcctcttttgaagcctcag

SEQ ID NO: 248339 - DNA, 844 bp, Homo Sapiens
  misc_feature (201)..(251): n is a, c, g, or t
ttggagccttttaaagccatcgctccttctttctggccggatgtgtgctgagacccagagtcacccaggggtctccgtcacgtgccaggagtaggcagaagtgggctgtgacagatcaggaaacagagctcagtgcagcccactaaattgctcagggccctacagctaacaagcggcagaggcaggatctgcactcaggannnnnnnnnnnnnnnnnnnnnnnnnnnnnnnnnnnnnnnnnnnnnnnnnnncaacattggccctgctcaggcagcagcggtcccaggatgccaggctgtcctggcttgctggcctccagcaccgagtggcatggggggccctggtctgggcagccacctggcagcggcggaggctggagcagagcacgctccatgtgcaccagagccagcagcaggccctgaggtggtgtctacagggagcccagcgcccccactgttccctcagaaggagcacagacataagcaccttccggaatcatctccctctgaccaaggccagccagacccagcaggaagacagtggagagcagccactgcccccgacctcaaaccaggaccttggggaggcctctctgcaggccaccttgctgggtctggcagccctaaacaaggcctacccagaagtgctggctcagggacgcactgcccgtgtgacgcttacatccccttggccccgacccctgccttggcctgggaataccctgggccaggtgggcacccctggaaccaaggaccctagggccctgctgctggacgcactgaggtccccagggctgagggcactggaggctgggacggctgtcgaacttctggatgtttcttgg

SEQ ID NO: 248340 - DNA, 787 bp, Homo Sapiens
gtttgttgtttgttctgtgttcaacaatgggcacatggaattacctgcacacagttttcagggaaagaaacccaaaatggaaatggcaaaggaggcccaccaggatggccatatcaaaggaggatgattaaaaggggcaagagggacagctacacaacttgctcctttatgtgactttccctccacctgtctattccttaaactgtaagacaaagccattttcaaatacagttccaaactgagccagaccaatttatcctgctacaatagaaaagaatatacatagaggcactttagttaaggaacagacaaaccatcattatattccaatcttcctcatctccaagcctttttgagccaagtctctatctgcacctttaacatggtgttattgcagacctgggttaactcgggattgggggagtgcaacctctgctttgtatttatgactgttttatttgctagtcatttatttccatatagtgtgtagaaagtcacttaaatttgccaatgaggaaaagatgtaaaaccacagctcttgacaactcttagagcactatttcacagctttcacatagcacagataactcgccatctgtgctaagcattatagtttatacaaattatttttaaatagtatgattcctgtacagtgcacacattggtattctattcatcccttaatatccccattagaatataagctctttgggggcagggactctgtcttgcttaccattgtagccctactatgcctggtacatagtaggaacttaataaatatttg

SEQ ID NO: 248341 - DNA, 625 bp, Homo Sapiens
acaaaaaagttgggattcctttttagaataaatatacttcattagttaaggcagttttaacttcacagcagaattaagaagtacatagatttcctatataccctaatgcacatatatatgtatccttcgcccttttcaacacctcccccaaccatggtagtacctttgttaaaatgaggaacctacattgagacatcatagttgtccaaaggccatagtttacattagggtttactcttgtggttttacatgctatgggtttgagtaaatgtataatgacatgtatccagccttatagtacctcacagaacactttgttctaaaagtcatccctgctcttcctgtttattacatatcatccccttaaccctgcaaaccatctccatcatttcgcatgttacatagttgcagttatatagtaagtagccttttcagactgccttcttttacttagtaatatgcttttaagtttcctcatcttttgaggacaagatagcccatttctttttagtgctgaattatgttctattgtgtgtaccatagtttatccattcacttactgaagggcatcttggttgcttccaaattttagttattttgaataaagctgctataaatccctgtt

SEQ ID NO: 248342 - DNA, 277 bp, Homo Sapiens
gtttcccccaaagcctttgccttttcttcattttggcttgcgttcagaaacacaaggctcggcacagcgaaggcttgcacccgcctcccgggacccctcaggccgccacctctgctgccaggcggtccaggtcctcagcttcccggggccctttttccgtgaactctgtgctcagctgccacaccttcactgtgcctgggcatcgcccgcagccaagagctgagtctgctggctgttgaactccagacagtagacagggctttcatcctgggtttgc

SEQ ID NO: 248343 - DNA, 1623 bp, Homo Sapiens
ttggcctggccctaatgcacccctgtcctgggttcgagcctgcgtccaggtcctggacccgaagtccaagtggcgaagcaaaatcctcctggggctcaacttctatggtatggactacgcgacctccaaggatgcccgtgagcctgttgtcggggccaggtacatccagacactgaaggaccacaggccccggatggtgtgggacagccaggtctcagagcacttcttcgagtacaagaagagccgcagtgggaggcacgtcgtcttctacccaaccctgaagtccctgcaggtgcggctggagctggcccgggagctgggcgttggggtctctatctgggagctgggccagggcctggactacttctacgacctgctctaggtgggcattgcggcctccgcggtgtatttgttcttttctaagccatggagtgagtgatcaggtgtgaaatacaggcctccactccgtttgctgtgacgggtctgctgcagtcctcagtcgggggtcctgggcaccatgtgactccccatcctcccatgaggggtccctgccctggatgagtcctagctgggggacaccctgagagctcgagcccctcccacccgggcatccgctggctgcctcctgtcagctgggcaggcggggcccacagtacctgccccaccaggacagcctggctcaggcctttctgggctgcttctcacatcctgggctggatgtgggtttggaagctctggaaccatcccggactcgcccactcctggattcgagggccctcgcagggacagctctgcccagcatcaccccagggcctgggcagtgatagagctgagagctccacccccacatacctgccacccacctggccagccacagcacgtgtgtcacctgcagagagccacccagacgtccccaccgagtccagcacggcaagggtgcaggggctgccctagaaatggactcagaggagcctggcccaccctcttgaaactggtcctggaccttggctcagctctgccgcctcaggtagcacgacccccaggccagcctggacacatcagggagcatggtgaggggcaacggcaggacccgtgggccatatcgggacaggcatttccagcgaggggtggggcagaggacatgtggctggcaggctacacccaccctgccatgcagcggtgtccaggctctggggaggccctggggaatttggaggcatcatgagccaaggcctggtggccctcgttcccctgcccctcgtcaccatcctgtccttggctggccgtgaggactcccctcctcaccactgggtcccacagggctgaggtgggcagtagagggcataggtgggtacatgtcccgggcaaggtctctcggggggacagaagtgagtccagggagtgggtgggcctgggcgtccctcactcagaatgccgcggggtgaggacggtgaggacagggtgggacacgggtactggtatagagtcagaatgtagggcgcacgagggcagcggggtcaggacatctccagccggtggtgaggaacgcaggaggggacacctccacaggacggagactggggcagcgggccagggtaggacccaagggaccacacttgagac

SEQ ID NO: 248344 - DNA, 1116 bp, Homo Sapiens
aaacagtgatagtttgacttcttttcttcctattggatgccatttatttttttctcttgactgactgctcttgccagaccttccaattctatgtggataggagtggtgagagagggcatccttttcttgtgccacttttcaagggaaatgcttcaagcttttgcccattcagtgtgatgctggctgtggtttgtcatatatagctcttactattttgaagtttgttccttcaatacctaatttattgagagtttttaagatggaatgacattgaattttatcaaaaagccttgtctgcatctattgagataatcatgtgtgatattttcctatttggctaatcattttatcattatacagtgtccctctttgcctttttttactgttgttgctttaaaatctgttttttctaatataagaatagctactcctactcacttttggtttccatttgcatggaatgtcttttcccacctctttcccttaagtttatgtgagtccttatgtattaggtgagtctcttaaagacagcagatacgtggttggcggattttcattcattctgctattctgtatcttttaagtggagcattcaggccatttacattcaatgttagtattgagatgtgaggtcactgttctattcatcatgttagctgttgcctaaaaactttgttttttccattgtgctattgttttacagacctcgttagatttatgctttaaggaggttctgtttcagtgtatttcaaggttttgtttcaagatttagaattccttttagcatttcttgtaatgctggtttggtagtgccgaattctctcagcattttttgtcatctctccttcatttatgaagcttagtttttgctggatacaaaattcttggctgacaattattttgtttaagaaggctaaagataggacctcaatctcttctggcttgtaagtttctgctgagaaatcagctgttaatctgataggtttttccttatagcttacctaatgcttttgtctcacagttgttaagattctttttctttgacttttagtaacccaatgactatgtgtctactaatgatctttttgtaatgaatttttacaggagtttctttga

SEQ ID NO: 248345 - DNA, 1160 bp, Homo Sapiens
ttgggcgagaagcagaagctcgtggagaagatcatggaccaataccgcgtgctggagcctgtgcccctgccccggaccaagaagggcagctggctggcagacaaggtgaagaggctgatgcggccccccggagacggagcttcctgagggcagggaggcagatgggacagggtccccttccccggcacccatgcgccgggcccagagctccctctgcctgcgggatgagaccttggcaggcgggcagcggcggaaactcagctcaaggttcccggtggggcgaagctctgagtcattcagccctggggacacccctaggcaacgattccgacagcgccatccaggccccctgggggcgcccgtctcccacagcaaaggacctggtgtgggatgggagaactccgctgagaccctgcaggaacacgaaacagatgccaaccgagagggccctgaggtacaggaaccggagaaacgtcccctcaccccatccctcagccagtgacaccgtgggaacattaggcttgggagtgcagccttctcggcactggagtgtcagcggaggccccaggcagcccaagagctcagggagccagggaccccaaggggagtccttgtgacaatggaggcctgggccctgagatcctccacggtcagcgccggggcccggagatggagctgggtacgagtgtgtggacaggggggatggctggcccccacgagcagctccaggctggagttctggttcttccaggtggctcccgctgaggcagcggtctctgggggatcccccagctgcaggaggctggcaggagttggccacgagatccccctgccctgtccaggctgggcacgctgagtcccagtgctggcgggactgtggcctgggctgatcttgagcctctaccgccttgggacccgtattgtcagggggctctgcagacattcatcggcttggaacgtggcgggcccttccttgcgcgtccgtgtggcgcgcgtggcgtgtcggcgttgtcgctcgccctggatgctcgtggtgcggacggacgacgatcgttggtctgcaggcggtggccggccctctctggaagggtgcgctcggccctcgggggtgggccgccgattggttcgttggcgtggtccgcgagcgctgtcgtctggct

SEQ ID NO: 248346 - DNA, 2030 bp, Homo Sapiens
  misc_feature (1311)..(1319): n is a, c, g, or t
  misc_feature (1960)..(1960): n is a, c, g, or t
  misc_feature (2004)..(2004): n is a, c, g, or t
ttggattttgtgaaatcaaatgttggtacgtgatggacggacatatgcttattttaatagtttttaaaataatcaagtatttactaagtgccaggcacaagcctaggtgctatgaatacctgttggtgttcaggaactacatggtccttggtcctcgccctcatgaaacttatactcaagtaggaagtagacaagataatgtgaaatagtaacaaatgctgtgaatctaacacagtaataaaatagaatgtgtctagaactgggttctcttaggtaaggatggtcagaggggttattaaagtaggtgacattttagctgagaccaggagtgataagaaggagccaaattgggtagaaaattgctttctgcaaaagcagtagaaagtacaaagaattttcaggcaagagtgagtaagggtttgtatgagtttggaaacgaattgtttgaagtgaaaagaagtaggcaagatgcatattgcataaggcatagggccatgttaaacaatatttggttacgctggatgtttctgttgcactctgaatggttagccatttcatgaactgaatttcagcaaggtgattgactttttaaaaataaatctttttcagatcaggtatttggatccaatctcgctaatctgtgtcagagagagaatggcacagtaccaaagtttgtgaagttatgtattgaacatgttgaagaacatggtttggatattgatgggatatacagagtaagtggcaacctcgcagtgatccagaaactaaggtttgcagtcaatcatgatgagaaattggacttgaatgacagtaaatgggaagatattcatgtcattactggagccctcaaaatgttttttcgagaattaccagaacctctttttacatttaatcattttaatgattttgttaatgcaattaagcaagaaccaagacagcgagtcgctgctgttaaggacctaatcagacagttgccaaagccaaaccaagacacaatgcagattcttttccgacatctcagaagagttatagaaaatggagagaaaaatcgaatgacctatcagagtatagcaattgtttttggtcccactctattaaaaccagaaaaagagactggtaatatagcagttcatactgtgtaccagaatcagattgtagaattaattcttctggaactgagttccatcttcggacgttgattcttactgaagacaacctgtggaatagaagctggattccatcagatttcaaatgtttatacacaatgtattttattttttggaccaagcagtgactctttgattttgcacnnnnnnnnngagggatcagaagggaaggggagagtcgagatgtgtgttaggccctcatatttgctgctttgttgcaagttgatataactgcgtgtaattatgaattcattttatcctgaatgtttgcatttcatactctgaatttcagtaaaaatcaaaacttaaaattctaaccagtcatatacactggataatttggtaagaaaactgtattttttttccctgaaattggataatgtactttcttctcaagattcatgacttgatagaacaatactttcagttatgttgcaaaggctcttgggcattttaaacaaaatgaagtatatccattttgaaacctgtgtatttctttttcggggtttctgcatgcagtggcagtcttaagtgccaaaattcattataaccccaaaataaccccttgatgaaggcttgctgtcttttactgtgttacacagcatccttactggatatcttagttgcttgtttgggcagcacactaatattacttaaaacactgtgatatactggagttttagttagcggaagtcagttcagggcattttagggctgtcttgctatactggaattgtaggctaacaatcctaattatatctaggtaccatactgaggttattgggtatgacccngtgggaaacacacattattttatggtaaatataggggctaaagncttaatgtccccttaggcctgtggta

SEQ ID NO: 248347 - DNA, 945 bp, Homo Sapiens
  misc_feature (65)..(185): n is a, c, g, or t
  misc_feature (818)..(832): n is a, c, g, or t
  misc_feature (883)..(892): n is a, c, g, or t
agaacaactttgtacaaaaaagttggctttctttttttaatgttgtacactattcttcctactcnnnnnnnnnnnnnnnnnnnnnnnnnnnnnnnnnnnnnnnnnnnnnnnnnnnnnnnnnnnnnnnnnnnnnnnnnnnnnnnnnnnnnnnnnnnnnnnnnnnnnnnnnnnnnnnnnnnnnnnnntgagccactgcacccgacccctactcctttttctaataagctgtatctgtaatcacagcattcctacagttgttacagtgtgttttttaaatgaaagtaaacatggttacatttgaatctcttaaataatcagtcacttggctggacaggaagaaggtagatcctgtgtgtcttgttttctggtcatgtgtattgtacaagctagagagctgaatttctgagatacacattttcaaatcacatgcaagtgaagatgatggtctgtagaaattttcagtatatataatgtttaatgacatactaatttatcatctggctatttgggaaggaaggacacacatggattttgcacatttccaccatggtggctggtgtggcttgtggctatggggtgatcaccagtatcaccactttggaaggggacagtgaaattggggctagagaaggaactttgtacagttttccctgagattcagattgactgaaaagtcacatgaagagttgattgtcttttaatggtatgttttaaacagctgacattttaaattttgatgaaatccagtttattcgtttgttcttttatgcttttgggtgttgcatccgagaaatcttttcccatcccaagatcacaannnnnnnnnnnnnnnacttctagaagtgttataattttaagctttatactttggtctatgacccgnnnnnnnnnnggttggttggtttcgttggtttctttgtttggagatggagtcttgttctgtca

SEQ ID NO: 248348 - DNA, 1101 bp, Homo Sapiens
cggacgcgtgggcggacgcgtgggtcgacccacgcgtccgggaaaaagctatgtattctgctgaactcgaaaagcaaaaacagcttatagctgaatggaagaaaaacgcagaaaatctggaaggaaaagtgatatcattacaggaatgtttggatgaagcaaatgctgcattggattcagcatcaagacttacagaacagttagatgtaaaagaagaacaaattgaagaacttaaaagacaaaatgagctccgacaagaaatgctggatgatgtacaaaagaaattgatgagcttagcaaacagctcagaaggaaaagtagacaaagtcctaatgagaaacctcttcattggtcatttccacacaccgaaaaatcagcgtcatgaagtgttacggttaatggggagcatcctgggcgtcagaagggaggagatggagcagttgtttcatgacgatcagggcggtgttaccaggtggatgactgggtggcttggagcgaggatcaagaaagtgttcccaacacacctttgagaccaaatcagcaatctgtggttaatagttctttttcagaactttttgttaaatttctagaaacagaatctcatccatccattccaccaccaaagctttctgttcatgaatatgaaacctctggattcaccaggaagaagaaaaagagatacaaatgcaccagaaagttttaaagatacagcagaatccaggtctggtagaagaacagatgtaaatccgtttttggctcctcgctcggcagctgtacctcttattaacccagctgggacttggacctggtgggcccgggcatcttcttctgaaacccatctcaggatgttttgcccacatttacacctttgccagcgttacctgacaacagtgctggggttgtgctgaaagaccttttaaagcaatagatgattctcaagccagagacaatctagcactttaaagaaaccatgaacactatatgtatgtactttatcacaaagtggcctttggggagaaagtcatgtatttgttcgcaattatgctttctctgaatttaataaaaatattcctaatgctttccgcccaaccggaccagaag

SEQ ID NO: 248349 - DNA, 883 bp, Homo Sapiens
ttggcaccgcttcctgcgcggcctcttaacgctgctgctgccgccgccacccctgtatacccggcaccgcatgctcggtccagagtccgtcccgcccccaaaacgatcccgcagcaaactcatggcaccgccccgaatcgggacgcacaatggcaccttccactgcgacgaggcactggcatgcgcactgcttcgcctcctgccggagtaccgggatgcagagattgtgcggacccgggatcccgaaaaactcgcttcctgtgacatcgtggtggacgtggggggcgagtacgaccctcggagacaccgatatgaccatcaccagaggtctttcacagagaccatgagctccctgtcccctgggaagccgtggcagaccaagctgagcagtgcgggactcatctatctgcacttcgggcacaagctgctggcccagttgctgggcactagtgaagaggacagcatggtgggcaccctctatgacaagatgtatgagaactttgtggaggaggtggatgctgtggacaatgggatctcccagtgggcagagggggagcctcgatatgcactgaccactaccctgagtgcacgagttgctcgacttaatcctacctggaaccaccccgaccaagacactgaggcagggttcaagcgtgcaatggatctggttcaagaggagtttctgcagagattagatttctaccaacacagctggctgccagcccgggccttggtggaagaggcccttgcccagcgattccaggtggacccaattggagagattgtggaactggcgaaaggtgcatgtccctggaaggagcatctctaccacctggaatctgggctgtcccctccagtggccatcttctttgttatctacact

SEQ ID NO: 248350 - DNA, 381 bp, Homo Sapiens
gctgataattgatctttattatacagaaatgtgaaggccataagcattaaatgagaaggagtttggcagtgaacattatgcagattcaaactgaaggtatcctcgtcttactgagatataaaaataaacactaagagttgcaagaaagaactcaattcaacttctatctcccaatcaagctataactttccacaggaaaacctggtttcaattcatgccgaattgttcaaagaaaagaaaaagctaaatcagttagagacaacacatggactggcttttgtcctattagagagccagactgaagctgtattcagcctcacatttagagactgtttcctattacaatttatatctctatttgcctaagagatacctaaagtg

SEQ ID NO: 248351 - DNA, 992 bp, Homo Sapiens
ggggcctggaccacgccatcccccacttatgtcaccatgtacctgcccctgctgctggttctcgtggcgaaccccatcctgttccaaaagacagtgactgcagtggcctctttacttaaaggaagacaaggcatttacacggagaacgagaggaggatgggagccgtgatcaagatccgatttttcaaaatcatgctggttttaattatttgttggttgtcgaatatcatcaatgaaagccttttattctatcttgagatgcaaacagatatcaatggaggttctttgaaacctgtcagaactgcagccaagaccacatggtttattatgggaatcctgaatccagcccaggatttctcttgtctttggccttctacggctggacaggatgcagcctgggttttcagtctcccaggaaggagatccagtgggaatcactgaccacctcggctgctgagggggctcacccatccccactgatgccccatgaaaaccctgcttccgggaaggtgtctcaagtgggtgggcagacttctgacgaagccctgagcatgctgtctgaaggttctgatgccagcacaattgaaattcacactgcaagtgaatcctgcaacaaaaatgagggtgaccctgctctcccaacccatggagacctatgaaggggatgtgctgggggtccagaccccatattcctcagactcaacaattcttgttctttagaactgtgttctcaccttcccaacactgcactgccgaagtgtagcggcccccaaaccttgctctcatcaccagctagagcttcttcccgaagggcctttaggataggagaaagggttcatgcacacccgtgtgagaatgggaagagccccctccagaccactctacagctgctctagccttagttgccactaggaagttttctgaggctggctgtaaagtaagtgtaaggtccacatccttggggaagtagttaaataaaatagttatgactg

SEQ ID NO: 248352 - DNA, 1429 bp, Homo Sapiens
  misc_feature (49)..(59): n is a, c, g, or t
  misc_feature (226)..(234): n is a, c, g, or t
  misc_feature (780)..(793): n is a, c, g, or t
cttttttcctgtctgcaaaccagaattgattttttggtcttgcatttcnnnnnnnnnnngactttgaatctgtttagtagattccatatctttgagtttcagtgttttatatgtactacttaagttaaatagttaaaagcttttaaatagttgagctttttaatgttgacactttatttggtacctatttatatatgtatgtatatcttagaaaagcacttggttnnnnnnnnnttgcattttatatgattcctgccatttgctgctaaatctgggctggtcagaatgctgcagcgatacttgatctatataaaaacctggcagtaaaatgtagagtgaaagttaaatcctcttgctgttttaactttatcataaagatgacataggcaagctgtgcagctttacattttaaccaggggactctgtggcatttaaaaccgtctagaaatggttgtactttaatgccagtaataatctgcttcctctattgtcattaaaatatatacgtttagtgtatcacacaaaccaatcttataagggtaatgtaaaaaccccaacaattgtacatgttctgtttttgaaaattgtggcatgtatttttgggtgaagatcattagagaagagttctctaaaggttttctgtgttcatacatggtatacagatagctcataatgaagtccagaatcttacttttaagtgaaggcattgtgaattcacctcaagtaaacccattgttccaaagcaattataaactttgactctagtactactatgatttnnnnnnnnnnnnnnccaacaaaaaccttttttcctagtttcagatacactggattctttatagagtttgtctccatatgaaagcatgctgtccagtcgctcttgttaagatcttgtctgagttttgaattgggtgccacacttttccagtcaatataattgcttgttctactgtaccatgtatgattcttgtcctttcctatatccttcatgacagattatgatgtggctttatattgtgccttacttgtacatttaaaactaaacgtcttcattcccttccacttcctacatctttaactttgacctttttggtaagagaatcagaactattacaaaagcatcatgaaggatttcagatgggtatggtttcaaattccctctctttatagttattttatatttgtatgaaagaccagttttggatggtctttgaatataggggggaaaagattagcagtaatttcactacatcccttttctctgactttcatgcatttctcatacatcttctttctgatgcttgactttatttgcttcctagcaatagtctgcatttaaagaaaggtgtgttcaattcatcagcttgaaattgactatttcatttttccaggattttttaggagagagtacccattttgttttataaaa

SEQ ID NO: 248353 - DNA, 634 bp, Homo Sapiens
  misc_feature (366)..(366): n is a, c, g, or t
acaaattgatgagcaatgcttttacctatataaaacaactttgtacaaaaaagttggccagaccccaccaagccggactatgacatccgggccgacgtatggagcctgggcatctcgttggtggagctggcaacaggacagtttccctacaagaactgcaagacggactttgaggtcctcaccaaagtcctacaggaagagcccccgcttctgcccggacacatgggcttctcgggggacttccagtccttcgtcaaagactgccttactaaagatcacaggaagagaccaaagtataataagctacttgaacacagcttcatcaagcgctacgagacgctggaggtggacgtgtgcgtcgctggnttcacatggactgtccagtggcgaagactgagtcaccgcggactagcggcgtcctgagccagccccacctgcccttcttcaggtagctgcttggcggcggccagccccacagggggccaggggcatggccacaggcccccctccccacttggtcacccagctgcctgccaggggagacctgggacctggacggccacctaggactgaggacagagagtggggggtgcccacagacgaggaacgtacaaaaacaccaggcgctgggacc

SEQ ID NO: 248354 - DNA, 833 bp, Homo Sapiens
tggccatctggaaggagcagctggacttctttgtgcgcctaggctatgaggtggtggcatcctgacctggccggccacggggccagctctgcgccccaggtggccgcagcctacaccttctatgcgctggctgaggacatgcgagcaatcttcaagcgctatgccaagaagcgaaatgtgctcattggccattcctacggtgtctctttctgcacattcctggcacatgagtacccagacctagtgcacaaggtgatcatgatcaatggcgggggccctacggcgctggagcccagcttctgctcaatcttcaacatgcccacctgcgtcctgcactgcttgtcgccctgcctggcctggagcttcctcaaggccggcttcgcccgccaaggagccaaggagaagcagctgttaaaggagggcaacgctttcaacgtgtcatccttcgtactccgggccatgatgagcggccagtactggcccgagggcgacgaggtctaccacgccgagctcaccgtgcccgtcctgcttgtccacggcatgcacgataagtttgtgccggtggaggaagaccagcgcatggccgagatcctgctcctggcattcctgaagctcatcgacgagggcagccacatggtgatgctggaatgccctgagacggtcaacgcgctgctccacgaaattcctgctctgggagcccgagccctcgcccaaggctctaccggagccactgccggcgcctccataagactagaagtagccgctgggccggcggggcatcgcttggtgagcacatccgcagccggaggaggcccgagccttctctctgtctg

SEQ ID NO: 248355 - DNA, 815 bp, Homo Sapiens
ttggggacatcgtccccacgaaggccctggcggtggcatcagtggtggcagtggccatcgtccccatgaaggccctggcggaggaatgggtgccggtggtggacatcgcccccacgaaggccctggcggaagcatgggtggaagtggtggacatcgtccccatgaaggccctggacacggggggccccatggccaccggcctcatgatgtccctggtcaccgaggccatgaccatcgagggccgccacctcatgagcaccgtggccatgatggtcctggccacgggggagggggccaccgagggcacgatggaggccacagccatggaggagacatgtcaaaccgccctgtctgccgacatttcatgatgaagggcaactgccgctatgagaacaactgtgccttctaccacccgggtgtcaatgggccccccctgccctagggaccatttgcctgccctgttcacacaagccctgtggactgcagcctcgctctttccaccctgttatggcttctgtgaggcccattttcccttttccccagctgatgaggagccggccccctcagttcccacttgcttgggttcctgggggttttctgatcactggtgcgcattgatgtacatattttcctccagtctggggaggagagagactggaaacgttcctggactgctgaagaggagacccagttgggcttcacttttgtgagaacgattcgccctgtaccccaaacccctttccagatattacccttactgcttgagaaccttaaaggttgggttatcctgggcgaacacccgtacccttctattg

SEQ ID NO: 248356 - DNA, 1361 bp, Homo Sapiens
ttggcggaaatctaccctctaggcctggaggcctctctcgcagagcatggaaggcaggagaggtgggctggcctagggcaggagctccacttctctctgcctctggctatgggaaggagcaggcggttggaaatcctgtgacagcagagatcttctggatttttgcctggacccttctgcaagcctggagactggacctgccacatgttccaagtctgtctgcctaggtcactgctgccacttctcctcccactaacagacctttcttgaagacccactaggtccagacactgccgggacttgcaggtatggggggtagaaggagaggcagataagctgcctggggggctgttagctaatgggtacaaggacaccccctcccgagaagagaagccacagatgagtgggccaggcgaggccagtcttcgatgtccactaattcactctaagcatttggccaaaaaaaggagagagaaataactgaaattgttcaggtggctccatcgtctattctgtggtcccctccatgagcctttgccccagggtgggtgcaggtgcgagtgtcacctgcagctgcctcagtcattcagagttccagagccttctgtggtggagcatcctgctgcttggaggatgagtctgaagtttaaaaatgggccttttctgagcccccctgatgagcagtcagtgcttctgggcccagctaaggaagccatctgttcccagcagaggagagctgctgcgctgacctgcagaggttggtggtcccagcacagagctgtgcccatgggcttgttagtgggaaaagcaaatacaacaatgttttaccaaacatttaattatgaatgcccactccccagcgtctagatctaaaattattaaccattttgccacattctttttctctctctgtgtatgtatatgttttctctgtcctaactttaacagtacattgcaaacatcatgaaacttgatccctgaaagcttcagcctgcatctcctaagagttagggcatggtcctacacattggcccagtatcacagccaagacgagaagtcatttcccagcgatgtctgctatctaaatctgtattcaagatccccccaaatagtctcccaggttactttatgtgtcagggtttaggaatcagcatccagtccacggtgcacaacattgcattttactaacctatgattcgtaaaacctcctttggaatgctgacaaaggtctcccttcaggctccccttgaagttcttaactgacgtggttttagaaggccctaaggccagcgacataagaagcccccattctggattctgaccgatagttggtcaataggtgtcataccatgactatatcc

SEQ ID NO: 248357 - DNA, 801 bp, Homo Sapiens
atttgctggcacccgttttcttaaaagaggtgcaaactgtgagggtgatgttgcaaatgaagtggagactgaacaaatactctgcgatgcttctgtgatgtctttcactgcaggaagttattcttcatatgtacaagttagaggatctgtgcccttatactggtctcaggacatttcaactatgatgcctaaaccacctattacattggatcaggcagatccatttgcacatgtggctgcccttcactttgaccagatgttccagaggtttggctctcccatcatcatcttgaatttagtgaaggaacgagagaaaagaaagcatgaaagaattctgagtgaagaacttgttgctgctgtgacctatctcaaccaatttttgcctcctgagcacactattgtttatattccctgggacatggccaagtataccaaaagcaagctgtgtaatgttcttgatcgactaaatgtgattgcagaaagtgtggtgaagaaaacaggtttctttgtaaaccgccctgattcttactgtagcattttgcggccagatgaaaagtggaatgaactaggaggatgtgtgattcccactggtcgcctgcagactggcatccttcgaaccaactgtgtggactgtttagatcgcaccaacacagcacagtttatggtgggaaaatgtgctctggcctatcagctgtattccactgggactgacttgacaaacctaatctacagtttgatacagattgcagtcaggtaattccgacggaactcttctgaagatcatgggtgatagcctaaccg

SEQ ID NO: 248358 - DNA, 462 bp, Homo Sapiens
  misc_feature (47)..(56): n is a, c, g, or t
ctatagaaaggcgggctatactttctggaaggaataacccagtagtnnnnnnnnnngtaagcatcggtatcaatatcgcattcttttaaaaggtaatgcatgcattgtgacctaatcctcttgtatgaggctttggaaaagaaccaggaatggcatagagagaaaaactttcattccaaaattaatctccagacaaaggggatagaaacaaagtaaacaacatctcctgctgctttcagagtgagacggggccaaatagttaccacagatgagcagcttcatggactactgtttaggttcttgtgaatcagtccagtgtaaaaaatcacctattattaatccaactccattctctatagaagagtttcttaaagtagtccacagatgacttactataggatcgcctggaaagcttgttagaaatgcacattcctggtgtctacccaaatcaatggaatacaa

SEQ ID NO: 248359 - DNA, 863 bp, Homo Sapiens
ttggccctcggggccttgtggtgccaaggactagccttcttctctcctgcttatgctgcctcgggaggggtgctgggcctaaacctacagccagagcagccccatgggctctaccttctgccccctggggccccctttatcgagctgctcccagtcaaggaaggcacccaggaggaagctgcctccaccctccttttggccgaggcccagcagggtagggagtatgagctggtgctgacggaccgcgccagcttcaccaggtgccgcctgggtgatgtggtgcgagtggttggtgcctacaatcagtgtccagtcgtcaggttcatctgcaggctggaccagaccctgagtgtgcgaggggaagatattggtgaagacctgttctctgaggccctgggccgggcagtggggcagtgggcgggggccaagctgctggaccatggctgtgtggagagcagcattctggattcctctgcgggctctgctccccactacgaggtgtttgtggcgctgagggggctgaggaatctgtcagaggaaaatcgagacaagctggaccactgccttcaggaagcctctccccgctacaagtccctgcggttctggggcagcgtgggccctgccagagtccacctggtggggcagggagccttccgagcactccgggcagccctcgctgcctgccccttcctcccccttccacccctgcagatgccccgggtccttctggcacagggcacctggcccagtgtctgcaggagagggtggtagtcatgaagtcaagtccatgccgacaacaggcgcaaggtacacgacacatagggaagatcgcagcataacgctcatgagagccgtatgcagga

SEQ ID NO: 248360 - DNA, 1019 bp, Homo Sapiens
tggtaggatttgtcttaagaaccaatttggcatagttgtgaccgaattgaggcaatgcattcctggccgtgaaactagtgcctggtcacctgaggtagactttggggaattaccacgtgcaaagatccaggtttttccaaagggcgatgatttggctcactttcagattatgggttaaagtaaaagtgcattttataagtttcgagcattcaaatgggagtccttttactaagagggaaacttctctagtacaaattccctatttgttttgtgtcaaatttccatatgtaccgaaaccttacacactgttggtaataaagcaatatctagggtttttttcagtttattttctcagaaaatgagaaaggtaaaataaagttttatgacattacctaaatagtttttcctgtttttattaataagtcactgggaatttagaaatatcattaaagctaaacagttgtctggagccaaaaaacctaataaaaattcaaagatctatttgttaatgaggtgaatgctttaaaaatatatctattatcctaataatttgattattaaaatacacaatttccacattaagaaacaaatattaaaagcaaatgtcaaaaaaatttaagtatgaaaagcctaatttaaaagtataaataagtaaacttacaataattacaacagagtttttagctttttctgtaaaaatagttagtggagatgacagtaaaacattcgaggcttaaatatttttacccccctaacatgtcccctaagtataatttctgcttttttctattgtgacatattctcaggttcacacaaatattacgtgcatcacaaattaagtggtttctttaaaatatacaatgcaaacagttacggaaaaaaagatacaaaaaagagaacctagttaggattttttcctcatacaagttaaggtggccttttcttggaaaaggccagcattcacccttaacattttatgcctgtcatacagaatataccctaaactgatttatcaccaa

SEQ ID NO: 248361 - DNA, 1616 bp, Homo Sapiens
  misc_feature (629)..(747): n is a, c, g, or t
ctggtgtgtttctttgctggtgtttgtcctcctctttgtttcacgttgcacttcattcacggggatgattagtctttgtactctcgccggtagtggctgctgctcctacccagttttccgtcgaggcttggcttcctgacgcttcgtgtgctgctatgtcttatagtgtccagtgtttgcccggttgcaatggcctacccgtatctccgtactgttccccgatgaattcttggggcatggccccatctctggtcgtcttggagattgcagccgttgaagggggttcatgcatgccactgtttgctggctctacttcttggcccccaccaaggtgtagagtgaccagtgttgacctggccagaatctgttcaataagcttggaggcaaagggaccttgggcaggaccacccaggctgtcttgttcggagcctctccagccatgcttggatctatgttctgatgtttggtttctcttggtagaatctaactccttatggcagagggaaggcgggacctcaggtggagtgtgaagggcatcgtgtcaacttgaataacgtagcagagaatcttacagagtcgtccctttgaaggcagggttaaacagggtgtaacttggctccttgctggcnnnnnnnnnnnnnnnnnnnnnnnnnnnnnnnnnnnnnnnnnnnnnnnnnnnnnnnnnnnnnnnnnnnnnnnnnnnnnnnnnnnnnnnnnnnnnnnnnnnnnnnnnnnnnnnnnnnnnnncgggaaagtagactcgtctttgcgtccgagtttctggagccgccgctaccccgactcctggggtcgcggcagcggctgcgaggggacagggcgtccgctgtctcctgggttcccctcgtagcgacccgcgggatcggaaaaaaaggagaagatggaggaggagggtggcagcagcggcggcgccgcggggaccagcgcggacggcggcgacggaggagagcagctcctcactgtcaagcacgagctgcggactgctaatttgacaggacatgctgagaaggtgggaatagaaaattttgagctcctgaaggtcctaggaactggagcttatggaaaagtatttctagttcgtaaaataagtggccatgatactggaaagctgtatgccatgaaagttttgaaaaaggcaacaatcgttcaaaaggccaaaaccacagagcatacaaggacagaacgacaagtcctggaacacattaggcagtcgccatttttggtaacattacattatgctttccagacagaaaccaaacttcatctcattttagattatataaatggtggtgaactttttactcatctttctcaaagagagcgtttcacagagcatgaggtgcagatttatgttggagagattgtgcttgccctcgaacatctccacaagttggggattatatatcgtgatattaagcttgagaatattctacttgattctaatggccatgtggtgctgacagattttggtctgagtaaggagtttgtggctgatgaaactgaaagagcatattccttttgtggaactattgaatacatggcaccagatattgtcagagggggagattcacgacatgacaatgcagttgactggtgga

SEQ ID NO: 248362 - DNA, 959 bp, Homo Sapiens
catcgctgtaattttagaaatgttttagaactcactagctaaatgcatatttcagtccacaccctagagagaagaatagggagctacatgtttttgtttagtcttgtttgtttcctcaagatgccatccctaggagtcaggagctacaagttttataggtaggcatttgtatgaatatgccttgccatgattctaagaccctagaacatctagaatacaggacattacatttttatttgaaaaaaatatttaaattaattttacatgtacaatataatatcactttcagaaccaaaaaacattaatgaaagtagaatatactaaaaccaaattatttttacttcttgagtcaaattctacaccctggaaaaagtcagaagcccatactagagttttgtagaagtttttttaaaaatgcttttaaaatttagcaaggctgcaaagtctgtcaataaataaatcaaattactatctgtcagtaagctatgaagtccacagtaagtaccaatgcaaactgaacagatttagaaagtcaatccatactttctagcatcatcatgaaaactccatgactgaccgacacatcatttccaatgttatcatcaaggcctcagtgtgtaccccaggacacactttcaaattctcaggcagttccttaagaatgtgtgggagtttctgcaatgtctttatatttccagcataaagatccagtaaccagtcagtatgaacactggtggtttctttatgacttttacaagccataagcagttcatttagatgagttaaccctttggaagctaaaatgaactctgaagataaatcaaaaattgaacaaaaatttagcaacatcctactaagtaaaaaggagccaaattcaagttgctggtaatgaaaatgtttctctgcttgtgcatgaaagttctccacccaacttttttgtacaaaggggcttttttaag

SEQ ID NO: 248363 - DNA, 1250 bp, Homo Sapiens
cggacgcgtgggctctggcagcctgggcaggaggcggcggggggccgcggagccgctggccatcgattctccccgccatgtgacgccgtccttagccctgcgacccccagcgcgtcccgggcctgcgcctccgccccgccgcgcagcgcacgatgcttctgccgggacgcgcacgccaaccgccgacgccccagcccgtgcagcatcccggcctccgccggcaggtagagccgccggggcagctcctgcgcctcttctactgcactgtcctggtctgctccaaagagatctcagcgctcaccgacttctctggttacctaaccaaactcctgcaaaaccacaccacctatgcctgtgatggggactatttgaatctacagtgccctcggcattctacgataagtgtccaatcggcattttatgggcaagattaccaaatgtgtagttcccagaagcctgcctcccagagggaagacagcttaacctgtgtggcagccaccaccttccagaaggtgctggacgaatgccagaaccagcgggcctgccacctcctggtcaatagccgtgtttttggacctgacctttgtccaggaagcagtaaatacctcctggtctcctttaaatgccaacctaatgaattacaaaacaaaaccgtgtgtgaagaccaggagctgaaactgcactgccatgaatccaagttcctcaacatctactctgcgacctacggcaggaggacccaggacagggacatctgctcctccaaggcagagcggctcccccctttcgattgcttgtcttactcagctttgcaagtcctatcccgaaggtgctatgggaagcagagatgcaaaatcatcgtcaacaatcaccattttggaagcccctgtttgccaggcgtgaaaaaatacctcactgtgacctacgcatgtgttcccaagaacatactcacagcgattgatccagccattgctaatctaaaaccttctttgaagcagaaagatggtgaatatggtataaacttcgacccaagcggatcgaaggttctgaggaaagatggaattcttgttagcaactctctggcagcctttgcttacattagagcccacccggagagagctgccctgctgttcgtgtccagtgtctgcatcggcctggccctcacactgtgcgccctgggtcatcagagagtcctgtgcaaaggacttccgcgacttgcagctggggagggagcagctggtgccaggaagtga

SEQ ID NO: 248364 - DNA, 1086 bp, Homo Sapiens
  misc_feature (720)..(1009): n is a, c, g, or t
ttggcccagtggcagcggcgggagctgctggccacagtgaagatgctgcagcggcgtgccaacactgccatccgtaagctgcaaatgggacaggctgcaaagaaaactcaggagctgctggagcggcactcgaaggggcctctgattgtggacacagtctctgctgagtctctctcagtgctggtgaaggtggtacggcagctgtgtgagcaggcccccagcacgtctgtgctcctactcagcccccagcccatggggaaggtgctgtgtgcctgtcaggtggcccagggtgccatgcccaccttcacagcagaggcctgggcactggcagtgtgcagccacatggggggcaaggcgtggggctcgcgagtggtggcccaaggcaccggaagcactactgacctggaagctgccctcagtatagcccaaacctatgccctcagccagctctgacccaggtccgcccagtgtacccacatggactaaaggcaatgccaggagccctgaaggagccagcagaaccttcccacatgctgaagcgaggactagaggctggaggccaagcagctgagccaaagaagatcacctgggccagggcctacatgacacaaggagacatgggctagggaaggcagaactgggcccaaagacacacacccccttggtgaaagagaagacatggacaattatggctgtgactgcacattagaaattatttcnnnnnnnnnnnnnnnnnnnnnnnnnnnnnnnnnnnnnnnnnnnnnnnnnnnnnnnnnnnnnnnnnnnnnnnnnnnnnnnnnnnnnnnnnnnnnnnnnnnnnnnnnnnnnnnnnnnnnnnnnnnnnnnnnnnnnnnnnnnnnnnnnnnnnnnnnnnnnnnnnnnnnnnnnnnnnnnnnnnnnnnnnnnnnnnnnnnnnnnnnnnnnnnnnnnnnnnnnnnnnnnnnnnnnnnnnnnnnnnnnnnnnnnnnnnnnnnnnnnnnnnnnnnnnnnnnnnnnnnnnnnnnnnnnnctaaattatttcacagaggatagcaagctccagaaggttctattacctttaacacaagagtagttttgcccctccca

SEQ ID NO: 248365 - DNA, 1169 bp, Homo Sapiens
ttgggtccatgaaaattttaacaatatttttgatcctgaatctaacatatttgaaaaatagttgctccactaggcttccacagtgcaggcttcaaatgggatggctaaattcacctcatggttcttagttttttttgtacttgtggcacattctcttcatatattaccccaccctgtttgtttgggcagttaagatgctggtactgtctggtggcgataaggaaagggaaacagaagtcagtaattcagacaagaataaacaggatgaaatgcatctattcctaggtaagattagcccaccacctccacactgctgctgtctcttcagctcaggctgtttttctctgttttgattgtgtaaagagtagagtgctgatttgtgtgttacagagggtggtctgtacaagtcataaagctcgacatggccttgcttcctgctaggtgttaggacacccatgatggtggagtctcttggcattctgtgtaattagataaggctgtttatagcattggtccatgagaacttccttgtttctatttaaaatgaaaatcattgtataagtaaaacttcttaaatgtagatagaaatagaattttaactgaaattttatgaagccattggccgcagggatgtgtgtcatggaggagggctccatacttttttggtatacttatctcaaacttaattcatttgcatactgctttttctctaagtgccaactgtcctagtatattttctaagtcaacttttactttcactttatcctaagcaggaatatctttggcatcacagactcagtaagcccgtttttttctaatgcacatacaaataaataaaatgcacaacttttaacataaatggctgcctccaatttgggaaatactgttctggccagaggccgttgctctgataatgtcatgtggttagtgcattttaggaagacctcctttccctttggttgactcctgcaggacataagatatcagtgacgttatcctttgttgagccatcctggtttgagtcaggatgagtgtcgagagtttcggggagttgcccctgtgtcctatattattttatcctcttaaattctgatggtctttggctcccactgactccaggtaagttggggtgacgtgcgcatattctatttctagtcggtctggcagaa

SEQ ID NO: 248366 - DNA, 376 bp, Homo Sapiens
cgaccttgactgatagttgattaaattatttcgtgtcatttctgaactcagcttgagatgggaagggaatggaaaggacgccttctctcgggcccttttgcccagcgcccctttacaggtcacagattgcactctccctgctcccaagctggagtttcagagctgtgggggagctcaaaggcattttgtcagggaaagctgatagttggcccctcggagtccacgtgctaacccggcaggcgccggctgactgggctcctccagcgccggacgcgaccagtgggggcctgaagggcggggaaggcagagacgtcaaagtcgaggcctacccttcttaaaggcgcaggctaggagtacccatctccccgcccgcccc

SEQ ID NO: 248367 - DNA, 1688 bp, Homo Sapiens
  misc_feature (209)..(222): n is a, c, g, or t
ctgccaaactcttttatggaatatatctttatattaatgctgttttggtcatttttgtttggggtcactattgagatattgctaagcatctcagtggtaaacgcggctgccagaggaaccaagggatagggtatgtagaccttacagaaggatggatggtaaaggcagtccatcatcagcacaatctgacttacatttcattgagtaannnnnnnnnnnnnnaagattctgtatggcagcactttcagttgcccttgtgtgccggccacagccgcacaagttggcttgtggtttatcccccgctataagtgagagctggagaaacttcaactccataggtctagaggaaacattgttttaggttatttctgtccacccctgtgcgatactatttattgatccaagcagaagagcttggggacactgagtcgaagtggggacatgggattgaagcctgggcactgctgctgcatgagctgtgtgtcctgggtgtgccggcctttctgtgaagggggttggtggcagtgcccacctcactagatgcctctgacccagcctcccctgggggagtgggtggtcacagaccctccctgccagagctcctggaaggttcctgcaggcctgacccatctattcctgtagacctggtttaagatgaagtctcggtgcgatttttgcagagttgggtttatctttcaactatagacccttctggctgttctcagccatatcatgtgactctgaatagttggatgaggaatggaaagaaagcaaggatgagagccggtcatgtggcagtctccgcccagcatcggctgtccgcacagaggcacagggcaggcctcctgtgcactccccacctagcactggcctgtcctgaatccccgccttccctggttggaggccagctgtggcatttgcaccctcttctcacctcacgcatgcacatgctaactttaaagccttggggtctttcctgtaccccctcctcaaccctggtccaccccctctcaggatcttgtcaacgttatttttcctgtcccgtcttcctatcgctggccttcctttcccatcctaaaaacttgccgaggccctatggctccctccctttctttcccaggcagcttcttatctgggctgtctgtaccccttcctttgcaccacccaccatgccccacgtagctgaaagctgcttatcccaattgtcaactctggccttcttcagcctctgtagcaccagacactgcacctcctgaatgtcctctgcttctctgcttcagaggcccaggctcgccagttctctgacctctcccataggactctgctgcagctgtcctcaccagcctccggggaatcccagtaccacagggcagggctgtgggctgggctgaaaaaccatctgcatggtccacaagaaagcctggcactgggtttccccatggattaacaatgtaggtggctgcagtgtcggaagggttccagcagagcagagagggtgtcagtctcatcacggaacccagctggatgggctcctccagccagcgagtcttcagaggaacatagacgaatgccgcacaacggagggaggcccagaggaccagacaacagaggcacccagcgcacggcaagatcccgaccaatgcacaagctcagcctgaaccggggccaaagctcacgaacggaagctg

SEQ ID NO: 248368 - DNA, 859 bp, Homo Sapiens
ttggcattgtttgaagggtccttgtcaaagaacttgtctctaaattctcaagctctgaaagagaatctttactatgaagctggcaaaatgcttgccatttctttagttcacggtggtccttcacctggtttcttttctaaaaccttgtttaactgccttgtttatggaccagaaaatacccagccaattttagatgatgtttcagactttgatgtggcacagattataatcaggataaatactgcaacaactgtagctgacttaaagtcaataataaatgaatgctataactaccttgagttaattggatgtctcagacttataacgacattaagtgataaatatatgttagtaaaagacatacttggctaccatgtaattcagagagtccacacaccctttgaaagttttaagcagggtctgaaaacccttggtgttttggagaaaattcaggcttatccagaagcattttgtagcatcctgtgtcataaacctgagagtctttctgcaaaaatccttagtgagctttttacagtacacacattacctgatgtgaaagctttggggttttggaacagttacttacaggctgttgaacgatggtaaatctaccacaacaatggaagacattcttatttttgcaactggttgcagttccattcctccagctggatttaaacccactccttcaattgagtgtctgcatgtggattttcctgttggaaacaaagtgtactaactggtttagcaattcccatcaccaatacatatacagagtttccagaaacactatggacttcaccattaagaaacactctaagactagaacaggacgaagttctcttacttggccttccct

SEQ ID NO: 248369 - DNA, 912 bp, Homo Sapiens
  misc_feature (17)..(17): n is a, c, g, or t
tccaggagccacggcgntgtcttccttgcgcgtcttttacacgtgtgggggtaggctgctcctcggggctgagccgtggccagggttatggagaggcccgcctctccccagatggcgtcgtcgagccctgactccccatgttcctgcgactgctttgtctccgtgcccccggccttcagccatcccggctgtgatctttgccaagaactcgggaccgaccccgggacgaggtgcaggaggtggtgtttgtccccgcaggcactcacactcctgggagccggctccagtgcacctacattgaagtggaacaggtgtcgaagacgcacgctgtgattctgagccgtccttcttggctatggggggctgagatgggcgccaacgagcatggtgtctgcattggcaacgaggctgtgtggacgaaggagccagttggggagggggaagccctgctgggcatggacctactcaggctggctttggaacggagcagctctgcccaggaggccttgcatgtgatcacagggttactggagcactatgggcaggggggcaactgcctggaggatgctgcgccattctcctaccatagcaccttcctgctggctgaccgcactgaggcgtgggtgctggagacagctgggaggctctgggctgcacagaggatccaggagggggcccgcaacatctccaaccagctgagcattggcacggacatctcggcccaacacccggagctgcggactcatgcccaggccaagggctggtgggatgggcagggtgcctttgactttgctcagatcttctccctgacccagcagcctgtgcgcatggaggctgccaaggcccgcttccaggcagggcgggagctgctgcggcaccggcacgggggcatcacggcagaggtgatgatgg

SEQ ID NO: 248370 - DNA, 194 bp, Homo Sapiens
accagccgcagaggatggcgcctgtgggcacagacaaggaggctcagtgacctcctggacttcagcatgatgttcccgctgcctgtcaccaacgggaagggccggccctgctccctggccggggcgcagttcggaggttcaggcaagagcggtgagcggggcgcctatgcctccttcgggagagacgcaggcgt

SEQ ID NO: 248371 - DNA, 1066 bp, Homo Sapiens
ggggaagtctgagttttcctcagggctcctagctgcaattgggaggctgaggcccgagactggagagacagagctctctcagaactgcacggggctaccctcttggcctcactggtcagtgactcccatttttggggtcaagggtaggttgccctccatgttccagagcagttaggtcctcattggccttaggccctcttccctcactctcccactgtcagacagaggtgaaagggtggtccagggtgttggccccaaaatgactccaactatatgggtctctgggctgcccgtcagagagatgggagccaggtctgtgagcagctccagctccagcccagagagaagggagggagggcaccagaagggggccaggcccaggccctggcacagctcagatgcatggcaaacagtcttcccagcacccggtgggcactggctgctcctgcccaatggtccccactccagccccagaacagtcctcccaagcaccccaatgtctggagctggtctccgcacctctaatctggccccatcaagaacctcctccctctgaaaggtcagagagaggccctaagcatctggttgtgccactcctctcccaactctgaccctagggaatgatatccagacacagtgggggagatgggggttatgatggcagggaggtgggaggatctgggaaaagtaggaaatttcccatcatctcaggcttaggaaagtgcagggacaggtatgaaggcagatgctgagagggcagggaagatgggggataaacagtgggcctggaatgggagtgcacagccagtggaataaacctgatctctaggaagtcctgcctgtagtctaaccttcaattctcttgctgcatcattggcctattccatggcatacctggatctccatgctcttctaagtttagcccaacccttaaagatgatgtagctctgagtcttctctcctgggagcacattgccctcgtgcctgacttggctttactagggatccagggtcagccctatccttctctgagcctcagtctccatttctcaatgtcacaacccaa

SEQ ID NO: 248372 - DNA, 1205 bp, Homo Sapiens
  misc_feature (327)..(376): n is a, c, g, or t
tacaaaaaagttggtaaattcgtagggcaccggatcctagcctgtctctgccatccgctccggataccactacgtctgcctgcggaacgaggccaaccaaccgctgtgcctgccggccctgctcatctacaccgaagcctcggactacattcctgacgaccaccaggactatgcggaggccctgatcaaccccattaagcacgtcagcctgatggaccagagggcccggcagctggccgccctcattggggagagtgaggctcaggctggccaagagacgtgccaggacacccagtctcagcagctggggtctcagccgtcctcaannnnnnnnnnnnnnnnnnnnnnnnnnnnnnnnnnnnnnnnnnnnnnnnnnaccacctcccctgccagcacctccctcagcagcccagggcagcgtgatgatctcatcgccagcatcctctcagaggtggcccccaccccgctggatgagctccgaggtcacaaggctctggtcaagctccggagccggcaagagcgagacctgcgggagctgcgcaagaagcatcagcggaaggcagtcaccctcacccgccgcctgctggatggcctggctcaggcacaggctgagggcaggtgccggctgcggccaggtgccctaggtggggccgctgatgtggaggacacgaaggagggggaggacgaggcaaagcggtatcaggagttccagaacagacaggtgcagagcctgctggagctgcgggaggcccaggtggacgcagaggcccagcggaggctggaacacctgagacaggctctgcagcggctcagggaggtcgtccttgatgcaaacacaactcagttcaagaggctgaaagagatgaacgagagggagaagaaggagctgcagaagatcctggacagaaagcgccataacagcatctcggaggccaagatgagggacaagcataagaaggaggcggaactgacggagattaaccgtcggcacatcactgagtcagtcaactccatccgtcggctggaggaggcccagaagcagcggcatgaccgtcttgtggctgggcagcagcaggtcctgcaacagctggcagaagaggagcccaagctgctgggccagcttggcccaggagttgtcaggagcagcgggcaagggtccccccaggagatccggcggagccttgctgggcgagatgccggagggc

SEQ ID NO: 248373 - DNA, 1124 bp, Homo Sapiens
gaagactcaaagggtttatggcttttactaactgaactctatgctagatgttagggataaatggttaacaggacacagttcttgcttatcttgctatggtctgtcaagccttatacaatctagccttatctctctcaccgtcttatctttatcacccgtagattcccttgttggccactggtttctttcagtccttaattagccttttgtcactacctgtctacacatgctgtttttcccttctcattccatcttgacattgtctattttgagatctcagctcagttgcagagaagctgccttccccatctggcaacccattatatgtgtcatagtaccatgttgtaccatagagctagacacaggtgccatgttgtgtcttgaaatgtattcaccagcttccaaaggtttacctcaatcccctttactcaagaagcctcagttctactgacagttggtaataataacctctctgtcataatgtacccaaaatagagtaagaatatcatgcttttcagtaatactccagtgaatgaggctaagagtaccatttttgttcttataaaagaatttttttggacatgaatacaaagatgtcaggttaccaaatcatttgctagtagatcctaacaatatcacctataggaaactgaacgtagcctttaaacattaagtgatgatcatggatttggccgggcgcggttgcctataatcccaaagtgctggattacaggtgtgagctaccacacccagccgaagtagtttttttctgttaatcttttcccatgctgcaatgaaaacttgaatgagactggcagggttactggtctgtaaatacccaggctgccagctgccataggtaggcagtaaacacaagtgcctcttttcattgcttaggccaaagtttcaggtcttaggcctgtaccatattagaggaaaaactaaaaaataaaggagggtttccaaacacccccaccaaccttgaattttttaaaaaatgaggggaacacaattaataaacactattcctggcacctgtccatggattcacttgctggggttgaaacaaactagtgtcagtgggattttatgttgaaattttggatcatgcctcactcaaattt

SEQ ID NO: 248374 - DNA, 1329 bp, Homo Sapiens
ttggcttccgaccgaatcaccgctcctgagcccggtgcggggctgccgctatcgcctggccgtgggtgccggagcggccgggttgcgactcagcgttcttgggtgggcgcgggcggcgtctccgcggcgggcatcccccgaggccgccctcgggccatgatcgactccgtgaagctgcgccgcgacagcgcggcggacttcttctcccactacgagtacctgtgcgcgctgcagaactccgtgccgctgcccgccgtgcgcgcctgtctccgggagggcgtgctggatttcaacgccgaccgcctccgcggggtggactgggcgcctctgctgagcaccctcaagatcaataaagacctgcccttggtctccatcaagagcttcttccagccctggctgggggacacaggttctgacatgaataaattttgcagaagtcgtgttcctgcgataagatacaaagatgtgaccttccagttgtgtaaagctcttaaaggctgtttaagtatatcaagtgtgctaaagaacctggagctaaatggactaattctgagagagagggatttaactattctagcaaagggattgaataaatcggcttctttggtgcacctgtctcttgcaaattgtccaattggagatggaggtttagaaattatttgtcaaggtataaagagctctatcactcttaagacagtcaacttcacaggatgtaatctgacatggcagggagcagatcacatggccaagatcttaaagtatcagaccatgagaaggcatgaagaaacctgggctgagagtcttcgctataggagacctgatcttgactgtatggctggcttaagacgtatcacactgaattgcaacacacttattggtgacctaggtgcatgtgcttttgcagactctctcagtgaggatttatggctgagagctcttgacctgcaacagtgcggcctcaccaatgaaggagcaaaggctttgctagaggcccttgaaaccaatacaactctggtcgttctggatataagaaaaaatccactcattgatcattctatgatgaaagcagttatcaaaaaagtcctccagaatggaaggagtgccaaatcagagtaccagtggataacttctccatcagtgaaggaaccatccaaaactgctaaacagaaaaggagaactataattctaggaagtggtcacaaaggaaaagctactattagaattggattggctacaaagaaacctgtaagtagtggcagaaaacactcccttggtaaagaatattatgcgcccgcacctcttccacctggtgtgtctggtttcttgccc

SEQ ID NO: 248375 - DNA, 1093 bp, Homo Sapiens
ttggctcagagcggtgttggcccggggccttcagtggcctttgtgtctgggtgagaggaaccctggatggccactctgccctgagtgtgtgggtccccagaagtgctgggttagggggcacggagggccagaaagtcccctttggagcgctggactctctcgctgactcctaccccaccccggcctggggtttcagagaaggggtccaggcaggagtgtcatcttttctcaatggggatgtggcttcagtctctgtccaggaggcacgcggacctccagtggccggctccggaggcttggtgactccagtggcccagccttgaaaagatcttttgaggtcgaggaggtcgagacacccaactccaccccaccccggagggtccagactcccctactccgagccactgtggccagctccacccagaaattccaggacctgggcgtgaagaactcagaaccctcggcccgccatgtggactccctaagccaacgctcccccaaggcgtccctgcggagggtggagctctcgggccccaaggcggccgagccggtgtcccggcgcactgagctgtccattgacatctcgtccaagcaggtggagaacgccggggccatcggcccgtcccggttcgggctcaagagggccgaggtgttgggccacaagacgccagaaccggcccctcggaggacggagatcaccatcgtcaaaccccaggagtcagcccaccggaggatggagccccctgcctccaaggtccccgaggtgcccactgcccctgccaccgacgcagcccccaagagggtggagatccagatgcccaagcctgctgaggcgcccaccgcccccagcccagcccagaccttggagaattcagagcctgcccctgtgtctcagctgcagagcagtgctggagcccaagccccagccccctgtggctgaggctacaccccggagccaggaggccactgaggcggctcccagctgcgttggcgacatggccgacaacccccagagatgccgggctcaagcaggcgcctgcatcacggaacgagaaggccccggtggacttcggctacgtggggattgactcca

SEQ ID NO: 248376 - DNA, 951 bp, Homo Sapiens
gtcaagtttctttaatggctgaacagaaagaagcttcaagtaatggagaaggcattgtctgagtgcagctgctttcctggacgcctgtgccgttcctgtcttccaaatcctatgcttggaggcccctggaggtacatttttgccaggaaccaacttgaccttaaaaagatgagtgtgacacagccggctgggcaggaggatggaggtgccacaggacaccacctgcccacgccctggccagcctggccatgctgccgagtgcggggaggccaccccacccagagggcacagggcaaaccctaagcacgggggtattgcccttgaagccccaggggatgccctgtgccggatcctcatgcctcattgactagcctgcctgctgaaggagcccaggggcctgagcctgcaacactgcaaggggtgagaagggcatgctgctgtgggcgcactggactcaaacctcacattagaagctacaaagaaccccaaatgcgcttcagagccccaccaacccccaagccaggctcatccctgacacagtgaatccactgcagcccccgtgggaaactctgtgccaattgactgcttaaagaactgggggaaatagaaagccgagaaagagctccgatacacaagggaaaccgcacgtgagaaccagcactcccagcagggagacgtcactctccagaggccacagagatggcagacacctctgtctccacaatgacccacatccaactgaaagtgtgcaggaagacaggtctattgacactgaaatctagaaatcaaggtccacaggcgaatggaggcatcttcagccctgaggaggccaggctgtgtctcctgacgcccctgagggtgggcacagcagccagctctgtgtgggcggagtccacgtggtcctcattctcttccctggggacagggcagcacagtcagatgctgagccaa

SEQ ID NO: 248377 - DNA, 702 bp, Homo Sapiens
ttggcggagtaaggcgtgccgctgcaaactggcctctgggccgggggcgagcagcccccgggaggccgagtgcatctgttggaccgtgcgaggagaagaaaaaaaatatcggccagaggagaggaactaaccgaacattcttcctccctaccttatagaggggagtggtcatctacactaaagcaaagtgttaggcgcgtccgtgcgaagagaccaccaaacaggctttgtgttccttatcacaggaagaaaattttccttgacctttaggtgcttttatattcatctcaaaaacaaaattctgaactcaggacttggcaagtgtctctatgttgtctcctagagtgggtagtcctgcttcttttacccagttactttccctgtttttgaaatgtggctatcacttctctacactttacctccatgatttggaatggaaaagggcacttttctttttgttctgcctctcaaattcaacacagattgagctcctaggattccagttatcctgctaacatctccaggaagaaagaagcaactcacatgggtcttttgctgtttgcttaattataaagacatcattttgcaagcagaaggctgagtttcatttgaaacaggtgcttaggtggtggtatttgtgaatacttttcattccaagcaagaagactaaagaagtagcaagtatgaatgacttcagggttt

SEQ ID NO: 248378 - DNA, 1213 bp, Homo Sapiens
gtccctcagtggctgaacacccccaccgtgttaaaacctaacttcgaaaatagaattcgatatttctttttgtaagccatctcttgattttgctatcaccacagaaaaatttgtagagatttgacccccgatacatcaagtactgcagaggcaccaagaccttttctgcttctaaaactgcatttgtggatgtcaccagtctcttaggctgaaactgaaactgcccatgctacaaaccttggcgaagtatggagacacctgtgaggacctttttactttttgaaaaatggcaagccaaggacttaacagctgccaactaaaccacgaatccttcacttcacgaaataaaattagatgatcatcttaaaaacattaccacaatgtgcaagctgaatatgaagagaaagcctaactcaggaatatcttccagcccagtttgcatttccatataaactgaacctgcaccccctccctccttcaaatgtttgcctttcaatattttgttaggcaggcaagagtcaagagtcatgccaactctagtaatgtggcctgtgttcaaacacctaccacagtgtggcaaagggaaaacagcatgggctaagagtggcctggattcaaatcacagtccttttatttactttctatgtgcccttgagttgtttactttagccccctgggccataatttctttctctgtaaaatgagaatacttgcatgaatatgaaacactgagcagttaataaatacgtgcttaataaatgttaggttctttgttatccctgccagttcatcactttcagttcatccattgccagattctttaacttgctggccaaggtatgttgataatttcttatagctgccactcttttattatcaccctctttccatagcctgtgcaaaatgactgcccatccattaagcatagggcaagccagtctcattccatgatagcatgcctcgccacagaagctttttgcactttaagtcagagtgccaaaggcaggcgttgaaattcattctttggcattcttaaggtatagaccagagcaaaggcagagatagtcagccactgctccctggcctccaggcagactgatggtccccagctctccaagataggcccttgatctgtgtcccaggcaacacacagcaatctcatgacatttatgggacatattttttattgggatcacagcagctttctagccaa

SEQ ID NO: 248379 - DNA, 844 bp, Homo Sapiens
tggcctgactcgtcgcagccgccggccgcgtccctggccaggcggagcgagcctcactcccgcagccgccagtctggttccagggctcccgcaggtttcgggggccgaggcggaccgacaggcgccagccaatcgcgagcacggagccggcctgggggcggggtggtacccgctccgccaatcgggtgggggcggagccagacgccgggggcggacgggaggaccggaggaccgaggacagaaagattggtggacaggagcagcggccggtggggagggcgctcggcggcggcctgcggccatggccaccgtgatggcagcgacggcggcggagcgggcggtgctggaggaggagttccgctggctgctgcacgacgaggtgcacgctgtgttgaagcagctgcaggacatcctcaaggaggcctctctgcgcttcactctgccgggctccggcactgaggggcccgccaagcaagagaacttcatcctaggcagctgtggcacagaccaggtgaagggtgtgctgactctgcagggggatgccctcagccaggcggatgtgaacctgaagatgccccggaacaaccagctgctgcacttctccttccgggaggacaagcagtggaatctgcagcagatccaggatgccagaaaccatgtgagccaagccatttacctgcttaccagccgggaccagagctaccagttcaagacgggcgctgaggtcctcaagctgatggacgcagtgatgctgcagctgaccagagcccgaaaccggctcaccacccccggcagcctcaccctccccgagatcgccgcagcggcctcacgcggatgttcgccc

SEQ ID NO: 248380 - DNA, 1146 bp, Homo Sapiens
ttggctcatctccctacttgtaacaggctgaaagaagtcctagctgtaaaatatgttctgtaacataagagaatgatattttgcatcaattcttaggtgtgtcgtttggactggtgatgagcgggtcttcttttataatcccaccactcgtctttctatgtgggaccgacctgatgatctgattggcagggcagatgttgacaaaattattcaggagccccctcataaaaaaggaatggaggaattgaagaaactaaggcacccaactccgacaatgctgtcgatccaaaagtggcaattctctatgagtgcaattaaagaggaacaagaattaatggaagaaattaatgaagatgagcctgttaaagcaaaaaaaacggaagagagacgataataaagacattgactcagagaaagaagctgccatggaagctgaaattaaagctgcccgagaaagggccattgtccctctggaggctcgaatgaagcagttcaaggacatgctgctagagagaggggtgtctgctttttcaacgtgggagaaggagttgcacaagatagtttttgatccccggtacttacttctcaatcctaaagagagaaaacaggtgtttgatcagtatgtaaagaccagggcagaggaagaacgcagggaacacgaaaaataaaataatgcaagccaaggaagatttcaaaaaaatgatggaagaagcaaaatttaatccaagagcaacttttagtgaatttgcagccaagcatgctaaagattcaagattcaaagcaattgaaaagatgaaagaccgagaagccttgtttaatgagtttgtggccgctgctaggaagaaagagaaagaagattcgaagaccagaggtgagaagattaaatcggatttctttgaactattatctaatcatcacttggacagtcagtctcgatggagcaaagtaaaagacaaagtagcaaagtgatccacgttacaaagcagtagatagttcatcaatgagagaagaccttttcaaacagtacattgacccaaatagccaagaatttagactcagaaaacagaaaaggagcttgaaaggcaagcccgcattgaggcaagccttcgagaacgagaaacgggaggtccaaaggccgttcagaac

SEQ ID NO: 248381 - DNA, 1098 bp, Homo Sapiens
ctattaaaagacaactttgtacaaaaaagttgggtcagtccaaaacctttccgtcgtcggcacaactcctggtcatctagtagcaggcacccaaatcaggcaactcccaagaaaagtggtttaaagaatggccagatgaagaataaagatgacgagtgcttcggggatgatattgaggagatcccagacacagattttgattttgaagggaacctggctctttttgacaaggcagctgtgtttgaggagattgatacctatgaaaggagaagtggtacccgttcccggggcatcccaaatgaaaggcccactcggtaccgccatgatgagaacatcttggagtccgagcccattgtctatcgacggatcatagtgccccacaacgtgagcaaggagttctgcacggactctggcctggttgtcccaagtatttcctatgagctgcataaaaagctgttgtccgtggctgagaagcatgggctgacccttgagcggagactggagatgacaggtgtgtgtgccagtcagatggcactgaccctcctcggaggacctaacaggttgaatcccaaaaatgttcaccagaggcctacagtggctctactgtgtggacctcatgtgaagggggctcatggtatcatctgtgtaaggcacctagctaaccatgaatgtccaggtcatccttttcctgcccaattttgtcaagatgttggaatctatcaccaatgagctgtcgctcttcagcaagacccaaggccaacaagtgtctagcctcaaagatctgcccactagccctgtggacctggtcatcaactgcctggattgccctgagaacgtcttcctgcgcgatcaaccctggtacaaggcagctgtggcctgggccaaccagaaccgggcaccagtactcagcatagaccctcctgtgcatgaagtcgaacagggcattgatgccaaatggtcactggcactgggcctgcctctgccactgggggagcacgcaggccgtatctatttgtgcgacattggcattccccagcaggtcttccaggaggttgggccatcaactacactcgcctttggctgcagttgtatcccact

SEQ ID NO: 248382 - DNA, 1536 bp, Homo Sapiens
  misc_feature (1326)..(1452): n is a, c, g, or t
ttggagatgttttacttctggtctaaggttaagaaggacatctatttaaagtccaaagtgagccactgtgcctggacgacctgagcattttcttagtccatgtttatttatgttacccacgtttcttaatcccttgactcctgttctggctttgttgcctcctttctcctcagtccttcaacaggtcccttgatgacatggggctggctctggttttccaggtgtcccctcgtcccagccacctcccacagagctgcatggccaacctggttctgggcacagggaccacctgacaggcagtgggcagcagccggggcagcaggaagacctggggacagctggagttccggggtcccctgggcagccttgggggctaatgacctgccctggtgggcagcgcagggaaccacgtgcacacatgcgtccgtggaagctgcaggttcccagagctggctgtagagggtgggcagctcctggtgtgctcttaggcaggccaggtgcagaaggtgccatgctctccctaaccatccagccctcctccccagcttcatcacgtttcgctcctgtgcctacctggacaagaagcataccatctttggacgggttgttgggggctttgacgtactgacagccatggagaatgtggagagtgaccccaaaactgaccgccctaaggaggagatccgcattgatgccactacagtgttcgtggacccctatgaggaggccgatgcccagattgcgcaggagcggaagacacagctcaaggtagccccggagaccaaagtgaagagcagccagccccaggcagggagccaggcccccagaccttccgccagggcgtgggcaagtacatcaacccagcagccacgaatgcgagcagcagaggaagagccctcaaccagtgccactgtccccatgtccaagaagaagcccagtcggggttttggggacttcagctcctggtagcagtaggttggccgctgtggaccttggtggggttgcagggctgggggcccatgtccacatctccatttccagcctttctagcctgccctctgctgccagccaataaattgcttgcctgctgcctgcatcccctttcctggcccctgggagcccacagccttcccatcccttaacctgttgccaagggccttggccctgtttccaggacctggcccagccagagcccactgctgggaccttcaagcacaaggcctgccctacacccaggctggtgcctcaggcctctcctctagtaggcaggccaggttagtgaggaaggactgtgtctccagattgtggtttcctctttaagacagnnnnnnnnnnnnnnnnnnnnnnnnnnnnnnnnnnnnnnnnnnnnnnnnnnnnnnnnnnnnnnnnnnnnnnnnnnnnnnnnnnnnnnnnnnnnnnnnnnnnnnnnnnnnnnnnnnnnnnnnnnnnnnnattacttccagcctgtatatgtctgaggttcttaaccccttacttctggcacatcctcctcaggggacagcctatttttccacg

SEQ ID NO: 248383 - DNA, 808 bp, Homo Sapiens
taggcatctgtgaccccaaatggcatgaataaaagagcaggttgtaagagccaggggaggggcatggggcagggagaccaggttggcccagacaggacagaggtgctccagggacagggtgctggagtgaaagccaggtggagcggtggagctgtggagcctttgaaacatcctgagggcccaggcctgccacagggtgacctgggcagaggagaagcccagaggacagcaaggtgcccaaatgaggtcagggcttctggggtggagggacgggggggcacagtggcggcgggggaaggaacgttgagtcccaggtgagcctgcctttccaggccaagcccttggagtgagggtgctcctgcctggggggcgagaagtggaagtggctcacagtccaaggtgacaaatgaacccatcaccggtcagctaccatccctgtgaaggagccagggtggaaggccctgtccatgtcctccctccctccctaagccctgaggaaggtaacagccccacctgtgaggccccagcctggaagcagagtaggagagccgggcttcttagaggtgggcagtgggtggtggtgggcagtactggtaagtatgcttgggtggctgggacttgccctggaactggggctgaaattcaaacggggaggcccaggcctttgttcccaagaccctgtgaatgctccctgttcccccaaaaacagaggggctctgcaaggacaggcttcatgggatttctctttcagagtgggcctgcagtgaaagaccagctcagccccttctgaccatgtgaccccagaaac

SEQ ID NO: 248384 - DNA, 1114 bp, Homo Sapiens
ttgggtccctgcggtgggtgtgtttcggcctggcctgggcaggcgcttgtgctgccagggcgccgggcccggggaggccggggtctcgggtggccgccggcccaggcgctggacggcagcaggatggggaaggcgaaggtccccgcctccaagcgcgccccgagcagccccgtggctaagccgggtcctgtcaagacgctcactcggaagaaaaacaagaagaaaaaaaggttttggaaaagcaaggcgcgggaagtaagcaagaagccagcaagcggccccggtgctgtggtgcgacctccaaaggcaccagaagacttttctcaaaactggaaggcgctgcaagagtggctgctgaaacaaaaatctcaggccccagaaaagcctcttgtcatctctcaggatgggttccaaaaagaagcccaaaattatccagcaaaacaaaaaagagacctcgcctcaagtgaagggagaggagatgccggcaggaaaagaccaggaggccagcaggggctctgttccttcaggttccaagatggacaggagggcgccagtacctcgcaccaaggccagtggaacagagcacaataagaaaggaaccaaggaaaggacaaatggtgatattgttccagaacgaggggacatcgagcataagaagcggaaagctaaggaggcagccccagccccacccaccgaggaagacatctggtttgacgacgtggacccagcggatatcgaagctgccataggtccagaggcggccaagatagcgaggaaacagtttgggtcagagcgagggcagcgtcagcctcagcctcgtgaaagagcaggccttcggcggcctgacaagagccttagccttggactgtgagatggtgggcgtgggccctaagggggaggagagcatggccgcccgtgtgtccatcgtgaaccagtatgggaagtgcgtttatgacaagtacgtcgaaagccaactgagcccgtagacggactataggacagccggtcagtgggattcggcctgagaacctccaagcagggagaaagagcttgaagttgttccagaagggaagtggcagagaatgttgaaggggcagaattactaatgggggcc

SEQ ID NO: 248385 - DNA, 820 bp, Homo Sapiens
ttggcaacaactttatggctcccggaagtgcctcctccccgtccccttcctttccagcctcacgcccgtgggctgcagttggaacgatggcggcggcagctgccgccgggcctagcccggggtctggacctggggactccccagaagggcccgagggggaggctccggagcgtcggcggaaggcgcacgggatgctgaagctttactacggcctctcggaaggggaggcggcgggacgccccgcggggcccgaccccctggacccgactgatctgaacggggcgcacttcgacccggaagtttacctagacatttttgcttagagagtgccctctggcccatttgatggacagtgagacggacatggtgcggcagatccgggctctagacagcgacatgcagaccctggtctatgagaactacaacaagttcatctcagccacagacaccatccggaagatgaagaacgatttccggaagatggaggatgagatggaccggctggccaccaacatggcagtgatcaccgacttcagcgctcgcatcagcgccacgctgcaggaccgccacgagcgcatcaccaagctggcaggggtccacgcgctgctgcggaagctgcagttcctctttgagctgccctcgcgcctcaccaagtgcgtggaactgggcgcctatgggcaggcggtgcgctaccagggccgcgcgcaggccgtgctgcagcagtaccaacacctgccctcgttccgcgccatccaggacgactgccaggtcatcacggcccgcctggcccagcagctgcggcagcgctttagggaggggc

SEQ ID NO: 248386 - DNA, 1044 bp, Homo Sapiens
  misc_feature (120)..(171): n is a, c, g, or t
tttgtacaaaaaagttgggtgactattgcattgatgtcagtattggcaaagaattcagaatagttcctggcatacagcactgtggaagcattagctagtattattatttcttatattgcnnnnnnnnnnnnnnnnnnnnnnnnnnnnnnnnnnnnnnnnnnnnnnnnnnnnactttatatcattaaaatattagaggctgcccagccagttcctgagacatctactacaaaagaattgttcatggtttgattttgttttttacatgatttggatgatacaggaagagggactgggagttgtttgttcccctgcaggtagcccggcttcagtagaaggagaggaagccggccctgaggtctgggttatcatccccattcttatagcactttgttctgtttgcccaggcccattgctagaagactgggacataatcagccccaaagatgtcattggctccgacgtgttgctggctgagaaacggtcatcactgacgactggcgccctggcctttacacagtccactggtcgctcaggtgggccgtaccttgtctaaggtccaatcaagtgctgagctggtcgtatgggagaagatgtcaagcccttcaagccacccctgagcgatgctgagtttcacacgtacctgaagcacgagggccagctctcctctgacccgaggagttgcgcctgcggatctatcatggcggtgtggagccctcgctggcgaacaggtggtgtggcgggtaccgtgctgaacgtgtatccagatggactgacaggccgagagcggatggactaacatgaaacgcgaagagcacgcgagtatgagcagctcaagagcgagtgggcccaggcgagcagaaccctgaggacctggaagttcatccgagaggcacggtcctcaagggatgtactggcgcagctgaccggagcgccacacctactatgcggggctgaggattggccacatctacggggcgctgcaagaacctgtctcaccaactatgccgttaaccaccacaggatgtcatactgacaggacatga

SEQ ID NO: 248387 - DNA, 661 bp, Homo Sapiens
ttggcgctgaggatgggagcgacgaggaggacccagactccatggaagccccaacccggatccgggacactccgtgaagacatcgtgctggaagctccggctagtgggctggcgttccatccggcccgtgacctactggctgcaggggacgtggacggggacgtgttcgtcgttttcctactcttgccaagagggagaaaccaaggagctctggtcatcaggtcaccatctcaaggcctgccgagctgtggccttctctgaagatgggcagaagctcattactgtctccaaggacaaagccatccatgttctagatgtggagcagggaccaactggaaagacgtgtttccaaggctcatggtgcccccatcaatagtcttctgctggtggatgagaatgttctggccacatggggatgacacaggtggtatccgatctctgggaccagcggaaggagggccccttaatggatatgaaggcaacatgaagagtacatcgcagacatggctctggatccagccaaaaaggctgctgctgacagcacagcggggatggctgccgtgagcatctgcgaacataagagggcgtcgagaagagctgcactcagaacctcagctggggacctgacctcagtcactcatcactgaaatgggggaacgac

SEQ ID NO: 248388 - DNA, 1545 bp, Homo Sapiens
  misc_feature (380)..(437): n is a, c, g, or t
ttgggtgctggtgtctttcactggcagcatgaagttagccaccaagtcctcacaagccgtgctgcttagttgctcggtggttatggataaactttgcccagcatgatttttgggttcatcttatcggttcccctggtgggcagatacacagtgttctgcattccacatgtaagtgaattgcaaaaacaaaacaaaactcactctcttgtaggtttatttatgtgtgtgtgaatgtgtattttaattatgtgtatttaactctttaaaatctcttagattttaatttatcctgtaaatttctgtatatataatttaataacagaagcctccaccagcaacagcatgtggaagatacagatttgtcatttctcccttccgcnnnnnnnnnnnnnnnnnnnnnnnnnnnnnnnnnnnnnnnnnnnnnnnnnnnnnnnnnnggtctgttccaaaaactctgaatcatctacattttaaggtattttacctcaaaaatgaatcattgtgttaggattctaattctttataaagaacttcatgggcttcaataatgtctagaaagtaaaataaagaggaatgttaccatccccagctgcccttatttccagagaaccagacgtttgtttcccagttggaaagaagacagttgagcacttcaggatggtttttaaatttggtatgagattctctgccaacaccaagctctgagttaactgtgctttcttctcctggccctgacagagcactacagcatcaaagtaaatctttggggacagtgtagcccatctgcatcctatttaatttcttcccttctccccaccagtgttgtcacagggctatgttgcttaaaggtagtctggctgctgaatccctttctcagctcagagcagttttaagatttaattgggaatacagagaaacaggattgtttgagaaccaaaatcaagaggaacagaaatcttaacttgatttcatgtgttagaacattgtaccatgcctcattctgtatctgtggaagtttcctgttttgacacagggtatctaggaggggcggggaagacatggatagtataggaagacattaatcctagcattgtcatttattatacatttaagtgaattcttgatgaggacctgcttacagttgtgttttcctttgaaacccagcccgtatagctattcggtatttaaaagtggtgtacacagttatgtataatacatctgtaccattgtggctaatcttggataacatattagcacggaagaacacgtattggcacttcaggaaccttctttgccagataattataatatccatctgatacatgagttactaggtggtattctaagactaagacttcctacgggtggggctgcttgcaagtccccaaataagtaccccaagtgtcaacgaggcgtgtggttcttaacaaggaacagattaaaagagttgcgttaggtgaccgtctcattagttcaagtttgaatagaagagttcgacgagttggtgggtaacagtagaaagaacacagggaaggaacacaagag

SEQ ID NO: 248389 - DNA, 367 bp, Homo Sapiens
  misc_feature (256)..(256): n is a, c, g, or t
  misc_feature (292)..(292): n is a, c, g, or t
  misc_feature (297)..(297): n is a, c, g, or t
tcctgtaaataaaacactttatttgtagagctgggcctcaccggcctcgccttgggcaccctccagcctctggcagggcctgaccctgaccccatcctgggctctgctcatgccagggcagaccctgctcctcaggtgccccctactaccctgggggcgcgctcaggctaccatgcctgggcggagccgcggggctggctccctttaacagaggacgggggctggcgctgggccttccagagccgcctaaggacangtccttggagcccggctcatgaaatgggggcctcanggaancttgggtgtttgggttaaatttgtgccttgggttcctgttgcgtttaaggcacccagggttcccaagcgg

SEQ ID NO: 248390 - DNA, 799 bp, Homo Sapiens
ctgtgacccatggataggactgtcccaacctctacggcttgattctgggctaaaaatatttttagggctcgctgtacccatgttcagttccttctggaacaaattgcaacttcaaccctctagatccagaatggggtttacgaagtgagaggccttccagagtgcacccctcatcgcagctagggaatgatcaggaatttaggtgcacaagaagcctgcagagagccatggagccagaatgtcaagccagcaagggctgggtggaagtcagcagccttgggctccgccaggaactccatgggactgtggaggatccaccttttttctaggctcagttctctcatccatacaatttggaggctgaattagttgttctgctgtccagggccccctttcactctaaaaccccatgactgggtgagatgtcttctcccacttctggtttcctcctgaccctgcccaatactctcggctccccaggcaaggctcatgttcagctggtcaggaatgctgcacaaccaacagtgacagagcagccctgatgcacagagctctgtgaggggcacaaaaatagacgtgacctgtgcctctcccaaatggaaattaacaaggtgaactaacatggagaagtaacacaggaaaaggctctaacgcagacgtgatgacaagcggaaccagccacaggggaaggccagctccccgcgacaagggtgccgtgttcaagaggacaaggaccacggcctggctgtgcccaccttcacgttcctcaggaatgtgcttctcttctggcaacttcctc

SEQ ID NO: 248391 - DNA, 1006 bp, Homo Sapiens
ttggccacacacagttcctggaccaccttctgacaggcatcgaagacatctgtggccactacggtcaccaccactggaaggacaagctcaaccggtttaataagaaatatgtgaagaagtgtctgatagctggcgagcgctccaaggagccccagctcattgccttctaccacaagatggagatgaagcaggccatcgagctggtggagagcgggggcatgggcaagatcccctctgccgtctccaccgtctccatgcagaacatccaccccaagtccctgccttccgagcgcatcctgccagcactgtccaaggacaaggaggaggagatccgcaaaatcctgaggaacaacttgcagaagaccaggcagcggctgcggtcctacaacagacacacgctggtggcagacccctacgaggaagcctggaaccagatgctgctccggaggcagaaggcccggcagctggagcagaagatcaacaactacctgacggtgccagcccacaagctggactcacccaccatgtctcgggcccgcatcggctcagacccactggcctatgagccgaaggaggacctgcctgtcatcaccatcgacccggcttccccgcagtcacccgagtctgtggacctggtgaatgaggagctgaagggcaaagtcttagggttgagccgggatcctgcaaaggtggctgaggaggacgaggacgacgatgggggcatcatgatgcggagcaaggagacttcgtccccaggaaccgacgatgtcttcacccccgcgcccagtgacagccccagctcccagaggatacagcgctgcctcagtgacccaggcccacaccctgagcctggggagggagaaccgtgcttccccaaggggcagtgagcgccagggtccgccggcagcgtcctgtgccctcacagactcttccgccagagccgggcgctgctgggggctccccttgcccttctgacccggatcgccctgccctgcgcccacccgcc

SEQ ID NO: 248392 - DNA, 946 bp, Homo Sapiens
ttggatcccagtgaatgccaccaccattcaccctggttcccaaactggtaacatagaaataatcttgacatatcttcctatcactttgtcatcaagtcctgtcatttttaccttgtaaacatctcttaaatgtgtctacttctcaccacaccctaatctaagctaccatcagcaccttttgcctgcatgactgcagttgtctcctaactgttcttcctgcagcgactctggccctccctgtattcactcgactgcaagcagaattctcctttttgttcgaagttcaattttaatcaagacaacccacctacctgcacttgcacccctagcttaaaatgctcgaatggctttttattgtccttaatgatgaaaaggaaatattttatgtgaccaaatatatttgacctatgaggtcagatatattagggccactatctaaagcatagttccaagcattaaaatagttactgtctcagattaaaacagtggctggcacatcacctcaatagaggttacctattcttgttgccacttagcctcatatgtaccatgttttacttaataccttcattgtcctttaagtattcggaatgagaattacagtgcttcattcagcataagacttttgttcatgctgtttctttggcctgaaatatctatcccttcccaattgcctaattaattcctatttgtctttcagatcttagctagttcatcactttcctcagggaaacattccctaatttctgtcacagagtaagacccgttgttatacgtctcaccctgaccatgtacctctacttagcatttaaacacgtgtaattttgtatgtattggttcgacttaatgtcagaaccactaagactgtaacactccatgaaggaccggaatttggcttcttgtcattgttcatctgctccagctttgccatttcctatgccctcat

SEQ ID NO: 248393 - DNA, 1478 bp, Homo Sapiens
ttggcctgcatccttcacaaagaactacaagcctgttgtacagaccacaggcaatgccaggattgtccaggagcttcctcagttgctggatgcccgctccgccccactcattgcagaccaggcagtgctgcagctcctcccaaagacctacattctgacgtgtgagcatgatgtcctcagagacgatggcatcatgtatgccaagcgtttggagagtgccggtgtggaggtgaccctggatcactttgaggatggctttcacggatgtatgattttcactagctggcccaccaacttctcagtgggaatccggactaggaatagttacatcaagtggctagatcaaaacctgtaaaggagcaaaacttccagaagcctcgagcccctcttgacctcctacacctgctttggaaagacatgcactttttagttgactaattcttcctcccattcccctctacttgcgagttatggaatttctattccataactgaagtctttatgataacctaatttttaaaaatgaatttgactaacttaagtgcaaaacatgtaaatttggttcccagagtgggccaatctctctgttcttgttatcttagccaactatactcatacctacagctacagaaagcaggactaggaactggaaataactttgggtcctgccttcattaggacgttctttttagaagcagttcttccagctctggatcatagagtgacctttaataagttaaaaaaacgaggactccttaattctgctagagttaaccttgagttcagagcagtattaaatgcgtgcactttcaggtcagtactggggaccaagtaccctctggtcttttgtgaatggatggttttgtttcctatgggaattttggcaaaggttttctggaaagaacaagtttctcaaaggactttcttcctctagaatgttcatttcatgagatcgctatctgtaagtccagttggattacaggaatacttgaaagttactttctaccactattagaaaatatgaagtcgcatgcactggatatctatatatcattaggtttccagctcgtgtccccggttatgctgtcccccttctccttggggagatatctgggagcaaacttatttagatttagagtacaacttctcattatagagcaagtacaaaacagacaaactgaaacaagcctagctgtttcacactacagaagatacttctgacactaaagtaccaagagcagcgctgacatattgcttggccattagtccaacaacacagacaaataccattcaccatactcacgttcaacaattcgttcaaccaactacctcttacgcaaggtctacgtcctaacttattcgcaccaatcccaactctctcgccatctctatactggccttctacaattggcgcatattttggcctacacatactactgtatcgcttcacccgtgcaagcttactcaccctgctcact

SEQ ID NO: 248394 - DNA, 750 bp, Homo Sapiens
cactttgcaagtctcccttagccctgtgctggggggtgccaacaccaccacctcttagtctgatgatgtagtaggagattcacagactcagcctgtagtcatactcatggctatgttttactacagcgaaaggctaggaagcaaaatcagcaaaggaaaaaagcgcatggacaaagttccagggaaaccaggtgtaagcctcccacagtcctctcccagcagagtcacataggacacaattcctccagcaatcagttgtgacaacccatgtgcaatgttgtatacaagggaagctcattacagactcagtgttcagggttctcattgggagctgctcacctcatcctctgcctaacacatatgaaaatctgactcccagaaggaaagcagatgttgggcataacccacattgtttgtacgaacagtttaggcacagtgagccactcttatcatttagggagtaatgagaaccctcctgaaatccaagctttcagatgccagccaagggccagccttgcaaacaggcctgctttctcatctcttttcacacagtccatctcgttattgaggcttctttacagcaaaattattattagtaggaccacatgcaaaagggtgagaccaacctcaaatatggacctcagttcttcctggtaggggtcctggacttaaccagctaaaataaatcccattaaccataaagtctatcttaggaagccaggtggcttcctccttaattcctttttgttg

SEQ ID NO: 248395 - DNA, 1073 bp, Homo Sapiens
ttggcaaggtgtttaatgagattcggaacgagcacttctccaatgtctttggcttcttgagccagaaggcccggaacttgcaggcccagtatgatcgccggagaggcatggacattaagcagatgaagaatttcgtgtcccaggagctcaagggcctgaaacaggagcaccgcctgctgagtctccatattggggcctgtgaatccatcatgaagaagaaaaccaagcaggatttccaggagctaatcaagactgagcatgcactgctagaggggttcaacatccgggagagcaccagctacattgaggaacacatagaccggcaggtgtcgcctatagaaagcctgcgcctcatgtgccttttgtccatcactgagaatggtttgatccccaaggattaccgatctctgaaaacacagtatctgcagagctatggccctgagcacctgctaaccttctccaatctgcgaagagctgggctcctaacggagcaggcccccggggacaccctcacagccgtggagagtaaagtgagcaagctggtgaccgacaaggctgcaggaaagattactgatgccttcagttctctggccaagaggagcaattttcgtgccatcagcaaaaagctgaatttgatcccacgtgtggacggcgagtatgatctgaaagtgccccgagacatggcttacgtcttcggtggtgcttatgtgcccctgagctgccgaatcattgagcaggtgctagagcggcgaagctggcagggccttgatgaggtggtacggctgctcaactgcagtgactttgcattcacagatatgactaaggaagacaaggcttccagtgagtccctgcgcctcatcttggtggtgttcttgggtggttgtacattctctgagatctcagccctccggttcctgggcagagagaaaggctacaggttcattttcctgacgacagcagtcacaaacagcgctcgccttatggaggccatgagtgaggtgaaagcctgatgttttcccggccagtgttgacatcttcctgaacacattcctcagtgagatgcaggcatctgg

SEQ ID NO: 248396 - DNA, 1099 bp, Homo Sapiens
ttgggtttctgctccctcaaccgagttgtcgtgttgccctcgcttctcagatccccgccggaagtgaagagagcaagcagatttgaacctatctgctttcaagctggtcatcatgatgaaacttagacacaaaaataaaaagccaggtgaaggttccaagggccacaagaagataagttggccctaccctcagcctgcaaagcaaaatgggaagaaagcaacctccaaagtgccctctgcacctcattttgttcaccccaatgatcatgccaatcgagaggctgaattaaagaagaagtgggttgaggagatgagggagaagcagcaagccgcccgggagcaagaaagacaaaaacgcaggaccattgagagctactgtcaggatgtcctaagacgccaggaggagtttgagcataaggtggtggaatactctgatgtgattctggaagtcctggatgccagagacccattaggctgccgctgcttccaaatggaggaggctgtcctgcgagcacaaggcaacaagaagctggtcctggtcttgaacaagattgacctggtccccaaggaggttgtggagaaatggctggattaccttcgggaatgagttagccgaaccagtggctttcaaggccagtagccagcatcaggtcgaaaacctgaatcgttgcagtgtgccagtagatcaggcctctgagtcactgctgaatagcaaagcctgctttggagctgaaaacctcatgagggttctggggaactattgccgccttggtgaagtgcgcacccacattcgtgtgggtgttgtgggtcttcccaatgttgggaagagcagcctgatcaatagcctgaagcgcagccgcgcatgcagcgtgggagctgttcctggaattaccaaattcatgcaggaggtctacctggacaagttcatccggctcttggatgctccaggcattgtcccagggcccaactcagaggtgggcaccatcctgcgtaactgctgtcacgtgcaagaagctggctagaccctgtgacaccagtggaagacatccttgcagcgctgaacctggaggagataccaactattatggagtctctggga

SEQ ID NO: 248397 - DNA, 958 bp, Homo Sapiens
ttggtccactcaggttcagtgattgccgccgggatctctcagggaaggtcaacgtcactgaaacgagatttcaagatcttcgagtacttccgcagagacacagagaagcgggacttcgtctccgcaggggctgcggccggagtgtcagcggcgtttggagcccccgtgggtggggtcctgttcagcttggaggagggtgcgtccttctggaaccagttcctgacctggaggatcttctttgcttccatgatctccacgttcaccctgaattttgttctgagcatttaccacgggaacatgtgggacctgtccagcccaggcctcatcaacttcggaaggtttgactcggagaaaatggcctacacgatccacgagatcccggtcttcatcgccatgggcgtggtgggcggtgtgcttggagctgtgttcaatgccttgaactactggctgaccatgtttcgaatcaggtacatccaccggccctgcctgcaggtgattgaggccgtgctggtggccgccgtcacggccacagttgccttcgtgctgatctactcgtcgcgggattgccagcccctgcaggggggctccatgtcctacccgctgcagctcttttgtgcagatggcgagtacaactccatggctgcggccttcttcaacaccccggagaagagcgtggtgagcctcttccacgacccgccaggctcctacaaccccctgaccctcggcctgttcacgctggtctacttcttcctggcctgctgggacctacgggctcacggtgtctgccggggtcttcatcccgtccctgctcatcggggcttgcctgggggccggctctttgggatctccctgtccctacctcacgggggcggcgatctgggcggaccccggcaaatacgccctgatgggagctgctgtccagctgggcgggattgtgcggattgacactgagcctgaa

SEQ ID NO: 248398 - DNA, 1000 bp, Homo Sapiens
  misc_feature (425)..(475): n is a, c, g, or t
ttggcaagaggaggcactgctatcctcctcctgacaggactggagcagcgggctggaggcttgacgcccaccaggcacttggctccacaggctgatcctaggccttccatgagtttggcagtggttgtaggcactgagccttctgccccaccagctcctcccagtcctgcctttgaccctgatcgttttctcaacagcccccagaggggccagacatatggaggggggcagggagtaagcccagacttccccgaggcagaggccgctcataccccctgttctgccctagagcctgctgctgccctggagccccaggcagctgctcggggtcccccaccacagtcagtagcaggtgggagaagaggaaactgcttcttcatccaagatgatgacagtggggaggagctcaagggtcacggggctgnnnnnnnnnnnnnnnnnnnnnnnnnnnnnnnnnnnnnnnnnnnnnnnnnnntggagccgtcaagcagggtaggaagaggagaggccttgtttggaggacctgttggggccagtgaactggagcccttcagtctttcatcattcccagaccttatgggagaactcatcagtgacgaagctccaagcatccctgctccgaccccccagctgtctcctgctcttagcaccatcacagacttctccccagagtggtcctacccagagggtggggtcaaggtgctcatcacaggtccttggaccgaagccgccgagcattactcctgtgtctttgatcacatcgcagtgccagcctcacttgtccagcctggtgtcttacgctgctactgtcccgcccatgaggtaggggctggtgtctttgcaggtggcagggcgggaggggcccctttctgcttctgtgctctttgagtatcgagcccgccgattcctgtctctgcctagtactcaacttgactggctgtcactggacgacaactagttccggatgtccatactagagcgaccggagcgtccacttagg

SEQ ID NO: 248399 - DNA, 1078 bp, Homo Sapiens
agaaaatccccattagcaataccagggtgaaacagctgttacaaattcacggaaacatataaagataaccatcactgtaagaggaaagggaagaggaaaaaccaagggaaggaaactttccacagtgactagcagaatgtctggtagataccaataaccgaagacaaacagggttgctcacttcatcgtatttatcaagtcatcctatcttaaatgagaatagttcatgcctaggataggctaactataggctttgctagtcctccttcctaatagaatgccctcagattattcctgagctatcactcaagtcacagatacttcagaatataatcttaggttttgtaaacaggaacatggtcaaaatgcaatacaatggaaaatctctacaagagaatgagatttggaaagccatgcttagagtctctgagccacacaaccataagatcttcgagtacgtttaatctctcatccaggaacattatccatttaccttgtaaggttgtgagaaatgaatagcataatatgcaagaagctatcacatgatgggtattctacaaaggacaattttctcatctgtaaaatgggaataatacccatttcccaggagtgtttttaggattaaatagaaatatttgaaaagcacatggttcggcacagtaagtgctcaataatattgacagcattcagtataaagagaaacaaccacagaagagatcctaaagcaattcattcaacagatgcaaaaattaaagggccttttctgatttaccataattaaatattttagagaactaccaactgttgttattgtagttatatatgtatttacctaattttttttaaacaaaaccccaactcaatatgcaccttaattctcccccttaaatgtcttaacttcaaaaggaaatggagaagggaggtagagggcaaaaaagtctatagcctctacatattcttttaaaaatacatagaacctctgtccataagaacccctatgttaatgagtgtataacggtatacaacaaaatactttttgtaattaaatctagtcactttgaccggacgcgtgggtcga

SEQ ID NO: 248400 - DNA, 984 bp, Homo Sapiens
  misc_feature (298)..(309): n is a, c, g, or t
cctgttacacagaagggtagtccttaatgcttgcttttaaccgtgaacaaatgtattggagctcattccatgacgatttataaaagaagttttgtgatggttaataatgagtgtcaacctggaattgggattgaaggatacaaagtattgatcctgggtgtgtctgtgagggtgttgagtcagtgggctgctattccttgaaaatggcaagtgagtcatggcagtactcgggaaaagtacatactacatggaaatgactgcactccagccttggaaacagagcgagatctcatcttgnnnnnnnnnnnnggtattacaatggggaaaaattggtttttaagaaaaggaccatcgattgttttccattattccatgtaaagactattttacatggagttcattgatttgttaactttagaattcaaattccttatggagtttattgtaaataaagagcaagtttttgcttgatttccttctgttatccctaatacatagactcactttcagagtgtgcttggtaaaacctggaagcttgaagatgagccttaggcatcactggcagtgcaggtgggtgacaacacaacagtaggaaggcttccagatactaaccaccagagtagcttggcttttctgctttacataacaggcttctaagtaagatttcatttcatgaaaagggtctgctaatccaattcttttgttttacaactgagttttgaattttctaccttgaatatttgaaatgaggactttgaatgtcatcagggctaacagtaccacctatcaaagttctgaaactgcatttctcagattgacaaaacaaacaaaagcccaaattgttgccttggggcttattaatctcagacaggggatttgttacaccttttcttttccattgtctttgtgcccagtagtgtcaaaacacataattggtgctcaagtttactgtatgaatctgacagaccggttctcatgacccaa

SEQ ID NO: 248401 - DNA, 1085 bp, Homo Sapiens
ttggccccgagttcggagcctaggagccccccgcggctgcggcgcaggtgccctcggcctgagtcgggatggagctggctgctgtgaacctgaaggtgattctcctaggtcactggctgctgacaacctggggctgcattgtattctcaggctcctatgcctgggccaacttcaccatcctggccttgggcgtgtgggctgtggctcagcgggactccatcgacgccataagcatgtttctgggtggcttgctggccaccatcttcctggacatcgtgcacatcagcatcttctacccgcgggtcagcctcacggacacgggccgctttggcgtgggcatggccatcctcagcttgctgctcaagccgctctcctgctgcttcgtctaccacatgtaccgggagcgcgggggtgagctcctggtccacactggtttccttgggtcttctcaggaccgtagtgcctaccagacgattgactcagcagaggcgcccgcagatccctttgcagtcccagagggcaggagtcaagatgcccgagggtactgaagccagccacgctgcgcccggccctgccccgggccttcctcgtgcctgggaggtcgttctagggatgctcctgacctccgtctcttggacctaagatggaatgtgtccccagctcagggattgcctgaaccaagaggccaggagcccccatgggccgcccagtaccatgcacactcctgtcccgaactccctgaggcctcccctcccttcaggtcaccccactggttcccaggctggaaccagggtctctctttacctcctaccccatgtttggcaccacagagggcctcagccgagtcctgcctgaggttgttgcaagctcaggccttaaggacttgctgatgcccctcagggctcccccagtttgctggctttggtggaagccctgagaagctcagggtcctgttcagccgaggagcagtctgtcttgggagtgggcccgtcctctccatgtctgtgccctggtgcctagggttgcgggcgtgggccgaggttgtcgccccctgtgccccaacctccagcctccttttagagagc

SEQ ID NO: 248402 - DNA, 1436 bp, Homo Sapiens
  misc_feature (971)..(1011): n is a, c, g, or t
ttggcgtttcccccttttctgtcttgttttcaaagcctttaccactagcggctctttatccacgtcggtcgccacacctgccccaccccagctccctagccagcacaggagctgccggagatgaagccctgagacacccccaaccctcacccccttgcagcccttccctccactgttccggctggcctgatgcctggggagttcctgagttacacctccctacccccggtctagtgggctgtggcagtgctcccttctcagtggctcagctgagaacaaatgatgccctccaatgcacaggcaggctgggttaggccctgtggatccacagtggggacctagaggcaagtcagtttggtggggaaaagccagagttctaggtcatctattccctgcctggtttattttcaagccaaaactgagcagtctagctttctatgggatggagaagccaggtatccagcattggagactgatggagaatgagaggaagaaagagaggaggaccttgcagctgtggaaggctccttggagcctcctttgtgggagggtatcagttctggttctgccagagcctcagccctggtagcagaacctcagggctgcccctctccccaaactcctcccagcaaggctgaccctttgagctcactccttaaacagtattaaccctgccacactcatgggcattggcaccttggttcccctgccccactttgtcctgtgacaggtccattgctggcagtggacaggtgaaatactcactccagcctacttccggctctgactctcactcctcaaggggaagggtccgttagaaagtggcccaccccatggtacatggtctcttcttgaccacactaggactcttaggtagaagattagccttcccctttttatggatcattacaaagtgacggtatcacctgtggagagaatgtcctcttccctgctggctgccctgcccatannnnnnnnnnnnnnnnnnnnnnnnnnnnnnnnnnnnnnnnnccacagttgtgtcctaggtctggagaaaagcttgcagactctgcctttggcaggattttctgcagttagccccgtccagagcagaacgaagggtatttcctagcctatttcctgggcaggctcctcaaatccagggatgaactactttctgcagtggccagccctccttgtgattttattgtggccccaattccagggctttgggggttacagagaatcaggcttccggtgggagtagatggttttccatctataggtggagaaaattccaggaggagaatagtgtctggcattccccgttctctctgggcaattgtttccttggttctctctccaactccatgtagtcttagtctcccaggaccccttcaggccttccatgtgggcccctagagcacactacccaccttcacacttgcattcca

SEQ ID NO: 248403 - DNA, 1397 bp, Homo Sapiens
ggagtttcttgcagctggagatgctgtggatgtaactcaggattataatgagactgactggtcccaagaattcatctctgaagttacagaccccttgtctgtgtcccctgcccgctgggctgaggaatatttggagcaatcagaggagaagctgtggctgggagaacctgagggaacagccaccgatcgctggtatgatgaatatcatcctgaggaggatctgcagcacacggccagtgactttgtggccaaagtggatgaccccaaattggctaattctgagggtacatcagatgcctgggttgaccagttcacaagaccagtaaacacatctgcccttgatatggagtttgaacgagccaagtcagctatagagtctgatgtcgatttctgggacaagttgcaggcagagttggaggagatggcaaaacgggatgctgaggcccaaccctggctttctgactatgatgaccttacgtcagctacctatgataaggggtaccagtttgaggaggagaaccccttgcgtgatcaccctcagccttttgaagaagggctgcggcgccttcaggagggggacctgccaaatgctgtgctgctttttgaggcagctgtgcagcaggatcctaagcacatggaagcttggcagtatctgggtaccacccaggcagagaatgaacaagaactattagccatcagtgcattgcggaggtgtctggagctaaagccagataaccagacagcactgatggcgctggctgtgagcttcaccaacgagtccctgcagcgacaggcctgtgaaaccctacgagactggctgcggtacacaccagcctatgcccatctggtgacacctgctgaagaaggggctggtggggcaggactgggccccagcaagcgtatcctgggatctctcttgtctgactccctgtttcttgaagtgaaagagctcttcctggcagctgtgcggctggaccctacctccattgaccctgatgtgcagtgtggcttgggagtccttttcaacctgagtggggagtatgacaaggccgtggactgcttcacagctgccctcagcgttcgtcccaatgactatttgctgtggaataagctaggcgccaccctggccaatggaaaccagagtgaagaagcagtagctgcgtaccgccgggccctcgagctccagcctggctatatccggtcccgctataacctgggcatcagctgcatcaaccctcggggctcaccgggaggctgtggagcactttctggaggccctgaacatgcagaggaaaagccggggcccccggggtgaaggaggtgccatgtctggagaacatctggagcaccctgcgtttgggcattgtctatgttaggccagagcgatgcctatgggg

SEQ ID NO: 248404 - DNA, 1038 bp, Homo Sapiens
  misc_feature (393)..(539): n is a, c, g, or t
  misc_feature (601)..(601): n is a, c, g, or t
  misc_feature (871)..(871): n is a, c, g, or t
  misc_feature (927)..(927): n is a, c, g, or t
  misc_feature (1017)..(1017): n is a, c, g, or t
  misc_feature (1024)..(1024): n is a, c, g, or t
tgtgttgtttctgcggtggtggctgtggcgtgcgttgcgggccgctattgctgctccccctcctggtaggtgtgcaccgtggtttggacccagcgctgtcaggcgcgtgatcgaattcttttcttcttgtccctggcgggctctgtgtatttcttggtcgtggggttggtcggtctcgttagtctgtgcgcactcccgactagtagggtgtgcctgtgcgtgccctggtatgccgacgcgctcgctcgctcgttcgctctcttcccctggcccccttttgtgactccgccggtcggcgcgtgtctttgttcagccgtccgccctatgggtgccgtctgtccagcatgcggcgcgtgctgcggtgttgtgccctcctccgcacgatattgtgannnnnnnnnnnnnnnnnnnnnnnnnnnnnnnnnnnnnnnnnnnnnnnnnnnnnnnnnnnnnnnnnnnnnnnnnnnnnnnnnnnnnnnnnnnnnnnnnnnnnnnnnnnnnnnnnnnnnnnnnnnnnnnnnnnnnnnnnnnnnnnnnnnatttaaaaataaactttattaaagcagttaaacttagcattaaataacactctttaaatggnacacctatgaagcaagagttaaatataaacccagtctaatcctgtacacttgtgattaattgtgacaatcttaagttgctcacttctttcccatttaccaattcagagaaagcccgtttcctgttttctcctcaccactttgccttggcatcacaccaaccctgcctcgggcttcagctgcagatcctccccagcccctcctcccagctgggctgactccagtcccagccccagtctccaccaactgaggcagcgtacgcaggggttgtngtctgggcttccagcattttaccacccctttcagaggcaactttccaacatggggncagggagagggaaggctcgcattggttggggttgaacaggtttaaggggggtttatcacaagggcccgaaaatttcccaaggaaagtttnctccttngcaaagtgaggggg

SEQ ID NO: 248405 - DNA, 1670 bp, Homo Sapiens
ttggctaagctttagttttctcgttcataaaaaactgagttcaagtatgtgatcttcaaagacacgttattccagaatttttaaagcctacaagtttgaggtaaattaggtttcagaattagaaagtagcatttgatttttgcacttcaagatactagttttttgttacatgggtgtttcttttaaaatgtttccaatcttatgttctgcttttatggttaattttcctttctaacttatcagtacttcctcgcgtattgctaaaggaggagttgaccacaccaaaatgagtctacatggtgctagtgggggacatgagagatcaagagatagacgaaggtcaagtgacagatcacgagattcatctcatgaaagaacagagtctcagctcactccttgtattagaaatgtgacttctccaacacgacagcaccatgttgaacgagaaaaagatcacagttcctctcgtccaagcagtccgcgtcctcaaaaagcatccccaaatggttccattagcagtgctgggaacagcagcagaaacagtagtcagtcaagttcagatggtagctgtaagacagctggggagatggtgtttgtatatgaaaacgcaaaagaaggagctcggaatataagaacgtcagaacgagtgacactaatagtggataacactagatttgttgtagacccatccatttttactgcacagccaaatacaatgttgggcaggatgtttggatctggccgagaacataactttacacgacccaatgagaaaggagagtatgaggtggcagagggaattggttctactgtgtttcgagcgattctggattactataaaacaggaataatccgttgtcctgatggcatatctattcctgaactgagagaagcatgtgactatcttgtatctcttttgaatatagcactattaaatgtagagatctcagtgccctaatgcatgagttatcaaatgatggtgctcgtagacaatttgaattttatctggaagaaatgatcctccctctcatggtagctagtgcccagagtggggaacgggaatgtcatatagtggtgcttacagatgatgatgtggttgattgggatgaagaatatccaccacagatgggagaagaatattcacaaattatttatagcacaaaattatatagatttttcaagtatattgaaaacagagatgtggccaagtcagttttgaaggagaggggtcttaagaagattagattgggaatagaaggttatcctacctacaaagaaaaagtaaagaaaaggcctggaggccgcccagaagtgatctacaactatgtccaaagaccctttattcgaatgtcctgggagaaggaagaaggaaagagtcggcatgtagactttcagtgtgtaaagagtaaatctatcaccaatcttgcagcagctgcagcagacattccccagggaccagctggtagtcatgcatccaactccacaagtggatgagctgggatattctccctatccatcccccttcgtggcaacagttgactcgatcctgatgcacagaatccaaatgctggtgatgctgatcttccttgaaaccatagcatgctactcttcacagtgacgttgtattctcctcatttggactggaaggccactcttctacattgtgaaga

SEQ ID NO: 248406 - DNA, 675 bp, Homo Sapiens
  misc_feature (444)..(444): n is a, c, g, or t
  misc_feature (656)..(656): n is a, c, g, or t
ttggcaccttcagtgacttcaacgcaggagccatcaagaataaggcccagtcggtgcgagaagtgtttgcccggcagctgatgcaggtgcgcggagtgagtggggagaaggcagcagccctggtggatcgatacagcacccctgccagcctcctggccgcctatgatgcctgtgccacccccaaggaacaagagacactgctgagcaccattaagtgtgggcgtctacagaggaatctggggcctgctctgagcaggaccttatcccagctctactgcagctacggccccttgacctgagcttatgccgtgaaacagcccccagcccccgtctgtcccccaacccaggctagccagccttttaacaacatcttttggggtagcaattagaagtctaagtgtttgcagccatatgtgtcatgtagaagatgcctagccctggggngccttgtgaaatacgcaggaaccagggataccatctggtccagtggtttttaaacaaagctgcttagcacctggaattccctggtcagggagatggagtcagtggggcattgcagcttggaatctattttatgtcgccagttggtcctcatcaaataaaatttccttaggagtgcagagggctcgttgggaaaatgagaataataaggatgnataaaacgtcctaaaagaa

SEQ ID NO: 248407 - DNA, 891 bp, Homo Sapiens
tttgtacaaaaaagttgggagacgtttgaccttcctccgtttccgtagttccgagttgcggtttctccgttagtgcttccgggttgcagccagggaagcctccgcggtggtgcaagtggaacccaagccttgaggtttcagtgagtagggggccgacgtgagctttagcgtccccctttagcctccctcttcgattccttgaagaccctggtgcagcttagcaagagggcccaggatttttggatccccagccctgtgacaagggttcctgtccagtttccccctcccaggatttcgactcagttcagcgaagtcaccgccccgtctgagaaatgatgacaccaaggcttagagcacagccccgaggcgccgtctaccaggccccgtcccctcccccggctcctgtcggtcagcactgaaaccccgtccctgctccaggcctccttctctggggtccaaggtcccatacaggcctctgcctcggccgcaggcccttcagtcaccgtcgcctcgtctccctgactgtccgcaggcctgggcagcatggccgtattccggctcgggctctcctggtgctgacgacgccgctggcctccctagcccctcgcctggcctccatcctgacctcggcggcccggctggtgaatcacacactctatgttcacctgcagccgggcatgagcctggagggcccggctcagccccagtacagccccgtgcaggccacgtttgaggttcttgatttcatcacgcacctctatgctggcgccgacgtccacaggcacttggacgtcagaatcctactgaccaatatccgaacaaagagcacctttctctctcctctgcccacctcagtccagaatctcgcccacccgccagaagtcgtgttga

SEQ ID NO: 248408 - DNA, 1060 bp, Homo Sapiens
ttggcttgctaccaacttcttggttacttgcaaaaggggaaaagtgctcgctctgtgttcaagatcatgtatggtagtgatatttttgaggttgtactgacctcattgttcagagctagtagtaggttccttattgagatggatgatcccgcttggctggaattcctccaagtgatagggacgttcttagaggagctaatgcagatgctcatccaaatgaagctgagcttggtgctcaattttagaaaaatcaccgcattcctctctagttccaaaccatacacggaggcagcttcaagcaaacaattagaaaatcagaacccccagggcaggcagctccttctggtgtctttaaccaggttgtgccatgtcctgggacctttcctcaaagagcagaagctgggccaagaggccccagcagcactgtctgagctgctgcagcaggttgtgctgcagacaggagctgtgctgcagctctgctcagtgccgggggcccggggctggcgccttccctcggtcctcatctcatccgtcagcacgctcttggaagccggacctgggtcagcactgcagggatggaggggccgacatttcccaaggaagcgacaggacgctgctctcccatgttgccctctaccagggtgtttactctcagatactgttggagttgccagctctcgcgggacatgatcagtcttttcaggcagccttgcagtttttgactctgttctttttggccccagaactgcatcccaaaaaggactccgtgtttacctccatgtttcattctgtgagaagagttcttgcagatcctgaaattcctgttcaggtcactcaggatattgagcctcatttgggagccttgttcacccaaatgttagaggttgggacgacagaggacttgaggctggtgatgcagtgtattctccagggactggatgtcagtaacatgtggaaagcagatgtgcaggctgtgtgtccgctgttacactgctgaggctgctactgaactgcccactcagtggagagaaagcaagtctgtcctggcgtgcgtgtcccc

SEQ ID NO: 248409 - DNA, 630 bp, Homo Sapiens
  misc_feature (331)..(339): n is a, c, g, or t
  misc_feature (520)..(544): n is a, c, g, or t
tatttttaataataaaattaatgtttctagtaaggaaaagacagtatgtcattcctttagcagtacaaacaatcttttatccaaaagaatacattgggttttattgtgtcatttgtctgaatacagacacagtggaatatctaaatgataccctgctctgaactccaagttgaaagtaagtttttattatacttgagggaaacaatgggttcagctgcttattgcaaggagcaattgccaagggagagttaaactcaattactgtaaccatactgaataaaaaatactgccaagaacaaaaatacgcctgggtaaagacagccactgaatnnnnnnnnntcgacataaagcgtatcaaatatttatttatctgggcaacaaaggactatgatacattgacaggcatggaaactactgccagcacaactcaatacaatgcaactagaactgcttccaatatggccagtgaaaatacagaataccaggtggtcccaaatgtttgaagttctttgaacagaannnnnnnnnnnnnnnnnnnnnnnnngaaaattccctaacccttggtttaaagacaatattcatttattgctctttaatgggtgcttttaagccaacttttttgtacaaagt

SEQ ID NO: 248410 - DNA, 1231 bp, Homo Sapiens
  misc_feature (183)..(191): n is a, c, g, or t
ccaatgcaaaacattttaataggttgtcaaatatacagttattagaattatgtaaatatcacttataaaaattggtatatcacattagatgattctataaaataaaaacacaaatcacacattgacaataacccctgcagtccaagtatacccccacaatagtacaaattacaaacacatttnnnnnnnnnccctaaagacatttatacatttaaaccaaagtaactgtgactaaatacattcattcatcaagtacaataaatttagcattgctgcttatagtcactaataacacaattttaggtgcaatttcacatgctttcataaatcttccagtacagttcccatagtaaagtgtctttgtgcacgccattttcatttatatgcaggtgcatcatacatcatacttaaaactatttcactttacaaactgttaaattatatttaagtggacagtaggtaaaaaatttaaactttgatgacaaaatctaaaattaaagaaaagtcttaaaagcctatagtgacttgtttacttgcataaataatattttcacttagtacaggctattaatataagtaatgagaatttaagtattaactcaaaaaaagatagaggctccaaacttttctaagaaattaatgcattttcaaagtaataatataatcaatctgtaagtcaaaagtaatttcatattcattgccaaatttaaaataccagtgatgttaagattgaggcctataactgttgtactaaattgtaaaattacagtaaagaagatgcagctcatttgcttgggaatatgtaatggaatggtttttcacagtaatgtttatgttaaacattactttaaatggacagtctaagtaaatgtacctttgccagcaaggaaagtgaaaaattaaggctttttttatgctatctgtaactatagccccacgtaatagaggttacatactgtaaatattacttctaacttcaactattgttagatgcttcatttcaaccccacacttattatcttatttagatgcctattgtttctatatctgctattttaattaagtccccaatcccagccccatccaaagagaatgctgaaaatggttagggccttatccgtttggttcacagttgtatactgggggctaaaaatgctttatacatggcataaatccaaggaatatttttgcgacccacgcgtccgcgacgcgtgggtcgacccacgcgtcc

SEQ ID NO: 248411 - DNA, 997 bp, Homo Sapiens
  misc_feature (654)..(662): n is a, c, g, or t
agttttttgggctcagttctttatttttatagttagcaaatgaaatttagaaactgctttggcacaggtcaaaggtggctcccatatactcactagttttcctcaggattatcaatactcattatcaaaatgtacttttgcttggttaccatttaaagttgccaccaatgtaaatgacaggggttagggtgggtatgggtgtggggaacttgagcatacacacaattttttaaatcttttagatgtaatgcaattaaccatatctaatattcttttagaaaacacaagaaacacaaaacatgctcaaagatcaagaaatcgagttatacttttcataaggcaccaccaattaccctgataaattgtaaataaatatgtaagggaataatcaatagggagtcttgaggttttacaagacattcctgtttagaccacttggagtactgcaaaagaaaaaacaaacaagatacagctttcataacccatcatatccttgcccagtgcacatcatttgttgcatagtggtgactggatatgatccaggccaagacaagaccaaaattcaaaaaatacattaacagccattcttcctcatactacagtaggagataccacttgggacattcatatccaaagaagtaatggtatgacttnnnnnnnnnggaggaatttcaaaaggagtacttaaggacctgctataaaagcaaccttctacacacatatggagctaattcacatgtgaagctttattaaatctggttatatgtgggacttcaacagctcaatttttccacaatttccacttttcaaatcccatgccaaactgtcactttttcccttaaaaagtggataaacccatcttttgaaagacaggtcttctcagtttttctgttcatcctcctactgtaagtactggctgatattcacacacatgtactacagaattaaaatactgacaagcaagtagtttcttggcgtgcaggaattgcatccccaa

SEQ ID NO: 248412 - DNA, 1045 bp, Homo Sapiens
  misc_feature (196)..(236): n is a, c, g, or t
  misc_feature (851)..(988): n is a, c, g, or t
ttggatttacacccccatgacctgaagttttgttaggctgtgaccacatgaattcgcagtataaatgggtgagtcctttttgaaaacctcatcttcagtgtgcctgatctgtaaaactagagcctcaggtttgatcctaggtaggcttcccacaacgtggggaaaattagtttgtgagggaaagctgtttctgagnnnnnnnnnnnnnnnnnnnnnnnnnnnnnnnnnnnnnnnnncccgtgattttgggcaagttattttaggtccactttggactgcttcatctcttaaatgaagacagcaaccaccttcaggagtgtgaaggtgacaacacttaaaactgtgcctggcacattgtatttgctattgtcttaatgttctggaataatggtttccataacttgggaagaaaactttgagaacaggattggttacatcaagtgtatagtgaaaagataaagatctgttatttaaacttgcagtttaaagtcattagaatcattcttttccgtaaggctttctttgcaagagatctgcattaaataaagttgctaggaaataactaaaattggggaaataatctaataatagcaagatgttaagcatactattattgtattttgggggttggtaataacattcacatggatttatcaatacacactgagaagcaaagcctctcaagctgtcccatatcctccatttcaaaggcacacatacattttaggtaactcataatttagaaaggttatttaatcttttccacatgtaaatatttgaatatgtacaaagacttgatttgactcttgtctgtttagtatgtatgtttgtttgagacagaggctccgtcnnnnnnnnnnnnnnnnnnnnnnnnnnnnnnnnnnnnnnnnnnnnnnnnnnnnnnnnnnnnnnnnnnnnnnnnnnnnnnnnnnnnnnnnnnnnnnnnnnnnnnnnnnnnnnnnnnnnnnnnnnnnnnnnnnnnnnnnnnaagggtttatgtatttttagtagagagagggtttcaccgtgttagccaggggtggtc

SEQ ID NO: 248413 - DNA, 702 bp, Homo Sapiens
  misc_feature (463)..(463): n is a, c, g, or t
ccctacagtaaattgaattaaatttttatcccaactgttgtgattttattatttcatggactagccttacgttaagtgaaatactatttatgttgttaccacccctaagagtgactctgatatattatggatgacccaggacggtcttaaaggtctagttttaaaaactgcctagtttgtaagtatttgaatccagttcttttctaaattttaataatttgactcaaaatttttgctacagggtcaacttttaaattgtatatttcctctgaggcacactgggcatttggagaatggttcttcactggtgtagagagccaggtttactgttggttgcaccatctgttatcaggcatgcagaaacatttttcttctggagaaacagaggggaaggtgttgttacagtgtacatgtttcctcttgttgtccgtttttaacgggaacataagacaattgttccaanaagcattgcttgttcaaaactacacatattttggaaacccaccgtttaaacaaaaagcaccacataacaccacacgacacgaagagacaagcgacaaccgaacacaagacccacagacgaacacaacaacacgggaagacgaccagagcacacaacaaagctacacgacagagaagaagcgagcaccaccgagcaacgacgacaaagccggaggcggccgcccacccaaaacacagaac

SEQ ID NO: 248414 - DNA, 544 bp, Homo Sapiens
tgttcttagggaaagctttttaggtttattaatgaaaatcctaatgttactaattgagacatcagttaacacccaacttagtgattcccatccaaccataattatgtatttttcaagaaaatacataatttactaacacattttccttaccatagccattttcaaaagaaggtagggtactaacactttccagtttagatggccaaagcctggtcagtctctataattaaacaattattttaaaccctagttatgctaaaaccaagctattcttatcacaagtcccattctgctaaccacaaaatttagagaatttgtacctggaagataccaccacgtgtcaattacaatatacgtattccttggtcaattctgatatcacaggaccggaaaaaatagctgcttggtgtctagattgtttgggtattaaaaccactgcacatggataagctatttgttcagtcggagagaaagggcatagagtgacagagcaacaaaaagacacacagagaatgtatttcttgtgaaagcggacgcgtgggtc

SEQ ID NO: 248415 - DNA, 950 bp, Homo Sapiens
  misc_feature (773)..(785): n is a, c, g, or t
  misc_feature (827)..(878): n is a, c, g, or t
ttgggaaggaagcgttcatccacaggtagagatagcaaatcttctcctcatccaaagcagcctcgcaaacctcctcagcctccaggaccctgctggttttgccttgctagccctgaagtggaaaaacatttggtggtcaacatcggcacacattgctaccttgccctggccaaaggaggcttatctgatgaccatgtcctcatcctgcctattggacactaccagtcagtggtggagctttcagcagaggtggtagaagaggtggagaagtataaggccactctgagacggttctttaagagtcgagggaaatggtgtgttgtatttgagagaaattataagagccatcacctccagctacaggtcattcctgtcccaatcagctgctctactactgatgacattaaagatgccttcattacccaggcacaggagcagcagatagagctgttggaaatcccagagcactctgacatcaagcagattgcacagccaggagcagcatatttttatgttgaacttgacacaggagaaaagcttttccacagaattaaaaagaattttcctttgcagtttggaagggaggtcctggccagtgaagccatccttaatgttcctgataagtctgactggaggcagtgtcagatcagcaaggaagacgaggagaccctggctcgccgcttccggaaagactttgagccctatgactttactctggatgactaaaacaaagggaagaactttttatgaactccacaggaagtagtaaagcnnnnnnnnnnnnnaattaaaagaattttttttgagacaaagtctcgctctgtcannnnnnnnnnnnnnnnnnnnnnnnnnnnnnnnnnnnnnnnnnnnnnnnnnnngtgggctctagagttcctcccacctcagcctcatgagtggctgggacccgcaggcgcatgctaccatgcctg

SEQ ID NO: 248416 - DNA, 1727 bp, Homo Sapiens
  misc_feature (1181)..(1221): n is a, c, g, or t
  misc_feature (1556)..(1568): n is a, c, g, or t
ttgggtcttttcagtatttttgtaatcttagccatagtcctatgagaaatgtacataagagcaaacaattcaggatagaaattagcagaaagctgggaatgatgtgaaataactggcagcatagtacagaaatgtaaggtatatgttttgcttctggatttttagaaattgtgctaatcatgtttacaaattaaggcatattcagatgtctgctattatgtttaatattgatttgataaaaaaatggaattaggtgtagcttagagtataaatgagtctttttaaaaatgtgtatctggaagtagggctaataaagaaatccttttattttcaaagaaatgaacttaattggacaactcatccccaattacagaattgatatcaatatggtttgctgtatttgagtataaacagctcagtgttaattatatcaaaggaagttctttacatcttcattgattacaaaatttaccaaagaaaatgtatctaccaaatataatttttaaagtacttgttaaggaatgaggcctctttaacatataaagtatcttaaaaatattctctgacctggaaaataggtttacagtagctacaagattccattttaggttttcttatgtcaataaatgtcaatattttacacttccagcaaaagtacccgttaaagctaaatctaaatattattcctcatagcacagtttctggtctccttaaattaaggatcctactcatcaggattgaataaaaagggggaaattcctaaaattggtatattgtataatattgtgggttaagtaaaatttaggggggcattatggaaatgtacctattttaaagggcagtggcaattactataatattggttaaactggtaaagtttgttaaataatttatgtccatgatcattctgagtgttttttttctttgcagaaaaacaggactgggttaagaaaagctaaaatactcatttttttaaaatgtatagcccaataagaactaaatgatttatttcaaaagttaaataattttttttggaaatcatggaatgtattggcatattgatgttccaaacaggttttatgtattgttttttatagcagggagtagttgaaaagtaatgagtatattgattagctgtcttggaaagagaggattggctttctaacaatcactgatacagnnnnnnnnnnnnnnnnnnnnnnnnnnnnnnnnnnnnnnnnnatcatccatactgaattgagagatatgctccatgtttaaaaatatttgtaataagttcatctacttgacactgaatcttttttattcttactctaaaattattctggctttacattcagtttaagtggttaagtgaaacagtttttagggtgcaaaaattattttcccactgtttttctcatgataatttgagtctcctgagctataatttctgaaggatttttactactttggcattatgtaatctgatctctgtcacaatgatattaaataagaactatctcactttcatatgtttgcttcataaaaggatatggaatgtacacatcagctcnnnnnnnnnnnnnaaactagcatcaacctataacttggtataaacttcccaagtatttagagaatagtgctggtgaaaatttaaataggataggcatatagaaattatgacttgtattgagtgatgtcctttcaacctaggactagtgacaaccttcattttttcagagctg

SEQ ID NO: 248417 - DNA, 1380 bp, Homo Sapiens
ttgggtcattgataagagcaagcgggatccttcagaagagattgagattcttctgcggtacggccagcaccccaacatcatcactctgaaagatgtgtatgatgatggcaaacacgtgtacctggtgacagagctgatgcggggtggggagctgctggacaagatcctgcggcagaagttcttctcagagcgggaggccagctttgtcctgcacaccattggcaaaactgtggagtatctgcactcacagggggttgtgcacagggacctgaagcccagcaacatcctgtatgtggacgagtccgggaatcccgagtgcctgcgcatctgtgactttggttttgccaaacagctgcgggctgagaatgggctcctcatgacaccttgctacacagccaactttgtggcgcctgaggtgctgaagcgccagggctacgatgaaggctgcgacatctggagcctgggcattctgctgtacaccatgctggcaggatatactccatttgccaacggtcccagtgacacaccagaggaaatcctaacccggatcggcagtgggaagtttaccctcagtgggggaaattggaacacagtttcagagacagccaaggacctggtgtccaagatgctacacgtggatccccaccagcgcctcacagctaagcaggttctgcagcatccatgggtcacccagaaagacaagcttccccaaagccagctgtcccaccaggacctacagcttgtgaagggagccatggctgccacgtactccgcactcaacagctccaagcccaccccccagctgaagcccatcgagtcatccatcctggcccagcggcgagtgaggaagttgccatccaccaccctgtgaggcaccagggcattcaggccacagggcggtgctagcttgacagagtcagcatgcttcccagagggagcaggccggaaccacagggccagagggagctggaacccgaggggccaggaagctgccagcccagaacacccctaatgagggtgtgagaagtgccttctccttccccaggatggactcttctcggctcaggctctgctggtggaaagcgattcactgtatatacttttttttatgaccaaaaatggcatcaaccaccatggatttttacaagatccatttgcctttctggggagcagaaacagccattgcggccccaggaggggaactgagtcacgctgggggctctctgagactctttagaagcagctttggggatcccaaccctggggacccccacggattgggccaccttgtagcccatcttgacacacctccgagacagtccagtgtcacctctctcagagcatcggggctgtttagcagaaactcaattctatccccaa

SEQ ID NO: 248418 - DNA, 868 bp, Homo Sapiens
  misc_feature (95)..(112): n is a, c, g, or t
  misc_feature (142)..(203): n is a, c, g, or t
  misc_feature (686)..(699): n is a, c, g, or t
  misc_feature (710)..(770): n is a, c, g, or t
ccaactttgtacaaaaaagttggcaaggcaggaggattccttgagcctaggagttggagaccaacctgggcaacatagggagaccttgtctcttnnnnnnnnnnnnnnnnnnttggatttggtgaaaaattttcctcttgannnnnnnnnnnnnnnnnnnnnnnnnnnnnnnnnnnnnnnnnnnnnnnnnnnnnnnnnnnnnntggtgtgagccacagcgcctagcccatttttccttttaataggacctgttgctgtctctgttctcccaacatggtaaacaccacccggacttgcgtgtatgtcccaaattacaattctttctttgcaaatgaaatgtgaaatttagaggcccttctccacactttaaatttgacttgacattttctaggcagatataagttattagagaatgagattctctataaaaatgatcccttcatgctgtggcctccacagaagatgccctgggccaggtgcccacatgaataatgcgggccacaggcaggcatttattttctcacagatatggaggctacaagtccaaggtggaggggtcggcggggttgtttgctctgaggccgctcctcctggatggcagggatccctttctggctgtgtcctctgtggcctttcctctatgaacctgtactgtacctctggggtctctctgcttccaaatatcnnnnnnnnnnnnnncagacagtttnnnnnnnnnnnnnnnnnnnnnnnnnnnnnnnnnnnnnnnnnnnnnnnnnnnnnnnnnnnnngctgggttcaggcaattctcccacctcagcctcctgagtagctgggtattacagatgcccagaaccaatctctgctaatttttctattttttagtaga

SEQ ID NO: 248419 - DNA, 1140 bp, Homo Sapiens
ttggagcataccatttacgttagtgacaatttatgaaaacagtgttgtaatcaattatatcatcctcattaacaggtttatcaaattcactaagtaaagtaggcacagtctgggtttctaaaactttatccaaatttttatgatattctacctttttattaactttcatttaacttgatttattttaattgataggcctaatatctggatttcatgcagtaattatttcccttttttgatgggcttaccaattggatcagcaactttgacgaagggtgtggctgcacttggttttccaactccaattcgattttgggctctcactcggaaactgtactcctgtccttctaccacatcagtaacagttgcagacaggtcttcagctctcacagtcatggcagtatcccacctgatagaagtcttgtctcttaattcaatgacgtagtttgtgatctcagcacctccatcatactctggtggttcccatgtcagtgagacaccaaatcgattcacatcagtgatggttacattcaaaggagggcctggaacatctggatttcaccacagaagaagaaaatatgagtttggggtaacgatgatgaaggcaaagactgcaatttacttaaaagctaacttgaatttacttaaaacttcttaccatatttactccttgcttctacaggattgtcagtttctactggctcaccagtgccaactctgtttcttgcactcacacggaataggtactcaactcctcctttctgtagaccagtgacagtaaactcacaaactctctgcacggtctgtggccagaacccaggtctttctcttaatgtcacgtctttcaacaacgtaacctatgattttgcttccaccatcagttaaaggttcttcccaaagcaaggctcacttcaccatcaaatgtttctggtcacttctaaggttacgtactggcccaggaacatcttgaaattcacatatagaggcaattttatagatgtgctggtcttgccttttaaatttgtggctttgccaatttaagtctgagagacccaagggcttaccaataaacttttaacatggatgaatccttcgtgcttttcccatgtttgttctggaagcacaagttttataacgtcc

SEQ ID NO: 248420 - DNA, 803 bp, Homo Sapiens
  misc_feature (382)..(395): n is a, c, g, or t
tctttacctatttacaaatgaagcacttcatatttacagctcagttttgcaaatgaaaataaaaagtaaaggacaacaaatatgaaaaagtaatagaatctcatactaaatgagtacataaagctaagtatacttaaaattagggatgattaagcaattaaattcaggaatgaatgacataaaataaaaccttaataatttttaatatggtatctttttaatgttaaagataatttattatttaaagtaccctatgcacaggaagtcccttaaatttactaatatatattattctgttttaccaaccttgtttttatattggcccatgtgtaccaaccctccaagattgtttagaaaactacacacccctcattccctaagnnnnnnnnnnnnnnctatactttaaatatttcaagccaaatctatatttggtattttgacttatccaactgtcatatttttaaaaggtagcaattgtacatactaaaatcaataaaaatttaaataatatatattttttaaaaagcattttcatttgaatagttgataatatctttgtgctgttaagtgatgccctctcacttaatttttttacataggctttgatttgtaaataatctatatgcttatactttattttaaatggatgagccattcagtatttctgtccattaagtttaattaattacaaatgaaatttaaaggtatagtctttagactaatgaaggattttaaaagccaaagatcaagacctctctatgttgtttcttaatgaattatggttaaatatgaatttaagccaa

SEQ ID NO: 248421 - DNA, 401 bp, Homo Sapiens
  misc_feature (21)..(21): n is a, c, g, or t
  misc_feature (32)..(32): n is a, c, g, or t
  misc_feature (89)..(89): n is a, c, g, or t
  misc_feature (106)..(106): n is a, c, g, or t
aggaaaaatggtaaattctgnaaaaaaatggnttaattaacccctccttccaaccccaatcaacggttggccctgagggctgacccggnaggcccagtggaagctnccctggtgtcccacgggggaagggccaaggcctgctgagctgattctcccagctgctgccccagcctttccgccttgcacagcacagaggtggtcaccccagggacagcccaggcacctgctcctcttggcccttccctgggggaagggagctgccttctgtccctgtaactgctttccttatgcccagcccggccactcagacttgtttgaactgcactggcagcttttttgtctcctttgggtattcacaacagccagggacttgattttgatgtattttaaaccacattaaa

SEQ ID NO: 248422 - DNA, 1323 bp, Homo Sapiens
ttggcttcactacggtttcctgcagaatgctgaacagagcttctgaagaccaggacattgagttccagatgcagattccagctgcagcttcatcaccaacttcactatgcttattggagacaaggtgtatcagggcgaaattacagagagagaaaagaagagtggtgatagggtaaaagagaaaaggaataaaaccacagaagaaaatggagagaaggggactgaaatattcagagcttctgcagtgattcccagcaaggacaaagccgcctttttcctgagttatgaggagcttctgcagaggcgcctgggcaagtacgagcacagcatcagcgtgcggccccagcagctgtccgggaggctgagcgtggacgtgaatatcctggagagcgcgggcatcgcatccctggaggtgctgccgcttcacaacagcaggcagaggggcagtgggcgcggggaagatgattctgggcctcccccatctactgtcattaaccaaaatgaaacatttgccaacataatttttaaacctactgtagtacaacaagccaggattgcccagaatggaattttgggagactttatcattagatatgacgtcaatagagaacagagcattggggacatccaggttctaaatggctattttgtgcactactttgctcctaaagaccttcctcctttacccaagaatgtggtattcgtgcttgacagcagtgcttctatggtgggaaccaaactccggcagaccaaggatgccctcttcacaattctccatgacctccgaccccaggaccgtttcagtatcattgggattttccaaccggatcaaagtatggaaggaccacttgatatcagtcactccagacagcatcagggatgggaaagtgtacattcaccatatgtcacccactggaggcacagacatcaacggggccctgcagagggccatcaggctcctcaacaagtacgtggcccacagtggcattggagaccggagcgtgtccctcatcgtcttcctgacggatgggaagcccacggtcggggagacgcacaccctcaagatcctcaacaacacccgagaggccgcccgaggccaagtctgcatcttcaccattggcatcggcaacgacgtggacttcaggctgctggagaaactgtcgctggagaactgtggcctcacacggcgcgtgcacgaggaggaggacgcaggctcgcagctcatcgggttctacgatgaaatcaggaccccgctcctctctgacatccgcatcgattatccccccagctcagttggtgcaggccaccaagaccctgttcccc

SEQ ID NO: 248423 - DNA, 503 bp, Homo Sapiens
attgcttggtatgtttattgacaagttcaaatttaatgacatgttacagtttcatttgaacagtgtattactgtattaaagtatagcatcatagctaaaagaataggctctagattcagaccggctgaatttgaatcctagatctgccacttacatgaacctggccaagtaatttaatctccctaggcctcgattattcccatctgtcaaaaagaaatattaaatggtacttatatcatagtattgtaatggagattgaagctaaggcatcaaaggtgcttaaaacaaggaatgccacataattcttcaggaaatatatgtaattgttattatttatcaccagtttctagtgcccaatactagaatgtgtctgggtttcaaagaatagatgcgaggaactatgtaaagtgtatgcttgctatacaagtgtgtcaggtattattgatccaactctgcaaggcaacccattaattgtacatagtttgggaataatccttggggaa

SEQ ID NO: 248424 - DNA, 937 bp, Homo Sapiens
ttttttattccctttcctctttaattctctaagaaaatatttatttaatataatgtatttcaagaaaaatgcccttcttagaaatataacctaagcatcactagacttcactagtttgggaatacaaatattaaataactcgtatttccacatttatataatgcagcaatttctgggcaccactgggggtatgtcttgtgctgcttctcttgtcgttttcctccagtcgtcttgttgatatctgctgctcaggaaggtcaacttggggacagtgccttgcctcagcctcttttgagggacagtgccttgcctttgcctctttttcttctctgggaacccgagattcccaaatggtaatctcatggagcaaccaaatgacataaacttctgttaagatttcagtgcaccaggaacacgctgtatctctgtggaaatgccctctcccccaattctgtttcttgctttgtcatctgaaccacaaactgtacttcttttgcctccctatgaaaatggcttctgccagtagcattttctccagtcatccacaggtgaagacaaggaaattctctatcctgaggcccccttttccacataatcccaccccaatgcaaactatttcctgcaaacagataccttcagactgtttcccccttcatcataacgacccagacttagaaatccagtttaggctcagttgaaacattctctactataaaaactaccgtatgggctcatttctcatccactaggggtctgccttctaaatcaaaagcaagtagaagacagagtaaaatgtgtaatataaatttattctgtgacattttcctcattgaagatattttaacatagattaaaatacatcaatatttcatgaaaaataaattctagaagaatttagataatatctgtaatgtacatgatttgaccctgaatatcc

SEQ ID NO: 248425 - DNA, 1154 bp, Homo Sapiens
  misc_feature (1026)..(1026): n is a, c, g, or t
ttgggttaatgtccagtatcacatcacccatgaaagtcgtgggcagttcaggagatacctgccttcgtctttgttctttgttgccttaggttcttcagagaaagatcacaacaaaaaatgtacactgtcgtttacagctattaagtgatttgattttgtttttttcccaaagagaaaacctacctgccctgtttctgatcccacccctctgctggcttgaagcaggtaaccctttcccagccctgcagctgcccacctggcctccatgccatcctgcccccacctggctggcagccctggctctccatgtgtgccctccggctctgtgtgaagcctcaagtcagtcccagcattgtttccatagggaagtgtggggtgcccagcaggtaaagcacagggagagagggcagtgggaatgccacctttaggctgcagcaggagccccacactgcccagttttcctccccactgttctacaccaaccaggggagactaacactgtgactctgggattggcaggtgcaacttggagccacttaatttcctggggacgtaagttcttcccaagcttagagcaagctgccctgccaaaggagaccaaaccatgccaaccacgctggcaactgctgctgtccagtccctgtgttttctgaccaccgtcactgtgcaactcatcgcctctgccacttaggaccagggaaagaggctggttttgctcccactcttagttgctgataaagtgggggaaggaaaatggacactctacagagtttggggaagggagagtagggagcccatcttgtccagaaagattcatctgtggtctgtctgttaaacatagctgatttcagtgggctttcccctggccctgggggagcagacactgactgggttgtgggcagaggagccatcctgggggagccttgctgcaggggagctccttcaggagccccattcggacctcttgcactgggctgcctttgcctccatttgccttcctgtatctgcaacaaaccttttaaaagngttcactcttgctttttccagtatttcggtaatcagccatcttgctgtagtacaggatgacattgtcgaatgctctttgtatgtgtgcacacccccttactcccttactgcttcatacactccacaag

SEQ ID NO: 248426 - DNA, 518 bp, Homo Sapiens
ggggattttcattgactttggccggggcgggggctctggcatgtccgacttggagggctctgggggccggcagagtgtcgtgtgaggcctcacagctggccttgagtttttactgacacgtccctgtgtgcgggggtgtccatgtggcgtgtgtgtgagtgagacttttttactgcgtcccgtcccgccagccctatcggcctcgtcactggccttggtcactttgtatttctgtcttggttggaaataccatcagccttccttgctcggcccaggtctgtttcaggcatctgagtcggcgtttacccaggggccgggccagagacgggggtcggccgctcgctcccacgctcctcctgccccagccctctggtgtccacacctgcccacagagaatgtaaacccagtgggctctgcccacgccgggccccaaagtgaccagactccagcacacctgtctcctcctgcctggggtggccatggggatggaagggggtggaataaaacctgtcaacctg

SEQ ID NO: 248427 - DNA, 733 bp, Homo Sapiens
  misc_feature (194)..(206): n is a, c, g, or t
  misc_feature (710)..(710): n is a, c, g, or t
tagatcttcatgtaaatgtgctctttgagcttcttaactggtctttcctatcagcagaaggcgatgtcttgtgctaaaatctcagtgtcaattcagtgatttaactaccacggctttactttcgtttcctttcatatcccaagtatttcttcacttctatctagctgtttgcttttatttttgatcaaccatgnnnnnnnnnnnnngttaatctgtttttactaggaataaatatgttttcttctttagccaaatgttgtctgccatcctgttgttgcttcagctgtgggacagcggggcacaggagactgacaatgagcgttccgcccagggcaccagcgccccgcttttgcccttgctgcaaaggttccagagcatcatttgcaggaaggatgcaccccactccgagggcgacatgcacgtgagtgtcatgatggaactttgtgtttaggtggcactcgagtctagttattttttacgcaagaccagcgtgcttgtgcacggcagtgtttttctctggtgtctgtgtgtttggtggtaacagcagcgagtcagatgagacaggtgtgggaggccacttgtttgtggagaagactcagatcagtgcgcgccgacttccttgtcagcacagaaccaagcttgaaacatgcacttttaaatcaataccagaaaagaacaacgaaaatagtggcttgctttgttggcccttnctttgtactgggctctgtgcagg

SEQ ID NO: 248428 - DNA, 356 bp, Homo Sapiens
cttccccaaggagtcagtcccccaggcctatcaggggatccttttgtatctgcactttgggttttagtttcaaagctccatcaggtacagcttgcatttcaggatgtgtggaaagctcgggtgagggcttccctggttcatcatagctccacccttcctcggaaggagtgggcctgttggagaccccccatccatggcacactagctcagcactgcatttcccgagatgattcccaagacagctggtgcctcctgggttttcctgtgccaggccaaggggcaccacagaggaccctgggatccttttgcctcttcttgggttgaaggatctctatgtattgtgtgtatataaatat

SEQ ID NO: 248429 - DNA, 863 bp, Homo Sapiens
ttgggatggaggttgcgctggctggatggcctagggaaaatgggtctgactggatggagctgagtgagaatggtgggaggccctgcagccgccgtggagagaacatgcgcgggggaaagccccggtcctccggctggcgaaatggacctctggaaggaatggccacacggtgtgaaatcactggtgtttattggctgtgattccatccggagagaacacacgcaggggccccgacatgcaggaggaggcgcaggcgcaggacagacggacagaggacaccacggtctaagctaagctcgcggcccggggcgccatgcgctgggaacggggtgcgcaggttctacgagaggacgccctgtctgctcagagctggctttgtaaggtgtgaaaacaggagtttttaaaagacacgacccgggagaagtcagtgagagggcacagggcgagcaggacggacagcgacgtccccgcgggccgcgtcgctggggcgcagaggggcgcggtggtctctgcccggaggggcgtcggtcgttagtattgcagtctaacgttatggcttctctaaagctatgtaaggtcatgaaggtcaatgccaagccacgccctggcccgaaacacgtggagacttgatgcatttttgctgtggacgaaagggcccgggggcgaggcggcgtctgtcaagataaaactcattaaatgcaaagacctcatttacctgagattcaacaaattgtgatgcaaattaaacatgaatggaggagaaacaggggctcggatgccgccccgcagggccaccaggtggattagccacacacgcgccagctgcgcgcacggaaaccccgcatgccccacccgaggagctg

SEQ ID NO: 248430 - DNA, 888 bp, Homo Sapiens
ttttggcagagaaattttcagctgtgcttgatacccaccaaaagaatgtatctcgaaagaatgaaggaagaagaaaaaaggatccttgatgtttgtgacaagaaaatgagaaagttagtatctgcaatacagagcttgttcctgttcagtgactgaccctctgtattctgtatagacaccaggccgatacacagtggagttcccaggccttgtttgcaggaagccgactgtaaagacagccccagctcaaggctattaggttgaatatttgctttcatgagtaaatgtggatctttggggaatggcttcaaaataagtcacgaacacaaattctttgtaaattatgtaaattcctgtttatataaattggcaacaacttataccgtctgacagttcaaaatctctttcagctgcgctcttcccaccgagccgagcttactgtgagtgtggagatgttatcccaccatgtaaagtcgcctgcgcaggggagggctgcccatctccccaacccagtcacagagagataggaaacggcatttgagtgggtgtccagggccccgtagagagacatttaagatggtgtatgacagagcattggccttgaccaaatgttaaatcctctgtgtgtatttcataagttattacaggtataaaagtgatgacctatcatgaggaaatgaaagtggctgatttgctggtaggattttgtacagtttagagaagcgattatttattgtgaaactgttctccactccaactcctttatgtggatctgttcaaagtagtcactgtatatacgtatagaagaggtagatacgtaggtagatttttaaattgcatttctgaatacaaactcgtactccttagagcttgaattacatttttaaa

SEQ ID NO: 248431 - DNA, 889 bp, Homo Sapiens
ttgggagaatttgtgagcagcccctaacaggctgttacttcactacaactgacgatatgatcatcttaatttacttatttctcttgctatgggaagacactcaaggatggggattcaaggatggaatttttcataactccatatggcttgaacgagcagccggtgtgtaccacagagaagcacggtctggcaaatacaagctcacctacgcagaagctaaggcggtgtgtgaatttgaaggcggccatctcgcaacttacaagcagctagaggcagccagaaaaattggatttcatgtctgtgctgctggatggatggctaagggcagagttggataccccattgtgaagccagggcccaactgtggatttggaaaaactggcattattgattatggaatccgtctcaataggagtgaaagatgggatgcctattgctacaacccacacgcaaaggagtgtggtggcgtctttacagatccaaagcgaatttttaaatctccaggcttcccaaatgagtacgaagataaccaaatctgctactggcacattagactcaagtatggtcagcgtattcacctgagttttttagattttgaccttgaagatgacccaggttgcttggctgattatgttgaaatatatgacagttacgatgatgtccatggctttgtgggaagatactgtggagatgagcttccagatgacatcatcagtacaggaaatgtcatgaccttgaagtttctaagtgatgcttcagtgacagctggaggtttccaaatcaaatatgtttgcaatggatcctgtatcccaatccagtcaaggaaaaaatacaagtactacttctactggaaataaaaactttttagctggaagatttagccacttat

SEQ ID NO: 248432 - DNA, 467 bp, Homo Sapiens
  misc_feature (467)..(467): n is a, c, g, or t
tatttaattgatttttatttaaaatgttggtattcatatatttttattttgccttctaattttaataggcataaatattttaaaacaataattttcttgaagatatacaaagtaattatgatcttaaaatttacaatcactttaacttacattttgatgaaaatatgctcaaattttaaacacaattaccttcatttttaacttgttacattattactatcaattgaacacaaattacatgaaaatctttattgtaacaacatagtggttttcctgaaatggagaaaataaaataaatgttgtggaatacataaataaaaacataaataatgtcttttattaatcatagaaaatgtcattagctcctctaaacatgtgcaataataactaaaaattagccatctttttttgcagtctttcataatactttatcaacaccatagctttacaaatgtttttaatggacn

SEQ ID NO: 248433 - DNA, 907 bp, Homo Sapiens
agacggtgacttgaaggagctgggaattaagacagatgggtccaggcagcagattctggcagcgatttctgaactgaacgcaggcaagggacgcgagagacaaattttacaggaaaccattcacaactttcactcttcctttgagagcagtgccagcaacaccagggcccctggcaacagcccctgtgcgtgatcctccttcccgcagccaccagcgtgagttcttctgaatcccgggaccccttcacgtggccacagccccagccctgcccccgtcacactgctgtgccttagttcatgttgttcccttttgttcggggatgcccatttcacgtcgacgggcattcattggtagtattttttgttgcaacaaatttcaacacacagagacagattcccatgttaacattccattgggggtgcttctgcttggcacgttggttcacacagtgatgcagggactcagctcctttcatcctgtgctctgccctccccgggagcctcagagtttgcttctggctggcggcaagggaaagggacgatggagaaggcacggctgcttcttacctgccttgctcttaactgacacacatcactcctgctcacgtcctcttggccactggtagtcatgtggccccacctggatgcagaggaggccaggatgtgcagtctccacatagtggcttcccagcaacaacttttgacttagatggggggtatgtattatggtgagaggttagccttcctggcacatcttcccttaaaacttctaacttgcccctcctagtccaagtcacctctcagatgaagtcttttttgaccccctttcagccactgggtcccttagtgctgtgtatgtgactgctgtagcattccactgcacctgctgcataaagcttacattgga

SEQ ID NO: 248434 - DNA, 447 bp, Homo Sapiens
aaatatagcagtcagggaagagaattttaaaaaaggtcattattgaagaagctgaggggacagggtagagctgctgcaatatggagatttagggtaatatggcaaggtcctgctgcttgaagcctgtgagtgggttgtggatatgggactggtggagagtgagactgttaggaaagttgtatctatgaataagggcagttgaagtagaatttttaccagtccacttgaccttcttcttccctaaccactggctcttgagcagcttgggatttccctggccattgccaatacctggccatctggcttccaatagtacagtggctactcaagttcaagcgaagaacttccagactctggtgactgttacttcccagagccaaccactagtgcattatgtttaggggatctggggcttccaacatgaatggattccttaaggaaaaggag

SEQ ID NO: 248435 - DNA, 1047 bp, Homo Sapiens
  misc_feature (284)..(284): n is a, c, g, or t
cacgatagaaccgagataaacctttttatttatttatgcttctccattttgtttaaaacaacaacaacaaccaccttaatgtaactgacagcccttccccctcaccctgcctcgggctgggggtagttaatggggaaatggcccccagggtggggctggaccagaagagcccctcaaggagctcatggagcccaaatcccctgccctggggaggggacctgtagtgtgtgacgggagcctctcccgagcctctgcttgtaccatcaaagatgcccttggccaancaagggtcaggaagcatgggggagggatttcggcctcctctgtccctacccagcccaatctcacgagcagggctggggggtttaaaaagggtggagcgggtggggttggctcacacgaaggagtactggttgttaatggccctggggtggcccccttcctctccatcaccccctagtggtgactgctgcagctgcaccattgggggcacccccgcgtccccaccagacccagcgccctgggcctctgagcctggggctatggcctcttccaattcaaccacggggaccagctcaaccacggggaccagctcttccgggacccctccaccgcccgctttctctttctcttgcctctctttggctgctgcggctgctgctgccgccacttctggcgccctcgacgcctcttctgccccaggctgtgggggatctgtccatgaagggggttcagggggctggggtgggtcatgggaggtggtcggttctggataggaatggtaagaaaacagactgattgtggaggcaggtgagctcctgccgtggcctccccttcactcagccccccaggagcgtggctgtctccccacatcccatctcctgagcaaccccccatccatggaagatggatcatgggcggtggtgagaggaggaccacacttacacacagtcactcgctccgaagggcatgagggtgcaggaggcatcggggtggcatccatctccctcgcacacccccgcatggctcccagcctgctcccggcct

SEQ ID NO: 248436 - DNA, 608 bp, Homo Sapiens
  misc_feature (109)..(109): n is a, c, g, or t
  misc_feature (540)..(540): n is a, c, g, or t
gggtggaggtggtgctgcttcatggaaaggcctttaactctcacacgtgggagcagctgggcacactgcagctactgtcacagaggggctaccgggccgtggcctttgnaccttccaggttttgggaactcggcaccttcaaaggaggcaagcacagaggcagggcgggcagcgctgctggagcgggcgctcggggacctggaggtacagaatgccgtgttggtgagcccctcgctgagtggccactatgccctgcccttcctgatgcgaggccaccaccagctacatggatttgtgcccatcgcacccacctccacccagaactacacccagggagcaattctgggctgtgaagactccaacccttatcctgtatgggagagctgggaccacatcctggctcgagagtcactgcggcagctccgccacctgcccaaccactctgtggtgaagctacgcaatgcaggccatgcctgttacctccacaagccgcaagacttccaccttgtcctgcttgccttccttgaccatctaccttgnactaacccactcccagctcccagcctggcatgagcttggacagtctggaccgccaccctccctgaacc

SEQ ID NO: 248437 - DNA, 514 bp, Homo Sapiens
agggccacgtcttgtcctatgagggtggcatgtctgtgacccagtgctccaaggaggacggcagaagcagctcaggacccccccatgagacggccgcccccaagcgcacctatgacatgatggagggccgcgtgggcagagcattctcctcagccagcatcgaaggtctcatgggccgtgcatcccgccggagcgacacagcccccaccacctcaaagagcagcaccacatccgcgggtccatcacacaagggatccctcggtcctacgtggaggcacaggaggactacctgcgtcgggaggccaagctcctaaagcgggagggcacgcctccgcccccaccgcgctcacgggacctgaccgaggcctacaagacgcaggccctgggccccctgaagctgaagcgggcgccatgagggcctggtggccacggtgaaggaggcgggccgctccatccatgagatcccgcgcgaggagctgcggcacacgcccgagctgcccctggccccgcggcc

SEQ ID NO: 248438 - DNA, 549 bp, Homo Sapiens
  misc_feature (380)..(448): n is a, c, g, or t
atagttttattcactcaaccaaactataaccatattccaaaggttgtgctaagcaaaacctcaggacactgataaaccatgttgctgatttattagcttacaaggaagctataggtgggtctaacagaatgaggaaggctggacattcagaaggggctcctcctgctggggaaagtacatgtcaaggccaatgggaaggttgcctagagaccaacatgtcattcattaactggggttaggctgaatgatcctcgacggcaaagggtatttctgattacacaagaaaaaagtagggggatttaacaagtattgatcacttatggattggaccaggtgttttcaccttgcctcgttttcaggttgttcaggattgaatgtgnnnnnnnnnnnnnnnnnnnnnnnnnnnnnnnnnnnnnnnnnnnnnnnnnnnnnnnnnnnnnnnnnnnnncccaaggtaaacgttcaatttcagctctgactgacttcaaccaatagctgtggaggtctcctagctattaaagtagaatgcaggctgggcacggtggctca

SEQ ID NO: 248439 - DNA, 737 bp, Homo Sapiens
  misc_feature (13)..(13): n is a, c, g, or t
  misc_feature (31)..(31): n is a, c, g, or t
aattcggcacgtngggcaggaagaagccagnaaatggtaactaattattttgcatttactcactcttctgatatctgactcattattcaagggctcctccagtgaatttaccttgccagtttccccatattttcatataacattaaagaacacagtaaatgcgggtgatcccttcataatcaacatgcttctaatatgtcaggggtctctaggttacaaccaatatattcactgatttgttttccaaagacaggatgaggttgctgagtaaaacagcttcatgaaaaaaagggagcagctaccctctgagcaggctggtctatccagagtggactcaacacagagctatagatttctaggggatttctgagcaggatgtcccagtatgagtgtggggacttgaggtcttatctttaggccaaacaaaaatatggactttggaattaagaaaagctagatacaaaacctctggtcctgggtgactttgaggaatctgattaaacctttgatgtcaattttgttgtttgaaaatggagaaaaatatatcataggggttaaataagtgaatatagttaagccaggtgttgagtgcagttattactattagtgaatcataggtattcaataatgctggttctcatctcttcatctttctttcccctagctttgtatctggtggaggaggcttgggccgaagctggtaaaatgagaagttaggggaaggatgccctcagaga

SEQ ID NO: 248440 - DNA, 596 bp, Homo Sapiens; identical to SEQ ID NO: 179130
  misc_feature (79)..(91): n is a, c, g, or t
  misc_feature (100)..(346): n is a, c, g, or t

SEQ ID NO: 248441 - DNA, 730 bp, Homo Sapiens
  misc_feature (269)..(269): n is a, c, g, or t
gtggactgctggctttcccagtacctgccaggagggaggcacaagggtgaatcatggactattgaggcgccctgcaaagcgttgcactgctggctgcaggcagcttcactttgggcaagtccccccccatgagctggggagactcagtcatggggagggaggagagggcaagcccccaagggacttctgaacctgggcaggtgctgcacggggctggcagttgcttgtggagctgacgtgagggcccgttctcagcagatggctgctgngccctgcaacagcagctgcagatgtctttgagtcagtcgtgcggtgctcctgggggcttcacccgacccaactttcccagcccaaggcacactgtgacagatgcctggcactgacgtcctcactggggttacggtgacagatcagaccccttcccagctcaggggctctgagttatagagacgatgattcagaatccatccctgaagttgtgtcataaaaatgtcctgaagcaataattccgagaaggcaggtggcagcttttggctatgccatgcaaagtgccacacccaggaaagagccatgtggcctagcccatgtggccaaacagccccggttccctcctgggacctcagcagcccagactcatgagcttgcctgccaagctgtgcaccagagggcgctgttgaaacacaccaggagcccaggtgacagacaggccatcctgttccccagccagcct

SEQ ID NO: 248442 - DNA, 505 bp, Homo Sapiens
  misc_feature (295)..(295): n is a, c, g, or t
  misc_feature (297)..(297): n is a, c, g, or t
  misc_feature (336)..(336): n is a, c, g, or t
  misc_feature (476)..(476): n is a, c, g, or t
aaactttttaacttcaggagtgtccttcctttgctctattaggacattacagaaaccaatactatgaaaagctgacagcagtatctggattaactttttaaaaacaatgaaagtattttacagaaattacatttcagatcgtgctggaactgtgttcagaagatatcctcagagggaatctggcctgagcaccatcatgtttaattgcctcctcctgtcttgcattttcctcccagcccccttcctaccccttagcagagggccaggtgagggtgcttggggcccatggggctgngngagtgtagacttcagttacacccccagcccccagggganaagcattagccttgaatcctcaatcccagggccctctaacttaaccacttttcaacctatggtatttattcttttggattattctgtgcatctattaaaatggggttatattgtacaggatgctttgtaaggtttctttncccacataaggatgcctgtaagcatttgt

SEQ ID NO: 248443 - DNA, 840 bp, Homo Sapiens
  misc_feature (493)..(493): n is a, c, g, or t
ttttatttggctcatgattctggtcgctggaaagtccaagactgggcagttgcatctggtgagggactcacattgctttgactcatggtggacaggggacggggagccagcatccttagaaaatccacagtttctctgagccttggttttctcactaatatagaagagcagggatcccctgcctgaggaggaccaatgcaggaaaggccaaagagcagttagaaatcagcatcccgagagaatgcaagatgttgtgaccaaggtgtctaaatatcaaacgcaagtcagggcggtaatgacttctcggaggggagctggcttcggctcaggccattccgggtggggggagagggaactgaagacaaaactgtgcttctcgtaaaggtctaatttctaaaaattaaaggcagggttaggcctagtgagtgtctcgcaggggtgcttttctgagtagggaagtaacagagccatgccgaggttcttgagttaggcnaaccagactaagcaaaagcgtgcaaagtaagccttctcctgacacgatccgcatcccaacaagatcagaagctttcagcttctgataaatctgttaggaagaggaagagtctgagaaacttaaagcttgtctcaaatctagtaaaacaataaagaggaagtatttgttcttgtatctggaaatttcagaaatgtgagcttcaggcaaggtttgatccagtgagtcaaagatgtcaccaagtatccgtttctttatgtccttctttctgctttccatggaatcactgggttgcaggatcttctccttgcccccaactcccagaccggcaatttctgaaggctgggaag

SEQ ID NO: 248444 - DNA, 801 bp, Homo Sapiens
  misc_feature (43)..(43): n is a, c, g, or t
  misc_feature (69)..(69): n is a, c, g, or t
  misc_feature (80)..(80): n is a, c, g, or t
  misc_feature (777)..(777): n is a, c, g, or t
gccccacctccctgtttatgctgccaccttgaagccttgaggnccccaaattccagtacagacccagtngtgtgttcatngttgcgtggttgctgtcacctgggagcttctgagcgtttggttagaaccctgttcagcttggggtcagccctcccctagtcactgccctttagcctggatgtgtctgggcccctgcacttcccgtgcttgagtcacgtggctgcatggccgggcgctggccggatggaacacctcccccagcaagggaccagggaccagagccctggcctgccctgctgagccctgctgtgcagagggcctggcacagatgaatttgagattttgccgcaaggtgttagcacttcacacccattgagtctttgagattttaagtgaatgtaagcagaaaaagtcagatccaatttacagaaatcagagttagctacagctaggactcgtttggttggggttttttagtttgtctttctaaagtcatgtggaccttaatttaattacaaaagtctaccctggtggtcataaaataggcaggcctatgaagaaaggccttttactcttccatctcgtcccagccccgagttgacccacgttgctgctcctcacaccatggtgatgcaggtctcgtagtgtgggcacaggcctggctacctcatctttttagtgcctctctcctcttccacaggatggggtcccacagctgcagcagctggccccgtagttgagcatgtgtggttatcctgtagagcttttcccaagaanggtgtttgaacttagagccttaat

SEQ ID NO: 248445 - DNA, 505 bp, Homo Sapiens
ggcttctttctctgtgttcatttccggagctgtggcaggtggcttagaggggtctaggccatgagaggacatggaatcttgcttctgcttggcaggaaagttcaataggagcgtcttggctctgtgacctctgatgagatgattttattgtgagctttctgttcacccctcgccagtgctgcctgaggtcacattccctgatgggaaagtagaggagacgaaagtagagggttctgcaggcccatggtgtggggggtatgagggtgtgtcccccagcacctgctcagtggggatcagaggcccctccctacccaccttatccctgggctggcacagccccacacacacaccctgagccctggctcaggactctgggaaaaccttaagctgatataggctcctgaagtccatcaccaaccctgatgaggaagcctgtcatagattcagatcagaatgatacttgagcactgctggcttaattaagctccagaatcaaatatttcaa

SEQ ID NO: 248446 - DNA, 891 bp, Homo Sapiens
  misc_feature (478)..(537): n is a, c, g, or t
tatcttttttaaaaaaatgtatttattgaatgtcttcaaattatactaatacatttctgttgtaatacattaaatgatacaatatgaaaaagtataaaaacaaagttaattatctctccctgccttccttctacctatgcttcgcattcctcagtggaaaccaattttagtggtctggtatgtaccttcatacctatctccttgttgaaatgaatatatatagcatattatctaaaggggtttggttggttgattgttagtgctgaaatgaactttaaatacatgcattattctgtagtatgcttctttcacatgtcaatatattgtgggcatttctagaagtcagtaaatacagatctaagcttgctttactaacttcctgaggtagacaaaagcaaacaaatattatatatcatcataatggtataatcatttctgtattcagttgtatcataatcatatgattatgttatatttnnnnnnnnnnnnnnnnnnnnnnnnnnnnnnnnnnnnnnnnnnnnnnnnnnnnnnnnnnnnacagttaaagtaaattcatgaattctcttttttatcttttttcctctctgtccattcattgaggaattatttagaatatcaaacatctacaaagagataactatccaataaaagcagaactactgtgtcatttgtggaatacatttttatacatttttgtgtaatttgtgatggattactaggcagccacgaagaagccatgtcttttgctccatgttttcttagattctgtatttgacatctgctcatcacagggcagattatattaactatattttcttattttctgtacttttgataccctggcatttctcgctgagtagggagagactgcccctcccagggctaggcttt

SEQ ID NO: 248447 - DNA, 483 bp, Homo Sapiens
  misc_feature (31)..(31): n is a, c, g, or t
  misc_feature (47)..(47): n is a, c, g, or t
  misc_feature (54)..(54): n is a, c, g, or t
  misc_feature (80)..(80): n is a, c, g, or t
  misc_feature (116)..(116): n is a, c, g, or t
  misc_feature (166)..(166): n is a, c, g, or t
caccaaaagggtaaaaccatcccggtatccngtggtaccataaccanagaatangttaaattttaccatacatataatanatgtaccatacataattatacatattacacatattnatatataacagttaaagtaaattccatggaatcctcttttttaccttttntccctctctgtccattcattgaggaattatttagaatatcaaacatctacaaagagataactatccaataaaagcagaactactgtgtcatttgtggaatacatttttatacatttttgtgtaatttgtgatggattactaggcagccacgaagaagccatgtcttttgctccatgttttcttagattctgtatttgacatctgctcatcacagggcagattatattaactatattttcttattttctgtacttttgataccctggcatttctcgctgagtagggagagacctgccctcccagggctaggcttttcc

SEQ ID NO: 248448 - DNA, 329 bp, Homo Sapiens
  misc_feature (26)..(26): n is a, c, g, or t
cgacccattcagggtgcccacctggnacttgacgagcacgttcaattcctggtttaccagcttctgcgcgggctgaagtacatccactcggccgggatcatccaccgggacctgaagcccagcaacgtggctgtgaacgaggactgtgagctcaggatcctggattttcgggctggcgcgccaggcggacgaggagatgaccggctatgtggccacgcgctggtaccgggcacctgagatcatgctcaactggatgcattacaaccaaacagtggatatctggtccgtgggctgcatcatggctgagctgctccagggcaaggccctat

SEQ ID NO: 248449 - DNA, 581 bp, Homo Sapiens
  misc_feature (510)..(510): n is a, c, g, or t
  misc_feature (512)..(512): n is a, c, g, or t
gcgcggctgggccgggctgctctgcaaaccgctcacgtgctcctgcctttccgagccggggactgcgccagggcgcgcaggaaaaaacacagcccggagctgcaagaagcccttctttcttttctttaatcactcactccccggctttgcgtctcctcccctcgcttgcgggaatgttatgaatggaatgtacggattccagcctgtgcgcgcgcggccaggaatgcagggcgcagcgacctctcgacccacggccagcgcaccgccccagcgccacagcctgggatcccagagccacagcctgggatccctgagccacagcctgggatccctgagccggcccggccgtcacgaacactcagggccacgtggcctgacgtctgcagtgggagattcagacggtaagcattcaaagtgaggcgagagagccaagcagcgccgccgggacacaccggggccactctcacgcttcggccctggggatgtgcgcaccggcacacacagcagggngnatgcacacaaaagggtgcgcacacacacaggggcgcacacgcagccctttgcatgcacagaaacaccct

SEQ ID NO: 248450 - DNA, 457 bp, Homo Sapiens
aaagttttcttctacttgcatagcctctgttgcataaaagctgcttttatctatttgtttgtttttgtctctttctttgatgctttgtgacccttggttgttttctcatagttaagaataggacactaaaaatggagaggagtagttggttggtggctttaccgcttgatattctgtctgggccatttcattgggggaagtcctggtgtcaatatttttatctttttttggagggaagtggcaggaactgatgtgattccttacctcgatctgtgcctgctgtctaccagcccagagatcctctattttacactccagagaataaacctgtagcctccagcaggagaggacagttgtttagctgcatggacttggcatataacatgaagatactttcaaccaatcttccagtttttgtcctatcttcttctttatatccagagctgtctgatatcct

SEQ ID NO: 248451 - DNA, 1357 bp, Homo Sapiens
  misc_feature (317)..(370): n is a, c, g, or t
  misc_feature (569)..(652): n is a, c, g, or t
  misc_feature (1205)..(1205): n is a, c, g, or t
  misc_feature (1282)..(1282): n is a, c, g, or t
  misc_feature (1316)..(1316): n is a, c, g, or t
ttcagtaagtgaagtaagaaataggtctttcttgaggaacaaaaagctgaaataatttcatgcatttgaatatgacccttgacctgtttttgtccatcatcactcagatttgtggctgcaaccaccaaccaatttggtgccataggatatagcataatttttcagcaacagttcataagcttttctttttgttctttttccttcttccagttgtggtggtttaaaaacatgtctgcaaaatctttgacacttctcattaaaaaatatagtcttgtgttcccttttcttgaacctaagtggcctttgtgctgcctcannnnnnnnnnnnnnnnnnnnnnnnnnnnnnnnnnnnnnnnnnnnnnnnnnnnnngaggtgatacagcttccccatgcccctgcattttagagctctgggttgccatgtaagaatagctaccctgaagctaccatgctgaagagaccacagggaaatcacatagagttagaaagaggtgtctgaagaagcccagctgctcccaatcccagctatttaagtcctcccagaccaggtgccatatatatgagtgagnnnnnnnnnnnnnnnnnnnnnnnnnnnnnnnnnnnnnnnnnnnnnnnnnnnnnnnnnnnnnnnnnnnnnnnnnnnnnnnnnnnntagtcaagccccagaaccgtgaaagacaatagacttgctatggaggtcgccacatgcctcttttttctccctttgtgaatgggattatttataatggttaccccatacctactccactatgtatattgggtatgagggagagataatttgtctcactagctgacagatttttcagacctcaaggaatgccacgtgagctgtactcacaggaccacacacaagtatctttatccacacgtgacctgatttcactgataaagtcctggaccttgagcctgagcccaatgtcttaataaatgagaatttcagaaggtcttgggagggggtgagtatattttgcatgtgggaaggatgtaaataatatgtggcctgagagcagattatggtggtttgaaaatgtgtccaccaattctttaatactactctcaacaagaggtggaatctgtgtctcttcctttggaacatgagtggacctttgtgattaaatgcagcagaaggatgctgtgtgaactctgagacagggtaataaggggtgatacagctgccacctagntctttctcagaacatgtgcctttggagccctgagctgccatggaagaaaaccacctaccctgaagccacaacactgnaaagaccatgtggaagaaccacagagagagagancaggaccaaatgtgtgagcccttcccagccccaggctccaa

SEQ ID NO: 248452 - DNA, 917 bp, Homo Sapiens
  misc_feature (199)..(219): n is a, c, g, or t
  misc_feature (906)..(906): n is a, c, g, or t
aataaccattgatcatacaatactctttaaagaaacaatttatgtgctaaaagtagccatatagatcctaaaaatatttctattgggctagttttacaagctcctgtacataagtaattataaatagttcacatctagaaaaaaatacacataacctttaaaatagaatttatccttacatataaacagtctttgtagnnnnnnnnnnnnnnnnnnnnngaattcttcgtagcaccattaattttatttttaaaagtgaacattgcaaatagaaatttgttttcatttttagagtgcccagattttaataaaaagagcaagaagataaaaatcaaataatattcaggatcatagagaagcactaagtaaaagacaatctaaagaaatgtctggaaggaaaaactggtattgggaatagaattcggtcatttctgatacaatgtcacactcccaatcagtgtccacacttcaggacccttttcatttttcagcagaagcagaatgacacttattactatcacctgaatctctggcaacgaatctgaaattacactaaaatgaacatttccatcaaattgagatttgtgagatggagatgaggtggaaccctccgattttttggcaggccctgttgtaggtttacagagtgtacccacaaacaatttgaggaccaggacaacgaacttcacaaaaacttcagttgggattttaaaaaatatatattatcatcaacttctaagacttagtacattatttcaagagcatggcactgattccatttattgctgtctttttttgctacaaatataatttctcttccaaaaaatttacaacttctgtacaaatattcaaaaaaagtgcaaaattaaggattctgtatcatagatgtgtttacgcttaatcctncttgaaacaca

SEQ ID NO: 248453 - DNA, 433 bp, Homo Sapiens
  misc_feature (137)..(137): n is a, c, g, or t
  misc_feature (383)..(383): n is a, c, g, or t
  misc_feature (420)..(420): n is a, c, g, or t
tatttattcaatgctctcacatttggcctctgtgacccagaaaagcggtagagcagggtaggagcacatgatgcatccttcagccactgcaacctccagagggaccaggtcttcttcaggaaatcttcgttcctggnggatgactgatcagccataactgcaagacacagacatttagcacctccgcttgcagactaaacacccaccctgactgccctcatcccatgaggatccagggtgcctttgccccaagaagcctgggtttccatactacatccctcaccatggggagaagtcctgcgttcttccatttcttccatcgttgggcttctcctggggggttcatggccaattcattgggtctgggttccccgttcaaaagnttttccacaggggccccacaaagttttcccagctggngcatttgttgaca

SEQ ID NO: 248454 - DNA, 980 bp, Homo Sapiens; identical to SEQ ID NO: 179176

SEQ ID NO: 248455 - DNA, 143 bp, Homo Sapiens
tttagctcccaaatgttttatttagaagcatatgggccacggaaccaaggccgaatacctacaagggagggcctctaagggggctgcctgcccagaagccccaacctcagaggagggctcagagctcagttctagctcctcac

SEQ ID NO: 248456 - DNA, 463 bp, Homo Sapiens
  misc_feature (25)..(25): n is a, c, g, or t
  misc_feature (53)..(53): n is a, c, g, or t
  misc_feature (74)..(74): n is a, c, g, or t
  misc_feature (81)..(81): n is a, c, g, or t
  misc_feature (182)..(182): n is a, c, g, or t
ccaagccaacttcggccaacccctncccccgccgacccaagcaacacctaagncagggccctgtgggaagtggncgccggnagtgctactttgacacagcggccccggatgcatgtgacaacatcctggctcggaatgtgacatggcagaagtgctgctgtactgtgggtgagggctggggncagcgctgccgcatccagcagtgcccgggcaccgagacagctgagtaccagtcattgtgccctcacggccggggctacctggcgcccagtggagacctgagctccggagagacgtggacgaatgtcagctcttccgagacccaggtgtgcaagagtggcgtgtgtgtgaacacggccccgggctactcatgctattgcagcaacggctactactaccacacacagcggctggagtgcatcgataatgacgagtgcgccgatgaggaacccggcctgtgagg

SEQ ID NO: 248457 - DNA, 380 bp, Homo Sapiens
  misc_feature (359)..(359): n is a, c, g, or t
ccccccgcatatagccccccgcgaccaggtggctttggactcccctacgagtacggcccagacttaggtccaccttaccagggcctcccatatgggcctgatttgtacccaccacctgcgctaccctacgacccctacccaccgccacctgggcccttcgcccgccgggaggttccttatggggcaccccgcttcgacatgccagactttgaggacgatggtggcccctatggcgaatctgaggctcctgcgccacctggcccgggcacccgcttgccctatcggtcccgggacacccgccgctccttcccagagcccgaggagcctcctgaaggtggaagctatgctggttccctggntgagccttacgaggagctgga

SEQ ID NO: 248458 - DNA, 711 bp, Homo Sapiens
gaggttgaggtgtccgtgttcccggccgggacgaccacagcctccagcccccagagctccatgggcacctcaggtcctcccacgaagctgcccgtgcacacctggcccagcgtgaccagaaaggacagccccgaacccagcccacaccctggctccctgttcagcaatgtccgcttcctgctcctggtcctcttggagctgcccctgctcctgagcatgctgggtgccgtcctctgggtgaacagacctcagagaagctctagaagcaggcagaattggcccaagggtgagaaccagtagcatctgctgtccatcaaggccctgtgctgcaacagagcccctctgggggactggaatgacctcctgaccactccctcccgggctgctctctccacatctcctggaatcctttgtgagcctccttcagccttttccctgtgcccgatcctcatgtgtcacatgtgaacctgacggacatggacgccctgagctgtgagtccacgtctcatgtgcacgccccggccagctaagcctcgggccgtcagcaatacctctgagtgcccggatgccctccctgcacccttccatttctccaggagcctggcactgcttcctccaccgttttcacagggagaagcaggtctaggactcccctgcacctttgccaccataatggcccacactccctgggtccaggagtgtagaatatgc

SEQ ID NO: 248459 - DNA, 741 bp, Homo Sapiens
taagtgcgaagattttattaggcggtacaattccaaggtggtaagggtgaaaggaaaggcgaaggcaggcaaatacattattgagctgaaaacaactttacattcaaggacagcttccagacaagccatgtagaaccagcatgccttgggactgtgtggatggcagggagacgagtttctatgctgaccacttcatgctttctgccccctttgggataagtatgcctcacggacctctaactctcccacttctctgggggcagcacctgacccctcccggcaactgctaggcaagagcattctgttccttcaaatttctcacctgagtctgagtcagagcatcccatcatcagagcctctgttcagggagggcagtgctgaaggcatggaccttcacctgggggaggctgtcgggagatggcactggaggccaggcctctaccctaagcgagaggtgcaggccggggtggaggtggacggtgggacagagtaaatccggggaagcacatcaaccgggtctggtagggcatagccttcttggacctgagccattcctactgctgatgtccactgcttctcaatcgagaaacagcacggattcagctctcagattttgtaaactgggattttctcccttattcctcaacaaccacctagccacgaccttctttaactcttcccccaaccccgaaacttttgaggaaatgacttttcttataatttgaatggtaataaaacccg

SEQ ID NO: 248460 - DNA, 390 bp, Homo Sapiens
gttcatatttttcataaaaccggctacccaaggaaaaaaataattagctttatggatgatccatagagctttcagatgaagtgactaggataaaataaaagatgaaggtctgaggtttcttctgactccttcatatttctaaaaataatcatacaaactagaatactgctagtctcccaagtcctgttccttgtaattctcccactgttctcagtggccctaaccatctctataggttcctgacagggaagcagatcatttagttttaatttatgttcagtctcccacctccaccctggggcccaacttcccttgcaggccttgtgggtcctatagaaagttattcaccatgtaatctagcacagcatgttttgaagcatctttggaatg

SEQ ID NO: 248461 - DNA, 727 bp, Homo Sapiens; identical to SEQ ID NO: 179186
  misc_feature (691)..(691): n is a, c, g, or t

SEQ ID NO: 248462 - DNA, 698 bp, Homo Sapiens
tgagccactgcgcccagccaaggtgggggaatttattttttaaaaaaagcaaaacaggtttatttggctcaaaattctggtggaaatttcaagattgggcagctgcacctggtgagggcctcatgctacttcaactcaaggcagcaagtagaaggggagaggcatgcacaaagagattacgtggccatatggcgagagaggaagcaagagacaaccgcaggaaggctgactctctaaccagctctcatgggaactcacccctccacaaaggacactaacctatccatgagggttccacccctattacccaaactcctcctactaggcaccacctcctaacactgcctcattgaggctcaaatttcaataccattttgggcaggggcagaccacatgcaaatcacagcatggggtaatagtgggggcaggttgacacagggctgctgcctacccagcaccagctgtctcttggccccttccagatcctggcaatctggctacaggcatgggcccagccttggacacagatgtggccacaggaagctgttagctctccagatctgatcagcctgggagagcggcacaacaaaggctcccaaaggagagtcgggatcctcagctagcctcagctctgctacccacccatatgtgcccagaacaggaaagatacgtgtttcttactcctccgggactcctag

SEQ ID NO: 248463 - DNA, 423 bp, Homo Sapiens
  misc_feature (375)..(375): n is a, c, g, or t
gctaggagtcccggagagtaagaaacacgtatctttcctgttctgggcacatatgggtgggtagcagagctgaggctagctgaggatcccgactctcctttgggagcctttgttgtgccgctctcccaggctgatcagatctggagagctaacagcttcctgtggccacatctgtgtccaaggctgggcccatgcctgtagccagattgccaggatctggaaggggccaagagacagctggtgctgggtaggcagcagccctagtgtcaacctggcccccactattaccccatgctgtgatttgcatgtggtcttgcccctgcccaaaatgggtattgaaatttgagccttcaatgaggcaagtgttaggaggtngtgccttagttaggaggagtttgggtaatagggggtggatcccttcat

SEQ ID NO: 248464 - DNA, 862 bp, Homo Sapiens
  misc_feature (760)..(760): n is a, c, g, or t
  misc_feature (762)..(780): n is a, c, g, or t
gagagttcttcccttagccctgactttacttgctgtgggaagagagatgagggtcagataggtgggaggactaacttccagggtgccaagaaggaagaaaagccccaggttctcttttcttattgaggaacgatccgaccacctcacaggcctgccctgcagctggaagactcggcgctctaaggcctgtgccgtgtccagctgtgactgtgcggtgggctccatctgctggacaaaaggggaactgcaccatggcacttggcccatgggaaagagggtgtggtggtgtgccgatacctcctcgcctgccctccaagccccagctgccttccttttggattcccaagcttcaggatgtgttccctcttccagctgtgggaccgctgtcccttatttcaacccgttagcaacaatggatagagaacacagtggctattaatgaagaggcccatgctggagactggaagggttcccttgtcctagacattgaggggccccagataagaccaaaaccaagcataagagaagaaactgtctcagatctcacggccaggcctctctcctgctgctgtttttgattttcccaggtagtgggagagaggaaaggagggaaggcaagattctttccccctccctgctgaagcatgtggtacagaggcaagagcagagcctgagaagcgtcaggtcccacttctgccatgcagctactatgagccctcggggcctcctcctgggcctcagcttgcccagatacataccnannnnnnnnnnnnnnnnnnngagggagaacgcctcacccagattttatcatgctggaaagagtgtatgtatgtgaagatgcttggtcaacttgtacccagtg

SEQ ID NO: 248465 - DNA, 581 bp, Homo Sapiens
gataataacaatagaagcacccatttattaagctctccttgtgctgcatggacaaaacacaggctcaaagaccgtttttcacacagcataggaagggacccagcagggactcagacccatcccagatcccccagccttctggcaaactccaaggagatggggagcttgaggaggcggatccacaccacacgcgggccgtggcgtggggacagcccggtagtgggaacggctctggacactcacgtcggggatgtggcagaggccttggggtgggctctggactctcacatcggagatgtggcagaggcctcgggtgggcgtgcacaggaaaggcattggcctcaagtactccgtggacctggctggccctgcccgccgcactccttcacacaggttctttattgccattgtccccgcccgcatcaaaggatcccagcatgcttcccacagcctggaattcctttgctgggaatgggagacaaagccatacgttctatcatcagagaggaaaggcccaaaatgcaaacatgcagccagagagaggctgtggcaggcaggagtttctgagtagggagtgtcag

SEQ ID NO: 248466 - DNA, 724 bp, Homo Sapiens
gataaattgaagaagcaattttttacccccaaagttctgcaggactacagaaaactcaagaacacagcagagcaattcttgtcccgaagtggctactccgaagtgaatctgagcaaactcttcgctggttgtgccgtgaaatcctaagggaatcccaggagtaaccaaggagggggtagttgaaaaatcccagcttcctctgtgcctccactctggccctaaatgctcctccagcatctgtttctcccttgggactgtgtctcatgtttgtgtgaatgtagaccagggaaagggggctgcaaaaatgttgagtctaatgttcgtaagcatcatagaaattcctgtcttcatattaagatgtactgctttaaaacacaacttcagagcccctccccaagctcccctccccaagctcctgaagacccggtttctgagggagggaaattgctacttggattgagagtagctggaatgtaagtgaccccaggctttgcctcagggcctttagcctatgtcccccccacataaagagagcttctcagagcctgactgaagagctgacgttttgctttttcatatgccaattaaacccggtctaaatccaaatgcttctccagccatccaggagtggctgtccttttcagtcttgtcttttatataggtagctgagggggaagatttagaagccttgcactcactaaatagattaaacagagcaggcttg

SEQ ID NO: 248467 - DNA, 757 bp, Homo Sapiens
  misc_feature (743)..(743): n is a, c, g, or t
aagataataaacatttttttattgcttctaagtcttagagtcagctggagggttcttctgctttggctgggcttactcatgtgtcggcagtcatctgtgggttgggtgactctcctgatcttgactgggggtaggctgactgtgggctagtctaggatggcttcagctggtatctctggctctttcgcatgtctctcacctacacatctcataaccctccagctgatcagccatgttctcatggcactggcaaagagcaagagggcaggcctcctttaaagcttctgtttgcttcatgtttatcgacatctcattgggctaaaacaagtcacatgtctgggtcccaggcatcaggagtgaggatggggactacaatgttatagggcaaaaaggagatgggatacagggggagaccatggaataggggatcatccaaaacaatcagcctaacacagggcacattaacccattttatctgggaaaggaagggctttataggagaggctacactagaactgagtgttgaaacatgagagagtattcactaagtgggcagctgttacttggaactggatgcaggctggtttaccacaatcaatagaaactcagcaggtctttctgtgctcatgacagggttctattatttgtatcttggcttcatttcttctggtcaggcacagagcagcaagcacacaacaaatgtttgctgaattgaattgaatatcttactgtgaacaaggtgngactaaacagctaa

SEQ ID NO: 248468 - DNA, 699 bp, Homo Sapiens
atcatctttttgagttttataaatctccaaacttcaaaactagtagatgctggtataaaacctaataatttcagttcaatctttacattctccagggtccacttttcattctcttaagtacaagcctatttctcagtttggcatagtgccaagaacattgataaatgttggccccaaaatgattgtcaaagttctgttcacttaaattcactgtaattagtaagaatagttatcatttattttgggtgccttcaaagtagactgtgctaggcaacaatttctcttgataatctcacaatagccttggcatttgaagaaactttggcctagaaacatttatgcccccaagatcacacaactagaaagaagcagaagttgatttatctcctaaatctatgtgacttcaaagctggtcatcctaccactatgcctggttgcctatatcatttaatgtgatgaaggcactaatgtgacacccacaccgggctcaatttattagtaatccttctatatcacagccacacaagtgcttagagttcctggctgagatcagtctatataattatattacacttctcaagtttagtagtgctagacaaataggaagggagttttacattctttgtttatttgcaataatttcatgattgtcgtaattaaactatagcccgagtttaaagaagaagccagcacaaaaaa

SEQ ID NO: 248469 - DNA, 955 bp, Homo Sapiens
  misc_feature (883)..(883): n is a, c, g, or t
  misc_feature (911)..(911): n is a, c, g, or t
  misc_feature (920)..(920): n is a, c, g, or t
  misc_feature (936)..(936): n is a, c, g, or t
tgtacaaaaagttgggtaactttgagcagagaaagtgggaatttggaactggattctctttagagccaggaagagcctcctgaggcggccagatgtctgctggtggccgcccagccacatgcttgtctgcctgagtgcaggtctaggaagcctctgggcatcccccagggtggggtctgggccgctgagctgtgtgctgctgctgggccaccgtgggccttaccttgacggtcactctgcctgctagggggtctccctggagctgtgggcatttccgtgcactgactgagcagaggcaagggctgccctgtccgccaggggcagggtttgcgggccttcctttccccacggcgaggcatgggtgaaagtggccatggcggcagggttaggggcaggtgaggagtgggagtcgcagcaccctaggggcctccatccgcagccttgggagactgacgctcctcgaacatgaatagaatgtggagaccacaacccccacacatgtcgttggttcaggtcgccctgctttgcctgcctaatggagcacatcttgctgccagaacctcactggcctctgggggtcggcaggtgcagagccacctggacgcctggagaccacctgggatgtttcctctgtgactgggaatggccttgacaacagagtccagccaagtctacgttattttctcatctcctgacaacactgggatgtcatatttattagtcagcctggtctcggagtgaaagagcgtccctggcgcatctcccacgcgccctgggctcctggtgtgctgggtgccagcctgggagcccagcgcttctgggtgatgccccagggctcagaggccctggatggctttggtctcgagacagctgggggaggggncctgcttctgattgtcctgggccccagnccccacctntgcaagggatcggtgngatgtgctccataatcgga

SEQ ID NO: 248470 - DNA, 768 bp, Homo Sapiens
  misc_feature (517)..(700): n is a, c, g, or t
  misc_feature (718)..(718): n is a, c, g, or t
  misc_feature (754)..(754): n is a, c, g, or t
cacaactcaacccttccaaacttttttcttcccagcaaggaaggtgaaagcccatccttctgtcttctcttttcttcagctgtgggaccatccacccaggcttcctacatacaattcagcccctccctgtccctccttccactcctccagttcaggtgcattttctcatctctatcttgatttctgacatagctcctgagtggtccagctgccaaaagtcttactcttcccatatcctcttaccatctgtctgaaattcaaatctgactgtgtcattccctttctgagacttaccatcaccatagggatgccattccataacatctgcaatcccgaccagatgttccattatcaggcttccatatttgtcattgctatctcccattatgcccggcattgcactttgtacttgagtaatatagaactatgtgtagttttcagaaatatcatgctgttccatacctggtgcctttggttacaattttttcctctacctataaaactctaccccagtgannnnnnnnnnnnnnnnnnnnnnnnnnnnnnnnnnnnnnnnnnnnnnnnnnnnnnnnnnnnnnnnnnnnnnnnnnnnnnnnnnnnnnnnnnnnnnnnnnnnnnnnnnnnnnnnnnnnnnnnnnnnnnnnnnnnnnnnnnnnnnnnnnnnnnnnnnnnnnnnnnnnnnnnnnnnnnnnnnnnnnnncctctacctcttcatttncagtaggataatttctactttccgattatgatttangtaagactttctct

SEQ ID NO: 248471 - DNA, 158 bp, Homo Sapiens
ttggctcatcgctctgctcccgctccttagggaagcctcggtgattctgccacagcctcagcctctgtggctctgtgacctgccggtattggatgattcgtatctaagactctgggacactcctgaagtcgggaaatgacggagtcttcgctgtgtcg

SEQ ID NO: 248472 - DNA, 724 bp, Homo Sapiens
  misc_feature (202)..(599): n is a, c, g, or t
ttttctttttaaatgctttatttacttaaccaaatagtaatcaaatcattgcaaattcttatatggaagatttaggcgctggcagcaatagttacataaattataatgtcaactatgacaaaccttctatgtgtctagagctagaatataaaatagaagtgtgccatcatggctacaaatggttaagaatatagattctagnnnnnnnnnnnnnnnnnnnnnnnnnnnnnnnnnnnnnnnnnnnnnnnnnnnnnnnnnnnnnnnnnnnnnnnnnnnnnnnnnnnnnnnnnnnnnnnnnnnnnnnnnnnnnnnnnnnnnnnnnnnnnnnnnnnnnnnnnnnnnnnnnnnnnnnnnnnnnnnnnnnnnnnnnnnnnnnnnnnnnnnnnnnnnnnnnnnnnnnnnnnnnnnnnnnnnnnnnnnnnnnnnnnnnnnnnnnnnnnnnnnnnnnnnnnnnnnnnnnnnnnnnnnnnnnnnnnnnnnnnnnnnnnnnnnnnnnnnnnnnnnnnnnnnnnnnnnnnnnnnnnnnnnnnnnnnnnnnnnnnnnnnnnnnnnnnnnnnnnnnnnnnnnnnnnnnnnnnnnnnnnnnnnnnnnnnnnnnnaggatgaaactccatttcaaaaaaatagatagatagattgattgattctagagtcagaatgcctgtgtttgagtcctggttccaccagtcatcagccaggtagtcgggatcaggttatttagcta

SEQ ID NO: 248473 - DNA, 585 bp, Homo Sapiens
acaaattccctcacttatttatttctgcatgcagatgcttatttaactcaggctaagtaggttaaggtaagaaattctggaatgggaagacagatcattagagaagaggatagtggagcttctaagagagtccaggtagggatcacacccagactctgcattctttcccctcctctgaacgctgccccttgacgttcttcggtttcccttccttcagagcatgtgcccaatatcactgtacacattcacgtagttctttccgcctctgacctgtgattgcttggggatctgagcaccacggactggactggggtgacctggtgggttgggctgaatgcgggcgctggggcagctgccatggccaagccttgccctggagaacagctgtgctgggcccgctcagacgtacgtgcctccccagcagactggctgcatctggtatcctctttgacttcatctgcatctctgtaactcgaggtcaagcagaaaagaataaccatctgtcaaggcgtctggctcatgctcaagaatgcagctcagtttctcagctgacaacacacatctgacccaaggtgtgaagctcag

SEQ ID NO: 248474 - DNA, 332 bp, Homo Sapiens
  misc_feature (205)..(205): n is a, c, g, or t
  misc_feature (228)..(228): n is a, c, g, or t
  misc_feature (264)..(264): n is a, c, g, or t
  misc_feature (288)..(288): n is a, c, g, or t
  misc_feature (304)..(304): n is a, c, g, or t
gcaagaactgctctttattctgatacacacaatataaatttcaacctaagcactaccttaaacatgctaagtgatgaatgttaaagctgggccttgggtacatgagtgtttataacactgttatctagtctttttgtgttcatgcttaacattttctaaaatgaaaagttttctatgactcaagggtcatcatagggaaaaaaanggttttaaaaattggctttaacnggatagtgtaaagttgaggagttgttacatctcctncctaaggctgactttatgctttgngtaaataatgcatttnccacttcctcattttgaatctacagcaa

SEQ ID NO: 248475 - DNA, 913 bp, Homo Sapiens
ttggctcctctctattgttaaacagtgggatatcttgtgcaggttttcagttgacaatcaattttaaagattagtttcggtccccatcaatcaattatttattaacccatcaataaaaatttaaatgctctgtgaggtacaatagctattaaaagagacagaggcactttctgtgtccagaggggcttttagtctgctctggaaagcaagatgcgtgcagatgagtgacgcagtgcatcgtgtggatgcaaagggagggactcacatgggaaccagaggagctacgaagggaggcagtggggactggtgggtcgagacctggaaataacacatgaataggcaacaaaggtttcctttcctcttccatgcacttcagtccttgaaaaacgtcttaccacggaattccacagcgtaccaagcgattccacagcttgatggcacactctcctttctcagcattcttgaaaatggcgtgtgagccaagccatcttactgagaaattaccttaaaccatttgatgaaccaaaaatattttgtaatacccatctccgacattaggtaggcaaatcacacagaaacaccgaggtcttctgagtcatatttatctgaaaaatcacagcttgggtgcatgtgaagccagaggagcactcctgggggcctgcggtgccattcacttcaggttcccctggggctttcacatgggccatgggagcacccaggcaagtgtagggttttgagcctttcagggaggggcggcatcagccagcaccatcgtctcctgggtcttgtgcctcttccttggttgcggtgttgtcagggccagaattgggcaattcccgggtgacatcccaggtgtggctgctgacacggagcacaggtgaggttcactgagacaccctgctcctgtggtttg

SEQ ID NO: 248476 - DNA, 898 bp, Homo Sapiens
  misc_feature (806)..(806): n is a, c, g, or t
cccttcatgccaactttgtacaaaaaagttggcagctgagttgggctgaggtgtccctagctggctctgcggctcttccgggtctgggctcggagattcacaggcggcccgcgaggccgagcgagggacgcatggccctgaggcggccgcagggcttggcggggtccggaggttgacctcgcccccgcagccggccttcgaggctgcctcctccaggcagcctctggggcccgcgcccgcgcctgctcaggctcccgtgttcaggctgcccatcccctccccaccggcgtcccggacgttgggacctgtgaccgtggcctcgggctgggcttccaaagccggccgcagcccggcgacccccgaggcctctcgccccgggcccctagacctctcactatgaccgcggccgccgcctccaactgggggctgatcacgaacatcgtgaacagcatcgtaggggtcagtgtcctcaccatgcccttctgcttcaaacagtgcggcatcgtcctgggggcgctgctcttggtcttctgctcatggatgacgcaccagtcgtgcatgttcttggtgaagtcggccagcctgagcaagcggaggacctacgccggcctggcattccacgcctacgggaaggcaggcaagatgctggtggagaccagatgaatcgggctgatgctgggcacctgcatcgccttctacgtcgtgatcggcgacttggggtccaacttctttgcccggctgttcgggtttcaggtgggcggcaccttccgcatgttcctgctgttcgccgtgtcgctgtgcatcgntgtcccgctcagcctgcagcggaacatgatggcctccatccagtccttcagcgccatggccctcctcttctacaccgtgtttatgttcgtgc

SEQ ID NO: 248477 - DNA, 831 bp, Homo Sapiens
tgcctctgtacgtggtcgctgacatcgccacatccttcaccgtgctggtcggcatcttcttcccttctgtaacaggcatcatggctggctcaaaccgctctggggaccttcgtgacgcccagaagtctatccctgtggggaccattctggccatcattacaacttccctcgtgtacttcagcagtgtggttctctttggtgcctgcattgagggtgtggttctccgggacaagtatggcgatggtgtcagcaggaacttggtggtgggcacactggcctggccttcaccctgggtcatcgtcatcggctccttcttttcaacgtgtggcgctggcctccagagcctcacaggggcaccacgcctattgcaggccattgccaaggacaacatcatccccttcctccgggtgtttggccacgggaaggtgaatggtgaacccacatgggcactcctcctgacggcactcatcgccgaagctgggcatcctcatcgcctccctcgaacatggtggcccccatcttatccatgttctttctgatgtgctacctgttcgtgaacctcgcctgtgcggtgcagacactcctgaggacccccaactggcggccccggttcaagtactatcactgggcgctgtccttcctgggcatgagtctctgcctggcccttatgtttgtctcctcctggtactatgccctggtggccatgctcatcgccggcatgatctacaaatacatcgagtaccaaggggctgagaaggagtggggtgacgggatccgaggcctgtccctgagcgcttgccctaacggctgttgcggctggaggaggggcct

SEQ ID NO: 248478 - DNA, 424 bp, Homo Sapiens
  misc_feature (17)..(17): n is a, c, g, or t
  misc_feature (23)..(23): n is a, c, g, or t
  misc_feature (35)..(35): n is a, c, g, or t
  misc_feature (48)..(48): n is a, c, g, or t
  misc_feature (54)..(54): n is a, c, g, or t
  misc_feature (75)..(75): n is a, c, g, or t
  misc_feature (389)..(389): n is a, c, g, or t
aaaaagctaatcccccntctaanttttacttaatnaaagaaacttaancccaanaaaacctaaaattgacttttncccaaaggtcccccaaccaagaacgtgggaacttcctcagacgtcagaagagtgatgtgagggagctgtgtgacccatagaaagtgacgtgttaaaaaccagcgctgccctctttgaaagccagggagcatcattcatttagcctgctgagaagaagaaaccaagtgtccgggattcagacctctctgcggccccaagtgttcgtggtgcttccagaggcagggctatgctcacattcatggcctctgacagcgaggaagaagtgtgtgatgaggggacgtccctaatgtcggccgagagccccacgccgcgcntctgccaggagggcaggcagggcccagaggatgga

SEQ ID NO: 248479 - DNA, 474 bp, Homo Sapiens
  misc_feature (13)..(13): n is a, c, g, or t
  misc_feature (23)..(23): n is a, c, g, or t
  misc_feature (44)..(44): n is a, c, g, or t
  misc_feature (67)..(67): n is a, c, g, or t
  misc_feature (72)..(72): n is a, c, g, or t
  misc_feature (80)..(80): n is a, c, g, or t
  misc_feature (92)..(92): n is a, c, g, or t
aaatccgcccctntgggaaaatngcccgggcccttttgtaaaantcaagggcccgggtcctgttgtnaatgnaagccagnacccctaaatgnatcctgggaagggttttaatgggttcctgaagcctgaaccttaaatcgatttaggttgaaccctgagggtcctggttcgtgggttaaatagatctggggcgggatttgagggagctggtcctgaggggttcagggaggccctgagggaagaggtgggccttaatggatctgggcggagcctgagtgaaggggcggggctgactgcatgaatggcaggagtcgggcttatgggctagagggaacactgaatggaagctcgggaccctggggctgatctggctggagagagctctggaatgggtttggggatgggctgtccttgagttaggggcaggacttagtggctcttaaaggggatgggagctggctctcgttccgaatt

SEQ ID NO: 248480 - DNA, 543 bp, Homo Sapiens
taagatatgccaacatttattgttgcacaagcctgttgcagtcctgaggggatcttctggcagaggtgtgggtaggaagctgagtggccactggggtgaagggcagacagaggaggctgtgaccagcaggctcctatccagatgatacatgagatggaggcctcctcagccacactccagggagggtggggtggcaagggggattcagggataatggcattaataatacaagtggtaaacaaataaccaagaggatctggctggttacgatacacaaaagttagcagtaagagtccgtgctttcacattcctatcagacagatctgagttcaaatcctgtatgtgtagcagggtgaggtatctgctttctgtcagagcccatgggtgcacatctctgagcctagttacaacagttggcacataggtgggtggacaaggagggcagctcttgattcctgttgcttccacagcacagagagataagtatggctggtgtgacagatcccacttgacagatgaagccactgagacttggagagcagc

SEQ ID NO: 248481 - DNA, 1143 bp, Homo Sapiens
  misc_feature (572)..(593): n is a, c, g, or t
  misc_feature (620)..(645): n is a, c, g, or t
ggacccaagctcgggacttgttgggtgatccccaggaaattatggtagacgtggatccatgttagttcccattccagaaaacttagggttaggaacctttccaaggaaagggttccaacggggtttcttcaagacttttaccctaaaccccatccaccggaatttttctagggccccccagagagttagaaaattaaataattgtgtggctctatgtgtggtgattaagtgctacagtcaatagttcttggcagtccaatatgtagttatatgccccttttgaagaaaaaccttacatttgccaaatcccaaactcttaaaattgagaaaggggttatttgtgtgacccaaacaactcacacggaaagattcctctcaacatgaaaatcccctgctacatgagataatttgtttacatacctttaattccctaacaaagaaaaagagagaaaagaaactggaagctaaagaattgagagcttttgccaactgaagacgaagcagaaaataaacttttcaaaacaaaacttttccaggcatatctttcaccatcacatatatagaatgatggnnnnnnnnnnnnnnnnnnnnnnttcctgcaattatacatcttttctttnnnnnnnnnnnnnnnnnnnnnnnnnntgagcttagcgcctgagagatgcggggtagacagcttcacacagggcagctgctaccgcatctctttttacccgaactttcggagaattgtgttgtacttatttatgcacagaagacacccgtttgctactagggacatttttcttcctaagatttgcagaacagatgcctctgaagacagcagcagggcactctgacctcggaaaaagcagcccgcggggccgcacataatttcaggcaccggcaggtgaagtgggaaggcggggccccagccccggcctcgcccactgcctctctcctgccaaaggggcggggcaacgaggcagcgcgcccggaaggctttcaagtgggaatcaagttttgagcacgagcaaatggggttcagactggccactgttataacaaaccctggggtggaattcggcctttcgcataggggctttaactggactctagttcctgggagcagaggggcgaatgaggcgggggatttctcag

SEQ ID NO: 248482 - DNA, 653 bp, Homo Sapiens
  misc_feature (562)..(562): n is a, c, g, or t
  misc_feature (609)..(609): n is a, c, g, or t
ggtccctctcctggtcccctcccggttggtccgggggtgcgcagggggcagggcgggcgcccaggggaagctcgagggacgcgcgcgcgaaggctcctttgtggacttcacggccgccaacatctgggcgcagcgcgggccaccgctggccgtctcgccgccgcgtcgccttggggacccgagggggctcagccccaaggacggagacttcgattcgggaccagccccccgggatgcggtagcggccgctgtgcggaggccgcgaagcagctgcagccgccgccgcgcagaatccacgctggctccgtgcgccatggtcacccacagcaagtttcccgccgccgggatgagccgccccctggacaccagcctgcgcctcaagaccttcagctccaagagcgagtaccagctggtggtgaacgcagtgcgcaagtgcaggagagcggcttctactggagcgcagtgaccggcggcgaggcgaacctgctgctcagtgccgagcccgccgcacctttctgatccgcgacagttcggaaccagcgccacttcttcacgcttcagnttcaaagacccagtctggggaccaagaaccttgcgcattccagtgtnagggggggcagcttctttttgcagagcgattccccgggaggcaa

SEQ ID NO: 248483 - DNA, 337 bp, Homo Sapiens
  misc_feature (87)..(87): n is a, c, g, or t
  misc_feature (116)..(116): n is a, c, g, or t
  misc_feature (171)..(171): n is a, c, g, or t
  misc_feature (229)..(229): n is a, c, g, or t
  misc_feature (258)..(258): n is a, c, g, or t
  misc_feature (260)..(260): n is a, c, g, or t
  misc_feature (308)..(308): n is a, c, g, or t
tgaaatgcaatagctcgcttttaataacaacatacaaaagtctggagaaagccccaaagtagtcccctgttcccagagcccaaagantaaacagatgggagaacaagaccctcctnttccttttcccccacagagaagatccctaaacacatcaccggaacccctcaaatnttcctgggaacttcaaacaaaaaaacataggcaacaaagagacccagtttccagtttnttcccagttggggtaggggacaggcctgntntcggggagggtaccgtggcatccttgcagatgggaaacgccttcatgntgggaccgggccgagggcagggctggggg

SEQ ID NO: 248484 - DNA, 981 bp, Homo Sapiens
  misc_feature (969)..(969): n is a, c, g, or t
ttgggcaatggcagtccactgccttgctgcagtcacagaatggaaatctgcagaggcctccgcagtcacctaatcactctcctcctcttcctgttccattcagagacgatctgccgaccctctgggagaaaatccagcaagatgcaagccttcagaatctgggatgttaaccagaagaccttctatctgaggaacaaccaactagttgccggatacttgcaaggaccaaatgtcaatttagaagaaaagatagatgtggtacccattgagcctcatgctctgttcttgggaatccatggagggaagatgtgcctgtcctgtgtcaagtctggtgatgagaccagactccagctggaggcagttaacatcactgacctgagcgagaacagaaagcaggacaagcgcttcgccttcatccgctcagacagcggccccaccaccagttttgagtctgccgcctgccccggttggttcctctgcacagcgatggaagctgaccagcccgtcagcctcaccaatatgcctgacgaaggcgtcatggtcaccaaattctacttccaggaggacgagtagtactgcccaggcctgcctgttcccattcttgcatggcaaggactgcagggactgccagtccccctgccccagggctcccggctatgggggcactgaggaccagccattgaggggtggaccctcagaaggcgtcacaagaacctggtcacaggactctgcctcctcttcaactgaccagcctccatgctgcctccagaatggtctttctaatgtgtgaatcagagcacagcagcccctgcacaaagcccttccatgtcgcctctgcattcaggatcaaaccccgaccacctgcccaacctgctctcctcttgccactgcctcttcctccctcattccaccttcccatgccctggatccatcaggccacttgatgacccccaaccaaatggctcccanaccctgttttac

SEQ ID NO: 248485 - DNA, 1000 bp, Homo Sapiens
  misc_feature (941)..(941): n is a, c, g, or t
  misc_feature (958)..(958): n is a, c, g, or t
  misc_feature (977)..(977): n is a, c, g, or t
  misc_feature (985)..(985): n is a, c, g, or t
ttggatttgctccacgggggatgcaccgtgcctggggagtgcaggtgcagctacggctggcaagggaggttctgcgatgagtgtgtcccctaccccggctgcgtgcatggcagttgtgtggagccctggcagtgcaactgtgagaccaactggggcggcctgctctgtgacaaagacctgaactactgtggcagccaccacccctgcaccaacggaggcacgtgcatcaacgccgagcctgaccagtaccgctgcacctgccctgacggctactcgggcaggaactgtgagaaggctgagcacgcctgcacctccaacccgtgtgccaacgggggctcttgccatgaggtgccgtccggcttcgaatgccactgcccatcgggctggagcgggcccacctgtgcccttgacatcgatgagtgtgcttcgaacccgtgtgcggccggtggcacctgtgtggaccaggtggacggctttgagtgcatctgccccgagcagtgggtgggggccacctgccagctggacgccaatgagtgtgaagggaagccatgccttaacgctttttcttgcaaaaacctgattggcggctattactgtgattgcatcccgggctggaagggcatcaactgccatatcaacgtcaacgactgtcgcgggcagtgtcagcatgggggcacctgcaaggacctggtgaacgggtaccagtgtgtgtgcccacggggtttcggaggccggcattgcgagctggaacgagacgagtgtgccagcagcccctgccacagcggcggcctctgcgaggacctggccgacggtttccactgccactgcccccagggtttctccgggcctctctgtgaggtggatgtcgacctttgtgagccaagcccctgccgggaacggcgttcgctgctattaacctgggagggtgactattactgcgnctgccctgatgactttngttggcaagaactgttccntgccccgngagccgtgccctggg

SEQ ID NO: 248486 - DNA, 1162 bp, Homo Sapiens
  misc_feature (572)..(583): n is a, c, g, or t
ttgtagattcacattgcagtacaactgtgcatcttgcccattgatttctaaatgtattaactacttaaattaatcctgaatcttttcccaggcttaagtgggataatgttttattgtagatgcatatttcctggctctacccagtctttctttgaagactttatcatcctattttctgaatccagtggctgactttaatcttctctggaggaactagataatttctagactaatgcttacactcatgatccagattgtaatttctgaactccttcttccaaatagaatcaaaacaagaaaggggaaagcctctcaaagcaactgtgcgttaataatgaaacactctttttttctaatccaaggagggtttcatactttttcttagtttcttgccctcttcccttctgatcaataattgtaataggaaatttgcaattgtgccaatactcagattcaatactgaactactttcttgcattgtaattcaaattccaaggttaacaactagctgtatgtttccaaaacaatcttattgtatatgtattttcttaggtgaagtttccagaaatgannnnnnnnnnnngcagagccaaacacacatggtaatttaaaaaaataatgcacgtatgtggtaaaaacagtaaaagcaaggtatcaagtaaaaagtgaagagtcctccctttctcattcccattcctactctctaattttttatatatccattttgtaagctataatacagagattccatatactcttcacatactttccccagtggtaacctcttgcataactataggacaataacacactataggacaaaaatcaagaaattgacattgatacaatccatcaaccttattcagagttcaccagtttaacacatgcttattgtgtgtctgtatttagttctatataattttatcacatgtatgctgatgaccaccaccacagccaagatacaaaacattttcagtgtaaagatttctcatgctacccttttatagccacagctacctccctccctccctgtacttccctaacccttggcagtcactaatctgatctttatgtcttgtcatttcaaaaatgctacataaatggaatcagattttgattgttttcattcagcacaatccctttgagatctatccaaggtttt

SEQ ID NO: 248487 - DNA, 445 bp, Homo Sapiens
  misc_feature (388)..(388): n is a, c, g, or t
ggcccaggaggtgtctctggctcacctccgtctgttcatcaccttcctccccagtgtttccacttatcttggatgttttagattgaaacagcctgattcccggaagaatcctcttcattcattgctagtgcttcccctcacctcccactctccacttcccagtttgcaaatgtggctttcgcccaccaagtgaaagcggactgagagcagcccttggggacggcccggtgcctggctgcaaggccgcgctggggctctgtcttggtgcacatggcttgaccgggactttccctgcttcccaccacttccctcactcccagacctccctcattctttttgtctcttcttttttgcctaaagccagttccttaacaccctattcttcctntgcaggtgggttgcagaattttccccacctttggggtttgtgggtggtggaagaggg

SEQ ID NO: 248488 - DNA, 388 bp, Homo Sapiens
  misc_feature (26)..(26): n is a, c, g, or t
  misc_feature (128)..(128): n is a, c, g, or t
  misc_feature (130)..(130): n is a, c, g, or t
  misc_feature (133)..(133): n is a, c, g, or t
  misc_feature (136)..(136): n is a, c, g, or t
  misc_feature (149)..(149): n is a, c, g, or t
  misc_feature (154)..(154): n is a, c, g, or t
  misc_feature (185)..(185): n is a, c, g, or t
  misc_feature (200)..(200): n is a, c, g, or t
  misc_feature (252)..(252): n is a, c, g, or t
  misc_feature (265)..(265): n is a, c, g, or t
  misc_feature (281)..(283): n is a, c, g, or t
  misc_feature (285)..(320): n is a, c, g, or t
  misc_feature (373)..(373): n is a, c, g, or t
tgaaacctcatccatatttgggaggnacctcatggacaagaaacagaatgtgaaagtacctaccccaaaaacaaacgcccttgtacctttgtaccgagccaaagagataatgtgttcctaaacccccntnggnctnttctgtggcgggncaaantggaattttcccagtgtgtaagcatttgganctgagaattgggaanacaaaattactcccagaagcccaaaactctttaattcccaaccgaagtcacncccaggctgggancgaagctccattaagnnncnnnnnnnnnnnnnnnnnnnnnnnnnnnnnnnnnnnngccaactctgttgacaaaaaaagggagagatttccatcctggttcagataaanttgttgctgtgtttt

SEQ ID NO: 248489 - DNA, 1234 bp, Homo Sapiens
ttggggtcccccggctcgcggagtgcctgcgagcgctgctcatggcgctctatgagctcttctctcacccggtcgagcgcagttaccgcgcggggctctgctccaaagccgcgctgttcctgctgctggccgctgcgctcacgtacatcccgccgctgctggtggccttccggagccacgggttttggctgaagcggagcagctacgaggagcagccgaccgtgcgcttccaacaccaggtgctgctcgtggccctgctcggacccgaaagcgacgggttcctcgcctggagcacgttccccgccttcaaccggctgcaaggggatcgcctgcgcgtcccgctcgtttcgactagagaagaagacaggaaccaggatgggaagacggacatgttacattttaagctggagcttcccctgcagtccacggagcacgttctcggtgtgcagctcatcctgactttctcctatcgattacacaggatggcgaccctcgtgatgcagagcatggcgtttctccagtcctcctttcctgtcccgggatcccagttatacgtgaacggagacctgaggctgcagcagaagcagccgctgagctgtggtggcctagatgcccgatacaacatatccgtgatcaacgggaccagcccctttgcctatgactacgacctcacccatattgttgctgcctaccaggagaggaacgttaccaccgtcctgaatgatcccaaccccatctggctggtgggcagggccgcagatgctccatttgtgattaatgctatcatccgataccctgtggaagtcatttcttatcagccaggattctgggagatggtaaagttcgcctgggtgcagtatgtcagcatcctgcttatcttcctctgggtgtttgaaagaatcaagatcttcgtgtttcagaatcaggtggtgaccaccattcctgtgacagtgatgccccggggagacttgtgtaaggagcacttatcctagaaaggccgtttctgaagactcagcaggaccgtggctgcctcattgtcatcttctgggaacgtcttaggaccttttgaaagagcccagcggacacctgcgggcttgtgtgcttttccctcagagacaacggttctttccggttttgctctacacagttccgtatctttcagagctcctgcagaattgttcaggggattagtttgtgggaaaggtctgaggagttccggggagctataattagg

SEQ ID NO: 248490 - DNA, 281 bp, Homo Sapiens
  misc_feature (222)..(222): n is a, c, g, or t
agaaaagtcaacagtaataacaataacaaaaagcagctgaaccacatcaaggacgaaaagtcaaacccaacccctatggagcccacctctcccggtgagcatcagcagaacagcaagctggtgctggcagagtcccctcagccaaagggcaagaacaagaaaaataagaagaagaaaggagacagagtcaacaattcaattgatgatgtctttctacctaangatattgacctaggacagtgtgggatatggttgagacagagaggggaagtgggatattt

SEQ ID NO: 248491 - DNA, 1124 bp, Homo Sapiens
  misc_feature (398)..(398): n is a, c, g, or t
  misc_feature (986)..(986): n is a, c, g, or t
  misc_feature (1090)..(1090): n is a, c, g, or t
ttggcgcttggcgagggtgctcacggggaacaccattgcccttgtgctaggcgggggcggggccaggggctgctcgcacatcggagtactaaaggcattagaggaggcgggggtccccgtggacctggtgggcggcacgtccattggctctttcatcggagcgttgtacgcggaggagcgcagcgccagccgcacgaagcagcgggcccgggagtgggccaagagcatgacttcggtgctggaacctgtgttggacctcacgtacccagtcacctccatgttcactgggtctgcctttaaccgcagcatccatcgggtcttccaggataagcagattgaggacctgtggctgccttacttcaacgtgaccacagatatcaccgcctcagccatgcgangtccacaaagatggctccctgtggcggtacgtgcgcgccagcatggacgctgtcgggctacctgcccccgctgtgcgaccccaaggacgggcacctactcatggatggcggctacatcaacaatctgccagcggacatcgcccgcagcatgggtgccaaaacggtcatcgccattgacgtggggagccaggatgagacggacctcagcacctacggggacagcctgtccggctggtggctgctgtggaagcggctgaatctctgggctgacaaggtaaaggttccagacatggctgaaatccagtcccgcctggcctacgtgtcctgtgtgcggcagctagaggttgtcaagtccagctcctactgcgagtacctgcgcccgcccatcgactgcttcaagaccatggactttgggaagttcgaccagatctatgatgtgggctaccagtacgggaaggcggtgtttggaggctggagccttggcaacgtcattgagaaaatgctcacagaccggcgggtcttacagaccttaatgagagccgccgtgcagacgtgcttgccttcccaagctctggcttcactgacttngcagagattgtgtcccggattgagccccccacgagctatgtctctgatggctgtgcttgacggagaggagtcagattgtcttgacagagtattgaggaggacgncggacccgactgcttcgaggggatgaaggggggt

SEQ ID NO: 248492 - DNA, 471 bp, Homo Sapiens
  misc_feature (73)..(73): n is a, c, g, or t
ttctacaaagaatgagcatttcttaaatattacaaacagtgaaacaaatatactagcttacagatatgtacantttatgactttatacttccaaaatgcaggaagataaattatatattttaatatacatgtaattttagatagattgaacatttcaatattgcctcttgtgttggtcttgcctgcattgtatgcatgcccatggcttgtcgctggatggaggaggggctcatggggatagaagggaagtcatggagccccatgctcatgcccagagcgccatcttcaaagcaatatttaattaaatattaacttattctgccctgggtcaaaaactgctatgcccatatgcaatgtaggatgtgttttcaagaaccacagctacatatttgggaatggaaacgtacaaatgctttaaaaaaatctaattctgtgatactaactcctcaaactctgagtcaattggggatc

SEQ ID NO: 248493 - DNA, 245 bp, Homo Sapiens
gattttatacaagcaatatatatatggatttctataatcactcgatgtgatacagtataaatatgctatggtttgtttgttatgaacagatagccaccagttacggccgttgtgtgtaactcctaagtactgtagtctctgggtgtcgggggtggccagggcgggggcggggtgcatttccatccttgtaaacccttcatagtactcagtcctgtatcgctcagtaaacattgctcttacttaca

SEQ ID NO: 248494 - DNA, 536 bp, Homo Sapiens
  misc_feature (489)..(489): n is a, c, g, or t
  misc_feature (506)..(506): n is a, c, g, or t
  misc_feature (524)..(524): n is a, c, g, or t
attcggcatgaggcgggggtaagggtcacggggggaatccagagtccagagtgagggctgctgctcacagtgcccggctgcctggggaatcagctagaagccaagctggacaaaccagatgtggtgaactggatgtgctaccgcaagacagaggacttcttcaccatctggctggatctcaacatgttcctaccccttgggtagaactgctggatcgataacaccagggttgtctacaaccggagctctgggctcgtgtccaacgcccctggtgtccagatccgcgtccctggctttggcaagacctactctgtggagtacctgggacagcagcaagctggcagggtacctgcacacactggtgcagaacctggtcaacaatggctacgtgcgggacgagactgtgcgcgccgccccctattgactgggcggctgggagcccggccagcagggagggagttactaccgcaagcttcgcagggctggttnggagggagattgcacgnttgccttttggggaagcntgtttttccttc

SEQ ID NO: 248495 - DNA, 344 bp, Homo Sapiens
  misc_feature (49)..(49): n is a, c, g, or t
gtcaccttgaaacccccaagtagttttgaaattccctttgaccttgaanccttacctcatcagtaagagaactcttggtgtcctgtcaggttttatgtggtcctgtaaagttaggggttcctgttttgtttccttatttaggaaagagtactgctggtgtcgaggggttatatgttccatttaatgtgacagttttaaaggatttaagtagggaatcagagtcctttgccgagtgtgacagacgactcaataacctcatttgtttctaaacttttttctttgataaagtgcctcaatctgtgccttcgtatagagtaacctgatccgctactgctcatgtccga

SEQ ID NO: 248496 - DNA, 874 bp, Homo Sapiens
ttggcacaggggaatataggccttactcccctgtgtgtcctcttgagaacgatgtcctctttgcttatgatcaacccaagcaggactcttctctccctggacgcctctcccctggtctggaatcttccggttctgccagaattggcctttcccagatgctgcaagcttccatttgaacccctttttctgtgtggcccctggggctgcgagaccaaaatccatgagttctgtgtaccctagacctttggaaggtgagagcagggccctgagaaaaggcagccacctcctctccctggctgaacccctgccaccctactcctcaccagaattgtcagtggcctttcaccacagtggtccttcctgcctgagccctgcactgtcccagaccacacagaagtctggtcacctctgggcgcctgggatggtcaccgaagagaagcacgctgtccccgtctctcctggcttctgccagaaaatcgaaacaagtgcaaatttaacacactgttactgccgaagcttgaaactcccccaggacttgtcctttgatccttccagaaaccacccaggtccggcacttggagccccccggagagggacctcccagccgagccctcaaagaactcccatgaaatcaggaactgcttgatgaaatgtatctccttgtaccttggaagatgaagcccaaacacccacacctctgtctccccccagggctcggggatgtctccagcagcccggccacgcagcttcccaggtgggcctcggggaggtgggagcagggaccatctctgtcccctccaccctcactccatccacctcggagaccaccctcccccagccagatacggaataaaactacagacgcagacgtcgg

SEQ ID NO: 248497 - DNA, 873 bp, Homo Sapiens
  misc_feature (840)..(840): n is a, c, g, or t
  misc_feature (848)..(848): n is a, c, g, or t
tttttttccataaaaggtagcaagtatttctaaaaattaatctttgcagatgtttttcctattataacttctgctggagaggtggtgatgggactctgctcccaaaagactcccacctgagccaggaaaagagaagctaagaaaagtcaactggcctctttacactggtatgatagccaacttgacactaggagttccgaaatgttacatagcatctaactgcagcagaaagtgtatcagtatttttataagctcactaaaactgtaggaatgaatatagacaattcagctacattttatgaagttataaaattattagtttgtattggattttcaaaagtagtatttaggacatatgtgggcattatttaccattagataactttaaaaccaaaaaaacctgttctatagtgtatcattatagaaattgataaatgagaaaaggtacatttatttttcaagcagtaaatttttacagaaaaattttttataaaggtattaaatgaatcataatggaaagtactatattttattagtttttatttaggaaatggaactttcactttatcccaatattttcttcagaggtagactttgtttttatttcaatgagttcttccactcgagctagaacactttcaatcaaatcaaatgtgaaaagagctgaatgcaggaccttaagctgcatttcaggagggcatattaggggatctcttctccacttacagttataggaacaaaggatctttaggatttctggggcctcttgggctatttttaatttctggcttcataatgtggcttttggacatattaagggccccatatggaggtggggcnttaagggnaattattcccccaaaatttcccagg

SEQ ID NO: 248498 - DNA, 556 bp, Homo Sapiens
gagaatggctttctttaattttgaattggagcaatatgctttcctgagcatcaggaaagagtggtgatgtcacagcaaaggagggaggcggtggctaagaacatgcacattcttgaatgtcctctgcatggtgcctggccttctggatggtttcggacaaaactttatgtgcctaggtgggagtgggaaaaaggagtgggggaaggataaagccatctttggacacccactccccactgtggataaccacagcgtgtgggccgaacaaagctgattaggaacacagccctacctcgggagggctgccatctgccagggccctccttcccctcccagcctttcaagaaatgttatctatggaaagggggaaaaatgccagccacatcctcattccaactctatccttaatgcagcttcacaaaattcctaaattctatcttgggtccttgaagagattggactatgacttgggtggccccccaaaatcctcaccctttcccttccctcagtgcaaagtctcacctgtgcaaagacatcacttttaattatttttttc

SEQ ID NO: 248499 - DNA, 422 bp, Homo Sapiens
  misc_feature (13)..(13): n is a, c, g, or t
  misc_feature (379)..(379): n is a, c, g, or t
  misc_feature (388)..(388): n is a, c, g, or t
  misc_feature (402)..(402): n is a, c, g, or t
  misc_feature (409)..(409): n is a, c, g, or t
taatatttgaagngatttattctgagccgaatctgagtgaccaatggcccgagacagagacctcaggagggcctgagaacatgtgcccagggtgatctgggcacagcctaattgtatacattttagggagacatgagacatcaatcaaatacatgcaagatccacattgcttctgtccagaaaggtaggacaactcgaaggtggagcggggaggttccagggttataggtagattcaaaatttttttattgggcaattggttgaaagagttattatcactaggaaaggagtgtctagggttatggataagggggttgtgggagaccaaagtttttattcatggcaaagggaagactccgggttggcacgctttcagagngttttaggnttgttaaatgcccncttaatncagactttagggc

SEQ ID NO: 248500 - DNA, 785 bp, Homo Sapiens
  misc_feature (622)..(622): n is a, c, g, or t
  misc_feature (641)..(641): n is a, c, g, or t
  misc_feature (654)..(654): n is a, c, g, or t
  misc_feature (659)..(659): n is a, c, g, or t
  misc_feature (702)..(702): n is a, c, g, or t
  misc_feature (709)..(709): n is a, c, g, or t
  misc_feature (721)..(734): n is a, c, g, or t
  misc_feature (744)..(744): n is a, c, g, or t
tgtacaaaaaagttggattgtcagccaccccaaaccaatttatttgaaagctcattcttccccagacttggactctgggtcagaggaagatgggaaagaaaggacagattttcaggaagaaaatcacatttgtacctttaaacagactttagaaaactacaggactccaaattttcagtcttatgacttggacacatagactgaatgagaccaaaggaaaagcttaacatactacctcaagtgaacttttatttaaaagagagagaatcttatgttttttaaatggagttatgaattttaaaaggataaaaatgctttatttatacagatgaaccaaaattacaaaaagttatgaaaatttttatactgggaatgatgctcatataagaatacctttttaaactattttttaactttgttttatgcaaaaaagtatcttacgtaaattaatgatataaatcatgattattttatgtatttttataatgccagatttctttttatgggaaaatgagttactaaaggcattttaaataatacctgccttgtaccattttttaaataggaagttacttcattatattttgcacattatattttaattaaaatgtgtcaatttggnggcccaggcccccattttntaccaataaccanttttnatttatttttagggccccatttggggccttattagggtccacnttatccnggtcctccaacnnnnnnnnnnnnnntttatatttngggcccccttttaagggttgggggcccaaatgggcccgttt

SEQ ID NO: 248501 - DNA, 373 bp, Homo Sapiens
gcgacaagtaccgcaagcggcactcatcctggtgtcactgctggcctttgccggcctcttcgccgccctcgtgctgtggctgtacatctaccccattaactggccctggatcgagcacctcacctgcttccccttcaccagccgcttctgcgagaagtatgagctggaccaggtgctgcactgaccgctgggccacacggctgcccctcagccctgctgggaacagggtctgcctgcgagggctgccctctgcagagcgctctctgtgtgccagagagccagagacccaagacagggcccgggctctgggacctgggggtgcccccttgccagggggagggttgattccggcgttgagatggtttgttaaggg

SEQ ID NO: 248502 - DNA, 201 bp, Homo Sapiens
agcctcctgagtacaggtgcacgtcactgcagccagccagtctgaacatcttgattccagggtggaaaacccttcttgtctccatggtaatggctgggctctcccaccctccaaatagttcagctgccaagctcaagtccagtggaatttatcaacaatttatcaccctgcccctgctctgctagacaatttcatgcattc

SEQ ID NO: 248503 - DNA, 263 bp, Homo Sapiens
  misc_feature (21)..(21): n is a, c, g, or t
  misc_feature (171)..(171): n is a, c, g, or t
  misc_feature (176)..(176): n is a, c, g, or t
  misc_feature (191)..(191): n is a, c, g, or t
  misc_feature (196)..(196): n is a, c, g, or t
  misc_feature (219)..(219): n is a, c, g, or t
  misc_feature (224)..(224): n is a, c, g, or t
  misc_feature (230)..(230): n is a, c, g, or t
  misc_feature (245)..(245): n is a, c, g, or t
cctgggctggtcatttgtctngctgtgcccaacctgccattaatcccatccatcctgagcccgacgtggtcatttctctcaccacccagcctaccgcccgacgtggtcctttccctcaccacccagcctaccgcccgacgtggtcctttccctcaccacccagcctaccgnccgangtggtcctttccctnaccanccagcctaccgaccgacgtggtnctttnccttancacccagcctaccgnaccgacgtggtcctttcc

SEQ ID NO: 248504 - DNA, 267 bp, Homo Sapiens
ctgggtccaaaatctgaagtggggaaatggggttagtttggaacccacatgactgagtttgaagggtgcccccctcacccccagctgaggtaggtgggtcagagtctggcccaggtgagaggaggcaccccagtgcttggccctgactctgccccctggacaccttcttcagtcaggaccccaaaacaaggagacacaggtaggaggagagggacaactggagtctggagccctaggtgaggggtggttaacccctgtgtgttgcat

SEQ ID NO: 248505 - DNA, 938 bp, Homo Sapiens
ttggcctgtcaattggccttaaagaatatgcaaacaatcttatagagagtggtgttcacggagcacttctggccttagatgaaaccttcgacttcagtgcactggcactgctgttacagatcccgacgcagaacacacaggctcgtgctgtcttggaaagagaatttaacaaccttttggtcatggggactgatagaaggtttgatgaagatgatgataaaagctttaggagagcaccttcatggagaaaaaagtttagaccaaaggacattcgtggcttagctgctgggtcagcagagactctccctgcaaacttccgggtgacttcttctatgtcttccccctctatgcagccaaagaagatgcagatggacggcaatgtatcaggaacacagaggttggattctgctacagtcaggacttactcctgtctaaagtctcctgttgtttacccacactacttctacagatgattatgcagcatttgaatccaacaaagactacattttggaatccagtggaatctttaatcttgttaatacttgttatatggaccctaagatattttattacagagtttttaattagtgaaaaattcatgaataccatagagaaaatattttagaatttaatgtttcttatatttatgtaaacttatgactcttcatttatatagttacttactttttcatgtatatccaggctataaatatcctttcaaatcatgttcttatacctaattttagtctttcaaatgaatgtactgtaatgcttgtatgtataaatcctatgaatagagggcttttgtaaattatgcatttattgtaattatcattaatttttttaatgataaaccatgacaaaggattttacgtttataaaattatgacagaagccatgtgcattatccttaagcggagcacgcggggacccaggtc

SEQ ID NO: 248506 - DNA, 851 bp, Homo Sapiens
  misc_feature (73)..(81): n is a, c, g, or t
caacattaagggccatattgtaagatttccatgttaatgatctaatataatcactcagtgcaacattgagaannnnnnnnnaatggctcaaaaatggaaactgaaagcaagtcatggggaatgaatactttgggcagtatcttcctgatgtcttcttagctaagaggaggaaaaaaaggctgaaaaaatagggaggaaattccttcatcagaacgacttcaagtggataacaatatttataagaaatgaatggaaggaaatatgatcctcctgagactaactttgtatgttaaggtttgaactaagtgaatgtatctgcagaggaagtattataaagatatgtcattagatccaagtgctgattaaatttttatagtttatcagaaaagccttatattttagtttgttccacattttgaaagcaaaaaatatatatttgatatacccttcaattgccaaatttgatatgttgcactgaagacagaccctgtcatatatttaatggcttcaagcaggtacttctctgtgcattatagaatagattttaataatcttatagcattgtatattattattgctgttgtcactgttattattattgtggatactggcccttggtgtgttgcatagctccctatgtattctctgtttccatctttaagttcccagaccaatatacattaagagttttgcatggtctaaattgtgtttatttcaaccacgtggaaagctcctggaaagaaattttacattcggttgttctgtgctcctaatgacactttgaccttgttgaacaaatggcaaagcttacccaaggatttgattgtttggtgaattatctgcatgtgtgc

SEQ ID NO: 248507 - DNA, 356 bp, Homo Sapiens
  misc_feature (235)..(235): n is a, c, g, or t
gctctgtggcactgctttctgaatctagcagggccccctaggctcttcctttcaagtctcaccctttctttaacctgtccagcaatcaacaagttaggaccagggtgaagggtggtttcagggaataaagagaatggaatcaattgctgggaccccctgtctgctgcagtaatgccagccaaagctgccttgggtcttcatccttgtgaggttgagccagggaaaggtttgaganccatatcctgggcagtctgaggatgtagaaaagagtaggtgaaaactgcttaggtacgttgagagggaggtgatatggtcagaagggagctgataatcagtgtccttttactcctgtcact

SEQ ID NO: 248508 - DNA, 958 bp, Homo Sapiens
  misc_feature (882)..(882): n is a, c, g, or t
  misc_feature (930)..(930): n is a, c, g, or t
  misc_feature (939)..(939): n is a, c, g, or t
ttgggaagctgaagatgtaagaaggggccagatcataggtctcagtgaggattaaatgataaagtgagatactaggtgactggcagctggtatcattgctgttatccttgatatatgccccctggcttgaggctctattttatgttgagccccacaggaggacgaagaggtcccaacaggacatcttactgtcgaaatccgctctgtgagccgggatcctcggggggctctagtggaagccacacttccagtgcatcggtgaccagtgttcgttcccgcaccaggagcagttctggaacaggcctctccagccctcctctggccacccaaactgttgtgcctctacagcactgcaagatccccgagctgccagtccaggccagcattctgtttgagttgcagctcttcttctgccagctcatagcactcttcgtccactacatcaacatctacaagacagtgtggtggtatccaccttcccacccaccctcccacacctccctgaacttccatctgatcgacttcaacttgctgatggtgaccaccatcgttctgggccgccgcttcattgggtccatcgtgaaggaggcctctcagagggggaaggtctccctctttcgctccatcctgctgttcctcactcgcttcaccgttctcacggcaacaggctggagtctgtgccgatccctcatccacctcttcaggacctactccttcctgaacctcctgttcctctgctatccgtttgggatgtacattccgttcctgcagctgaattgcgacctccgcaagacaagcctcttcaaccacatggcctccatggggccccgggaggcggtcagtggcctggcaaagagccgggactgacctcctgaacaattncgggagacgtggaagcagcacagaaggacagctgtatggcccggatgncatgcccanccatggcttggtggcctgt

SEQ ID NO: 248509 - DNA, 837 bp, Homo Sapiens
  misc_feature (826)..(826): n is a, c, g, or t
ttggccctctagcctcgtgggtctgttccccagggcccagggccctgcagcctccagccagagtgccctcatgcctcctgctcccaccacccgttggtgcagccagccgccaactggcctggaccccagccccttgcacctccatgccaggctggcactgctgaggcacatggcagagcaggaccgtgacttcttggagaatgaacagttcttcctggagaccctgaagaaagggtcctacaatttgacatctcattcagcctgagtgggaccccagccgattccccaacagagggttcggaccccagaactgtcctgttcctccggctgcctccatggaggcagtgcctggggaggattctgagatgcttgaggcctgatgacagctcttccgtggacagggtgcaagtgcatcctttccaaatgtgccagcccggggcagcccctgcctctggggctctgtggtgtaggctatcttaccatggctttggctgccctgccccaaagccattggcttggatctgagggtctgagttggcagcaaggacccccagctctcactgggctctgtgggctccccctgggctctgtgggctccccctgctccacaggtagactgttgtgggctctttttgcctgggcctcttctgaggcaggagctttcttgagggatgccacaaacagccttccctactccctgccagagcagttccctccctgatgagctggataagggccctctggcttcctgacagtacagggagggcaccagctagatcctcccttgtgggtgtgagatgttcctgggaactcagccagggccttntcctcctgggg

SEQ ID NO: 248510 - DNA, 1035 bp, Homo Sapiens
  misc_feature (943)..(943): n is a, c, g, or t
  misc_feature (974)..(974): n is a, c, g, or t
ttgggtggggccatggtgtttttccatggtgtttggttggagtacagccttttttacccttgcttggctacccttttctggtcctttggcaggagagagcaggactctcttagggcttttttttcccctgcatttattgacatttccaggttgctgactttttcagctccaagttggaaatatatgagctgaaaagaaaatgtagggaactcatcacagtgttgttacttgggccccaatgttcctagcctattttctgtctactattcagagtcttgctgtgttttaatataatatccaggatttttatatgcatttagcagaaggatgtctactctgcctttgtagaagtgtctcactgatttttacatatttttccagcacacaaacatacacaatttaactcaaagcatcttagcagagcttaattaaatggatagatgtctgttccctttgctggacgccaagaatacaaaaaagaacaagtgacaattttctctgtcttagggagaagagacagcagaagtgtaaatgatccctaaagagtgatagatgttatcatgaagccacaggaggggtgccaggctgcacaaaagagacactggatgcttcttggtagtagaggcagtggcttcccagccttggggctaaggcttgtagggtgaattggaacttttcagatgagcaaggcaaagaagggaccttctaacattccttggatggaacatttttgacattttcccatttacagctacttatattttctacaagtgtcactgtgaccaacttatgtacacatactttttcttgcttagttataataatctgttcttaaagaaaatgtcagtctctacattctatggctgactgttaagggaaaggggcacccacatctggctcctacttaggctttttttctgtgggttcttacacagtatttccnttttttcttttcttggaaggggactcctccnttcttttcttttcttggaaaggagtttttaaaggagttaggtggggcccaaaagtggaccg

SEQ ID NO: 248511 - DNA, 435 bp, Homo Sapiens
  misc_feature (383)..(383): n is a, c, g, or t
  misc_feature (398)..(398): n is a, c, g, or t
  misc_feature (404)..(404): n is a, c, g, or t
  misc_feature (408)..(408): n is a, c, g, or t
agatccccaccccattgttcttgtcaatgagcaggagtggggtggacctgccatcctgcgaatcctttacagcctgcagcgctccctgccaactcttcacaaccattagcacccactaacaatccatttcccctggagctcttcactctaaagatagaagaccaaaaaatagaagtgtcctcatttctcacagtactacaggaggaggtgagaaccgatgcatccgtgcatcttaggagaatctcatttcagacctcggctttgagtgcgcctcctgctcagtcagccctctccctcgctgcaggttgacgtgggtcagacagtgcgcagtcaggcagccttgattttcggttctggggtttggtccaaggattgaccgggtncctttttgttcattngccccnttcntgttgcaacccctgggtttgttttggc

SEQ ID NO: 248512 - DNA, 350 bp, Homo Sapiens
  misc_feature (169)..(178): n is a, c, g, or t
attcggcacaggtgaacatgcacaagtttctgcatgaaaagatattaatatattaatcacatgtatgtgccttttggttacatgcattaaatctaacagagttaaattatttcagtggctcttttggcctcttactaggggggatagtcttgtttctagcttaaacaannnnnnnnnngcacaaaatttcatttttaataaaagtggtatcttttgactgagttattgttttgaaaagggtatatagggtttccagtaggtcaacaaccatatggtaaatggtttttataaaatttctcaatttggggggacaaggtttttttgtggggtctaaatgtgggggcttaagg

SEQ ID NO: 248513 - DNA, 324 bp, Homo Sapiens
aattctataattttgatttacttatttttttctctcaaagaacttgagaattgggattacggaggaactcaaatagctatatggtaataatgtcatcataacttcaacagatatgtattgagaatcctagtactagacactgagaagtccagctgtgaacaaggtatatgtggtttctgcctttctgaatcttaagtctagtagactgcatagatattttgaacagtaattgcctaggtgcttgctgatgagttttgcaacacctgaagaacgaagtaactggggtgtcaaggaaagccagttgacctgtaagaagagatgtgg

SEQ ID NO: 248514 - DNA, 299 bp, Homo Sapiens
  misc_feature (99)..(99): n is a, c, g, or t
  misc_feature (262)..(262): n is a, c, g, or t
agcttcaccgatgacaacagaggaagaagggaactgggatttgggtaagttctcctccactgtttgaccaaattctcagtgataaatatgtgtgcaganccctagaagagaaaacgttgactttgtttttaagtgtggcacataaggatctgcagaattttccgtagacaaagaaaggatcttgtgtatttttgtccatatccaatgttatatgaactaattgtattgttttatactgtgaccacaaatattatgcaatgcnccatttgttttttatttcattaaaggaagtttaattt

SEQ ID NO: 248515 - DNA, 507 bp, Homo Sapiens
  misc_feature (16)..(16): n is a, c, g, or t
  misc_feature (73)..(73): n is a, c, g, or t
  misc_feature (86)..(86): n is a, c, g, or t
aaaagaaacatgaagnaaaaccttgtgcttgccccaagtggaactgtcctggtaacaacaacaacgacatttncaccccaggccgncaattgccaaaactgtcctcaatgccccatgtggggcgctgggaatgccttccctgtaacagatgtcctcatgcccttcaagttaacacataggtgttccctgtttaacagttccctggaggtccagaagcacaggcacgaagagaagcaggcccgttcttcccgtggcccacttcttcctttgaacaaaggctccttggacccagtggcgggaaactggccctcccacaccccctgcctgttctgggggcagcagtctttggaggagtaatgccaggcagcccctcactgagggccccagtctcccctgcatttcttccctgattgattgataggaggtggctgggctgccactgaatttgtcaacttagactcattgacaacacattaaggggctgtaattatatttattagattaacc

SEQ ID NO: 248516 - DNA, 451 bp, Homo Sapiens
  misc_feature (28)..(28): n is a, c, g, or t
  misc_feature (60)..(60): n is a, c, g, or t
  misc_feature (65)..(65): n is a, c, g, or t
  misc_feature (71)..(71): n is a, c, g, or t
  misc_feature (90)..(90): n is a, c, g, or t
agccggctttcttgcccctcccatcganggaaaactgcaatgcttctcaatcggaaaacntgtgnaaacgnaggggccctggggaaaaancgctaacccctggaggcaagcctttgggtgatggctttttcttcccttttcctcccgcgggcctgttttcaggtgttcctagcatttttgcctcccaggcaggacggcaggggtgagcagctttgggagagacacctggcctttttctcctggagcctctcctcccggccctgggaaatgtgcgcagccctgtgttcccccagcttggcagatgggctgcatgcggcgctcccttccttcccacgctcagcggccccggccagaccctggcagacttcacacctcattgctttaccccctggggcctggggaaatgtctgtactttgggaagtcacagaaatacattttaatgcaaaatgg

SEQ ID NO: 248517 - DNA, 424 bp, Homo Sapiens
  misc_feature (381)..(381): n is a, c, g, or t
  misc_feature (390)..(390): n is a, c, g, or t
  misc_feature (398)..(398): n is a, c, g, or t
ggaggcctcgctgaggaacgacgccgaggaagtacgctacttcctgaagaataaggtcagccctgatttgtgcaatgaggacggactcacagccctacaccagtgctgcatcgacaactttgaggaaattgtgaagctgctcctctcccatggtgccaatgtgaacgccaaggacaacgagctgtgggacacctctccatgctgcagccacctgcggccacatcaacctgggtgaagatcctcgttcagtatgggggccgacttgcttgcttgttcaacttgggattggggaacatgccatattgaccttttgcgagggattgaacccaccctggggatgttcattcgaggaccttgcattggcattaccagggggcattnaccccaggnggaaattnaacgaggattccgggttggcttcctt

SEQ ID NO: 248518 - DNA, 475 bp, Homo Sapiens
aaaaaattcaagttccttgcttgctggaaccttaaaaaccacaaaccatgattgttgaatcattgaaattcaacagcttgaaggcaacaaattcatccctttgaagccggaaggaccttcccagcgcaggcaagcccgtgggaaaggtggtgcggcgagcccagcctgtcggacaggacccaacctgtataggaaggagtatgagggagaggccatcctgtggcagcggagtgcagctgaggatcagcggacctccacctacaacggggacatcagggagaccaggacagaccaagagaataaggaccctaaccccaggctggagaagcccgtgctactctccgaatttcctaccaagatcccacgaggtgaactggacatgcctgttgagaatggcatcgggctccggtcagtgcctaccagtatgcgctggccaacggggatgtctggaaggtgcatgaggtgcctgactacc

SEQ ID NO: 248519 - DNA, 1166 bp, Homo Sapiens
aggcagcgtggcctgctggaggcctcgctgaggaacgacgccgaggaagtacgctacttcctgaagaataaggtcagccctgatttgtgcaatgaggacggactcacagccctacaccagtgctgcatcgacaactttgaggaaattgtgaagctgctcctctcccatggtgccaatgtgaacgccaaggacaacgagctgtggacacctctccatgctgcagccacctgcggccacatcaacctggtgaagatcctcgttcagtatggggccgacttgcttgctgtcaactcggatgggaacatgccatatgacctctgcgaggatgaacccaccctgggatgtcatcgagacctgcatggcataccaggggcatcacccaagaggaaaatcaacgagatgcgggtggctcctgagcagcagatgatttgcggacatccacttcatgatcgcagcgggccaggacctggactggatagatgcccagggtgccacactgctgcacatagctggagccaatggatacctgggggcagctgagctcctcttggaccatggagtgcgtgatgaatgtgaaggactgggatggctgggagcccctgcatgcagctgccttctggggacagatgcagatggcagagttattggtgtcccatggagctagtcctcagtgcaaggacatccatggatgagatgccaatagacctgtgcgaggaggaagagttcaaggtcctgctgctggagctaaaaacacaagcatgatgtgatcatgaagtcacagctgaggcacaagtcatccttgagccggaggacctccagcgcaggcagccgtgggaaggtggtgcggcgagccagcctgtcggacaggaccaacctgtataggaaggagtatgagggagaggccatcctgtggcagcggagtgcagctgaggatcagcggacctccacctacaacggggacatcagggagaccaggacagaccaagagaataaggaccctaaccccaggctggagaagcccgtgctactctccgaatttcctaccaagatcccacgaggtgaactggacatgcctgttgagaatggcctccgggctccggtcagtgcctaccagtatgcgctggccaacggggatgtctggaaaggtgcatgaggtgcctgactac

SEQ ID NO: 248520 - DNA, 303 bp, Homo Sapiens
  misc_feature (19)..(19): n is a, c, g, or t
ggcctgaggaggcagccgncctgaggcctgggggaccgtggacccctatgcccgggtcagcgtctccacccaggccggacacagacatgagacaaaagtgcaccgaggcacgctctgccccgtgtttgacgagacctgctgcttccacatcccgcagtcggactgccaggggccaccctgcaggtgcagcttttcaacttcaagcgcttctcggggcatgagcctgcggttgagctccgtctgccactgggcaccgtgggatctgcagcatgttctggagcactggtacctgctgggcctgtc

SEQ ID NO: 248521 - DNA, 560 bp, Homo Sapiens
  misc_feature (307)..(307): n is a, c, g, or t
cgttaaaagggcccactttgtacaaaaaagttgggcctgagtgataaacagcgggaggaacattacttctgcaaggactttgtcaggctgaagaagatcccgacatggaaggagatggccaaaggggtggctgtgaaggtggaggagcccaggtataaaaaggacaagcagctcaatgagaaaatctccctgctccgcagcgacatcaccaagctggaggtggacgccatcgtcaacgccgccaacagctccctgctcggaggcggtggcgtggacggctgcattcatcgggccgccggccccctgncttaccgacgagtgccggaccctgccgagctttaatactggcaaggccaagatcaccggcggctatcggctcccggccaagtacgtcatccacacagtggggcccatcgcctacggggagcccagcgccagccaggctgccgagctccgcagctgctacctgatcagtctggacctgctgctggagcaccggcttcgcttcggtgggcgttcccctgcatctccaccggcgtgtttgggttacccctgtgagg

SEQ ID NO: 248522 - DNA, 948 bp, Homo Sapiens
  misc_feature (909)..(909): n is a, c, g, or t
atgagccaccgtgtctggccaggaacagcctgttatattacgtcagctttatgacagactcccacatttatctttacttttcccagttcactatgtgccagtgaaatttcatggcgtgttagtgatctgtggattaacttttgagaaacactcttttaagtatccctttaataaatcagaataaaatatagtacagccttttactctagccctttatatggctagaagaggtagaaattaaaatgttgcttctcatttctagaagaaaaaatgttaaagggagttttctagcattgatagataacttactgtacacgagatgcttatttatattttatggttttatatagagcaagaattggcaaactttctgtaaagggccagatagtaaatacgttaggtgttgtgggccatgtggtccctgtcacacctattcaacttccccattttagtacaaaacagccagagacaatatataaactacagtatctgaaccttggcactaccaatattttggaccggataatactttgctataggaagctgcccagtgcatcctgggatgtttaggggaatccttggcttctacccacaagatgccagcattcaatgctgatagctgcccctcccccagttgtgacagtcaaaaatgtctccagacatggccaggtgtacctagaggccaaaaattgtccctggttgagacccactgatgaatgtgtgcaatagtggttcccataaactgcatttaaaaaacagctgttaggtttcatttggctcaagggctgtcatttttcactcctccccccatagagtatgtaaaatgattaggaaatgacaacagacttttcatttagtattcaggttagtgtgtgtatatgccataagttatttccctaggcaattccntttagtatttttgttggcaataattcttttaaacgctac

SEQ ID NO: 248523 - DNA, 463 bp, Homo Sapiens
  misc_feature (18)..(18): n is a, c, g, or t
  misc_feature (24)..(24): n is a, c, g, or t
  misc_feature (49)..(49): n is a, c, g, or t
  misc_feature (77)..(77): n is a, c, g, or t
acttccctgcaccccagnaccagnacaacctgcaccatacgtgaaccanacatacacccttgaaaatttcccaaatncccaaactttctgtgtgtctctctagagcccattgaattctcctgagacacactctctggccctggcccaggggtgtgggcctgaacccaggggccagtaggggagctggagccttcttggatggagccaaatttcttttgagccttggaagccttggaggaagccgccctgcagtcctggggcagagaagactatgccacagagagggcgaggggctggcttgtggtcaaaaggcccagagctgtctgagcccaagggtggccactggcatggttttaggcaagaactggagcttgcagacttagactaggaggtgctccagacactccttgagtcaggtaaagttattttcaaacccccatcttgaggcaaattgccaggggcc

SEQ ID NO: 248524 - DNA, 628 bp, Homo Sapiens
  misc_feature (414)..(414): n is a, c, g, or t
  misc_feature (419)..(419): n is a, c, g, or t
  misc_feature (440)..(440): n is a, c, g, or t
  misc_feature (455)..(455): n is a, c, g, or t
  misc_feature (503)..(503): n is a, c, g, or t
  misc_feature (532)..(532): n is a, c, g, or t
  misc_feature (534)..(534): n is a, c, g, or t
  misc_feature (546)..(546): n is a, c, g, or t
  misc_feature (549)..(549): n is a, c, g, or t
  misc_feature (610)..(610): n is a, c, g, or t
tgtgtccgtgcggcgcggcgctgtgtggctccctcgcgcccaccacgctggcccccgggcccggctcgcccttcccaggcgccggctgcagcagagtttcagaacaagcttcctggaacccatgacccatgaagtcttgtcgacatttataccgtctgagggtagcagctcgaaagtagaagaaagtgttgccagggacggcagtatctctttgtgtgaccctggcggcttatgggacgttggcttcagacctttgtgaatacaccatgctgcgtgggacgaatgaacgtcgtggagaggaatgaggcctgaggtcacactggcttgcctcctcctagccacagcaggctgctttgctgaactttgaacgaggtccctcaggtcaccgtccagcctgcgtccaccgtccagaancccgnaggcactgtgatcttgggctncgtggtggaacctcnaaggatgaatgtaacctggcgcctgaatggaaaggagctgaatggctnggatgatgctctgggtgtcctcatcaccnangggaccctcgtnatnactgcccttaacaaccacactgtgggacggtaccagtgtgtggcccggatgcctgcggggntgtggccagcgtgccagc

SEQ ID NO: 248525 - DNA, 354 bp, Homo Sapiens
  misc_feature (316)..(316): n is a, c, g, or t
  misc_feature (327)..(327): n is a, c, g, or t
ccacgaagcaggccctgaccagctgtggctttgactgcttggaaaccagcatcggtgcccccgggtctccatccactcagccacctccctggacagccgagtccagcaagccctggatggcctctgagaggagcccacgacactgcagccccacccagatgcccctttctggattattctgggggctgcagttcgactctgtgctggccagcgagcgcccagctcctgacactgctggagaggccccagccgcttgggattgcagccaagctctgcagtcccagcggtgggacctagggaggcatggtcttgcctnttgcattcttntggagccagccgagcaggaggcttagg

SEQ ID NO: 248526 - DNA, 404 bp, Homo Sapiens
  misc_feature (62)..(62): n is a, c, g, or t
cctggcccaatgtgcatttttgcacatgctggaaccttcccatgggggtctgggctaattgnctggagcccaggacatgagtcaggggcacccatggacctcacgtgcccagggagacttgaatgtggctgtcactcttccggaacgccaagggctgcaggaggctgcttttggcactacccaccccgtgtgacagaataggagccagcgactcaggactgctcacgggtcaggaggcaacgcctgaagtcagacctccctataggtcaacagggacaacctggggatctctggagcagggccctcctctctcaggcttggcccactcccccagacacctggacacgtggccacaaatctgggacaaggggcccccgcacagcatgaaataaaaagtgcctgag

SEQ ID NO: 248527 - DNA, 951 bp, Homo Sapiens
ccccggggcctgagctctgcaaggcaggaggaggggagggctcagtgcccagcttgctcctagggtccccctgccatgctcaggactgcaggaactcacggaaggaaaactacagctcgggagagcaggaggtgccccccgctgatgcccagctcaaacttatgacctcagaggtggcggccaccacagaccacagtgaaattctcagccaggcaaagttcaggacaggaggctcttggtgccccagagacggaggctgtggggagctgggccatggctgctgctgcccggcggaatccctgctgagcagccaggctcagaggctgggtgggaggtgctgaaggactcacagtcctagggacaacctgggacacgcctcaggggaccaggcagcactggaaatgggaggcgggagcagctgagggcccagtgggggaagaaggaaggagcccacctgtgtggacagcagccacccaaagctttgtctccctgggcctcacgcctgccatctcactcagcaagccagtctctaggtgatccagggccccaagcccacctcatactctgccatagctgagactgatacctcggggcccagacaggatcccagcctcctggcccttaacactagccagtccttaagcatctacctgcacgcatgggccatttagcctgcccaccctccaacaggatggctcgaaggacagggtgcacctggctgcatggagctctcagcaaaccccatctcggcagctccccggggctccctctctgtggggaggggcctggagtagccgggcaggcaaagccgctccttgcagcaggtgcggacatactcaggcctttgcccaacgtgcaaacccatccctggggccctcctgccaccgtccttgggaccatgctgtggggaatgcttgtttatgtatctggagggtgtgggagctaagccaa

SEQ ID NO: 248528 - DNA, 321 bp, Homo Sapiens
gaatattaattgttttggtatgatgatactcagaaatggagatattataggaaaaagaaatcctttggaattttaactaaaatcactgcatatgggaaattaagagatccaggaccatatttgataagagttcctaaaaataatgtaattattaatgctaaagactgctcatgtatcttgatctaattactaaataattacatatttatttacctgataaatatgtatctagttctacaaggtcacatttatgtgggaagtccaaagtcaagtccttaggggggattaattttgttttgggctcagttgttccctgcttcc

SEQ ID NO: 248529 - DNA, 454 bp, Homo Sapiens
  misc_feature (408)..(408): n is a, c, g, or t
  misc_feature (430)..(430): n is a, c, g, or t
agcgcctcaaggatgagaatgcagcgttgatccgcgtcatcagcaaactctccaagtgacccggagacttttcccgcacccgtatttatacagctgcttctgccacacgcaccccttcccccgtgtgaacacgagtgacagggctccgggggaagtctcagagaagccatagcccccctgggacctccggactgggaggggagcagagtccccagggagccgagggggccacccgaggccagggatggaggtgggaggccgagccaagcagggggacgttgccagaggggaccagggccagagacgggaccagggaaggaatttaggaccaagaagttgcaaggtttcagtagccagggaccagagttggccgcttgggagttccccttttcacgtttttattgccanccctttaacctttcctttcttnagcagggtttccagatttttccaa

SEQ ID NO: 248530 - DNA, 1203 bp, Homo Sapiens
  misc_feature (1127)..(1127): n is a, c, g, or t
  misc_feature (1156)..(1156): n is a, c, g, or t
  misc_feature (1188)..(1188): n is a, c, g, or t
ttgggaatctatagcctggatatgaagaagagcttctttcagaggttcggcctggacaaatggagttccctcccagaaacacccacattacctgctttcttcttgggtagcttgtccatcagctccacgccttgtgacacctttctgaagctggagggctgggagaagggggttgtattcatcaatggccagaaccttggacgttactggaacattggaccccagaagacgctttacctcccaggtccctggttgagcagcggaatcaaccaggtcatcgtttttgaggagacgatggcgggccctgcattacagttcacggaaaccccccacctgggcaggaaccagtacattaagtgagcggtggcaccccctcctgctggtgccagtgggagactgccgcctcctcttgacctgaagcctggtggctgctgccccacccctcactgcaaaagcatctccttaagtagcaacctcagggactgggggctacagtctgcccctgtctcagctcaaaaccctaagcctgcagggaaaggtgggatggctctgggcctggctttgttgatgatggctttcctacagccctgctcttgtgccgaggctgtcgggctgtctctagggtgggagcagctaatcagatcgcccagcctttggccctcagaaaaagtgctgaaacgtgcccttgcaccggacgtcacagccctgcgagcatctgctggactcaggcgtgctctttgctggttcctgggaggcttggcacatccctcatggccccattttatccccgaaatcctgggtgtgtcaccagtgtagagggtggggaaggggtgtctcacctgagctgactttgttcttccttcacaaccttctgagccttctttgggattctggaaggaactcggcgtgagaaacatgtgacttcccctttcccttcccactcgctgcttcccacagggtgacaggctgggctggagaaacagaaatcctcaccctgcgtcttcccaagttagcaggtgtctctggtgttcagtgaggaggacatgtgagtcctgggcagaagccatggcccatgtcttgcacatccaggggaggaggacagaaggcccagctcacatgtgagttcntggcagaagcctggcccctgttttgcacntccggggaggaggacagaaggcccagttcacngttagttctgggcag

SEQ ID NO: 248531 - DNA, 404 bp, Homo Sapiens
  misc_feature (363)..(363): n is a, c, g, or t
  misc_feature (389)..(389): n is a, c, g, or t
ctcactccagcttcatatggtgccaagacgttgctgcttttgaggttggctctaacatctctggtctttagagccaccagatctctctggcccatacagatatcagagcagacggaaatttctccctgcaagcgctcagtctcatcccagcaagtcaaagacctcctgggccaagtcctgccctcttaagtctccagggaacgctgcagggaaaacccagctgaggcctggggctaggactgtggttaggtcactagattctactgctcttcccccacattaataccttttccttcctcagagagaaatctccccttaaccttgaattgcagccccctccagtttgctttcctttgggccttncagaccccgggaagttgggccttccnttcctagtgttatgg

SEQ ID NO: 248532 - DNA, 1271 bp, Homo Sapiens
  misc_feature (1223)..(1223): n is a, c, g, or t
  misc_feature (1236)..(1236): n is a, c, g, or t
ttggcccaggatgagctggtgaccttcagtgaggagctggccaatctctaccaccacgtgtgcatgtgcaacaatgagacacccaaccgtgtcatgctggactactaccgcgagggccagggcggggccggccgcaccagtcccgggggccgcaccagccccgaggcgcgtggccggcgctcacccatcctcctacccaaggggctgctggctcctgaggcgggccgagcagatggtgggacgggggacagcagcccctcgcctggctcctcactgccatcacccctgagtgacccacgccgggagcccatgaacatctacaacctgatcgctatcatccgtgaccagatcaagcacctgcaggcagccgtggaccgcaccacggagctgtcacgccagcgcattgcctctcaggagctgggccccgccgtggacaaggacaaggaagcgcttatggaggagatcctcaagctgaagtcgctgcgtgctatgtttgccaccaggtgtgacgagtacattacacagctggatgagatgcagcggcagctggcggctgctgaggacgagaagaagacgctgaactcgctgctgcgcatggccatccagcagaagctggcgctgacccagcggctggagctgctcgagctggaccatgagcagacccggcgtggccgtgccaaagccgccccgaagaccaagccagccacaccgagcctgtagagtagctgccaggaggacttggccacccggccctgtcacactgcagccccttccccttccctctcgtggcccacaaagaggaaggaaagggcaacctaaaagcccacttagaaactttttggatatgccactgcaattcttttcaaaatagcattccccaggtttttaatgggaggaaaaaaagctttaatgttgagcatgctgcgagctgctgcgtggaaaggcctctgtatgggccgaagacccttcttccctgggctgccaggctcgccagggagcccactggaaacgcccaccacgggggcttccttgttacacatgttctttttttatccgatcaacctgtgcacttttgatattttgatattatatttgcttccttaattcctcgcgtaggagacggtcttcaggtgccgtgggtctatggcttcgtgggtcctgtaggctgtccgccttcaggttcccaccgtgttttgtctgggtgttcagcacgagggcagagntgtgttgttcccntaggcgtgtagcttttagattcgggagatgagtgc

SEQ ID NO: 248533 - DNA, 883 bp, Homo Sapiens
  misc_feature (766)..(766): n is a, c, g, or t
  misc_feature (856)..(856): n is a, c, g, or t
ttggctcaccacagcccctgcagtaagcagtcgggtatgtcactgacagagcagaagctcaggggactaaaactccccgcctgagttccctggtgaatggatggtggggccgagttccattccaggctggatggagcccagagctgtgggtctcctaccctcccatcccctcattccagcttgatcttccttaagagactcatacgccccaaccccttggtctgagtatcttagattgttctcgtggttcctccgtccttcaccactgaaggctgctgttcattctctctccgtctctgtcccttattgctctcacgtctgtctctgtcatcttttcactccttgtccctcttactccgttctttggcccccaatgaaagctgagtcagagacagacgcttcccctcagttcccagtgcctcccttgggggcccctccttggctgtatccgtcagtggctccaggctgccgcgcgcaggcttagctcattcctctgacctgccaggaagcagagagacccacagagcaggagggaggcagaaagtggagacggacctgagcccgaggaagaggcaggcagaggctgaggctgattccaccccagcctgcctggacaaccctccttagccgcagccccttccagttccctaggggttctgcccctccccctctctgggggcaccagccccccagggtcctggcatcccaccatgttcgatgggctgtgggaaacctttgggtttctttcatgggcaactgtgggggntgctgatgctggggggtgattttgccaaacagctaattgggcgagtgttccattgttgcacggggaacttcattcaccaccaacaccatntttcgagaaacttttggttttaaggtt

SEQ ID NO: 248534 - DNA, 442 bp, Homo Sapiens
  misc_feature (34)..(34): n is a, c, g, or t
gtccctgctggtccccaaatcccccctgaacccnaaaaatgggttcctttaaaaatcttcccttcccctgaaccccaagccccctgtaactcctggaattaaagtgaacggaggcccaaattctgaaaatctgggccatccatgttgttcaagccagggagtcccctggcctgcccctggatagagtggagggccctagtttgggaggatggtccacctggggtctggggtgccgtgggggctagaacctgggctgagatgtcctggagctgttgtaatggggttagcgaggctttgctggcaggcgtggggcggggggacagggaaagggaagggagaggcactcagattttgatctccgtccggaaggtctgctggacgtgttctgtatgcgggtgacgcgtgcccggatagtgaggctgccgtcccctcatgccgaaat

SEQ ID NO: 248535 - DNA, 438 bp, Homo Sapiens
  misc_feature (32)..(32): n is a, c, g, or t
  misc_feature (36)..(36): n is a, c, g, or t
  misc_feature (60)..(60): n is a, c, g, or t
  misc_feature (100)..(100): n is a, c, g, or t
  misc_feature (119)..(119): n is a, c, g, or t
cggccccaagccttgaatatctttcccttccngctnaaggcccccaagacgcagctgcantccctgaagtcccttctgagaaatgtgggaccctgccccnagctcccaccccaggggcnagcgagggaggcgttggaatggagccgccccacggctcctctgtgaaggtctgcacgtcactcagaaagttgaagcaaaccaagcagggttggagccccacagttcacagccggctgcacaggggatgcaccaagcacagtttcctatgacaagtggaaacctgtgcgccacagcaaaactccgtcaccacagcagcagatggctccgaagaagtggagcgttttcatcaggttcaactttgaaacctccaccatcaccatccaccagcaccgctgtgtcatgctgataacttgaggacaggcaggatcaagccttctg

SEQ ID NO: 248536 - DNA, 638 bp, Homo Sapiens
  misc_feature (32)..(32): n is a, c, g, or t
  misc_feature (78)..(78): n is a, c, g, or t
  misc_feature (141)..(142): n is a, c, g, or t
  misc_feature (146)..(147): n is a, c, g, or t
  misc_feature (410)..(410): n is a, c, g, or t
  misc_feature (452)..(452): n is a, c, g, or t
  misc_feature (464)..(464): n is a, c, g, or t
  misc_feature (491)..(491): n is a, c, g, or t
  misc_feature (563)..(563): n is a, c, g, or t
  misc_feature (581)..(581): n is a, c, g, or t
  misc_feature (604)..(604): n is a, c, g, or t
gcactttaaagaggctgtgtggccaaccaggncccagggtccctccccagctcccttgggaaggacacagcagtattngacggtttctagcctctgagatgctaatttatttccccgagtcctcaggtacagcgggctgtnncgcnnccaccccctgggcagatgtcccccactgctaaggctgctggcttcagggagggttagcctgcaccgccgccaccctgcccctaagttattacctctccagttcctaccgtactccctgcaccgtctcactgtgtgtctcgtgtcagtaatttatatggtgttaaaatgtgtatatttttgtatgtcactattttcactagggctgaggggcctgcgccaggagctggcctcccccaacacctgctgcgcttggtaggtgtggntggcgttatggcagcccggctcttgcttgggatgcgagcttnggcttgggccgntcctgggggcacagctgtctgccaggnactctcatcaccccagaggccttgtcatcctcccttgccccaggccaggtagcaagagagcagcgcccaggnctgctggcatcaggtctnggcaagtagcaggactaggcatntcagaggaccccagggttgttagaggaaaagact

SEQ ID NO: 248537 - DNA, 335 bp, Homo Sapiens
  misc_feature (243)..(243): n is a, c, g, or t
  misc_feature (246)..(246): n is a, c, g, or t
  misc_feature (269)..(269): n is a, c, g, or t
  misc_feature (274)..(274): n is a, c, g, or t
  misc_feature (276)..(276): n is a, c, g, or t
  misc_feature (303)..(303): n is a, c, g, or t
gctccgccgggtgcaggtgcgtggcgagctcctgcagcacggccgcgcgcccgatctggtcgttgcgtcgcttctccatgatcaggtcctctagactctggaactcgagcgtgtggctgcctgcgccgacagctgaatgcttcagccggtagggctgcttgccgatgcgcagctcgccgccgatcttgaactcgcgcttccgtagcggcaccaggcggcgaaactctccgagttggccagctncantcgcgctccttggcacccaacgntgcgncncaccgtttcgcaccacggcgctgattnttagcggcttgtagcggtacagatcgttgaac

SEQ ID NO: 248538 - DNA, 279 bp, Homo Sapiens
  misc_feature (126)..(126): n is a, c, g, or t
  misc_feature (148)..(148): n is a, c, g, or t
  misc_feature (176)..(176): n is a, c, g, or t
attaaagaattgtttggcactctctaacgtcccactagcttactgagttatcaggtgcaggtcagactcttggctacagtgagaggcagcttctaggcagagttgcttaatgaaagggtttgtaanactttacaaaccattacctgtncctggcctggcctccaaaatattaacgntctttttctgttgaaactcgcgagtgtaactttcataccacttgaatttattgatatttaattatgaaaactagcattacattattaaacgatttctaaaatc

SEQ ID NO: 248539 - DNA, 415 bp, Homo Sapiens
gaaccccaagtttctcttcaaagaatcagtatgtcagtctgttcagcttcctgttctttgattctccattttaaagtttaacttcctggttctcttcacccccttgcctctagtttcagtaaacaactttcccgccagtcctaatcactagttcacatctgttcccctgggtcacctgctccatcctgactcatctcggtcacctgctttgaccggagtcacctttagttacctcttcctaaccgtccttcccaccaaactggttcaccccgccactctgggttcgttactcctggctctttttaaaataggccagtcgggaattaggttaggactgtgtgggtccaaccctaggccattagggggaacgacacaggcagtaggggggattacctggcctcagggggttaaggtt

SEQ ID NO: 248540 - DNA, 570 bp, Homo Sapiens
  misc_feature (531)..(531): n is a, c, g, or t
gaaccccaagtttctcttcaaagaatcagtatgtcagtctgttcagcttcctgttctttgattctccattttaaagtttaacttcctggttctcttcacccccttgcctctagtttcagtaaacaactttcccgccagtcctaatcactagttcacatctgttcccctggtcacctgctccatcctgactcatctcggtcacctgctttgaccggagtcacctttagttacctcttcctaaccgtccttcccaccaaactgctcaccccgccactctggctcgtactcctgctctttttaaaatagccagtcggaattagcttagactgtgtggtccaaccctagccaataagggaacgacacagcagtagggactacctgcctcagggataagacctcctgtccctcccgtgtccaggtatgctcttgccatggctccacctgcgagggtcaccctttatgcaaaaagtcaaaactgccttgctgagaacattaaatggatgctcgagtgctatttctctgtggcactgnggaacaagcattttgcatttctaacagtccaggcaccag

SEQ ID NO: 248541 - DNA, 161 bp, Homo Sapiens
tttattattattattttggcaacatgtacatttctaacaaagtttattgtggctattaaagtgttttatttcccaattcatattactcttgtatcgagtccatgaggtctaaggcaacttagatcaaagttttaaaaaagtaaaaatatttcaggttttgt

SEQ ID NO: 248542 - DNA, 407 bp, Homo Sapiens
  misc_feature (16)..(16): n is a, c, g, or t
  misc_feature (47)..(47): n is a, c, g, or t
  misc_feature (61)..(61): n is a, c, g, or t
  misc_feature (236)..(236): n is a, c, g, or t
  misc_feature (258)..(258): n is a, c, g, or t
  misc_feature (286)..(286): n is a, c, g, or t
  misc_feature (395)..(395): n is a, c, g, or t
caggtccaacctcacnggaagcacagcccaagatggaccatgtttangggacagtgccccnagatgtggaaaacagatagaactggtttgtgggacaggggcagccttgcctcaggagagggaataacgcaggtccccttgtccttggaagggcttgtacctatggcccatgacagtgacattgccctcacccatgatccctctccaaagtggttgtctttctttaccttgtgtcntctcttgtaaaaatgaaactcngaaatgacataaatgtgtcaaattttgnaccaaaaaggaaactggaaaagctaacatgaattgtgtgaaattgcataatgctgtaatgctaatctacaatatgtaatgctatcttgtatgttgaatttgttaatgcnccacacaagtgc

SEQ ID NO: 248543 - DNA, 441 bp, Homo Sapiens
  misc_feature (331)..(332): n is a, c, g, or t
  misc_feature (336)..(336): n is a, c, g, or t
  misc_feature (339)..(339): n is a, c, g, or t
  misc_feature (362)..(362): n is a, c, g, or t
  misc_feature (377)..(377): n is a, c, g, or t
  misc_feature (421)..(421): n is a, c, g, or t
ctatataagccatctttgtacaaaaaagttggggcctgggagccacttggcctgcccctcggaccctggggcaagaagagcaccctgccgagtgaggtcctacctgcaggcagtcactgccccggccatgggcctctcaaggctggcacgaagccattcggggagagggctccacaacaagctgagggtgcccgacttaaactgtagaaccgggagtggacacccacagactcccaggctggatgcgtgcgcaggcacactggatctcgtggctctctgggccgctgccaccgcctttgaacgtgtcggggagcaggagccaggccagagnngccnagnaggacagcgagaagcacctgttnatgctggggccactnggaggaagctccatccctctactctcagcccacaccagggcggncagcttcagagcaccagggc

SEQ ID NO: 248544 - DNA, 736 bp, Homo Sapiens
  misc_feature (631)..(631): n is a, c, g, or t
  misc_feature (653)..(653): n is a, c, g, or t
  misc_feature (694)..(694): n is a, c, g, or t
  misc_feature (715)..(715): n is a, c, g, or t
  misc_feature (723)..(723): n is a, c, g, or t
ttgggtcccacccaccctcactgagatccatgtaaggggctcctcttcccacctggaacttgtgagtggggacccatgatgtatgggtctcacctgacttgaggtgaattttggagtgaagggccctgaggtcagctcccaggtcggtcgtgctgggccaggcctggttttcacaggggctgaaggatcccagtccacctgtgtgcatgtcagggctcggccgggaagaagccagcaaagtcccccgtgtcccttgctgagtattctgtcacagacaagcctccattaaagccacagcagtgctacccaccacacacaccttgctggcccggccaccactgctggcttcagcccttgagcagcccatggttagcagacccccagatgtaggtcagtggccttacctgtctctatccatgctgtcaactcctgcctccacctggggtcacccagttcacattgggaagggctgtgaaggcctccaggctggccccttccaggggaatcctgggaggcctgggggtgggctcctgcccttctgccctgccttgcccctgcactatgctcttggctcctgtggaaggagggctgccctcttgccctagtgagggccccatgtggatccactctnagtgctgggagccagcgcttcnttgactgggaacaggattccagggacccctttcttgttgtnggctgccatgaaagccacagnttcctttngggaaagttgacc

SEQ ID NO: 248545 - DNA, 417 bp, Homo Sapiens
  misc_feature (97)..(97): n is a, c, g, or t
tcaaaaactgcctgttaaaaaacccacgtggccttgaaaaaggtctctgcctacccttctaaggcctccctaaggcttggcaccctatagggcgaantggtccctactcgatgtgacccagcaaacgccctcccccgtgccagcacacacgaatccagcttcctcggaggtgtttattgatgcccagctgccatgctccggccactgacacaaccagaaaaggcgtaaacatgcacgggtgtcccccaggagggtgcaggggccctgccttcaaaccccgtgcccctccaggggacagttatttaaacgagtggccgggagcatctgccacctgctggggaggcagagaccctgcaatggccacctctttaaaagggcagctgtacagggctaggttttttcaatgaagtttctgaa

SEQ ID NO: 248546 - DNA, 452 bp, Homo Sapiens
  misc_feature (34)..(34): n is a, c, g, or t
  misc_feature (47)..(47): n is a, c, g, or t
  misc_feature (122)..(122): n is a, c, g, or t
aacagggtcccctgggcaaaatgtttcaacgatncagttaacggggnacgaatcccttggatggaaaacgatgaccctggtgatcgacatcccggagtgaccgtgacatcacgccatgcccnacccacggccccgcccggcgccctcccccgtgccagcacacacgagtccagcttcctcggaggtgtttattgatgcccagctgccatgctccggccactgacacaaccagaaaaggcgtaaacatgcacgggtgtcccccaggagggtggcaggggccctgccttcaaaccccgggcccctccaggggacagttatttaaacgagtggccgggagcatctgccacctgctggggaggcagagaccctgcaatggccacctctttaaaagggcagctgtacagggctaggttttttcaatgaagtttctgtattattggagtggctctgga

SEQ ID NO: 248547 - DNA, 381 bp, Homo Sapiens
  misc_feature (29)..(29): n is a, c, g, or t
  misc_feature (79)..(79): n is a, c, g, or t
  misc_feature (96)..(96): n is a, c, g, or t
  misc_feature (118)..(118): n is a, c, g, or t
  misc_feature (179)..(179): n is a, c, g, or t
  misc_feature (227)..(227): n is a, c, g, or t
cctgtggaaaacctggggtgccggccctntaaaaaatctatcccggggggctaaaaaatcctctcgctttgtgttaaanggggacttccccttaanccctgcgtgtacccctccccantttaggggtctctggggcagtggccatgtttcttcccctgggggggctctgcaacccccantcctggggactccgtgcctggaaccctgcctcatctgttcctgcccanaccctgagggtcacccttccaccctggtgtcactccccggctcagccaggccaggatggcggggtgggtcccttttgctgggctggactgtacatatgttaatagcgcaaacccgacgccacatttttataattgtgattaaactttattgtac

SEQ ID NO: 248548 - DNA, 444 bp, Homo Sapiens
  misc_feature (302)..(302): n is a, c, g, or t
  misc_feature (312)..(312): n is a, c, g, or t
  misc_feature (423)..(423): n is a, c, g, or t
  misc_feature (431)..(431): n is a, c, g, or t
aaacaaagagggatttattttatttacaagaattctggagaaggatggcggctggtattggcttggtgaaataatgatagggtcaatgactctgtgattctcttggcctttttgtcatggtagcaaagtggctgctgtggctccaggcatcacaccctcaatcaaggtagggaagaagaggcccaggggaggtgttagccatgcctgtgtcttttattgggaaaagctttcccagaagcccgggtagacttcctcttcaatttcattgggccacacctgatccacataggccatcctaaggnttgcaaaggnagactgggaacaggtggaaatctgggattttacagccttccacagttgggagtgggctgggagatacagagttggggacgacccctgaaaaagttgaaccaagggtcgttntgcacggnttaccccgggagg

SEQ ID NO: 248549 - DNA, 491 bp, Homo Sapiens
  misc_feature (398)..(398): n is a, c, g, or t
  misc_feature (418)..(418): n is a, c, g, or t
  misc_feature (420)..(420): n is a, c, g, or t
  misc_feature (424)..(424): n is a, c, g, or t
  misc_feature (429)..(429): n is a, c, g, or t
ttgggagaatagtaggaggtcctatagcattcccagtgtcactagaattttgaagacaggaaagtggaggttagtctgtggcctttttttcatttagccattgcacagtcagctgcagaagtcctgctgaccacctagtcatggacaaaggcccacgaccagtgacaccctgcgtccctgtgtgcattaagttcattctgggtcgcagccatgaagtgtcaccagtatctactactgtgaagtcagctgtgctgttttccattcgcttccacggcttctgcctcctgccataaaaccagcgagtgtcgtggtgcaggcaggccctgtggctttgtgggctgagggaagtcagagccccagggcgcccacgaagcagccactgggataccccaccccgncccgccctgcccgccccccncnaaancagtnctgcccccgcatgggagcccccgtgattagtagcccgtatggttcacgttggacccacccaa

SEQ ID NO: 248550 - DNA, 552 bp, Homo Sapiens
  misc_feature (23)..(23): n is a, c, g, or t
  misc_feature (36)..(36): n is a, c, g, or t
  misc_feature (40)..(40): n is a, c, g, or t
  misc_feature (440)..(453): n is a, c, g, or t
tttttttggtcctaaaacccccntttttcggcacgnaggnctgagccgcagttttgtcatctgtgatacgggtgcataccaaccctgtggagctctctgaagctactcggaatgggtaatgtgccccaggcagggctcagctgggcaagtaggggagcaagagcagcctggggtggcccagggactggtggcccctgctggctggcacttggacccttggcaaggcagtccctaagctctcagtcctcctgccctggggcaggaggggaggcccctgggcagcagccagcagcatccccaaccacagattggggggctgcagtccaggagggtgggtgctgggcctgggccctgcagcagctcacaggactcagtgggggccccaaggaggtgaggaggctgcactcccactcccagaaagcagcagcccaccaagaggnnnnnnnnnnnnnncctagccttgttcccaaagatgtcagaggtgatctgcattcagacatcttataaattggtaaacacctgtaatcccgacagaacaagaatccgtctcag

SEQ ID NO: 248551 - DNA, 873 bp, Homo Sapiens
  misc_feature (794)..(830): n is a, c, g, or t
tagtaacccacagcaaaagtttattcatgtgccagggacataaagatacattaattgtttgtttttctagggctgcccagtataagcttttcaaaatgtttaaagtaaataaaaccaataatacagctagataccacattgcaaagaaccctaatgctatttatcagctttaaaatactttcaactgaaatcaattacattttaatatacacatattatatagaaattacctatagctcttttaaaaatcctatgacattaacatgaaactttattagaatttaagattctatatgcagacctgataaagccttaaatttaattattttggagtaatgtcttcttaagaaatggtagataggataaaataatttacagatttatctgcctttgaactggaaggaattttaggtaatcacctggttcaacctactccctaaagtcacacagctctataatttccccctcactcagctacttttttctgtctaaagatatgtcaaagcgatttcatatgtaatcatgagacattcaagtgcaagataatttaccaagaaatcccactccaagatccactgtacttatttaacaagacaaattaagtttgtgtaatgaaaatacacaacaaacattgcatttagcgttttgactccacttttaattaatgaatcatagctcctatgctgaggaaacatattatgtatagattaatataaataaattactggattggctaaatgaaatgcatccagttcaatggaaaatgtgcattctattcagagccatactttagnnnnnnnnnnnnnnnnnnnnnnnnnnnnnnnnnnnnntcagagaaggttggtatatttgcagttggagcatcttggccaa

SEQ ID NO: 248552 - DNA, 880 bp, Homo Sapiens
  misc_feature (38)..(38): n is a, c, g, or t
  misc_feature (84)..(84): n is a, c, g, or t
  misc_feature (100)..(100): n is a, c, g, or t
  misc_feature (106)..(106): n is a, c, g, or t
  misc_feature (199)..(199): n is a, c, g, or t
  misc_feature (226)..(226): n is a, c, g, or t
  misc_feature (674)..(701): n is a, c, g, or t
gagaagaataaagccacattttagacatatttatagantcaattaaagctatatgtctaaaattcgtagggcaacttctgagangaaacaccgttctttntctttnttaatggaaagtgacaatgtgacattagtcatgttgtgtgcggtgacgagtagttaactgaggtaatctgactgttgcactatgtgacatatnttcaggacgtacttgctgcatttgcanaggccctctctctctgtcccttcccacaattctgctgttgctgcaacttgagttaattgtgacaaatgcatctttgtgttatattttgttttgcttcataatttccagaactatatataaatatattttttaaatagcaaatattgtagttagtgagtgatgatcactccaaccttatccttaccatattggtttcagggataggattaagagtgtctttggaagagaaaaatacacacaaccctgtggtttagaatgacgctgaggccttaggctgtgggcctagaacaactatgtgagtgaattcacccatctcatactttgaatcaagcatgcattcctgtttctcattgtgaagtatccccagttgttttccttcagtgttgagtttttgtccttttaaattttattatattttgctctccctaacatttgactgttttttatnnnnnnnnnnnnnnnnnnnnnnnnnnnntaataccctcgatgccactggatactcacaagcagggttatgctccttcatcttgggcttgtttgcctaaatgaaagggtttaatttattttgtacctcctatgcgtgggatagtccagggtgcagagccaggacttgcttgtaattgcacctgctatacttaaatgtatagccctaga

SEQ ID NO: 248553 - DNA, 454 bp, Homo Sapiens
  misc_feature (229)..(229): n is a, c, g, or t
  misc_feature (430)..(430): n is a, c, g, or t
  misc_feature (434)..(434): n is a, c, g, or t
acctgaacccgggacttggcatctggcccaaaactttttatgaactcaatcttttaccccatctgtggcccaaagactcaggagctggcttcccccagagcccacccagggaaaacgaagccccagcggtgcccagagcgcataatatgtactcactcgatcccactttacaaggagcagagcacttcaactttagcaaggccgggacccaccccaggcctttgggcancgctcccctgggtctgggctgtggcagcatcacactgctcatgacaacagcattctgccctctctcaaccagcgattcctgggctccctctgctccaccaaatgactccccagtcacccctcaggagctgctggcactgtcaggtctgtcttctgttccatgctcttctgtcaataaactccccgcatggagaccttctgntccncaggatgtggcaggtttatg

SEQ ID NO: 248554 - DNA, 531 bp, Homo Sapiens
  misc_feature (21)..(21): n is a, c, g, or t
tctggaagccactggctgccncaaggcccccgataggttcccaaggcagctggccccctcagggctggtgtcacggagccgccgtccttccctgatccaggacttggcatctggccacacttttatgactcatctttacccatctgtggccacagactcaggagctggcttccccagagccaccagggaacacgagccccagcggtgcccagagcgcataatatgtactcactcgatcccactttacaaggagcagagcacttcaactttagcaaggccgggacccaccccaggcctttgggcagcgctcccctgggtctgggctgtggcagcatcacactgctcatgacaacagcattctgccctctctcaaccagcgattcctgggctccctctgctccaccaaatgactccccagtcacccctcaggagctgctggcactgtcaggtctgtcttctgttccatgctcttctgtcaataaactccccgcatggagacctctgtgccacaggatgtggccgatttatgaa

SEQ ID NO: 248555 - DNA, 270 bp, Homo Sapiens
  misc_feature (15)..(15): n is a, c, g, or t
cggccaatgtgaggnagttgatggaccgagctctggagctagaggcacggcgctgggctgaggatgtgcctccccagaggctggacggccactgccacagcgagctggccatcgacatcatccagatcacctcccaggccccagccaaggccgagagcatcacgctggacttgggctcacagataaagcgggtgctgctggtggagctgcctgcgttcctgaggagctaccagcgcgcctttaatgaatttctggagagaggcaagcagc

SEQ ID NO: 248556 - DNA, 898 bp, Homo Sapiens
ttggctcggagagcttcagccaagttttagaggaaacttacatgcttgctgtaactttggatgaatggaaaaagaaactggaatctcccaacagagaaattattattttacacaatccaaagcttatggtgcattaccagccagttgcagggtctgatgattggggttcaacacccacggagcagggtcgaccaagaactgtgaagagaggagttgagaacatctctgttgacattcattgtggagaacctttacaaatagatcacttggtttttgtagtccatgggattggaccagcttgtgatctccgctttcgaagcattgtacagtgtgttaatgattttcgcagtgtttccttgaacttgctacagacacattttaagaaagcccaagaaaatcagcagattgggagggtagaatttcttccagtcaactggcacagtcctttgcattctactggtgtggatgtagatctgcagcgaataaccctgcccagcattaaccgcctcaggcacttcaccaatgacacaattctggatgtcttcttctacaatagtcccacctactgtcagactattgtgggacacagttgcttctgaaatggaaccgaatatacacacttttttctacagagggaaccctgattttcaaagggggtgtatccattgctggtcatagtttaggttcgcttatattgtttgatatcctaacaaatcagaaagattctttgggggatattgacagtgaaaaggattcgctaaatattgtaatggatcaaggagatacacctacactagaggaagatttgaagaacttcagctctctgaattctttgatatctttgagaaggagaaagtagataaggaagctctggctttatgtacagaccgagatcttc

SEQ ID NO: 248557 - DNA, 221 bp, Homo Sapiens
  misc_feature (65)..(65): n is a, c, g, or t
  misc_feature (68)..(69): n is a, c, g, or t
gttatgataattaaaaggcattcagaactgtgtggaccagactgaacctctgcactctagatttnccnnttttttgaagcctctacaaaggataattaaaatttacaccatgactctttgtcctggggtgcactgtctgtaagccggtggagttatttcccaaaatccttggtccttcccagcttgaggaggtctgcaggactgagggaggggacctgtgc

SEQ ID NO: 248558 - DNA, 192 bp, Homo Sapiens
agaataaatagaactttattctttatccagtagatctcagtggaaagcccaacagtaacaggtgcacccacgggctccaggggaaggggccccaacccctggtgaaggaggtcggggcagagcagctcccccagctggggttgcaggggtgaggggagacccccctgtaggcccgtcctgcggggttaagga

SEQ ID NO: 248559 - DNA, 330 bp, Homo Sapiens
  misc_feature (57)..(57): n is a, c, g, or t
  misc_feature (67)..(67): n is a, c, g, or t
  misc_feature (134)..(134): n is a, c, g, or t
  misc_feature (314)..(314): n is a, c, g, or t
ccaaagagactggagcatctgactcacaaggaggccagactgtggagaaatagaaanacctctttantttttgattgaaggaaggttttctccactttgttggaaaacaggtggcatctctaattgggagaaantcctgtagcatcttctggagtctccagtggttgctgttgatgaggcctcttggacctctgctctgaggcttccagagagtcctctggatggccccagaggctgcagaaggccaagaatcaagctagaaggccacatgtcaccgtgggccttcctgcccccagtcactgtccctcaaatgncccaaagaccaatatt

SEQ ID NO: 248560 - DNA, 460 bp, Homo Sapiens
  misc_feature (427)..(427): n is a, c, g, or t
  misc_feature (434)..(434): n is a, c, g, or t
gtgaagctacgctattttccttcgtgctaccatcagccgccgcctcaatgatgttgtcaaagagatggacattgtagttcacacactcagcacatacccagagctgaactcttccatcaagatggaggttgggattgaggactgtctgcacattgaatttgagtacaataaatccaaataccacttgaaagatgtcattgtagggaagatatacttcctgctggtgagaatcaaaatcaagcacatggagatagacatcatcaagcgagaaacgacgggtacaggccccaacgtgtaccatgaggaatgacacggtaggccaagtacggagatcatgggacggggcaccagttgcggagggaggagttccttccccgttcccggtttttcctggggccgggttttggggtttcacggcccaccttgncgggggncttccaacagggagtttttcttgttg

SEQ ID NO: 248561 - DNA, 466 bp, Homo Sapiens
  misc_feature (52)..(52): n is a, c, g, or t
  misc_feature (57)..(57): n is a, c, g, or t
  misc_feature (78)..(78): n is a, c, g, or t
  misc_feature (111)..(111): n is a, c, g, or t
attaacgtgccacaaaatacattaaacctgaacaagtcccttttggaacgtnaaaanggtccataatccccccctggnctgaactttggatcatgtttgaaagatgcaatnatgatggccactgtgcagtccctcccgtggccgtgggcacacctgactacatctcgcccggagatcctgcaggcgatggaggacggcatgggcaaatacgggcctgagtgtgactggtggtctctgggtgtctgcatgtatgagatgctctatggagaaacgccgttttatgcggagtcactcgtggagacctatgggaagatcatgaaccatgaagagcgattccagttcccatcccatgtcacggatgtatctgaagaagcgaaggacctcatccagagactgagttgcatccaaagaacaccatacctacagtgaagcatgggggaaacatcatgctttggggctgtttttc

SEQ ID NO: 248562 - DNA, 549 bp, Homo Sapiens
  misc_feature (371)..(371): n is a, c, g, or t
tgcaaaacagaagtacagatttattgaaacaaaagtacactccacagagtgggagtaggctcgagcaagcagcaagagccctggttacagaattttctggggtttaaatatgctctagaggtttcccattggttacttggttacaccctatgtaaatgaaacctgccccacgaccagtcagattggttgtgggaggggaccaatcagaggtactttccatttttcatctgtgaggcagtggaaaggtggggttgcaaagggagtagcttctgatcctttccttacttggggcgtgggagaggtgggggttttcgttttgattcagttctagggaagggcagcgcaaattgggccttagggttcttgttctncctgcctcctgcctcagctgggcacgtttgtacaggaggaggagagccttagcagccactcagataaacacctgaagcagaatatacttgaggtagggaggaaagatgagggacacatgcaatattaatcaatataaaacaaatattagcttcttgcagttgtaacctaagctgagag

SEQ ID NO: 248563 - DNA, 532 bp, Homo Sapiens
tctttcctgtgtttgtctgttacagtttatacttctggtttatcattcttttcttcatattagtatttcttattgtgatagaaaatgcttcccagtatccattcttacattcatcctcagtgttacaatttctaaagttttaggtgtccattttctgattattgttgcagctaggaatagctttgtggctaagttttgtcaaagggaaagaagtagaattggtgtgtgaaagatccagaaaatgtgtgcctttttcttaaaaaggaaggaagtgtgccctcctccccacactcccattttattttatttttgctgccattcaggctgacacaggagtaaacatgccaggctatgagaagggagcctgtgatcttaattattacagaactcccatacttgtgttaaacttcgtatacttatgagaaggtaatacatttcaatcttatttgatcctctgttcttttgggctttgtcatttgcactaaaatctaatcctaacaaataaacacttgtaatatctttcaccgctaaa

SEQ ID NO: 248564 - DNA, 352 bp, Homo Sapiens
  misc_feature (29)..(29): n is a, c, g, or t
  misc_feature (238)..(238): n is a, c, g, or t
  misc_feature (310)..(310): n is a, c, g, or t
aaagctggtctccctcagaagccccttcntcccaaagacttctgatcatctcccctcttctccccctcctttcacaccgaggctcctgctctcctgtgcctccgaggcccccagctggaagtgccttgttgcctctgccctttgaagtcggaacaattcctagcacctgtcggaaggtcaaggccaaaggcaaattcaaggccagactgtgacaaacccagggctgaggcctgccccntgaagaggctgagccccctgaaacccctgccccttgttggtacattccagaggcgcaggggcctgggggatntgaagctagggaagcccctgcttcgattccccactgcccttg

SEQ ID NO: 248565 - DNA, 317 bp, Homo Sapiens
  misc_feature (303)..(303): n is a, c, g, or t
ggcatgaaggggacctcccagtactacccctcctactccggcagctcccggcggagagcggcagacggcagcctagacacgcagcccaagaaggtccggaagtcccgccgggtcttccatcctcggtgtaccgacccagctcaggtgaggactacggcagggatggcaccgcctacccgtccgccaagacccccaggtggcacctatcccgcccccttctacgtggcatatggcagcctgcaccccttcagccgagctctggagtcccccgggccaggcgggctttcgggcccatgctgggtnggggcttatccccg

SEQ ID NO: 248566 - DNA, 375 bp, Homo Sapiens
  misc_feature (49)..(49): n is a, c, g, or t
  misc_feature (118)..(118): n is a, c, g, or t
  misc_feature (157)..(157): n is a, c, g, or t
  misc_feature (317)..(317): n is a, c, g, or t
  misc_feature (358)..(358): n is a, c, g, or t
ttcctcattaccaggggaaatttcagaagagtgtgatggcctctatgangcttaattctaacactcaacactcaattcactaattcactggtcagtacagataaataacaaataattntcctttcaacttgatagatatcaaccgtttctattgggnttgaatctaccatgatatagtgcagatttgggtctgtaaaatcttgcacgggcctccattatcttcctaaactattccaggggtgctgtatttccaccggctctgggttagaacgttcccaaccgcagtgatttgtgacttcaaagaacaccctcgaganggggttccaaaggttttcaggctttaggggagcaacggganataaccaaattctgcat

SEQ ID NO: 248567 - DNA, 513 bp, Homo Sapiens; identical to SEQ ID NO: 179459
  misc_feature (52)..(52): n is a, c, g, or t
  misc_feature (110)..(110): n is a, c, g, or t
  misc_feature (119)..(119): n is a, c, g, or t
  misc_feature (223)..(223): n is a, c, g, or t
  misc_feature (327)..(327): n is a, c, g, or t

SEQ ID NO: 248568 - DNA, 454 bp, Homo Sapiens
  misc_feature (410)..(410): n is a, c, g, or t
  misc_feature (431)..(431): n is a, c, g, or t
  misc_feature (443)..(443): n is a, c, g, or t
ttggctcagtaaccggctggccctgcataactcccgtttcctgagtctctgctctgagctggatggtcgagtccggcccctcgtgtacaccctccgctgctgggctcagggtcgggggctgtcagggagtggcccccttctcagtaactacgccctgaccttgctggtgatctattttcttcagaccagggaccctcctgtgttgcccactgtgtcccagctcacccagaaagcaggagagggggaacaggtggaagtcgatggctgggactgcagtttccccaggggatgcctcaagactgggagcccagcataaatgtgggagcccctcagttcccttgcttagcccagttctttcttcctgtgtatcttgttggggatctttcgtgggcttccctgctgttccctgngggaggggttcagggcattgnctgtggcaaggngggcttgcttt

SEQ ID NO: 248569 - DNA, 374 bp, Homo Sapiens
caggtcagccttcgtctcagttacaacctattacatatggtccttcacattcagggtctgctacaacagcttccccagcagcttctcatcccttggctagttcaccgctttctgggccaccatctcctcagcttcagcctatgccttaccaatctcctagctcaggaactgcctcatcaccgtctccagccaccagaatgcattctgggacagcactcaactcaagcacaaagtacgggccagggggggtctttctggcaccttcatccttaatatgttcacagtttgtgtggatccaggcgtcatttccacctgatggggggcaactgtggaggcatttaaacctggaaccaggaggttcggggaggccttaa

SEQ ID NO: 248570 - DNA, 903 bp, Homo Sapiens
  misc_feature (338)..(338): n is a, c, g, or t
  misc_feature (658)..(669): n is a, c, g, or t
ttcttaccacttcctgcctcgcgatgatacaccagcaacaccagattgcttgtaattcttgacaaacacataacacagcttgttctacctctggtgtttgttcacagtacccactctgtcaggaactgccataaccctcattcttatcgttaatcaaattgcaattcagtcactactttctctaggtagcctcttctaatttatccagactactttaggtaaccccgagtttctataaactcatgttcatgtcaattactgcactaattaatataacggtgtatgcctctggtgtttctccctaccaactacactgtgaagtccttcagggaggcaanatgtgtcttacttatctctgtatccccagtacttagcacagcgtttgcccacgttaggtactcaataaatatttgttgaagaaaggattcaatggcatttttatcaacattattaacaactcttcagcctagtttactctgaaggtaaactagggttatataattttagatacagttgtaaatacaaacacatatagttgttttacttctcatttattgttgttttgacctcagagagtcaaagatgtaaatggagatgtatattaagtatgaagaaatagggatacctctgagaaatatcaaccaacatatgatatgcnnnnnnnnnnnngggggaaattgtgtggtgagaaggtccatcaacccaaaaataatggccataaagtgccagataatctagttccagatgcaaacctaaatataaattctgcctgcatttggtgaaaatgacatgcattaggttgtaagaatatgaaccaaatatcaattatctgcttgaagaagttgaacgtgtttattatattaataaattcaacctttactattatagaatgttataatccaa

SEQ ID NO: 248571 - DNA, 932 bp, Homo Sapiens
  misc_feature (576)..(576): n is a, c, g, or t
gcgtcttttttccccactcccagagctgctcaagtcattccaccggccccctcggcttgggacagggtagtgtaactcccgatcccagggcctagcctgagcacaggtggcttcccgtatcccggtgggaaaacgccctgccaccagcgggcttgagctggcctgtgtccctccaccgcctgcaccacccacctccagagtgcagtgctgggcaagggcagctcaagaggacaggaccaggcgcttggcaagacatcagacacacccaacccaaaggcgtgggaccccagggcccggcccgtggttacccagcaggtggcactgcagctccccgctcctgcaggtccagcgtcctcacaggaacaccagggcctgtgctccggagccttccttcagacccttcctccacgtgcccacttgggatgcagaatgcagcggagctaggaccccctccacggcctggacctcggctgcagtaaagttacgtgaggcctgtctctcggggcctggaagtggcagccatcagttgctcttgctgacccctcggagcaagcgccgcacaggtggtggctgaangacagctggcgcggggggcccccagctgcgccggcctccagcccaccccacagctgttgctgaagtcaggccaacctccccagcactggtatctgagtaacggctaagaacctccttcctctggttttgaaaagcagttcgggttgtccaaatctgtaacattcatctccattttttaaaaaggtttctctgaacggccccaggcccgagccgcggtgagcgtcgtgttgcatgagcctgggccccgggcttcccgtgcgcctctgccgcaggtgcttctgggcacccatcctctgcgtttcatttgcagtcgactgtacagaaggcactcaccacaataaacctttcctgaaagc

SEQ ID NO: 248572 - DNA, 1224 bp, Homo Sapiens
tccagggtattttatcaagtttaatcaatttcccttttgtttccgaaactcccacctgagggcatatacaggttcagctagccaaagtgatgctgaccctggtgaccaagtcagtgagcggcacccacccaagtacaaggctcagtccacagtcatgataactatagccttatactcattataaggctatagctccaagaagctcagtgccaaaggtcaaggttaaatcagaaggtgggccaagcctcaccagacaatggctaccgtcctgcccagagacaaagcatttgcagtgacaggtaccactggagggataacagacatgagtaccagggacctgaaccctggggtcacacctgcaggcgaaggcttagggctcttagcttgctaatggaactgcagtgaggtgggtaggtgcgtgtgttatcagggcagtaactgggggcagagccaggaggacatggaggcgggggcccaccctgagtgtcactcacactggcagctctgaggttgggtggagctcaggccatagtgaccaggccagtaggagtcacagtgctgaccccatacacacactttgcagcaacactgcccagagaggaggccatggatctcattaatgtgagcatcacacaaatccccttccagacacccacagggtcacagtcacaggctagatcagaggtcagaggttaaggatggaattaggtcagaggtcaccatggagctgaaggataagagtcagtgttgggattaggggttgaaggactcatgtctgcaggaccgaggggaacagggatcctctcagggatgacagtagaagaagggccagcagaactcacagtggcgcccagctgtgttgtgctgacacacatcacacacacctccactcacataaccagacacacagctgtgtcaaagtgacaactgtagacatgcccatggcactcacattctgaggcagaaccagaaaggtagatatggggtgggcggacctgtggcaggtatggccaggcagagtagagcatggcattcatcccagcaggcatgggggtgcccaggctctgctgcatgtcatggatgatcctggtgcaggtcttggcagcactcacagtgtgcaccgactggtggggacagatgcaaagcccatgtacctgatagggaggagggcaaggcaggcctgctctggagtcccagcttgcccaccccaccagcaacagaatc

SEQ ID NO: 248573 - DNA, 454 bp, Homo Sapiens
  misc_feature (253)..(253): n is a, c, g, or t
  misc_feature (396)..(396): n is a, c, g, or t
  misc_feature (419)..(419): n is a, c, g, or t
cccttgattcaagtgaagaagcaatctgtctttattatgagaaactggggaggtggggccaggccagactcaatttcagaaggcccctcagtgagaagcgaagaagcaatctgtctttattatgaggaactaggaggtggggccaggccagactcatgtcagaaggcccctcagtgagtgcagcccaggagactgggtcacattctggggttgcggaagggccttggctgcattcagtttctccacatcactntagcagtacaaattgggaccatggatgaggtacaagccgggaccattgggcggaacatgagttaggggccaagggacttttccatacacaaggctccgtctaccttctcatgggggccaagggagctttgtccacgtggcttngggctcctgacttcaggtccagncaccacagccgccgtcctgccttgatatgggagcc

SEQ ID NO: 248574 - DNA, 362 bp, Homo Sapiens
  misc_feature (344)..(344): n is a, c, g, or t
ttgggaaaaatcaatttattatccttggtgctttcccccccaccaatgcacaaataattgtgaacagcttgaaatgacttaaactgtaatccaaatgggacaatctgataagaatttcatgcattggtagttaaataacttaaattgctaaagctttagcttgaaatttatgtttagaaaaactattgatttcccatggtatgaatataactattgtaattcttcaaatgagactcttctcaccttaaatagtcatatattaattaacttataggaaataagcatactatatgttagctgttttaaaaggtaccagatgtaagagtcataaatatatgcaattnaagaagttcatagatttc

SEQ ID NO: 248575 - DNA, 474 bp, Homo Sapiens
  misc_feature (24)..(24): n is a, c, g, or t
  misc_feature (26)..(26): n is a, c, g, or t
  misc_feature (401)..(401): n is a, c, g, or t
  misc_feature (431)..(431): n is a, c, g, or t
  misc_feature (441)..(441): n is a, c, g, or t
  misc_feature (459)..(459): n is a, c, g, or t
gggttcgtctgctgctggaagagntngctgaccccactgtgcagtgccaggaccattgacaccagaaatggaggcacggcaggctacacggaaaatgtatcttaatgtatccctgcggtaactgtaggaacagcagcagaggcagcaggagcaggaggagcgtgaacgatatgagcagcggcgatttgccgccttcagtgacctagagaagagagctctggctgcagagtgccgactcgctgcccagttgggagcccctacctctccaatccctgactctgcaatcgtcaatactcgacgctgctggagttgtggggcatccctccaaggcctgactcccttttcacttaccttcgacttctcttttctgcttccacacgtttgcctccagggttcatcgncttcagagggggagggcctttttcctgatntttttacagntttacctggggggccaanttagggacctgagtt

SEQ ID NO: 248576 - DNA, 470 bp, Homo Sapiens
aaatttataatgggcatgagcccactgaaccctggcccctgaagcgtttttctcaaaggcccctcagtgaagataaattagatttggcatctccctgtccctgggcccgggatctctcctacaagagcccctgcccctctgttggaggcacagttttagaataaggaggaggagggagaagagaaaatgtaaaggagggagatctttccccaggccgcaccatttctgtcactcacatggacccaagataaaagaatggccaaaccctcacaacccctgatgtttgaagagttccaagttgaagggaaacaaagaagtgtttgatggtgccagagaggggctgctctccagaaagctaaaatttaatttcttttttcctctgagttctgtacttcaaacagcctacaagctggcacttgctaacaaatcagaaatatgacaattaatgattaaagactgtgattgccacc

SEQ ID NO: 248577 - DNA, 992 bp, Homo Sapiens
  misc_feature (343)..(389): n is a, c, g, or t
  misc_feature (417)..(425): n is a, c, g, or t
  misc_feature (920)..(920): n is a, c, g, or t
  misc_feature (929)..(929): n is a, c, g, or t
ttgggtatttattaccctgtaacagatgactaatacatctcctgtgatcaaaacacttcagaggttccccatttctctcagagaaatatccaaagtccataaggcctgtgaggcccctcacattcttcccacccccattacctctctaactccattttctaccactctccttctttccacctcaaccacagctacagtgacttctttgccctttctcaaaactgcctcagggcctctgtactggacactctctccccactcccactccctcctccaggccttcactgaaatgtctccctctcagtgaggacttcctttcctaaactgcagtacccccaacctnnnnnnnnnnnnnnnnnnnnnnnnnnnnnnnnnnnnnnnnnnnnnnngagtctctagtcttcctagctccttaannnnnnnnnccttagcacatatcactatttcatataccatatttgtcatctattttctggtttccctttctcagatgtaagctaagttggtgcaggggtttttgtctgttcccaatgtctagaagagtgtctgatttacagtagacactccataaaatttgtcaaatgaatacaccagtgttaagagtataagagtgtaatagtacctttaaaaatgcctcaaagataaatcttttgatttatctttatttttagatctctacccccactttagccacttctgaaatttactactagaaaaaccttttctttcgtgaagaactgtctcacaaaaatagcagttaaataggaagctatcctaacccactgtttgccttttctcttgtgaaactcagaccaaaattgaaagtcatctattgtaactatgtgttcttggcatctaaactctgttttgtttcatcttgactttcttaatttcctaggttttttcctttgttcctattnttttattgnttttattctatattgcttcaaagactttatggaattaagtgaattataaatacaaatataagt

SEQ ID NO: 248578 - DNA, 1064 bp, Homo Sapiens
  misc_feature (1028)..(1028): n is a, c, g, or t
aaatcagcataatatcttaaaaattaacatgaaatgtgttttaaggctttgctgggatcttgctttttaaaaagccaagagggatcacacagagcagcatccacacgtccccagctccctcttcccgttctgttgtcctgttttcaccattccccggacctcaggccgctgcctccacgcatccccctgcaggagccctttgccaccttctttcatgaaggtcattcctcaggccacagatggagcgtgtgttgagcatctcaccgccaggcacaaggctggcccttcctagtggaggaagtgggagcctcgactagagagggagccaagagggacgagctgggcagggccccgtgatcaccacggcctccttgaaggggctatagggaaatgatctggtctttctggccctagctggcagccaggaggcaggagcagcgggcgacagtgcgggccctgtggttctgggccttctcgctgcaggcaaaggaggagaaagaaggcgcggctgcagtgggcgctccaggcctaccaggggcagctcctccaggagggtgccacgcggctcctgcgctttgcagccagcatgaaggcctcccggcagcagctgcaggcccagcagcaggtccaggcggctcacagtctccatcgtgccgtccgccgctgtgccacgctctggaaacagaaagtgctgggccggggcgggaagcctcagcccttggcagcccatcgcacccagcaggaaagtgacgtttgagggtccccttctcaaccgcattgctgctggggctggggatggcacccttgagaccaagaggccacaggcttctcggcctctgggagctctgggccgcctggctgctgaggagccccacgccctggagctgcctcagaagccacaggaacatggcctaggcatggcttcagccagcagccccctccctgacgcggcccttcctggcagaggccccgacagcactggtcccacacagcccccttgcctggggccctgttcaagcgcccctggnccgaagcagcccccgacggcaagcacaggcccggag

SEQ ID NO: 248579 - DNA, 709 bp, Homo Sapiens
  misc_feature (561)..(561): n is a, c, g, or t
  misc_feature (629)..(629): n is a, c, g, or t
  misc_feature (643)..(643): n is a, c, g, or t
  misc_feature (661)..(661): n is a, c, g, or t
  misc_feature (696)..(696): n is a, c, g, or t
acttaaaaaagcccactttgtacaaaaaagttggatttatctcccctccatcttgcctggaggagggcagtgccagccctggggttctgggattccagccctcctggagccttttgttccccatgtggtctcagtgacccgtccccctgacagtgggctcggggagctgcatcacccagccttccccttctccgactgcagggtctgatgtcatcattgacagcctttgcttcgtgggggcctggcagggcccctgcctccccgacccccgacccactgcaaatccccgttcccctgcactcctcttctcccagcccatccctccggcccctgtgccttttttgccccagcccagctcccagggccgtcatctgcttggccctggcccagctccctgccctgagtcctgagccagtgcctggtgtttcctgggctcggtactgggcccccaggccttccaggctttgcacggccagttggtcctccctggggaactgggtgcgggtggagtactgggaggcaggaggtggcccggggaggcttgtggctcctccccttcgntcctcgccctgggccttcagctttcctcatcaattagaaaggatgttgtttcggggtgggggcgtcangtgaagaacttttntgggaaggagaggatttngggcatggcttttggggcaacctttctgggaattnagagaggaaggtt

SEQ ID NO: 248580 - DNA, 973 bp, Homo Sapiens
  misc_feature (442)..(503): n is a, c, g, or t
aattgatgagcaatgcttttctataaagaccaactttgtacaaaaaagttgggcacctccatcctctgctgtggccagagcaggtgcgcaggcacctcccacagcagcagtggggagaagtcagccagctactcttcggggcacagccaggggcccggccccaacatgggcaagggtggagaacagatgcacgagaaatccatcccctacagccaggagacccttgtggttgactagggctgggagcagagagaagcctggcgccctcggccctccccggcctttgcccttgctttctgaaaatcaggtagtgtggctactccttgtcctatgcacatcctttaactgtcccctgattcttgcccgccctgtcctcctctactgctttattctttctcagaggtttgtggtttaggggaaagagactgggctctacagaccnnnnnnnnnnnnnnnnnnnnnnnnnnnnnnnnnnnnnnnnnnnnnnnnnnnnnnnnnnnnnngaaagtcatattgatcctaaaatgttgaagcctgagtctggacgcagtaaaagcttgtttccctctgctgctttcttagatctgcaatcgtctttcctcccttctttccttgtagtttttcccccaccactctctgcagctgccgctccttatccctgccttctggcaccaatccccctcctacagctcgtccccctccctccatccatccttctcccctgtctactttcttgttctgaagggctactaagggttaaggatcccaaagcttgcagagactgaccctgtttaagctttctatcctgtttttctgagtgtgaggcagggaatggggctggggccggggggtgggctgtgtgttcagcagattatttagtgcttccagccctttggatctggggagcctccagagcttgcccttaaattgggatcacttccctgttcattttggggcattgggggctagtgtt

SEQ ID NO: 248581 - DNA, 1021 bp, Homo Sapiens
  misc_feature (665)..(665): n is a, c, g, or t
  misc_feature (906)..(906): n is a, c, g, or t
  misc_feature (924)..(924): n is a, c, g, or t
  misc_feature (939)..(939): n is a, c, g, or t
  misc_feature (965)..(965): n is a, c, g, or t
  misc_feature (980)..(980): n is a, c, g, or t
  misc_feature (994)..(994): n is a, c, g, or t
ttggagaacttggggaggtgtctggagatgagggcctgtggaaagtgggctgagtggccgtccctaagctccagccctctcccctttgtttccccagtggctacatctttgactatgattactaccgggacgacttctacgacaggtgagcaggggaggggcgtgcccaggcatgaaacagccaagctggaggggtcttgagagattgttggtgcagcccactgagttctccaaatgagaaccaaaacccagaggtttgcctggggttgctccaccagtcggtggcagagctgagactggggtcctgtgctgcaggtgctcaggccagagctcctaccaccatacaacactgtctgccatgctaactgccctttttccttcttgtccttgggtgaggctcaaggagaccgtacagccaagagctatgtaagtgtggctagttggaatacacaacagggtacagcgctggttgcagggagtttgagcccttccctctgtgaggtgcccaagcagctggtaggagccccagagctcagtctaagcttcttgggtttatatttagagacaagaggccagcagccatttggaagtctaattagtccctggcgggctgtggtctaccctgcactcccaagccctacccagactccagcccagaggctgtngggctcccactacaacagcactagccacattcttgagtagatatcatggtagatactaactcaaatctctcctcctccctgcttctctccctctgtccagcttagcccaccccagggcagcccaagaagaacagtgcctctctgaggcatgagtcgtccgcccccattccccaccccgcccctgtggagttcgttttcagggaggacagtgtgggtgttagtgggaaagtgtttttaggcngggggggttcaggaaggntttaggatggctaantcttcaggttcttgcccatttgaatnggatttttgttgttnttttgggggcaaanttcccctttccccatttttgttggaaa

SEQ ID NO: 248582 - DNA, 400 bp, Homo Sapiens
  misc_feature (359)..(359): n is a, c, g, or t
cacagccgaggccctttaacccaagaacccatggccaaggagaaatcaaagtccttcctaaataagaatcactgccatataatatatcacagtagagttgcaactgagattccttgtgtctgggagtttggacagcttcagatgtacagtttcactagccacaaagcacaggtacaaactgggtcatcgcctgttcacaaaatgctctcttgatcttatttgcctcatcttcctcatggttgtacagaggatagcaccccaccatgccagcctgacttgggagatatctcctggctgcctgcctggcagggagtttaccccagtttccaaaaacagtcgcccagattaaagggaggganaaggggaaagggcagacggattgggcatgggtttttattaa

SEQ ID NO: 248583 - DNA, 488 bp, Homo Sapiens
caaccatctccaaaatggttttttattgaacacccactttggctaggcaatatcctccccctgccctctaatccaggctcaggtacccccagtggagtatcctcagaaggcaactcccaagaccaggggtaatgagagattgggcagagggtaagggacagcagggagacggaggaaaatgaagacaccagggaaagaggagaggcctgaactggacagctgatgctttgtcctgcccagcacccattcgtcccttcttcaggtaatatcatctgccaccacaaccaccagcaccaactctcagtctctgtgggtacatgccaggcctgtccatttggtgtattccatcttcctggccacaatgatgacttgaggctggataccttcctcgtctggaccaatgagaaccaaatccagcagttctgtcagcaaaggggagctctttttatcaataactggtgctgtggggccacactgtgaagcccaac

SEQ ID NO: 248584 - DNA, 400 bp, Homo Sapiens
  misc_feature (12)..(12): n is a, c, g, or t
  misc_feature (26)..(26): n is a, c, g, or t
  misc_feature (50)..(50): n is a, c, g, or t
  misc_feature (387)..(387): n is a, c, g, or t
cctggggaccgnattaagttggatantgtgggttattaaggcccacaccncccatgaaaatgccataccgttaatgaacctaataagtattgccctcaagaactttcccactatagaattctttttttatttaaaacatgtatgtatttaaaactcaactggtgacttgtgattgtgaaattgataacacttggatgcattcttgctctcgcagaattggtgacatgctttgagagttttgtcacatgttgacatgccaatgttcttataaaccttttataaaggaatatatttttaaagtaaatatattgtaatgtactgtgaacttgtagggtgcttttcaacagtctttgtacagtgtaaatagatcatggaaataaaattacntattcaatattaa

SEQ ID NO: 248585 - DNA, 707 bp, Homo Sapiens
  misc_feature (256)..(270): n is a, c, g, or t
  misc_feature (683)..(683): n is a, c, g, or t
  misc_feature (693)..(693): n is a, c, g, or t
ttggctttaatggtgaaaagtctcagcctttagctgctatctctcccttggttatgcctcacggttttttgtaaactacccacttagtacttgttgcttttgtggctctcttggttctcttgggagacagagccttgtgtaactcccatgcttggcttcaagttaatgccctcttttggctgaaagctgggttttgggggtgagaccatttgtacagccgctatatttttcaaacaaggatattctgaaaaaggannnnnnnnnnnnnnngaacctatttaatatgaaggcttttcaagataagctgactcctgcccagcagtatgtcttatggcacgaaggttatgcagtgccacaggcggggggctgtcccagacctctgtcttcagttatgtggttcctctgctcagggcctgagattccactttgttatattcagatccatcagctgagaaatttttcaacagaatgtttaactggtttttaagatttaatctctcagtagcattacggaacaaactctttagattcaaactggggcccgagatcaggcccccctcaactgaagcatcgggacactaaattttttcaaatcgacccctttttcttctgggaatactagagacatccccacagccctctgttgcttccttctcccttgggcctcccccttcttccctctnttcttccttncctgtgcctgtctt

SEQ ID NO: 248586 - DNA, 893 bp, Homo Sapiens
ttttttataggaaaagaaaaatgaatttactttagttaccgggttttgtagagagtctctgctgtgtcgctcacctcagctagccacatatggaagtaaagacttggactagcagtccatgttttgtataacaacagataacagctgaagtttcagtttccatccattttagggttctgggctgcactcctgcacaaccttggattaacttggaaacatgcgctgtctacatcaaagggtagagactctgaagtgtaggaattcatattcagcaccattcaccagagctgccaagatgactggcatgacgctcacaaaccttgcttggcacacagtgatgaaggagggtttcggagccaagagggagatgatatttatgtgttcaaatcagaactgatgtggggcatgcttagaacgtgccacctggagaaacatcatctgtgtctggggctcttccttggtctgaagctggtaatcgatcctgacagtgatttcgttaggggactggctggcaggcaaatactgacatatagtctctccattttaattgaaaattcagtttgttttcactcttcacatgacaataaaattctttcatactgaaacagtcctggaagggtgggatagactgtccaattaaagtgaaaccatttgctcctgagtcaatccattctcctcactgactcaacagccattgaatttactatttgctctccaaagaactccctaagtgtcccacactcatggccagctcttggttttgctcatactgtccctgccaagaaatatacatctcaatcttttattcttttttataactatcacagggttcaggacatgctacttgaaaatatggcaccccagcatattgaatattttgagctgaaggaatt

SEQ ID NO: 248587 - DNA, 219 bp, Homo Sapiens
  misc_feature (84)..(84): n is a, c, g, or t
  misc_feature (158)..(158): n is a, c, g, or t
  misc_feature (198)..(198): n is a, c, g, or t
tgtgtgagccatggcgcctggggccaacaccagcctgccagagatctcatgaggaacctggacctttacattgcaaagtagggnaagggagctcactggggcaaaacccggactgctgggtctaaatatgtgggggggaggttgctgggtgggtagtngggttaatatggttgtttttgggtttttgaaacaataggngccaacagtggcaaatttttt

SEQ ID NO: 248588 - DNA, 481 bp, Homo Sapiens
  misc_feature (440)..(440): n is a, c, g, or t
  misc_feature (454)..(454): n is a, c, g, or t
  misc_feature (462)..(462): n is a, c, g, or t
gagttaatttttaattagagaagctgtagtagatctaacgtgggccagtacctatcagagtggtggtggaaatggaaggaagccagattacactgggaagatagcagggtttgtgtcagattaattataaggagtgagaagagaatagttgaaaatggagctctaaatggcatcagttttattgcttttggctataagttgagatgccaccttcaaccattaacttaaaaacacaacaccttgtttacttttgctttacgcatatttgaaaatttacttctagatattctgcctcacatttctagttagggtacctccttcctataggaattttgcactgttgggctctattgttttcaaaaacccaaaaacaggcatatttatttccactacccacccagcaccttcccccccacctttttttggacccggcagttctnggggttttgccccngtgaggtncctttcctacttttggcaa

SEQ ID NO: 248589 - DNA, 528 bp, Homo Sapiens
agttaatttttaattagagaagctgtagtagatctaacgtgggccagtacctatcagagtggtggtggaaatggaaggaagccagattacactgggaagatagcagggtttgtgtcagattaattataaggagtgagaagagaatagttgaaaatggagctctaaatggcatcagttttattgcttttggctataagttgagatgccaccttcaaccattaacttaaaaacacaacaccttgtttacttttgctttacgcatatttgaaaatttacttctagatattctgcctcacatttctagttaggatacctccttcctatagaattttgcactgttggctctattgtttcaaaaaccaaaaacaagcatattattccactaccaccagcacctccccccacatatttagaccagcagtctgggttttgcccagtgagctcctttcctactttgcaatgtaaaggtcaggttctcatgagatctctggcaggctggtgttgggcccaggcgccatggctcacaca

SEQ ID NO: 248590 - DNA, 998 bp, Homo Sapiens
  misc_feature (81)..(162): n is a, c, g, or t
  misc_feature (203)..(211): n is a, c, g, or t
aaggttaccaaatcttaacaaattcttatagcctgggtccttggtctgtgatatattacacaaaaatgtgatgatataatnnnnnnnnnnnnnnnnnnnnnnnnnnnnnnnnnnnnnnnnnnnnnnnnnnnnnnnnnnnnnnnnnnnnnnnnnnnnnnnnnntctcttaagtccctgtttttccatctaatccttccttcccnnnnnnnnnaagggatggattagaaaagttaggcgaaattatggagcatattgagagctgggtagaattgctgctatttcataaacagtgtattcaatttttgaacatttgaagatgaaagagaagtagcaggaagatgagttggtgaatagtctgaaatcattgaggctacttgggtccttaaggaaaacaagtgtcaagaccataaccaaattagtcatggagaagaagtaatgactgttagaacccatttgtaaataaaattaattgaatagaattactcacatagtaatagtttcagaatctagaaacattgtgctgggggactaatagagttccctaaatctgcattcttcattttatagagagaaaactaaagcttaaagagatttgtaatatgttcaagttgctgtcaagccagtagttagggagccaagactagaactccagcacctaactcatagccccactgccttttctactattctgtgcttttcccagaagggagtctccaggaatttcttaatatctcccggaactcttttatttacgttcccctaatgcaatcaaaagattattttgatatgtttatgaagctttttatgtgatttttgactctcatacagccagaaaactgtattaaactggttagtaaaatacacaaattatggtgattgtggatatttatatatgcatatgtgatacatagatagtgacttctgatcagttttccaaaaaattaggattcagtgaagtacatttaatattaacaatggcagggcacggtggcttatgc

SEQ ID NO: 248591 - DNA, 939 bp, Homo Sapiens
agcattcactttatgtgactttaataatctttgctagagacagtttaaaaattattggtaaaatagaaatgtcttcaaaacttaatttagatatctgggctgaattagtcaagcaggtcagatactattgtctgctagatgtattaggataaaaaagtttgcttctgtaatacttttaaagcttgcttatctcatctgtaaacctatgtgtcttgagaatcaagcctttggactaaccccaggcattgcccttcatcctgggatacgcatctggtgcataattaaaactgtttacctcctagattcttcaataaaaataagagttaccaagagttcacattacaattaatgtatgtaattaaaacattacatctattgctgcctagaccaccttctggctatacacaaagtgtattgtgatggttaatatgaggtgtgaacatcactagacggaggaatgcctagatggctggtaaaggattgtttctgggcgtgtctgtgagggtgttgtcaaaggagattgacatttgggtccgtgaactaagagaagaagacacaccctgaatgtgggcagtaccatcccatcagctgccagtgaggccagaacaaagcaagcagaagagaaaagggtgagcagcttgctcatcactctctctgtcttcccgtgctggatgcttccttcctctcctcctgcccttggacatcagacttcctggtctttggcctttggactctgggacttgcaccagcggcctcctggaggattacagggcttcatcctaagaccgagacctacgcagtcggcttctctggttttgaggcttttagacttggactgagtcacactacgggcttctgtctttccccagcttgccaagagcctgttgtgggatttctgctcgtaatcatgtgagccagttctccccctcgttccgaatt

SEQ ID NO: 248592 - DNA, 573 bp, Homo Sapiens
agaaaaataagttgattacggacagaggagggcaagtagaaacaggcagaggtgagcatggaacagaaatctggtttacttggctctcacaatgtttgagaattaataaagatcattgctggggatacaagttgcaggcaattgaaagtaaccttaaatttctgagcatagtctttaagaagatgctttaagataattcttactttttaaggttagattgtttagagaacagaggaatacaagttgattaatctacttcagagtttcagatgatactgtgtcaagagaataaaatgtggtcagtcagtaagaatcagtaacagactgcaagtgggcaacagaagaggtgtcagaaataattttaatgtccctggacctgaaatactggaggatggtggtgatggaaataactgaaacgtggtagggaggataatgggctcaattattgacaagtttaatttcaaacttgttgggaattgttgaaattcacaatatgctacttttaccaaggattgcaaccaagaatctaccaatacaacaagtttgcattccatacattgttagagaatgcaa

SEQ ID NO: 248593 - DNA, 371 bp, Homo Sapiens
gtttttgaatatacattctataaaagattatttgaaagacaaaattcatagaaaatggagcaaaactgtataaactgatttgtaactaacactggaccattggatcgatattatatgctgtaaccatgtgtctccgtctgaccattcttgttattgttaaaatgcagaggaatctggaaatatttatatccacggagtccttggatccagtgctacgtcagtaaatagcaccagcattttgcaattgctgatctgctgaaatgtacacattctggtctagtttggtctatcttttaaagcctgatctgggtgtggattatccaactaggggaatcttaaacttgggattaacacgtgggtggaacaactgg

SEQ ID NO: 248594 - DNA, 410 bp, Homo Sapiens
  misc_feature (30)..(30): n is a, c, g, or t
  misc_feature (187)..(187): n is a, c, g, or t
  misc_feature (324)..(324): n is a, c, g, or t
  misc_feature (357)..(357): n is a, c, g, or t
  misc_feature (387)..(387): n is a, c, g, or t
gcatagtgggaatctgcaccatgccctggntctgctcctcctgaccctcctcactcactctgcagtgtcactggtccaggcagggctgactcagccaccctcggtgtccaagggcctgggacagaccgccacactcacctgcactggggacagcaacaatgttggcaaccaaggagcagcttggctnaggcaggaccaaggccaccctcccaaactcgtgtcctacaggaataacaagcggcccttcagggattttcagagagattcttctggcatccagggtcgggagacacagcctccctgaccatcactgggattccagcntgagggacgagggttgattttttcttgccgcanttgggggacaacagcctcagtttttatgtntttcgggaattgttgaccaggtt

SEQ ID NO: 248595 - DNA, 449 bp, Homo Sapiens
  misc_feature (20)..(20): n is a, c, g, or t
  misc_feature (40)..(40): n is a, c, g, or t
  misc_feature (363)..(363): n is a, c, g, or t
  misc_feature (365)..(365): n is a, c, g, or t
tccttggttcaataaagggnccattgggaattccaacccnacaccgcccaggttcagtcccctgagctgggctcccatgctagggggaagcacgggggccctggagaagggctcagacctcagcagtggctccccaggaactgaaaggggagaaaggaagatccctgccgaggccgaggggtgcgaggacgtggttctggacaaggggtggtcagccgcggtgcctgctggcacatgggccctcgaggtttgtgctcctgcaactcctctcgtctctcctttccctctttaagtaacaagccaaatccgaaccaaatcagcgtcaacaacgtcaaggccggtgtggtgaacggcacgggggcngncggccagagcctggggctggccgggcctgcgagagctgttacagtaagtgccctggaatggcggggcacacccctgtgccgaat

SEQ ID NO: 248596 - DNA, 886 bp, Homo Sapiens
  misc_feature (15)..(15): n is a, c, g, or t
aaaacagtgccaggnggtcatcaagagttcctaccaggtggccaaggcgttagcagacgacgtggagttgtactgcttccagttcctgccctttggcaaaggcctcatcaagaagtgccggaccagccctgatgcctttgtgcagatcgcgctgcagctggctcacttccgggacaggggtaagttctgcctgacctatgaggcctcaatgaccagaatgttccgggagggacggactgagactgtgcgttcctgtaccagcgagtccacagcctttgtgcaggccatgatggaggggtcccacacaaaagcagacctgcgagatctcttccagaaggctgctaagaagcaccagaatatgtaccgcctggccatgaccggggcagggatcgacaggcacctcttctgcctttacttggtctccaagtacctaggagtcagctctcctttccttgctgaggtgctctcggaaccctggcgtctctccaccagccagatcccccaatcccagatccgcatgttcgacccagagcagcaccccaatcacctgggcgctggaggtggctttggccctgtagcagatgatggctatggagtttcctacatgattgcaggcgagaacacgatcttcttccacatctccagcaagttctcaagctcagagacgaacgcccagcgctttggaaaccacatccgcaaagccctgctggaacattgctgatcttttccaagttcccaaggcctacagctgaaggttggagaaatgccagctgccctttcgtccccacactgtgggagggaagggacctgtggcagcttcacagggcattgaggggtggccgtgcacaggtgcccagggttccaagggacagtttcggcagcaggt

SEQ ID NO: 248597 - DNA, 946 bp, Homo Sapiens
  misc_feature (502)..(515): n is a, c, g, or t
ctttaaataaaaatactaaagaagttcgtatatcctggaataacatgtcatcttcaaaatatttttattttctaatatttttaataataaacattttatagtgttaaagctgtatttttcttaataaataaaggacattacaaatatttctttaaggaagttcaaaaggatgttgtcttgttaacactggaacgaatataaatcttcaaaatacaattaatatatactgttttgtggaaacttagctcatactattctttaatgctcttcaaatttaaactaacccttacattccatgtgatgtgatgtaggcttataaggtgctaaaatctataggttttgggaagtgaaaggttctattaatatatactgttttgtggaaacttagctcatactattctttaatgctcttcaaatttaaactaacccttacattccatgtgatgtgatgtaggcttataagatgctaaaatctataggttttggaagtgaaagattctannnnnnnnnnnnnngtacataatgggaatttcattccagattatattttatttacatattaatttcacagaatattaatatttcttaacttcttaaagcatgctagcgttttatgtatatgtacacatatattcagacagggtaattttatctgctgcctaacattgtactaaaatattgctttatctgtttttaattacaaaatgctaatgatttcttaaattatagtttaaagacaattggcccaggaagcaaatcccctgcctttagtatgaaccactataaagtaaccttacaatagagttaatccaagacaatattaacaaactgtgctttgtctttaataaaagggataggatttacaaacatattgatgggataacctattcagctatgtccttatttttgcaataatgttacctcaaatattggattgttgaaccaa

SEQ ID NO: 248598 - DNA, 466 bp, Homo Sapiens
  misc_feature (13)..(13): n is a, c, g, or t
  misc_feature (416)..(416): n is a, c, g, or t
ctggcttcacttntgggtcatgccaaagaggcagagttcaggattccctcagaatgccctgcacacagtaggtttccaaaccatttgactcggtttgcctccctgcccgttgtttaaaccttacaaaccctggataaccccatcttctagcagctggctgtcccctctgggaggctctgcctatcagaaccctaccttaaggtgggtttccttccgagaagagttcttgagcaagctctcccagggagggcccacctgactgctaatacacagccctccccaaggcccgtgtgtggcatgtgtctgtcttttgtgagggttaggacagccttcagggcaccatttttgaatcccagtaacacattttcaaagaggcacgtattttaggacctgctgggattctggcagggggtganggggggaacagcgagatttggggtaatggattaacacccttgttggggat

SEQ ID NO: 248599 - DNA, 467 bp, Homo Sapiens
  misc_feature (322)..(322): n is a, c, g, or t
  misc_feature (406)..(406): n is a, c, g, or t
  misc_feature (416)..(416): n is a, c, g, or t
gggttgcctcgtggcacaaaataattgccagagctccagccttcacctcctcattctgagggaaagtcagaggccagcgctggctaggtgtctcctggaagtcttcccaggaagcctcgaaacccttctttttatatcccactggccagaacagagcgaaatggccataccttgctgcaggggaggctgggaaatgtggctgtccagatggatgagattctgttacaggcataaggggagcggggggcttaggcagtgattctctaagtgtctccatccatttcacagatgaggaaacggaggccccaagagaggcagtgantcaccaggggggcccacggcaggggacttgaggcaccaggagccagggtttttcaccttgaaccccttaatttttccttgttgnttgatgttgncaagttttcagatttttgcaaattccgttgcacccctttgggcttttgaac

SEQ ID NO: 248600 - DNA, 459 bp, Homo Sapiens
  misc_feature (44)..(44): n is a, c, g, or t
  misc_feature (51)..(51): n is a, c, g, or t
  misc_feature (117)..(117): n is a, c, g, or t
  misc_feature (150)..(150): n is a, c, g, or t
  misc_feature (241)..(241): n is a, c, g, or t
  misc_feature (361)..(361): n is a, c, g, or t
  misc_feature (425)..(425): n is a, c, g, or t
acctgaaaccccaaaacccccagctgctgatgtgcaaatctcanactctgnaaaaacccgctgcaaccccctcgggctgtgaaaaatttcaaaacccatgtgtgcccaaacttggancagccccaggccccaggggcacggctggaaagntggaccccggttccctggctgtggaccccatggctgagggcttagctgctttgtgcctcagtttcctcatctgtaatatggggacacgaantggccctgtctccaagggctctgacaagacacatgacttcatgtgaggcattccggggacccccacacaataggtcctcaatgtgtgttaatcgttctcatgctgctgctgcttttgggntgtaggcatgggtagtttctggggctcaaggaaataacagaggggtctccaaaggtctcctgtnttgcacaacccacaagtaaactctgatattcact

SEQ ID NO: 248601 - DNA, 463 bp, Homo Sapiens
  misc_feature (32)..(32): n is a, c, g, or t
  misc_feature (58)..(58): n is a, c, g, or t
  misc_feature (130)..(130): n is a, c, g, or t
ccttcaggtgggggtcagggcgagcacaaacngtccacatgctgcaaaaaatttgttnaaggcccagttttggggcccagtttatggcccagatttgggggcctgttccccaacaccagagatttccccnaaacagacagatgactttgttagtctcaaggacagactgcctcagcggacctctgctccctgcccacgatcattacccccaaaacatgccggcaagtctctgctccctgcgtcggcagagggatttataagccctctcttataaatcctggtttagcctttgttttgtgactgagtccaccgagatccttgcaggagaagaaaatttgcaggcaaatgaactaaatgtctcttcctgacatcttcccttctggggggctgaggaagctgtgaacagcctggtttgtcacacagcatgatggccaccacactgaagcagcagcaagcagattca

SEQ ID NO: 248602 - DNA, 547 bp, Homo Sapiens
tcctgcttccccattgccttctgccatgattgtaagttccccgaggcctcctcagccatgcttcccaaacagcctgtggaacgagaaaaggccatgtgatgacctggtgagaaggtggcaatctgcaagccaagaagagggctttcaccggaaacaaactcttccagatcttaattgtggatttctagcctccagaatgatattctttcagatactgtgtactgatgaaactgctgactcagctggtctgaaggaccccactggcactggctggtctgaaggaccctgctgatcacaacttgcctgaaggaccctactgacatcagctgttgtccaaaggacgccacaagaaactgactcaccaaaaaatgcatcctgatgatttcatcccccttaacccgaccaatcaacaaccccaaatctacacagcccctttccctccatgattcctacaaaactccagcccagaactcctcagggagatggatttgaaggtctcctcccttctacttgcttgatgccctattattattaaactctttgctac

SEQ ID NO: 248603 - DNA, 850 bp, Homo Sapiens
  misc_feature (700)..(700): n is a, c, g, or t
  misc_feature (738)..(738): n is a, c, g, or t
  misc_feature (807)..(807): n is a, c, g, or t
tgaaaacatccagttccacagcagggcgggcccaagcccagcccaatccccaggcaatgcagggcagggatcccacgtggtataagtacgggcagagggcagagccaggctgtatcgaggggcggcgctgggaccctcctcgcccagaattcctactcatccccagcacagaagtgctctgtagggccagctgaggacaccccggttcactgagggtggcccacagtaagtcgccgtctggcagtaagttagctctgcaggtgtggaccccaagaccacacacggcctttctcaggtgcaggtcctgccaagcctcacttcgcagtggtgacaggcaaccccgtcagggcagggagcttccaaaggccagtccgagtccatgccaggcgtccactaaatctgcctctccctctccagcgagcaggtgcagccctcaactcctgcaggcctggggagcggagacagggcctgtaggctcggacacgacccggtcctgattttaacagtagacttgagaaggcaagctcagcagacaggctgctggaggatccacccgctgtctcccgcagcggccccactgaagcggcagaaacacacagaagcaccaaatctgtcactctcttcccgtaggaagtccccagaggtggccctccggagatggtcctgttggctgaagatatgaccacacctgtgcctgccnacggccaccttcagcttggcaacaggaactccgcacantggtaccctggacacacaaggaaaagaaagttccctccaagagggtatctggcccagcctcagccccancaagcggagggcagcaaagcccccgaatgatttcgcttacccc

SEQ ID NO: 248604 - DNA, 417 bp, Homo Sapiens
aatatgggtacctacagaagcctctagaaggatctaataacttcaagccagaagatatcaccgaggctctgagagcttttcaggaagcatctgaacttccagtctcaggtcagctggatgatgccacaagggcccgcatgaggcagcctcgttgtggcctagaggatcccttcaaccagaagacccttaaatacctgttgctgggccgctggagaaagaagcacctgactttccgcatcttgaacctgccctccacccttccaccccacacagcccgggcagccctgcgttcaagcctttccagggactggagcaatgtggcttcctttgaccttccaagaggtgcaggctggtgcggctgacatccgcctctccttccatgggccgccaaagctcgttactgtttccattattttt

SEQ ID NO: 248605 - DNA, 731 bp, Homo Sapiens
tctcgccctcactttcatctactcccactttctctctcccttccttccttttttccccctctttctctctttaagtatcatttactggctgagtaccaatttctttctttttcagaagaaaaccctaaacatacatttacaggggatattgtaaagggtcaataccagtaaagtcgcattgcttcccacacataaaataaatgttgatcatccttgggatgctcctccagacttttcctgtgaagttcctcactcccatctgaggtttcttcccctggctaacaaatttcctgccgaactggctgccactcccaattctcttccccagtcttaggaaaaggacatgtgtcacccaggcttcagggagaacttgccttcaactctgaggagaaggaatgtattgccactagcttttaagtccacttgttaaaagaactgtgaaatcaatctagacttatcctttgcattgaagtttatggctgggctgagactaaaggggccatgagtgacactggaagatcttcagacattggaggcttgcagagcaagctgtgggacagggaaggccacgtggcagcagggaaaggatttgaatggggggctccttggacaaatttggggccagaagctagagcaaaggatggttgggggtaaaagggaggctgccagcacagggcatgggcaacttactggggtgatgcctctccatgcctcaggaaatggggtatccc

SEQ ID NO: 248606 - DNA, 467 bp, Homo Sapiens
atcacctgcagctccatgctgtccagcctctgcttcctgggcgccatcgccgtggaccgctacatctccatcttctacgcactgcgctaccacagcatcgtgaccctgccgcgggcgcggcgagccgttgcggccatctgggtggccagtgtcgtcttcagcacgctcttcatcgcctactacgaccacgtggccgtcctgctgtgcctcgtggtcttcttcctggctatgctggtgctcatggccgtgctgtacgtccacatgctggcccgggcctgccagcacgcccagggcatcgcccggctccacaagaggcagcgcccggtccaccagggctttggccttaaaggcgctgtcaccctcaccatcctgctgggcattttcttcctctgctggggccccttcttcctgcatctcacactcatcgtcctctgccccgagcaccccacgtgcggctgcatcttcaa

SEQ ID NO: 248607 - DNA, 914 bp, Homo Sapiens
taatttttcttttgaacagctttattgaagtataatttgtatactataagtccatccattaggtgtacagttcagtggttgttagtagtagattcaatggttgttgttactgttagattcttaagttttaaaagataacttagagtttagcaagaagtgtcattttcccacttccagatatagaggacctcctgagactcttaaaatttaatacacctctgtcaacaattcttaattcatttacatttccatagttacctgccaacctagatattgtacctctgcaagagttaaagtagctaaatatagcatagtcctggtgcctcaaaataagaaactcaattatttctaagtttgagtttgccatccttccatgttcaatgtatttaaaaaatagcagtagtctgactaatgtcagcagatatgtacttgtcattatttttaaaaggcaaatgggatacctggttcagacggcactgttataaatggttttgcattagaactgcagtatagtagaggagggctgaactagaagggaaaaaaacatggcttgcagttactgctctgctactcaatcaccaagagccagatcaaatctcttaatctttctgaagctcaagtttcctcatctataaaaatcaagtgtgataatagttaaacctttctgcataggatttttgtaaggatgaagtgagataatgcatatgaaaatattgttgcatcgtaaaagtgaattaaaaaaaattaaaatctttttcaatatcctagaggacaataatacccgagttttgtttgaacgagttttaacatctggaagccttcctcctgagaagtctgggtaagccattgtgaaaagttgttgatcaggttctaaagacagctttcttgacctgaattgtgccaacttttttgta

SEQ ID NO: 248608 - DNA, 113 bp, Homo Sapiens
acttaatcctctagctcttctacaaaatgttctgttttgttaatcatgtttaacataattttgatccttttaaatgtattgagacctatcttggtgaatgttccatgtgcaat

SEQ ID NO: 248609 - DNA, 627 bp, Homo Sapiens
  misc_feature (361)..(361): n is a, c, g, or t
  misc_feature (615)..(615): n is a, c, g, or t
ttcttttaaatgagcaagtttgagagtctgcagtttggactaccatgagaattgataggaaggtgggagtcccaggcaatcccaggtcctgtagcagcagctggtggggttcccactccatgccgtgcagagcctgaactcaggatgacacctgcacctgctctctggctgggctctggcacaggaagccctcagcaaacacccccggcacagccatgccatagccagacaacagctcgctgtaccacaccatcatgggagacagcagttattctgagcatctcactgctgaagaaaccaaggctcagagaggaccatggcatgcacaaggtcccacagggccccaggaatccaccaagtnttcagacaacttgcccatggttttcacggagcaccttgggacccttcccgacaggcaccgttggcttttctgacgtgggctgcaagtgcacggagccccttcctcctcggccattcccagtttagattcccaggggaagcatcagatggcccctctcccctgctggcagcagagcagacggaaccagccagagcccagggcagtgctcacctgcaggccagtccactgcggccagcaccgccccctagaacctnactgcgggcatg

SEQ ID NO: 248610 - DNA, 796 bp, Homo Sapiens
ttgggacatggctcaccggatgacaacacagctgctgctccttctagtgtgggtggctgtagtaggggaggctcagacaaggattgcatgggccaggactgagcttctcaatgtctgcatgaacgccaagcaccacaaggaaaagccaggccccgaggacaagttgcatgagcagattcaactggaaccactgtggagagatggcacctgcctgcaaacggcatttcatccaggacacctgcctctacgagtgctcccccaacttggggccctggatccagcaggtggatcagagctggcgcaaagagcgggtactgaacgtgcccctgtgcaaagaggactgtgagcaatggtgggaagattgtcgcacctcctacacctgcaagagcaactggcacaagggctggaactggacttcagggtttaacaagtgcgcagtgggagctgcctgccaacctttccatttctacttccccacacccactgttctgtgcaatgaaatctggactcactcctacaaggtcagcaactacagccgagggagtggccgctgcatccagatgtggttcgacccagccccagggcaaccccaatgaggaggtggcgaggttctatgctgcagccatgagtggggctgggccctgggcagcctggcctttcctgcttagcctggccctaatgctgctgtggctgctcagctgacctccttttaccttctgatacctgggaaatccctgccctgttcagccccacagctcccaactatttggttcctgctccatggtcgggcctctga

SEQ ID NO: 248611 - DNA, 1221 bp, Homo Sapiens
gctggcaactggaacgctggattctcctgcccatctggaaattgaaggggaagattttccttttgtgtttcattcaatgcctgaatttggagctgctataaacaaaggaaagttgcgtggcaaagtggatccagtgttaattgtaggttctgggcttactgccgctgacgcagtactgtgtgcttacaacagtaatatccctgtgattcatgtgtttcgcagacgagtaactgatccaagcttaattttcaaacagcttcccaaaaagctgtatcctgaatatcataaagtctatcatatgatgtgtactcagtcatattctgtagactcaaatcttttatctgattataccagctttcccgagcaccgtgtgctttcctttaagtcggacatgaaatgtgttctccaaagcgtttctggattgaagaaaatatttaagctgtctgcagcagtagtattgataggttctcatcctaatctgtcttttctgaaggatcaagggtgttacctaggccataagtcaagccagccaatcacatgtaagggtaatcctgtggaaatagatacatatacctatgagtgtattaaagaagccaacctttttgcattgggtcctttggttggagacaattttgttcgatttttaaagggaggggcgctgggtgttacacgctgtttagctacaagacagaagaaaaagcatttgtttgttgaaagaggaggaggagatgggatagcttaaagcaagtttacaagtaattaaaatggacagtttgccattaaagatttttaatagtggttttgcagtgtactggcttgaattttctggacttgagttaactgaaggagagcctcaaactatagtaacttcatttttaaaagttactagaatttggtatcctgatttatattgcagtgtttcaaaggtgtcactgtcagacaaatagaaacactgccaacttggtgtaacttaagctttcatttaactaaaacattcttttcttgcaaaacttatttttcatgatcatttttggttatttattatacttgattccaaaatagtacagccttgaaatctataaaaactgtgcagtcattatgccagaaattatcttaaatatataatgggtcaccttgctgttcaaagggtggtgcaaggtcctgcagcatcttacatctgtagcttgttagaatgtaaactctcagccccacaacttactt

SEQ ID NO: 248612 - DNA, 484 bp, Homo Sapiens
  misc_feature (275)..(275): n is a, c, g, or t
  misc_feature (292)..(292): n is a, c, g, or t
  misc_feature (310)..(311): n is a, c, g, or t
  misc_feature (358)..(358): n is a, c, g, or t
  misc_feature (420)..(420): n is a, c, g, or t
  misc_feature (457)..(457): n is a, c, g, or t
  misc_feature (462)..(462): n is a, c, g, or t
tttccttccatcttgattgcagtggtgattacacacatgtagacattcatcagaactcatcaaagtatacacttaagtctgtgcattttattacatgtaagtaacacctcaatctgaaaagtatcagggcaacaccacacactgcagaggggcagggctcctccggcagttactcacttcccttgaaacagaagctcaaacatggagtagtcttctgtgactaaacttgttttccgccctcccaacttccagggagaaccttcttctgaataggntttgaggtaacttaggnaactgctctcaatacggnnttttaaagttggtgaggaagtcgacagaaggggaagtcacagtaggnaaatcaaggtactatcaggatgaagtcagcacgcagagcaagggccaggcgaggcccagggngccgggcttgggtccctgcccaccttacccggggcanccagncagcacggtttccctacaaggt

SEQ ID NO: 248613 - DNA, 371 bp, Homo Sapiens
  misc_feature (17)..(17): n is a, c, g, or t
  misc_feature (23)..(23): n is a, c, g, or t
  misc_feature (39)..(39): n is a, c, g, or t
  misc_feature (346)..(346): n is a, c, g, or t
acctccccttgtatctnccggcntttggtctgtccaggnaatgttttcacttgagcctcagtatttcttaaaaggccataggttggagagaaagttctgacgttggtttgactgctgacggcttttccgtatgagttttcctgctgggtagtggccgaggaagaatatcccgagcccaagaagcctcttctggcatcacctccaatagatgtgcccgtctgagatccacggtgccctgacaggttagaatacagtgccgagctgtgattgaaacttgccaaaggtgctttctgcctttgaaaatagattcctttcatttttccctctgtagtagtgagtcggtatnagtgataggatttttgttctgaatt

SEQ ID NO: 248614 - DNA, 1102 bp, Homo Sapiens
  misc_feature (18)..(18): n is a, c, g, or t
  misc_feature (34)..(34): n is a, c, g, or t
  misc_feature (54)..(54): n is a, c, g, or t
  misc_feature (558)..(570): n is a, c, g, or t
  misc_feature (751)..(762): n is a, c, g, or t
tcaggcccttttactccnttaaaaatccgaaggnggggactaatccttcctcgnagggtccctgagtcatagttttgttaaaatatttacttgcttttttcagatatgcttaatatcaactgttcagactttaaaaaccaacttgtcacagattttctagtggactcacttttctagtaaaagtctcacaactctcagtcagtctcacacacattcacacaatcggtattatgaattttaatgtgacaaattaaaaatatctttcattgcagaggctctattatggacagagcataatatctacatggatacatcagaaattattgtatgtcatgaaaaaaaattatgtcacaaataaagccccacccaactgctgattttctatatgaaacacaagtgggcttttcatttgttgtgggtaaggccacaccactggccacattatttggtttctccagaggccactatcactgacccccaaagcaaaatagagggctgggggcacatccccatttttgatgtgctgatggcagatcctccaccagcaatatgaatacnnnnnnnnnnnnnaaatatcatcatctttttgaacatttataaaaactatctacaatataatagtgtatcatcactaatagaaatttcttctcagttctatttcagaaggtgtcaactgatcgtgctctttaaataaacgataaataccccatatattccttcatgtctagttgtttcaacttcttcttcttcnnnnnnnnnnnnggcaaattaaaaaggcgtatggcttcttttcgccaatttttatatttgaggtttagcttggtatcctgcggtaaaagtacatgtagcccaggtctttagggggcctttctgaggcacaaactttgtggtcattgtaaatcacccatctgaaaataagacagaagcatttgatggatttaagtcagttccaggaaactttacacaaagaagtcactaaatcatatggcgcacaacacttaaccatgatgttttaaggtactatactcaagttcgttgtataaaaagggacagaatggtggtagggaatccaacttttttgtacaaagttggcttttatagg

SEQ ID NO: 248615 - DNA, 432 bp, Homo Sapiens
  misc_feature (23)..(23): n is a, c, g, or t
gtggggacacaaacaaccatccnggtaagggaaaacggaacggggtcattccaatattccacggctgtgtctttgtaggccaaacatttttgtctatacagacaaatggaaaatggagatgttaaaatagtttggtctacgaaatacaaactaacatttgtctcctagctaagaaatgtatcaatgtagagctggggggcgggggattatattattcactttctagaacactggctaatgacactccaacttgtcagcaaatagttatacatctcaaggagctaggtctccttgccctttaaaatctccagtgaagatgtagaacaaaactttatgtttcacattctttatttagacgcattatagcatcagatgtttttttctgccctcttttttactttagccattacttctcacagtagtgtttgtaat

SEQ ID NO: 248616 - DNA, 569 bp, Homo Sapiens
  misc_feature (183)..(195): n is a, c, g, or t
  misc_feature (454)..(454): n is a, c, g, or t
  misc_feature (481)..(481): n is a, c, g, or t
  misc_feature (530)..(530): n is a, c, g, or t
cgacagtctcagccccaccgacccactttcttggcatatagccccacttaagacccctcctctacttccttctgagtcctctacaaagacatccgggtactacatttccatcccttccctattttgacaccaaattatggtgtagacagccctcccccaaccccaggccagtcaggcacaatnnnnnnnnnnnnnaaacgtcctggactgcacagacctcccactccagaccatccaggcctggttcccaagacccgatccttcccctgcaaccagacagtctacaacttgcccccttccagcccattttctgccgtgaaaccccagccagccacaccagactctgggaaccctttttcgactggccccaactcttgggacaccaggggcaattaggaacatccaacagcaaattgtgacagactcttcccaccccaaccttccccaggacttntggcacgggatgttccttagggccccnttccccaacttttaaccaggaccccattcccccttaagttccttttgtntttggacccccaagtttttcaaaccaggatattcttggg

SEQ ID NO: 248617 - DNA, 511 bp, Homo Sapiens
  misc_feature (22)..(22): n is a, c, g, or t
  misc_feature (37)..(37): n is a, c, g, or t
  misc_feature (45)..(45): n is a, c, g, or t
  misc_feature (52)..(52): n is a, c, g, or t
  misc_feature (61)..(61): n is a, c, g, or t
  misc_feature (82)..(82): n is a, c, g, or t
  misc_feature (87)..(87): n is a, c, g, or t
  misc_feature (491)..(491): n is a, c, g, or t
cactggaatgaaaggaaccatnagtggatggccccanctggatgntctgcanaatccccanagggaggaaaattcccaatanaggcnagccagaattctgaactccctggcagcagcagggctttcaggcaccagtgtctgtgttgttagaactcagaggaagaggcaggggcagcagccgacagggggcagcatgacccaagcaaaggggcctgaggcctcagtgggggtagggcaaggaggtacctcacaggtgggtgtgaggccccctctggagtttctggccattcacttacccactctcttctccccctgacccccgctccattgtttatgatggaaaaacggacatttggctaggtgtctctcacggctgctccatcctagcccccacaagctggggcttcctcctgtagatgctgtgcatgccccatgatgagtttctggcctaattgagggaaggaggaaattcataccagcagttttcaatnattaagaattgttctaattt

SEQ ID NO: 248618 - DNA, 982 bp, Homo Sapiens
  misc_feature (900)..(900): n is a, c, g, or t
  misc_feature (943)..(943): n is a, c, g, or t
  misc_feature (950)..(950): n is a, c, g, or t
ttggcacagacatgcccttgacgaccccttgttgcgtcttcactctcaggtaacatatttttggaattccaagaggagttggagcaagtctataaggtctactgtgccagctacgaccaggccttgctactggtggacacgtaccggaaggagccggagctgcagcggcacatccagggcatcgttgaggcggtggtgccgcaagctggatcttcaggcctcagtttcttgctggtaattcctctgcagaggatcaccaggtacccactgctgctgcagaaaatcctggagaacacagtccctgatgccagtgcctatcctgtccttcagagggctgtctctgccctccaggacgtgaacaccaatatcaatgagtacaagatgcgcaaggaagtggcctccaagtacaccaaggtagagcagctgaccctccgggagcggctggcccgcatcaacacacacaccctctccaagaagaccacccggctgagccagctgctgaagcaggaggcggggctgatccccaggacagaagacaaggaatttgatgatttagaagagaggttccagtgggtgtctctgtgtgtgactgagctgaagaacaacgtggctgcttacctggacaatctgcaggctttcctctacttcaggccgcacgaatacaatctggacatccccgaggggcctgcagtgcagtattgcaatttggcaagagaccttcaccttgaggccttcctgaaatttaagcaacggctagaaggcctggtgtggcagccactgtgcagcctggccaaagccctgcttggccctcagaacctgatcaagaagcgtctggacaagctactggactttgagcgggtggaagagaagctgctggaggtgggcagtgtgacctaccangaggaggccgccctgcacacattaccaggcactcaactcgctngctagtnggcttgagctcccacagtttaaaccagctggt

SEQ ID NO: 248619 - DNA, 977 bp, Homo Sapiens
ttggcctcctcctcttcactgcccgtctgaggcccggcagcccctccctggcgctcttcctgagcaatggccacttcgttgcacagatggaaggcctcgggactcggctccgcgcccagagccgccagcgctcccggcctggccgctggcacaaggtctccgtgcgctgggagaagaaccggatcctgctggtgacggacggggcccgggcctggagccaggaggggccgcaccggcagcaccagggggcagagcacccccagccccacaccctctttgtgggcggcactcccggccagcagccacagctccaaacttccggtgaccgtcgggttcagcggctgtgtgaagagactgaggctgcacgggaggcccctgggggccccacacacggatggcaggggtcacaccctgcatcttgggccccctggaggcgggcctgttcttcccaggcagcgggggagttatcactgttagacctcccaggagctacactgcctgatgtgggcctggaactggaggtgcggcccactggcagtcaccaggactgatcttccacttgggccaggcccggacgcccccactacttgcagttgcaggtgaccgagaagcaagtcctgctgcgggcggatgacggagcaggggagttctccacgtcagtggcccgcccctcagtgctgtgtgatggccagtggcaccggctagcggtgatgaaaagcgggaatgtgctccggctggaggtggacgcgcagagcaaccacaccgtgggccccttgctggcggctgcagctggtgccccagcccctctgtacctcgggggcctgcctgagcccatggccgtgcagccctggccccccgcctactgcggctgcatgaggaggctggcggtgaaccggtcccccgtcgccatgactcgctctgtggaggtccacggggcagtgggggccagtggctgcccagccgcctaggacccaacc

SEQ ID NO: 248620 - DNA, 746 bp, Homo Sapiens
  misc_feature (171)..(221): n is a, c, g, or t
  misc_feature (671)..(671): n is a, c, g, or t
  misc_feature (695)..(695): n is a, c, g, or t
  misc_feature (701)..(701): n is a, c, g, or t
ttggctggtgaggagtgactgtccaggggaaccagcagagggcgttgggggtgccaagggcttctccgcaagggaagcccagatttacttctttcaaaatcatatcattccttagagtttagggaccaaaggactattgcttttttaagaatatatatatctatataaatnnnnnnnnnnnnnnnnnnnnnnnnnnnnnnnnnnnnnnnnnnnnnnnnnnngacagtatagagtctcataaaagctgcctttaaatatccctaggagacagggtgaaggagacccttgacagccccagcctaggcagatgggggctgtggaaagattgttctgtgtctcattccctcttaagccactcccccaccctgcccttttaaaaataattaaggatttgaggtctaggctcacatgcaggtaattagaacgttatggaagcagtgaacccacaatccacaatccccaaactcagagtgcatcccagaagaggccccaggcagagctcaggttggccctggcttttgccatcccgggaggccccctagccagcaagagtgggattgcctttcctgtggaaccactgcttccccaggcgggaagaaagagggagttctgggccacctgagcctttcccttgccaatccaggtagacagaggccctgccttttgggtgnaagcttgagacaccttcctgtttncccttnccctttgaaccagttcccagtgttccctttgctccagggtaactt

SEQ ID NO: 248621 - DNA, 357 bp, Homo Sapiens
  misc_feature (325)..(325): n is a, c, g, or t
tgacacgcgcgcacggctatcccttccaatatttccgaggccagctgcccagagaaggagggctgggtggagaggaccgtgccagcagcagtaggcctgggcaggagacaggcacgcacctccgcggtctctggcgagtctatgtccacacagcggcaggacctccacccccagccacctggcagcagccccacatctccaccgggtcacccttgctgacatcaagagtgcctcccgcaatgtcccaacccatgagggcttcttgggagctgaaccaggggcaccggccacttctggaggggggctgctcgtgacttccgacctnttgtcttcgtagttggcatgagaagatggatt

SEQ ID NO: 248622 - DNA, 476 bp, Homo Sapiens
  misc_feature (81)..(81): n is a, c, g, or t
  misc_feature (428)..(428): n is a, c, g, or t
  misc_feature (435)..(435): n is a, c, g, or t
  misc_feature (446)..(446): n is a, c, g, or t
tggttttgtgcagatatcagagtgctaatgtgagaaacccagttaaaagaaaacttagtttattgggaagaaagcctcagnccactcgtttctagaactgtgaaaatatccttggttggcatttttaacacaaaacactatagtgttggtattaaatagtactaggtaaatataaagaaaccaataatgaattgctgagacaatcttgaacccaaatagcattagaaagctgaaggcccaatgaaataacactttcacacttaaactctgtgggataaattttgcctgtggggtattaaacagatgggtcaaattaaaaatgctttactataattaacttttctgatttgaatgaaggggaaatgtatttattggaaccaaggctgtttgctgctttatgccgggtgccgtgttccgttcgccagggngtggggngggttggaccngggttttgtgtctaccccccagttctttac

SEQ ID NO: 248623 - DNA, 662 bp, Homo Sapiens
  misc_feature (11)..(11): n is a, c, g, or t
  misc_feature (58)..(58): n is a, c, g, or t
  misc_feature (67)..(67): n is a, c, g, or t
  misc_feature (95)..(95): n is a, c, g, or t
aagccttgggnatttaatcaccagggaaaaacactaaaaatgcccccaggctgagctnacccatccnagtgatcagatgaacccaagccctgtgnatctcttaaagaaacctacatctacacatggcagcctggttagtggcttctctggaaactaagtgcatagctgctcaaatgttagagccagaactctggttccccagggagggcgagtatcccaaagagatttgaggttaaatggatggcagtcccaggtggtcccagacatgctctcactgctgaattcctgcacttactcctagaatataccagtgctgttttgtcccgccatcctgagggctttagaaagtgctttaaaaagggaggatctcgaagcagcagctatttcagaggcagctgttgggaaagcctatagtggttccatggaggctatccaagggaggaaccacaagccaactccccataagtcaggagattttcctgtggccccacccagaatctgagcggacagaatggaggccttgtgcatgatgctcacctggcctgtttcagatggagggcaccctacccccagaaagttctctccctcccaggcactagaccatgacaggaatagattcctccccagaggaaattctcaggcaggttcctagtgccgaatct

SEQ ID NO: 248624 - DNA, 413 bp, Homo Sapiens
  misc_feature (63)..(63): n is a, c, g, or t
  misc_feature (150)..(150): n is a, c, g, or t
  misc_feature (269)..(269): n is a, c, g, or t
  misc_feature (353)..(353): n is a, c, g, or t
  misc_feature (374)..(374): n is a, c, g, or t
  misc_feature (396)..(396): n is a, c, g, or t
gctgttggacaggatacgagcttgaaatccgggtcttcctccagcagctcaagggccgcgtanccggtgatgccattcagaaagtgcatccgggtggccttcagggaccaaggcgccgggagacatgcccccagcccccatagaggtctngacggatctggctgagaagataacagggccactggaagaagccgtggcagtggctttctcgcaggtgctcaccatcgcgggccacggaaccggtcaccctcctgcactccaagcccccnaagcccacgcaggcccgtggaaagcctttgctcctgagcgcccctgggaggacaggaagaccccgtccctgaaatacctagctntgccccttgttgcaccttagnttcgaacccagggattcttgancttgccctgagaaactt

SEQ ID NO: 248625 - DNA, 336 bp, Homo Sapiens
  misc_feature (52)..(52): n is a, c, g, or t
  misc_feature (284)..(284): n is a, c, g, or t
agaggttttaacatttaaggaaataacttggcaaaacactccgaattgaggnagatgctacagacaatggtgatcaggacccagtcaccactccattgaggcttattacgaaccaaggcaggatccaaatagccctcaaaagaagaaccaaagattgcaatgtgatatcctccaagctgatgttcctgttggatgacctgctctgggtgctgactgactcacagctcaaggctatgatgaagtatgcagagtcactgagtgaagccatggagaagtcagcccantcaaagaaagagcctggcccctgaacctgtgcagattactccaccagcccat

SEQ ID NO: 248626 - DNA, 877 bp, Homo Sapiens
  misc_feature (616)..(634): n is a, c, g, or t
gtacactggttcatagatcggcacttgactttgaacctggcaccaaaaggcacaatatctgataccctgtacaagagctattagagatgctgccatatggatgggcaaaactgagccaatcccacttaggaatggaaggcttggacatggaagggaggatataaacgaggagttggagaaaaacgcaagcccagtttttgctagagtggaaatgaaagtgggaatgagggtcttgtttttagtcctctaaggaccaggaagcaattttaaaacttccttggtttttctgaaagcagcatattcaaaatgccagcaaaaactcctaacaactgcaaaaccaaaagaggatcaaagctcaccaacatcccttcttattgctgaaaggctctaaaattcaggatgccctgttcccttgtaaaagggaaaataattaagtctgatttatggtaatcataccacatcacacttctaaaaaaatattcaagtgtgtgaccaggggacgtttgacaccattttattaaccttcaacttcagtggaaaaataaaaccttttccaagtgccattttcatcacaagacttctagttagtgtgtgtgtgtattcacacacacacacnnnnnnnnnnnnnnnnnnngttggttgcttttgaagtgcagcaagagaccaataccgcattgtagtcaatcaaataaaagaacagaaggccaagcagtttccaaatggttattttatcagattgtttgaacatttaattatcctgtttgcaatccaaaatagttacctgaagtttgctgttttgtgtgtatgtgtttacttttattgtatatttatttttctaaactctttggcacaattttctgggggcgttcagactgcc

SEQ ID NO: 248627 - DNA, 225 bp, Homo Sapiens
  misc_feature (18)..(18): n is a, c, g, or t
  misc_feature (54)..(54): n is a, c, g, or t
ccaggggcttagggaagnccgagccaccctgggtcaaagaagtcaaaggggctncctggaggaggcagcctgtcagctggtgcatcagaggctgtggccaggccagctgggctcggggagcgccagcctgagaggagcgcgtgagcgtcgcgggagcctcgggcaccatgagcgacgtggctattgtgaaggagggttggctgcacaaacgaggggagtacatca

SEQ ID NO: 248628 - DNA, 502 bp, Homo Sapiens
  misc_feature (178)..(191): n is a, c, g, or t
tttttttcatataaaagttacatgtttgaaatgtctgcaggaagatgccaccatcagacaggttagctggggcatatatattacaatgtaaccctgtggaggtcgtggggccggagcgggaagatgctccccagaatcgggttcaggtcagacatggtgtgtgcctgcccctccttgnnnnnnnnnnnnnngacacctgcaggtgaggactgacctctgcaaggaacgagtcctccgcctggctcacgtctgtctgtgaagactgattcccacaacccgcccgggccccccaaaggaacagacgagccacggccaggccgcagcactgagcacagagctcagcaataaccagggccaggcttagggggcacagggggctgcctgccatcaataagttagacatacatcgcaccttgccgtcctcacgcagggagccccagggcccaggcagcacatgagcagtgcccaggggcaccttgccgtcctcacgcagggagcccaa

SEQ ID NO: 248629 - DNA, 883 bp, Homo Sapiens
agcacccaggcggccgcgatcatgaggcgcgagcggcgcgcgggcttttgcagagtcttgagcgggtggcacaccgcgatgtagcggtcggctgtcatgactaccagcatgtaggcagacgcaaacatgccgaacacttgcaggtgcttcaccacgcggcacagccagtcggggccgcggaagcggtaggtgatgtcccagcacatttgcggcagcacctggaagaatgccacggccaggtcggccaggctgaggtgtcggatgaagaggtgcatgcgggacgtcttgcgcggcgtccggtgcagagccagcagtacgctgctgttgcccagcacggccaccgcgaaagtcaccgccagcacggcgatctccagtttggccagctcctcgttgcgcacgtccctcggtgggccgttgccctccccgagggcttcggcctcccggcttgtgttgccagcgccggtggccagaggccaccatgggctggagttgcccgagggccccgcgtcgggaccggcggagagacgcatgctgtccatgcagctcctactcggccctcttcggagctcccgccctcgcgggccgctccctccccgtctcggaggacttgggctcctcgtccgaagcgcagggtctttggcgcgctcgcagcttgccgggctctgcgatccctccagtgggcgtctcccggagcacgtcccgcctgcccactgagcagctctcagcagggtgagctggcccctctccctgctctgccttttttcaacttcggcgaggtcgggaaggtgagctccgagcttccggaagcactgggttcccaactcaagtatttatgcggtgcttgtttccttgggacgcgctccctcccgccctattgccccaa

SEQ ID NO: 248630 - DNA, 916 bp, Homo Sapiens
  misc_feature (839)..(839): n is a, c, g, or t
ccaactttgtacaaaaaagttggccagaaccaaagaatgtgaagggggtccatggagggctcacgtccccgcgccccgagcggccacttagcgccgtcgccgccggctttcgacggcgagctggatctgcagcgatactccaacgggccagccgtgagcgcagggtcgctcgggatgggagcggtgagctggtctgagagtcgtgcaggcgaacggcgcttcccctgccctgtatgcgggaagcgcttccgcttcaactctatccttgctttgcacctgcgggcgcacccaggagcccaggccttccagtgccctcactgcggccaccgcgcggcgcagcgggctctgctgcgctcgcacctgcgcacacaccagcccgagcgcccacgtagtcctgctgcacgcctgttgctggagttggaagagcgcgcgctactacgcgaggcccgactggggagagcccgaagctcagggggcatgcaggccacccctgccactgagggtctggcgcggccccaggctccttcatcgtccgccttccgttgcccctactgcaaaggcaagtttcgcacctcggcggagcgcgaacgccacctgcacatcctgcataggccctggaagtgcggcctgtgcagtttcggctccagccaggaggaggagctgctgcaccacagcctgacggcccacggggctcccgagcgtcccctggcggccacctccgctgcgcctccgcctcagcctcagcctcagcctccaccccaggccgaacccagatcagttccccagccggagccggagccggagcccgaacgtgagggaaccccgaccccagctcctgnccgctcccgaggagcccccagcgcctcccggagttccgctgccaagtgtgcggccagagctttacacagtcttggtt

SEQ ID NO: 248631 - DNA, 886 bp, Homo Sapiens
ttggcacactttggcttttgctgttcaccaaagtgagaccagaccagcctcgtctctgcccttcatgttggttccttcctttcactggatccagaggggctttgagtgtattgggtggcggcagtagtcacccctctgatcttctgtcttgggcatctcagtaggaagtcgggggactgcggggctgagctcagttctggttgacgttgtgactgcgtggccttctcttggccttgtgcctcagtggcctgcagtctgcaattcggtctgactctgctgtgaaaccctgttcttaaagctaacttggcgctctactggcaaccccgattgctgttttaaaagcagaggatcagcataaaaaaagagaaggaaatcatgaactaggtgaaaaaacacatttttcttcatattctcaaaatgagagggaagcagaagtctgtggctaagggtggagaccctgcgtctgtgaacagaggccactgcccaccactgcccccaagcaggtggagggaggcacagttctgaatgcctttggcccctcacaaggaaggtggcacacacaccggaccccctctggccttctgttaacctgcaccaagtcctgactgtccgcggagctgccacgcccaccttgatggctgctgcgttacaccagaggcaggaccaggacctgactcctccaggctccactgcccatcagtgcctgctgcctgctcagtgaatggtcaccatggaaacggcgctcacgcctacccacccccaccaccacgccttggtcattgttccttccatgagtgagtgctgcccagcaagacaaagtacaggctccagtgggaaaggccaccatgtcagccaagtcccttcccgaagagtgcccgcatgctta

SEQ ID NO: 248632 - DNA, 600 bp, Homo Sapiens
  misc_feature (492)..(492): n is a, c, g, or t
  misc_feature (499)..(499): n is a, c, g, or t
  misc_feature (504)..(504): n is a, c, g, or t
  misc_feature (515)..(515): n is a, c, g, or t
  misc_feature (528)..(528): n is a, c, g, or t
  misc_feature (538)..(538): n is a, c, g, or t
  misc_feature (555)..(555): n is a, c, g, or t
  misc_feature (567)..(567): n is a, c, g, or t
  misc_feature (589)..(589): n is a, c, g, or t
tggctttctccaagcctttcaaaaaagacaaccaagaccaaaggacacagttacccacctggcccccctgaagtcagccggctcagacgatgcaggaagcgctgctccgagggccgagggcccacaactccattttctccacctccacctgctgatgtcacctgctttcctgtggaagaggcctcagcacctgccactttgccggcctccccagctgggaggctggagcctggccttagcagccccttttcagacctactgggccccttgggtgcccagggcagatgaagcaggctgcagcgcccagccttcaccatatctgctgtcctcccctctcgaaccacggccagtctcccgctcagcgtatatgctgcgcctgcccccacccgccggagcctacatccagaatgaacacagctaccaggttgggcagcgcttgactttgggaagcgggcgagccgaggcagccctttgatgccctttgacaaaggnccagcgncaatntcaagggcttncaaagcggcgggnagaagcgggnttgcggtttgagaattnaacaaaggttgnaagaaggagcggggaagggagnaagcggggaaa

SEQ ID NO: 248633 - DNA, 492 bp, Homo Sapiens
  misc_feature (248)..(248): n is a, c, g, or t
  misc_feature (397)..(397): n is a, c, g, or t
  misc_feature (481)..(481): n is a, c, g, or t
cgggcggccggtgggcagcgggcgccatggccgcgccggatccgctgcggacgcgcctgtgccgcttggtgcgcggaaagcagggctacggcttccacctgcacggcgagaagggccgccgcgggcagtttcatccggcgcgtggaacccggttcccccgcggaggccgccgcgctgcgctgtggggaccgcctggtcgaggtcaacggcgtcaacgtggagggcgagacgcaccaccaggttgtcanaaggatcaaggctgtggaggggctgacctgtaccgaggagatggcccagcgagggcttcccacccgcccacgacccctgggagccgaagccagactgggcacacaccggcagccacagcttccgaagctgggcaagaaggatgtcagtngggcccctgagggagctgcgcccttggcttctgccaccttgcgaaagggacctcagggctattgggtttcaacctgcatagttnaacaatttccc

SEQ ID NO: 248634 - DNA, 899 bp, Homo Sapiens
  misc_feature (18)..(18): n is a, c, g, or t
  misc_feature (29)..(29): n is a, c, g, or t
  misc_feature (38)..(38): n is a, c, g, or t
  misc_feature (47)..(47): n is a, c, g, or t
  misc_feature (93)..(93): n is a, c, g, or t
  misc_feature (99)..(99): n is a, c, g, or t
  misc_feature (125)..(125): n is a, c, g, or t
  misc_feature (794)..(794): n is a, c, g, or t
  misc_feature (798)..(798): n is a, c, g, or t
  misc_feature (804)..(804): n is a, c, g, or t
ctcccacctctcttatgnccaatggcatncaactgggncccagtggnaagggcttctactactccctcaaacgtcactgagatgaaaatccgnccgggncctgaagggctggtcccccttcaggncacctttcctcccctgggacacccatggttctccatgagtgctccctctgctgcccctgatgcatgcttctgctgattcccgagcaccaactccttacaagggggccttgtggctctcagccatgccacatccctgtcacacacccagggcatccattcctaagccagacccggctcccctacacctgaagttacactgccagcagtttcccagggctctttcgagaggcacatggttctagcctggacctggctgggctccatgagaatgagttgcctccaccctgtcccaacagctgacagccaggagccactctcccagctgcaggcctttgtggtccatcttgtcctgcttcctcactgtggacccctgtctgggccaccctagtgtgctaagctgagcagtgcagtgtgaacagggcccatggtgtattctaggccacagcccagcactcctctgggctgctctcaaaccatgtcccatcttcagcatccctcccaccaacttactcccctgtggtgagtaccgtggaaccccagcccacctcactatcatactcagcttcccctgatggcccatcccagcccctgaagctctatgccaagaacaacactaccgcacaccaccctgaaacagccacagccaaggtaggtcatgcatatgaggtncttnccccantaccctctgggtgttgagaaggtttagccacatgagggagcagaggacaatctctgcagggtctgggagtgggtagggactgaaggtctcaataa

SEQ ID NO: 248635 - DNA, 1603 bp, Homo Sapiens
  misc_feature (374)..(433): n is a, c, g, or t
  misc_feature (483)..(537): n is a, c, g, or t
  misc_feature (1571)..(1571): n is a, c, g, or t
  misc_feature (1591)..(1591): n is a, c, g, or t
ttggactgaatccattttgatttttggttgagtttcctacacaaagaagaaaataactgagaatctggaatgttgtagtccatcctttaaagagtaagaaagtagcagttaatgctagtaaccgtgaattaggcaccactgaaagcacatcccgaatttctttaacaacaacattttatagtgaacactacaagtttttatatttaaaaattaagactctgtatatccttaaggtgctctatgctttaccagtaattcacagggtatttcaaatggtagaatcattttagcttctgtgcttcctttttctaaataatgcaacttgtaagagttgacattgtaataagctttataatagtataaccgtcaggagnnnnnnnnnnnnnnnnnnnnnnnnnnnnnnnnnnnnnnnnnnnnnnnnnnnnnnnnnnnnaaatggggatattactattgtatgattaaatcattcttaagtccccaagnnnnnnnnnnnnnnnnnnnnnnnnnnnnnnnnnnnnnnnnnnnnnnnnnnnnnnnatccctttgctatgagctcgctgtatattgataagtgtaagaattgtgttgcatgaataaccgctttgggctggatttgaagtattttgatgttgtgttttgcaaatattgaagttacaataatggcaacagaaaaggaacagatacacagctttacacttagcagaatgttacatttaaaatctgacaaggcgccaagatggtgactgtctcctctaaaccacgaaagagtaagatttgtgcaaccctcctcctcttccacctccttcaggagaattaaatgaatcaagactttggaaagacggggaagagccgggacttggcagtacttgaaacaggaggaatacaccagcctaaatgtacagactttgtagccgagcccactcgatcggtctgtgccttcacgtgaccaccatctgtgcctccctcgctccatccaaatttgtgtaggctgctccttggagctatgcctaaaatatagctacaccagagccctggaaactgtagtcaagtaacaggcctcactgttttttttctttggattaaaagtgtatatctctctactgaggggtttccagctttacacttctataggttgttctgacagtgagaacacattatgtacatgttttctattcatgtccagggcatgagaatcttaatattcttatacttccctttttgcatgcagtatgtctggaatatgtttataaaattttagcaaggggtgagatcaagggacaaaggtagagtggttatttaaagacaatcagaaatgaacttaaaagctgccctgcaaaaccaatcctttcctatcatgaagagtaccttcatattttctagagattgtctctgaaccgttgctacatagccataaatttctgtaaatcatgttggctatcagttcttgctattctcagagcactctatcatgtttttagggtgtatattgtgtattcagggatagcattaaaaagaactgatgggcaaatgtattgactcacagtgggaaacattgcatttgggatggaagnattagtggtttagcctttgnaaatggaatgac

SEQ ID NO: 248636 - DNA, 441 bp, Homo Sapiens
  misc_feature (53)..(53): n is a, c, g, or t
  misc_feature (62)..(62): n is a, c, g, or t
  misc_feature (246)..(263): n is a, c, g, or t
  misc_feature (421)..(421): n is a, c, g, or t
gaattctaaaacctagacttatgtcccagaaagggtaaaagacctactactgnatccagtcnaatattgaccccaatggatgagaaaatagttgttttcccattccaaagactaacacatttagtctactcccagaggcccaaggaagagagaatcgcttgagcccaagactgcagggcattatgactttgtctgtgaaaagccactgctctctagcctgggcaacatagcaagatcctgtctctnnnnnnnnnnnnnnnnnntgtagtcacagagttgctagtaattatttaaaaaaacaaagccctgtttttttctcaaaaccaaggtgtgctaatactaaatatagggccacaaaaatcgaagcaataaagtttgaagcttaataaatatagagaaagagacattcttaataggtagnagcaccaaggcttttttacc

SEQ ID NO: 248637 - DNA, 449 bp, Homo Sapiens
  misc_feature (380)..(380): n is a, c, g, or t
  misc_feature (403)..(403): n is a, c, g, or t
  misc_feature (415)..(415): n is a, c, g, or t
  misc_feature (422)..(422): n is a, c, g, or t
  misc_feature (431)..(431): n is a, c, g, or t
actgcttgcaactattttaaaagcccattaatttgaagcccactacttcagaacttcgagaaaatcacaacttaagacaattcacagtagctgtgattctggctacataaaaatatttgacatattcttccctttagtcaatgttcagggtcttttgtgtaagagaaatccagtttaaaatgagtacccttttcaaagaaaaggctcaagatattaaggctcccttcaccgtgccttcagctttgcagttcagcacttctcgtatgtacagggtgatctcttgttctctctccatcacagggatgttggatattgcagccttttcactctactccgttaatttatcctgtggaataacatagtttgtggaactagactgncaatttaaaactaaatacacatngatgtatctttntaaaatnattctgtanaaggcaggtggctttcgg

SEQ ID NO: 248638 - DNA, 1152 bp, Homo Sapiens
  misc_feature (717)..(717): n is a, c, g, or t
  misc_feature (1001)..(1001): n is a, c, g, or t
  misc_feature (1059)..(1059): n is a, c, g, or t
  misc_feature (1078)..(1078): n is a, c, g, or t
  misc_feature (1095)..(1095): n is a, c, g, or t
ttggggttgttcttggagaattcttaaaagaaattaagaagaacccctccagtgtgaagtttgctgagatggccaacatcctggtgatccactgccagacaacagatgacctcatccagctgacagccatgtgctggatgcgggagttcatccagctggcgggccgcgtcatgctgccttactcctccgggatcctgactgctgtcttgccctgcttggcctacgatgaccgcaagaaaagcatcaaagaagtggccaacgtgtgcaaccagagcctgatgaagctggtcacccccgaggacgacgagctggatgagctgagacctgggcagaggcaggcagagcccacccctgacgatgccctgccaaagcaggagggcacagccagtggaggtccagatggttcctgtgactccagcttcagtagcggcatcagtgtcttcactgcagccagcactgaaagagccccagtgacccttcacctcgacgggatcgtgcaggtcctaaactgccacctcagtgacacggccattgggatgatgaccaggattgcagttctcaagtggctctaccacctctacatcaaaactcctcggaagatgttccggcacacggacagcctctttcccatcctactgcagacgttatcggatgaatcggatgaggtgatcctgaaggacctggaggtgctggcagaaatcgcttcctcccccgcangccagacggatgacccaggccccctcgatggccctgacctccaggccagccactcagagctccaggtgcccacccctggcagagccggcctactgaacacctctggtaccaaaggcttagaatgttctccttcaactcccaccatgaattcttacttttataagttcatgatcaaccttctcaagagattcagcagcgaacggaagctcctggaggtcagaggccctttcatcatcaggcagctgtgcctcctgctgaatgcggagaacatcttccactcaatngcagacatcctgctgcgggaggaggacctcaagttcgccttcgaccatggttccacgntcttcaacaccattcctgnttgaaccttcacagagntttttccagttaaggaaccaggtgaaggacctgaaagacctgggagagccagaactg

SEQ ID NO: 248639 - DNA, 674 bp, Homo Sapiens
  misc_feature (567)..(588): n is a, c, g, or t
gtggtactttcttttcatatttcaactttatttaaaatatgaggttttatgtccagaagggagggcagttgcccatggaaggtgaagtgaggcacaatactattgggttgcgggccaagtacacagggttgcactgtgaaggaactgaggaggttctgggagggcctggtgacaacaatggatttggggagatccacaaaggaaattttcatttcctccccagggttagctattcagtggggtggattattcagtctttttaggcaaggtcactgctccttaggcaacatcaacaaaagtgccaaagctgagggacacagagaataccatcattgtctttttgtttctctttatgcctctggacctgtgttctcatctgtaaaggagccaggaaccaatgacgtcggaagagaagccttttcatgtctgattctatgacctgcaaactgcaaagatcccagcaggctccagaaaaacacggcagttagaaacaagggaatgtgggtgttaggtggaaaactgaggagctagggctcatgatgaaatgtttttctacattcacaaagnnnnnnnnnnnnnnnnnnnnnnggacggaggctatgggacagggaggtgtaggaagacacctgcagtctggatgagccaacttttttgtacaaagttggctttatggg

SEQ ID NO: 248640 - DNA, 404 bp, Homo Sapiens
  misc_feature (35)..(35): n is a, c, g, or t
aacttggcccaaatttaaccctacttggcccaaanttaaaggtactagctgtaaaagttttgaattcatacatctttaaaaaaattaaccatgaattatttttattaaggtggaagggtttttggtttgtgttcagtctttttgtaggtctatttttgaaaacagattctgcacttccagttctaaacagataccatatggctgcttctttactaagttatttatttttcaaaaaatgctaactgcagttttggcagttctttattaaacatcattcgtaaaacacaaacaaacaaacaattccagcaatcatctatgaagagactttagaagcttgtaaaaaagtgaattctacctccttctggctgacgactcctcctcctaccctcttgagtccctctggg

SEQ ID NO: 248641 - DNA, 1160 bp, Homo Sapiens
  misc_feature (376)..(561): n is a, c, g, or t
  misc_feature (1072)..(1072): n is a, c, g, or t
  misc_feature (1129)..(1129): n is a, c, g, or t
  misc_feature (1134)..(1134): n is a, c, g, or t
ttggcacagtccctgtcctagtgcaggacttttctctgtatgttttcataccatgggatttttggatatcagtgtattttggttcttgaaatagcctaatagctgctcacacattgggtaggaatattataccaatgtcatccccaaaggaagggtgagctgaatggaaattaagcccagtcattttatttgatctattagctctgttatcagtgcatgatcacccagatcaccctcctcagcccacacagtgctgaaccatcttccctcctgttctccatggctattaatagtatagctaaatttagagtgcagagcacggatataagtattttggaattatctcccagtttgtggtagaagctgactggaatannnnnnnnnnnnnnnnnnnnnnnnnnnnnnnnnnnnnnnnnnnnnnnnnnnnnnnnnnnnnnnnnnnnnnnnnnnnnnnnnnnnnnnnnnnnnnnnnnnnnnnnnnnnnnnnnnnnnnnnnnnnnnnnnnnnnnnnnnnnnnnnnnnnnnnnnnnnnnnnnnnnnnnnnnnnnnnnnnnnnnnnnntgtaggagaggctactcgattccatttaatgactgtcctagtcataatcatccaaagataaaagccaggtagatgttgaaagctctttccagggctgaaaaagtgttcttacgttctctgcatgtgactagcatcactgtggaaattaatgctctgttcttcactagaatgtagtaagtggttaaactgagctatcccccacctgatgactattggcatccatttgcaaggccaatggctgggattaagggttaggattatttgtagctagaaggtaattttatttctgtgaaactaattggctcatatttgaggttaggtgtggccttgaccttaccagtacatttatacccactaccagttgactagcccagataattgttaaatggtgcttcttttctgcttctcagtagacttccatgccattacaaaggaaatttgaattaccctagtgtttgtatattcccatggataactatgtataacttctgttacaccagcttatgtattngttaaccattttaggtgtaaaccaatgccaccagctaaccactttaaaaatggaaanctaanttagttcttgctttgggggaaatgcc

SEQ ID NO: 248642 - DNA, 1143 bp, Homo Sapiens
  misc_feature (289)..(312): n is a, c, g, or t
  misc_feature (616)..(637): n is a, c, g, or t
  misc_feature (670)..(679): n is a, c, g, or t
  misc_feature (1002)..(1002): n is a, c, g, or t
  misc_feature (1021)..(1021): n is a, c, g, or t
  misc_feature (1053)..(1053): n is a, c, g, or t
  misc_feature (1083)..(1083): n is a, c, g, or t
  misc_feature (1097)..(1097): n is a, c, g, or t
  misc_feature (1102)..(1102): n is a, c, g, or t
  misc_feature (1119)..(1119): n is a, c, g, or t
ttggcgcaatatgatgcggccaacggcatggacgacgaggaggacttcaacaattcacccgcgctggggaacaacagcccgtggaacagtaaacctcccgccactcaagagaccaaatcagaaaaccccccaccccaggcttcccaataagatgatcggcaccagaatccactgtcaataggcccgtgggtgatcattacaattgcaaatctttacttacaggagaggaaacagaagagataaaaacttttccatgcaaatatctatttctaaaccacaatgatctgannnnnnnnnnnnnnnnnnnnnnnntaattgagaggattattcccaataagcttccatgaccctttcttggaggccttcacaggtaatacagatactggcactgattgtaattaaaatgagagaaaactctagcgcatcttctggcacggttttaacaacgtgtttgtgttgaatttcctttttatgcatcaaacgaaggccatattgtccataaatgctcagtgctcaggatctcattaatatgccgaacctaactacagatgactttttaatattgtaaaatattttctgctttttgacttgcatctgagagtttcttgtttcagtnnnnnnnnnnnnnnnnnnnnnntcagctttggaaagtaatttaaatgtaccttannnnnnnnnnctttatgttttctttcattgggcaacagctaagagggcccagcaaggtaatttatggttgagctgatgtcaattggttcttgtcttgagtcgactcaatttagcccaagtgctgaaacaagaaatgtcatttttttcatcaaagacaccagggcagatttttaagtaaagaaagacaattggacccttaagaatttaatgcatttgtaaagttgctgttgatccaaatattttcaagccatgtaatccattggttttgtgggcagtttaataaacctgaacctttgtgtgttttctaattgtacccggagttgaccatccttntctttttatagtatatttncttgtatggatattttgttaaagctctcaccnggggttcttttatggggggactttttcggnttttggggcaactnccagngtatttatgtggaaacnttattaggggaattaatttttccc

SEQ ID NO: 248643 - DNA, 200 bp, Homo Sapiens
  misc_feature (180)..(180): n is a, c, g, or t
tcttttatggggacttttcgtttttgggcaactccagtgtatttatgtgaaactttataagagaattaatttttccatttgcatattaatatgttcctccacacatgtaaaggcacagtggctccgtgtgttaaaaaacagctgtattttatgtatgctttactgataagtgtgccaatnataaattgttgttaatgacc

SEQ ID NO: 248644 - DNA, 912 bp, Homo Sapiens
  misc_feature (174)..(467): n is a, c, g, or t
  misc_feature (672)..(672): n is a, c, g, or t
gccgagctgtaatcaattcagctgtttctgtacctcacttacgttttctgtatgtcactttcctttttctgtccataaatcttccaccacatggctgtgctggagtttcagcatactctggtccgaggctgcgtgattcgtggatctttcattgctcaattaaactctatttannnnnnnnnnnnnnnnnnnnnnnnnnnnnnnnnnnnnnnnnnnnnnnnnnnnnnnnnnnnnnnnnnnnnnnnnnnnnnnnnnnnnnnnnnnnnnnnnnnnnnnnnnnnnnnnnnnnnnnnnnnnnnnnnnnnnnnnnnnnnnnnnnnnnnnnnnnnnnnnnnnnnnnnnnnnnnnnnnnnnnnnnnnnnnnnnnnnnnnnnnnnnnnnnnnnnnnnnnnnnnnnnnnnnnnnnnnnnnnnnnnnnnnnnnnnnnnnnnnnnnnnnnnnnnnnnnnnnnnnnnnnnnnnnnnnnnaaacttctttaaatttaattcgtctgaagtttttcttttatcacaagtcacatcaatccctcgggcccctgctcaaatgccacctcttcctgaaagccatccctaagtagtctctctaaagagccatccctgcccctttctttgctttatccttcacagcacttatcactacctgaaattatgccacacagctatttaccacttntggcattgtgattaagcttatcaagtatgaagccagactgcctggggttcaaatcccaggctccactacttccttgtcatgtgaccttccaggcctatggttacaggttgaggggggtcataataggtacctgtctatagggggctttgtgagggatggaatggaattaggtgtgtgtaccagtgttctaacatcggcctgcatttccatttttcccaaagcagcccagttatttgtaca

SEQ ID NO: 248645 - DNA, 571 bp, Homo Sapiens
  misc_feature (403)..(403): n is a, c, g, or t
  misc_feature (416)..(416): n is a, c, g, or t
  misc_feature (422)..(422): n is a, c, g, or t
  misc_feature (501)..(501): n is a, c, g, or t
  misc_feature (530)..(530): n is a, c, g, or t
ggggttcaccacccgcgctcgggagatactttccccttctaaatgggacttgctgttacctcaggaggctccttagtgcaaatatgaccctggtcagggctttgcaccgttgaagccctgcagaaggtgcaatgtaggggttctggggccacagaggagaggccacttcccaccaggacccccaacatgaagtctaggcctcaggggctcccgccctttcttcctccagcagcgggaactgccactgctctcccagggccctgttctggaggctaaccttggttcctgggagagtgtgcccctccaccctccctccagcagccctgattcacaccatgagagccagggaacgggtcaccctgctgaagatcactctgtgccctgggggaggagccaagccctnaccccacaagggncaggtnggggcttggttgctgacccggcccaagtccccacagagcaccttctgtagctccagcttgtctccctggcttctctttnaaggagaaaaatgttaaaatatgtacttnagtaaagccagccccgcctgcttgagttcagccccggtagt

SEQ ID NO: 248646 - DNA, 1176 bp, Homo Sapiens
  misc_feature (922)..(933): n is a, c, g, or t
  misc_feature (1054)..(1054): n is a, c, g, or t
  misc_feature (1081)..(1081): n is a, c, g, or t
  misc_feature (1088)..(1088): n is a, c, g, or t
  misc_feature (1150)..(1150): n is a, c, g, or t
ttggcgagtgtgcccggcaggagggcctgactttctttggcacagagctagccccagtgcggcaacaggagctggcctctctgctaagaacatacttggcacggctgccctgggctgggcagctgaccaaggagctacccctctcacctgctttctttggtgaggatggcatcttccgtcatgaccgcctccgcttccgggattttgtggatgccctggaggacagcttggaggaggtggctgtgcaacagacaggtgatgatgatgaagtagatgactttgaggacttcatcttcagccacttctttggagacaaagcactgaagaagaggtcagggaagaaggacaagcactcacagagcccaagagctgcggggcccagggaggggcacagccatagccaccaccaccaccaccggggctgacaccctgccccacagggaatggccttggcctggcccagcccaagatcccatcgttatctaactcctggagggtggactctgtcctggcttgtttggtgtcctcagatatctttcacacagtagagcaaaatcaccagccctgcactgatgtcactttatgtagaaaaaggccttagctggacctgtgttgccgtctatgcaaatgcatgcaaatactccaggccctgggatgtgggcttgtgttttgtcactgtgaagggggagatgggagaggagcctgttttggggtggggtctggggaaggcaatctgattctgaagctaaagagctttcatcctcttgagtgtatgtccccatagtgggccccttgacccacatgctgaccggtgccttgggatttgactagagttgctggctcgaggcccagcacgaggacttaccctggggttttgttaggtttggaagcagctgtccctagggggtgaagtccccccccnnnnnnnnnnnnacccctgcttctcccacggcttcacctccctatgaactgtagactcagatcccaataaagtgctgttgcagctatgatgctaggtggtttctaagcacaggggacaccccacaccccctgncctgaatggatgggtccatcccagggnactggtnactttgcccccttgttctgtattccccctttggcccttgccttggccctttccaacaaaccntagggccctttgagaagctgataatt

SEQ ID NO: 248647 - DNA, 501 bp, Homo Sapiens
ttggatcatgtttgttattctgccttaaatttctacttactgtctttttcttctctgtcttccaatcactttaatatcttcaattttcaaactatatttgtacttgggcttagatagaaagtcttacacaagcatagtatcttctactttggttttccctaccttttcttccccaccttctccaaacacacatatacatactctactcaattctatttctgattttgtagttgttagttgtccatgctcaggataaaaaatgagtgggtagggttgagggactggttctttgaggttctgccctttttccatgattcagaccaactttctcttggtcatttctggagtataactgactcaattcttgtaaaaatgtgttccacccaaaccactgtatggttcttttccctactttattttctcctaccttccttctcctaattgtgttacaagaggcagccatagcaagaatggaaaatccagatcagtaaaagattcaac

SEQ ID NO: 248648 - DNA, 1217 bp, Homo Sapiens
  misc_feature (1074)..(1074): n is a, c, g, or t
  misc_feature (1107)..(1107): n is a, c, g, or t
  misc_feature (1128)..(1128): n is a, c, g, or t
  misc_feature (1141)..(1141): n is a, c, g, or t
  misc_feature (1148)..(1148): n is a, c, g, or t
  misc_feature (1168)..(1168): n is a, c, g, or t
  misc_feature (1181)..(1181): n is a, c, g, or t
  misc_feature (1192)..(1192): n is a, c, g, or t
  misc_feature (1206)..(1206): n is a, c, g, or t
cggtggtgctagctgaagaaatttaaccaagtaccctactgatagggactccatatggaagtgcttgaagtttctagggaagtcggcatccaaccctggtgcttcccttggtgccagagcttctgagcacccacccattttttgacacagctgaaccagacatggatgatccagcttatattgcagttttggtacttattttcaatgctgctaaaagctgtccaacaatgccagcattgttctcagatcacaccttcaggcactatgcctacctccgagccagtctttctcatcttgttcctgccttgaggttaccaggtagaaaactggtgtcatcagctgtttctcccagcatcatacctcaagaggatccttcccagcagttcctgcagcagagccttgaaagagtgtatagtcttcagcacttggaccctcagggagcccaggagctgctggaattcaccatcagggatctgcaaagacttggagaacttcaatctgaattggcaggagtagctgatttctctgccacctatcttcgctgtcaactacttctcatcaaggccttgcaggaaaagttgtggaatgtagctgcccctttgtatttgaagcagagtgatttggcctcagcagcagcgagaacagattatggaagagacctacaaaatggaattcatgtacagtggtgtggagaataagcaggtggtgattatacatcacatgaggctgcaggccaaagctttgcaacttatagtaacagcacgaactacacgaggacttgaccccttatttgggatgtgtgaaaaatttttacaggaagtagacttttttcagaggtattttcatcgctggatttgccccacttgcaggacagctttgtggacaaactccttgaccttatgccccgactcatgacatccaaacctgcagaagtggtcaaaattctacagaccatgctgcgacagagtgcctttctgcatctcccgcttccagagcagatccacaaagcctcagccaccatcatcgagccagcgggcgagttcagacaaccctttgcggtttacctctgggttngttgttgccctgggatgttgatgcaaccctggngcatgtgcaggatcctcagancactgttaaggtncagggtnttatatccagatggccaggntcagatgattcancccaagcctgnagacttccggaatnctgggcccagg

SEQ ID NO: 248649 - DNA, 927 bp, Homo Sapiens
ttggaatgatcttccacaacatattattccataaaaccagtttagggcacaggccagttcctgattagaacacaggacctgtgggagggactatcagagatgcaaaaattacttcaagatgagtttattgttttcatttgtattgcaaaagttagaagtcattttacaaattaaaaaaacatttttttcttggtagtctttaaaaattaggggattgaaaggatccaggatgggctttgtgtgtgtgtctcagattctcatttattagtgagcacacctgtgtatatatataaatcacaaggagatcatcaagggaaaacattttgcatgtgtaaagcttcatgaagttctctttaaaaaataccaaagcttgtttatttctgataattaacctaagcccttatgaaaataaacaaaatgaagggattatgacaggtattaccaaaaacaccaaaaggaacaaaggggcctgcgttaaaacctaattgctaatgcttcacaactaggagagcatgccgtcttgatgtttaaaaaaccccagggtctccaacccttcctttgatttgtgcaattctgtcttccacagttccggagccttcagtgaggggtagctacatgccccatgcctgccctttctttccttctttgctcactttactatgggtgtattttaatcttgtataaaaatatgcatgaatgagtcatgcacatgtatacgttatgtatttgacaagtggtggtgaaacaaaatcaaaacagatttgatttgtgtttttgaaatgtcagtacattttgtgccactaacactgtgatgtataaaagagctgtttgaatgccttttaatgttgtgttttgtactctggaatcatatggaaaaaggtttgattttgtaattttcaatacatattttaaatgtattgtgtctta

SEQ ID NO: 248650 - DNA, 479 bp, Homo Sapiens
  misc_feature (13)..(13): n is a, c, g, or t
  misc_feature (52)..(52): n is a, c, g, or t
  misc_feature (66)..(66): n is a, c, g, or t
  misc_feature (99)..(99): n is a, c, g, or t
aaaaagggaaatngaacctccatgtttttcagtgagtttgaaacagggtctncagcttccaccccngtccttccattatgccagacacccatccccctnaaggcactgtgcctcgaccctgtgagacccctttgccttagcagccttggaggaaatgtttttttaaaaaaggtactatacacacatacataaatgcacacgtttatatgtgcatgtgtatatacatataaattgtaataaagtagttttagaaagctgggggtaccaaggcctctggggttgacttccttgcattcagaattccacaggacgatacctacccatgaacttctctccaatttgaaacactccatcttcccttaagatcgcctgatactgaggagactgaggcaggtccacaaaacaaacgaaggtcctagaaaatgtgtcatcagtgacactgttcacatgtgaaaggaacactagagtcatgagttatc

SEQ ID NO: 248651 - DNA, 453 bp, Homo Sapiens
  misc_feature (16)..(16): n is a, c, g, or t
  misc_feature (407)..(407): n is a, c, g, or t
gaccaaaaatgaaggnaccttggaaaatttttttaaaaattaggaacccatatccaagtaggttgtttacatttccttgaaaaaatgggaactcgggcagcagaatcagattggcagaatctttagactacacaggcaataatcaagtctgctgttttggcctttcgtagtagaagtggttgtagtgtttagatatctgtttggtcttgcttcttgtattgcatttttttcaataaacaacaacaaaaagaactctctctgtgaggattgatccacttttaaatttctcttctaccagcaacttgggaaaaattaaatatgggtgggggagacctaaactcaagtcattttctaaagtaagttacccacattgaccaaaatgcagcttcaacgttgagtaaaggganttctgagagctgccaatgccttttgccagctgcagtgagattctgc

SEQ ID NO: 248652 - DNA, 130 bp, Homo Sapiens
ggagagcacacctatcttagtggttccccaccgaagtggactggcccctgggtcagtctggtgggaggacggtgcaacccaaggactgagggactctgaagcctctgggaaatgagaaggcagccaccag

SEQ ID NO: 248653 - DNA, 1179 bp, Homo Sapiens
  misc_feature (303)..(317): n is a, c, g, or t
  misc_feature (799)..(799): n is a, c, g, or t
  misc_feature (1100)..(1100): n is a, c, g, or t
ttggcaaacaatgctgcagtgatcttttaaggtatactttaatgcacattgcctatatttttccatactaaatagaggaggatgttttgttctatagataaagaagattgagctaaagttccctttcttcataaggctctgctttttaggagttttgccttttgccccagaagtagctttgagagttcttcatgtctaccgtggctaccccataggagatatgtatgatttctctcatgcatcaaagccagtgttttggcaatttttgcagctttcatgtcttcttaaagtatcagttgggcnnnnnnnnnnnnnnnaagcatttggttttataacgtaggtttcacaagaataaagactttaaagatttttctctagaaaaagccacattttgttttatgagtagctgttaatgactagtccctactttaatgaagccatacaaagtgtacctcttgcagatttaggatctctcctgttctttcaggttattcatgtggccccactaggtcccgggtatgtgataagtaatcaatgcagaagttgttaacttaggttagggccaaacaacaggcatcattaagcgagaagcagatgcagaccatcaggcagggggattccgtgttgccttatccacttcagatcccgtcgtcgcctcactggctcaggacatcttcaaggagctgtcccagattgaagcctgtcacggcccaatgcaaatgaggctgattcccactctggtcagcataatgcaggccccagcagacaagattcctgcagggctttgtgcgacagccanttgatatcctgacaacagtagtacgaaatacaaagcctcccctttcccagcttctcatctgccaagctttccctgctgtggcacagtgtacccttcacacagatgacaatgccaccatgcagaatggcggagagtgcttgcgggcctatgtgtcagtgaccctggaacaagtagcccagtggcatgatgagcagggccacaatggactgtggtatgtgatgcaagtggtgagccagctcctgggacccccgcacctcagagttcactggcggcctttgtgggccctttggtttccaccctncatctccaaggcagggcggggaacttcggggagaatctagaccagattttttcgtgccttccttcagttaagatggcag

SEQ ID NO: 248654 - DNA, 445 bp, Homo Sapiens
cttctctccaggccactttgctcacgggtcagaccggcgcatggttcgtctggaggacctgttccagaggtttccaaggacacccatgagcgtagagatcaaagggaagaacgaagagctcatccgtgagcaggcttggtgagacgctatgaccgtaatgaaatcaccatctgggcctcggagaagagctcggtcatgaagaaatgcaaggctgccaaccccgagatgcccctgtccttcacaataagccgaggattctgggtgctgctttcctactacctggggctgctgcctttcatcccaatccctgagaagttcttcttctggtttcctgcccaacattcatcaacagggacctattttcccattttcctgctcttgcctggaaccagttattgggtgtggttttcgaaatgggtgatcatgagggaggagttttgatcct

SEQ ID NO: 248655 - DNA, 414 bp, Homo Sapiens
  misc_feature (47)..(47): n is a, c, g, or t
  misc_feature (168)..(168): n is a, c, g, or t
caaaaattccttggcccgcaaaaggcaactgaaccatgagggaatgnaaccgtgctgctgtcctgcaaggtgccgttagccctgttttgcaactggtggattgatctgctcaggcgcacagggagatggcacagcaggacccgccgcccagcctcgctgagggcaatntcccgcctcacctccagaggctgttgggcggaagccgagagctgcagtagttggggccagcgtgggactggaggcccaggtgaatcttgtggggcaggggacggagctgaggctgtccggcccgggccctccccacccaaaggccctagaaccctagccttcaatcctgggggtttgcttctcccctgagtcctggctttcctgacctgccgtccgttagggacaggtggaggggccaagtcttgc

SEQ ID NO: 248656 - DNA, 867 bp, Homo Sapiens
  misc_feature (809)..(809): n is a, c, g, or t
ttggcatgggcagccccaaataggacagagggctgtgggtggggtgggctacaaatgccctgcacccggaattattcccctccctaatcagaatgtaggccagctgcaggggaaaggtctggccaggctccctgagggcctgggtctcttccatgtggcctggcctcacttgctatccccctcactgggtcaggacgcagcgactgctgagtggcccgtgggtgccaggcagtggtgtgagtggacaagcactggcagtggccccggatggaaagctgctattcagcggtggccactgggatggcagcctgcgggtgactgcactaccccgtggcaagctgttgagccagctcagctgccaccttgatgtagtaacctgccttgcactggacacctgtggcatctacctcatctcaggctcccgggacaccacgtgcatggtgtggcggctcctgcatcagggtggtctgtcagtaggcctggcaccaaagcctgtgcaggtcctgtatgggcatggggctgcagtgagctgtgtggccatcagcactgaacttgacatggctgtgtctggatctgaggatggaactgtgatcatacacactgtacgccgcggacagtttgtagcggcactacggcctctgggtgccacattccctgggacctattttccacctgggcattggggtccgaagccaagattgtgggtacagagctcagcgtgggaacgtcctggggcccaggtcacctacttccttgcacctgtatttcagtcaatgggaagttgcgggcttcactgcccctgggaaagncagcctacagccctgacggtgacagaggatttgtgttgctgggcaccgcattggcgtt

SEQ ID NO: 248657 - DNA, 462 bp, Homo Sapiens
  misc_feature (11)..(11): n is a, c, g, or t
  misc_feature (338)..(338): n is a, c, g, or t
  misc_feature (348)..(348): n is a, c, g, or t
  misc_feature (422)..(422): n is a, c, g, or t
  misc_feature (432)..(432): n is a, c, g, or t
gactttgtcanctctcaaatataaatgtgaatcacttaaaagacatttgttttcctgtaataaataaaagattagtaattagttttacgtttgctttcaagggattctggttgtatttattgtcaactaaataactttgatcaaatagccaagactctaacatataggcaagagtttgtagggaatcgtgagttgcttggcttatactgtgttcttggtgttaagtattaacaggaatatggcctgggtaattagaacttgtccatcagaattgccaaaagtggggattcgggggtctctgcctatggaggatgtggttcagaaataaaggaatttgnaatagggatnaagctgtagggaggatcttagtatgaggaattgagtatcctgaaggtttagctgttgaggagaggggcagagcnatgggagggnaccatgttgggacatgttgaaggctgtgat

SEQ ID NO: 248658 - DNA, 406 bp, Homo Sapiens
  misc_feature (368)..(368): n is a, c, g, or t
  misc_feature (393)..(393): n is a, c, g, or t
actttgtcactctcaaatataaatgtgaatcacttaaaagacatttgttttcctgtaataaataaaagattagtaattagttttacgtttgctttcaagggattctggttgtatttattgtcaactaaataactttgatcaaatagccaagactctaacatataggcaagagtttgtagggaatcgtgagttgcttggcttatactgtgttcttggtgttaagtattaacaggaatatggcctgggtaattagaacttgtccatcagaattgccaaaagtggggattcgggggtctctgcctatgggagggatgtgggttcaggaaatgaaggaattttgattaggggtaagctgttggggagggtcnttaggtattgaggattgaggtatcncgaaggtttagcc

SEQ ID NO: 248659 - DNA, 894 bp, Homo Sapiens
  misc_feature (839)..(839): n is a, c, g, or t
  misc_feature (847)..(847): n is a, c, g, or t
  misc_feature (860)..(860): n is a, c, g, or t
  misc_feature (878)..(878): n is a, c, g, or t
ttggcggctggcccccatgcacggctcctgcagtttcctgatgcttctgctgccgctactgctactgctggtggccaccacaggccccgttggagccctcacagatgaggagaaacgtttgatggtggagctgcacaacctctaccgggcccaggtatccccgccggcctcagacatgctgcacatgagatgggacgaggagctggccgccttcgccaaggcctacgcacggcagtgcgtgtggggccacaacaaggagcgcgggcgccgcggcgagaatctgttcgccatcacagacgagggcatggacgtgccgctggccatggaggagtggcaccacgagcgtgagcactacaacctcagcgccgccacctgcagcccaggccagatgtgcggccactacacgcaggtggtatgggccaagacagagaggatcggctgtggttcccacttctgtgagaagctccagggtgttgaggagaccaacatcgaattactggtgtgcaactatgagcctccggggaacgtgaaggggaaacggccctaccaggaggggactccgtgctcccaatgtccctctggctaccactgcaagaactccctctgtgaacccatcggaagcccggaagatgctcaggatttgccttacctggtaactgaggccccatccttccgggcgactgaagcatcagactctaggaaaatggggtactccttcttccctagcaacggggattccgggctttcttggtaacagaggtctcaggctccctggcaaaccaaggctctgcctgctgtggaaacccaggccccaacttccttagcaacgaaagacccgnccttcatngcaacagaggctncaccttgcgtaacaactnaggtcccttccatttt

SEQ ID NO: 248660 - DNA, 497 bp, Homo Sapiens
  misc_feature (303)..(303): n is a, c, g, or t
  misc_feature (394)..(394): n is a, c, g, or t
  misc_feature (473)..(473): n is a, c, g, or t
gagctttttcacagttttaagaagacaagtggagggtgaggatagtggtggggggtctggcaccatctcattgctttaatcccagcaacacaggtggcagcttctcccccttccttcccaccccagtccctcttcccacccctctcttctagcttggtaatgaagtatatttattggtgaaggaaacagctgctgctgcttctcctgctgctgggacctgctcccctgtctcttctccgtgacctttctctagccagggagaagggagagcaggagtattggggctgggcctggggcaagggnaccagctgggtcccctttgctttcttgtgttccagccacctgccattttcctccctgcctgccaccctccctccctgccccctgttcctgntttcccaccccttgcctgcccagctgggggcctgcagtgtgggaagagacaaataaagcttaattgttccttggggggnaaggagccgagcttttttgttttt

SEQ ID NO: 248661 - DNA, 440 bp, Homo Sapiens
  misc_feature (31)..(31): n is a, c, g, or t
  misc_feature (55)..(55): n is a, c, g, or t
ctgcacaggaacccccaggccgaaaagatgncacaaggttgttaaaaaacacttnagcaccggtttgtaacacatgaaacctttaggggttttttgcacacacacgctgtccggcaattgagaaagatgtggccctgcaggggctgggagggctgagagctattgcgggatgaagtcagggtggaagcgagggggtattcagagctgtgccagcaaatttaatagtgtctgccccactgcagtctcgctggtcagctcagatgcttttcttcaggaggggatccggctaaggagtgtgacctgtggcagcctcccccatgtggctgtggagctgcagagttggcctttttggggccaccctccagacccagactgcttgcttcccagccccgttcctggcaaaccaggcttcactgctagaacaggacagactcgcaggc

SEQ ID NO: 248662 - DNA, 1298 bp, Homo Sapiens
  misc_feature (38)..(38): n is a, c, g, or t
  misc_feature (90)..(90): n is a, c, g, or t
  misc_feature (698)..(709): n is a, c, g, or t
gggagggagagatgaattttccctggaggatcctagangcgcattgtcatattgccatctccattagctcacttttaaacaactagggtnctggaagaacctttgtctgagggtagttcatagctggaaatacttggaatattttccagagtctctaaactctcatcttcccccacagatacacatccaagctcacaaataggagtagcaattctaggtggtagggttgtgtacggaacccctggctgtctgcatatatctcagaattaccccaggaccattgtcccaaagtctagagtctttacaggtaggcaaaatttgttttcaatgcctgtgcctcagctgctgtcacaaatacccatcttaggatcccatcagcttcccatcccccaccagacagccacagtatttctcactttctccctattgttctttcaaatcctgttctcaggaaagaaactgccactaattcattcacactaaggtgtaaatgattgataataggaatgagttacctcttcccacagacatttgtttttaagtatgacagagcagggccttaatcccaagggaaaaggttatggaactggagggggtgagctttctgggtagaaggagacttcctgaatttccttaaaacccagtaagagtaagacctgttgttttggaaggtctgcttcaccatctaagagcactgnnnnnnnnnnnngttgttgttgttgttttacggtctctgagggaatatagtaaaaatgcatatgcacgtgcaatttgcacggcagcatttcaccgattgtggactgtattggctaatgtgtttcctggtctttagatgcaaaccattaataacactatcttatctcatagttttttcaggggtgcttcttgattagtagggaattttgaacacctctttaaatacagctagaaaataaaaccaatttgtaaagccacatttgcatatgatgccagcctcacgcatttgtatatctccagaaattcaggtatgcctcaccaatttgcccgtctttaataaaatcttgtgttaaaatttgcatcacgtcgccttcctatgtatgacgaaacaagaaacagagatttccaattgctcttttgtcttcagacatttagtaatataaagtacctatttttatgctgaaatgtttatacaggtttattaatagcaagtgcaactaactggcggcatgccttgcaacacattttgatatattagccatgcttccgggtaaaggcaagccccaaactccttatcttttgcagtctctctgggatcagta

SEQ ID NO: 248663 - DNA, 441 bp, Homo Sapiens
  misc_feature (37)..(37): n is a, c, g, or t
aaatgttccccaggggaataaacattccccattgtcnacctatgtaactgggaatgtgaccagcaacacgatgttttgatatgtatgaaggcgataactctggaccgttgacaaagtttattccagagtgctgctcccaaattccctgctcttcttggtgaccctatgacgacggaagcacaagactgaataacgatgcccaagaatgcccatagaagcacttggaagtaaagaaatcaggaacatgaaattcaggtctagctgggtatttattgcagcaaaaggcttggaactcccttccgaaattcagagagaaaagatcaaccactctgatgctaagaacaacagatattctggctggcctgcagagatccagatagaaggctgcatacccaaagaacgaagctgacactgcagggtcctgagtaaatgtgttctgta

SEQ ID NO: 248664 - DNA, 473 bp, Homo Sapiens
  misc_feature (29)..(29): n is a, c, g, or t
  misc_feature (459)..(459): n is a, c, g, or t
accctgcaagaagcctgaacaaaaacaancccctttggccccaggaaaggagggaataaatgaagaaggtgcccaactttgcctaaacggacctacattttaaaaagtgctctgccccctaccctaaccttgcccctttggaggagcctcgcctgcaggaggtcactgagcaaagagtcattcccatcacagggactgcatgataccatgtaacctccgacatgtatttaaacgtgtatagcttaaccctggattaaacactagcaagcgcgcggggtcctttgccgttggcttctagtgctagtaatcattggatgcatgatggggcagggccggtgatggtgcctcccccttgctggtgtcttgagaggggaaggcagccgctttcaccgctcattatgtagtctgctacagccctcaaaaacagcttatactcttaagactaattttgaaataaantccttcatttaatt

SEQ ID NO: 248665 - DNA, 923 bp, Homo Sapiens
  misc_feature (832)..(840): n is a, c, g, or t
gttgcaaacataggtatatgcgtttttttaccagtgacacactttttccttgtggtcaaatataaatcttgcccttaagaagcacactggtcaccaccacagtaagtcagatgtggtaccccaacactgactgcttctgcttctccaggacaatgcaccagaacaaacctccgttaagaacacaactatcaaacactgaacgtgtatatgcatttaaagctaaaattcatttataataaagcactggcccatgaaaagcagtttataaatagtttatcctgttcacattatgcagaatttcagtatcatccacaatgttagtacagtaactgaaacacaatgaagaaaaacggggagtgaggggaggttcctagtgtgacctgacatagtctaagggttctctccttttgtatgcatctcccaaaggcaagtatcagttaattgtttgaaggagagtagactatccagggttcatttattgttcaggtgtcttttccaaagtgtgagaaaataggagtcaattcaataatgaatatctgtaatccaaaccaatttaactacaatcaaggatgtctttctcatctattatcacaaacatcccaggttgcctccatctaaaaatttctttggaaaagttaagggcacaattaattataccttattaattccctcaaaagcaaaaaaatatatgtaccattcagcatacaaaagttacacagtaaaagtgcatatgtatctttcttaattggcccactcattaaatttgcatttggtcatccttacttttaacatgtacagaattcttcgtataaatgtaggtcagtataaattnnnnnnnnnttacttccacacaatacatgctttcttcatgaaatcttaacctcaatcagttctcaataattgtaaacttagaataaacccaa

SEQ ID NO: 248666 - DNA, 811 bp, Homo Sapiens
  misc_feature (160)..(177): n is a, c, g, or t
  misc_feature (690)..(726): n is a, c, g, or t
gaaataatattgtttgtattaaggtaactgtgttactcctactgcatccaaagctcactaatctctgaggttttaggagatttatctactctcctctaattggtagggttgactttcccaggacattgctaaggttagcccctgaaggcaataatatttnnnnnnnnnnnnnnnnnnggattccacatagctccaaaagtcaggtaaaagctggagggaattagagatagcaaggaaagatcaaggattaacttgcaagctctattttctctaatatctggatctaggaaaattgtctaccgccttgtctgctggatcactcatcacctacgcattttataaaaggctacccaaaaagaaattgttaacaaggaatgttaacaagcctttaaaagctaataaacaacagactgtggtgtttgctttcagttactcctggcaagcagaagtaagagcgtaggtcatcaacttcctaggtggctgtagggaacacctcctacagtaagcctatagggacaaaaactggtatgggaatcacaagtgtgagcaccattatcattaccttcctccacatgctctcatttgtggaaaaattaatctaggcctctcgaaaaccctatggaatctgccttttcatgtccaggaaccctgtgggctttttctgattgctgcttgatagtgctaacctannnnnnnnnnnnnnnnnnnnnnnnnnnnnnnnnnnnnatgtcaacctcctcaatgaagggtcatacagtataaacagcccatactatacgccatatatctgaaaactttcttggcttaattg

SEQ ID NO: 248667 - DNA, 444 bp, Homo Sapiens
  misc_feature (27)..(27): n is a, c, g, or t
  misc_feature (33)..(33): n is a, c, g, or t
  misc_feature (48)..(48): n is a, c, g, or t
  misc_feature (86)..(86): n is a, c, g, or t
tgccttccagttttcccccctcccttnctgcanacccactgcagtagncactttcgggaacacccctgtgccacttgaggacatgnaatccattaataagccaagtaggccccactcggttccctcaaaagacacaaaaggtgccaaaaatagcttctgcaattgaagcaagaaccacgtcagtaaccagatgaatgtgggtggtcacataagattctggtgctgcaaagggcaaattattaagcaaatgcctagatttattttcttttttaaactttattcttcttgcctcaaatcaaccgtttgctggcactcaaagtgacacctgacaaggtctactattctcaaaattgaaactttcatcaatgctaaagagcatgattcattaacatagaaggaatagagatgatatcctaaaaaatatacattttctataagataatc

SEQ ID NO: 248668 - DNA, 916 bp, Homo Sapiens
  misc_feature (402)..(485): n is a, c, g, or t
ttttaaaatttcttattcatttctaacatggtaaatatcagtagatataacccacataaacaacaggtctttgaaagcttcaattcttaagagtataaaggggtccagagaccaagaggttggagaacctctgtcctaaaagactctggtgcttctgtttttgttaagcaatggctggtcttgtcgacaccatcaaaacatgctgggtatacttgcggctagtccccatgcatgacaccactgttagcttcctcttttattttcccagagacccaaagtgtagaaattataatagcattgatttaaaaagtagcaaccattttgaatatatgcagacactatgttagaacctttgattcattatcttcatgaatccttacagggtagggacagagaaaattnnnnnnnnnnnnnnnnnnnnnnnnnnnnnnnnnnnnnnnnnnnnnnnnnnnnnnnnnnnnnnnnnnnnnnnnnnnnnnnnnnnnaaagagaaaatagaggaaggcaaagatactaaattgtgcctttgagggttcaagaaccccaaagaaagggctcctgcatggcacaattttcccccaacagtggcttccttcctgccttcactgggccaccaaccccaccccaaaagcagaactaagccatgggctcaggttcctgaaatgggaggacaggctaggactggtgcctactgaagcactactgtcctcaccccaaagtccttaccttcgtgtagtggaactgcatggggtcatcggtggaaagagaaacatgcagtcccttgtgtaggaattccctcagagggttcttggaatattcgaggaacaaactgttgttgctaagaggagacatggcaatggggatctgagcaaggtagtagagatacttcaataccggactctgcaaaagaacccaa

SEQ ID NO: 248669 - DNA, 270 bp, Homo Sapiens
  misc_feature (46)..(46): n is a, c, g, or t
  misc_feature (70)..(70): n is a, c, g, or t
  misc_feature (81)..(81): n is a, c, g, or t
tgtgcccggagcccatgtgaaaaaaacccaacttagttccttttanccctaaaggacccaaaaataagcntccttatatanctgtattttactactgttaagtttctttgtatgaactgtgttgttagtactcagatagtttagctttgtatttataatagagcttttatataaagttttaaaaattgaatgtgtgatatgtgttctttgaaggttttttaatttaacatttatagtcactttttagtgcacacattttccagactttcg

SEQ ID NO: 248670 - DNA, 387 bp, Homo Sapiens
gcgggctgggaactctcgtcctcggtccccagggcgcactgtttggggctgcgggggagtggagcccccgtgcccctgcttttcctcagatccgttctttctctgtgttgtcctcctccttcccttcccagtctcccttttctctctcctggtgtctctgcccctctctgtgcctgcaaaccttatcctctattcttcactttggggtcagaacttcgggggtgtgggaggaggtgcggctctaggggacaggtaatgtcggcttccaagtgatgccctcctgccactcccctgcgatttataaggggaattttaaattttttatagtggaatcttcaaggggatcatcccatccttggacccacaggggacaagaggggggccccc

SEQ ID NO: 248671 - DNA, 318 bp, Homo Sapiens; identical to SEQ ID NO: 179659
  misc_feature (92)..(92): n is a, c, g, or t

SEQ ID NO: 248672 - DNA, 462 bp, Homo Sapiens
  misc_feature (29)..(29): n is a, c, g, or t
accctgtttgtccccctgggtaggaaatntgggaagggaaaaggtgtccaggggaaaagaccccgccggggaggggtgcctagaacaacaacaaaaagatactatgttagaggcctaatagggaaaaaaaagcacattgccaggtatttttgccttcctgtgggcacaggcctttgtccttggatccctgggctgtcccaaaaaataaaagctctgggcaacatgagattaggggtttctcttcctttcagaggacagctctgttcttttttatcctcacaaagtcaccagtgtgaacgatggaatacaggaagcactatagtttttgttttgacccactaaatgtcagtaagcaaaatgcacccaaaaatttttcaagtaatttttgtttttcagtgtggaagagtgaaataatagaatctttctacagcctgattatcaactggtttgcttgcaaacagc

SEQ ID NO: 248673 - DNA, 396 bp, Homo Sapiens
  misc_feature (165)..(165): n is a, c, g, or t
aaattctcaataaaagagaaatcattttccaataaaattgaaaataactttttaaattattttagcattttacagggcatatttaatcatagcaaaaataaaagctgcttgcatatcttatataaatcttttatagaatcatttctttcttcttctcttgagganctctgactttgaggtcattctagagtaggtgtgctcatgaaggaagttttgcggaggttttagaaagataggaaatcacgtacagaggaaggtacttccctctgccttccacaagggcacaccattaaataactatggggacattcattccctctaataacacagctctgtgcagggaaaccttgtttgttccctggggtagggaatagtggggagggggaagagggtttc

SEQ ID NO: 248674 - DNA, 1239 bp, Homo Sapiens
  misc_feature (255)..(264): n is a, c, g, or t
  misc_feature (522)..(530): n is a, c, g, or t
  misc_feature (869)..(882): n is a, c, g, or t
ttggatttattcctcaggtgtggaaatttctactgcaattgactacgtttgattattttgagcttgtgaaagatttctgaacagtgattgtcccgttaatagcccctcagaagatgttccctgctgataacagcatcctattttacttacttttatagcattactgtgcctagtcgtggggaaagagatggggctgtatagattatctgaatcatttgtctaagaggtacattcttccagatggaatcaataacnnnnnnnnnnccaggttcccgtgcttgctatcacagtatcattgttaagtgacacttttgtctctcataacaccatcacactcttccttccaagtctgagctgtgctggggtttgaactaaaagccatatgtggaatattgacatgtgtaagaagcactttcagaatgttgtcctttttaagaaatgattctcaaaataccagtttttattccaaaaatttagagaacaaacccggaatatgaagtgcagattgtaacatggagctannnnnnnnncttaatcccataatacagctcctaaaagttgtgtgggatttgcgttgcataaatagccatgtgaattccacaagaagcaccagggaaagtttagagatttgcggcaatggaccgaagaacgggccaggaagtcctccaatttcctttggtctttccaggagattggactacacattgtaaagactgactgggtttcaactagtcaaaaagcactttcttctgttttcaatccctgttcgatttgtgcttctgtgcttgtaggagagatggccagggtggcagccctcatgcaggttgaagtatatgtagcctcagcctgatattcttggtgcgaaggtnnnnnnnnnnnnnntaaataaaaccattggcctggttgagggcgtgaccaccaagacatatatgttgtgcccgtgttcatcctgtgtatttatactgtatatgtagaagtctagatttatatactggcatgtaaaatatatatatatttaccttttttaaagacaatggaaattccaagtagctaaaacttagcttcatttatttaatgccactttaaatgtcttaaatttgtttcctggtggacagccgggtaatgcttttagctgctcgcatgcttgtctttctgcatctccatcatctgtttaccttttggttaaactaataaactagtttgggacttggctggcatgtgctgcccgacccaaagggg

SEQ ID NO: 248675 - DNA, 304 bp, Homo Sapiens
cttttttcagtttaagagaacaactctggagacagaaatggcttggctttccgacgcaatgagtaattaaactctattcgtcctccggaagatttccatcccaactgaacgttatgtaatttcctggaaacagcaggctcgtggaggcaaacgggggacagtgagactattctaggtacagaggactggagggagacatgcgagggaagaggaaagaggagagtaaggaactggatggaaacaggattactggagaatcaaaggggaaacagttacatcacatccagactgcagtcacctcagg

SEQ ID NO: 248676 - DNA, 243 bp, Homo Sapiens
  misc_feature (15)..(15): n is a, c, g, or t
  misc_feature (25)..(25): n is a, c, g, or t
  misc_feature (141)..(151): n is a, c, g, or t
ccgggaatgaaaacncttttgtganctttccccatgttagtggaaacaaataagatctgaagctgattccctttagaaactctcaacacttcttagctatgttccccaaatgcgtgagcattgataaattagactttatcnnnnnnnnnnncttgtgcctcaaaggaccccatcaagaaagtaaaaagacagcccacagaatgggagaaaatatttggaaatattgaatctgataagagactt

SEQ ID NO: 248677 - DNA, 535 bp, Homo Sapiens
  misc_feature (486)..(486): n is a, c, g, or t
  misc_feature (494)..(494): n is a, c, g, or t
  misc_feature (523)..(523): n is a, c, g, or t
cctataaaggccaactttgtacaaaaaagttggctaacgctttccccaaagagtacatccccaccgtgttcgacaattacagcgcgcagagcgcagttgacgggcgcacagtgaacctgaacctgtgggacactgcgggccaggaggagtatgaccgcctccgtacactctcctaccctcagaccaacgttttcgtcatctgtttctccattgccagtccgccgtcctatgagaacgtgcggcacaagtggcatccagaggtgtgccaccactgccctgatgtgcccatcctgctggtgggcaccaagaaggacctgagagcccagcctgacaccctacggcgcctcaaggagcagggccagggcgcccattcacaccgcaggcagggccagggcattgcaaaggcaggttccacgctgtgggcttaaccttcgaattgttcaggccctggcaaacagggtgggtgttcaagggaagttttttggncgaggttnttccggggttgttgtttcaacccccaggncgttcaagcttg

SEQ ID NO: 248678 - DNA, 894 bp, Homo Sapiens
  misc_feature (738)..(746): n is a, c, g, or t
ttcagcacacttttcttcacccaaaattgctgtaccacgccccccaaatttgctagtatttgagaatggactacgtaactcatttaaaccagggcagcagaatctgccagcactagacttcaagggctaagttaggtctgagcctattatatggcttttaagggtgaaggaactgaataatacattatgaagattaatatctcagggtgactagacaattcttcatgctgggctagttcacctctttgggatggaggactgggctctaagaagaaatatcttctagtatttaaaaccaaaaaatcccacatcttctcaggacagaatcaagtgagaaacagatgcttcagtcaaactgccactaaacagtgataactataacattttgctctgatacagtagactttttatttgttttggaaagtgattctaagatttttacaaatagagtgtctagtctacagagcaatactactgagtttggtgactacaggaaagtaatagttcttgcataacaatggaaaaagttagttgtactgtactttctagtttggaaagtaatatattgctatgtatatagccaataataaattttatttaatatgtaagtactagttaataaaaaaattcctgattttttctactttgaaaactaaaaagtaagagataagaaaattttaaaaatttaccatttaagtctctttgattctggaaatattttaattaggttccactttnnnnnnnnngtagcttccttatgacctccacagtgagtacattaactacattttcacaaacagaaaacttacatacattcaactgtttacaagacatgtctccatataacacatttacattcgtgtgaaatctatgaacttctttaattgcatccaa

SEQ ID NO: 248679 - DNA, 1111 bp, Homo Sapiens
  misc_feature (978)..(978): n is a, c, g, or t
  misc_feature (1066)..(1066): n is a, c, g, or t
  misc_feature (1094)..(1094): n is a, c, g, or t
ttggatattctgtttatgagtgaaatgtataatacattttttaaatcaaaactacttaaaatgaatttaattgcttagttaattatctctcaattaacattttgaaaccagtcatctttgattcattctgatcttttactcgtgacaaattctatctgttctgctgctgaaatcccccttcatttcatacttaatatagaacatcttaattcaggttctttgttttatcccctcagtgacagcaatagttccttaaccagtcttgttatctctactcagatctctctctgtagcccattttccctgatgtttccccatctcatatatttcagataatataccagtatttacatattgtatcaatttttcatttttttcagaaacataaaatatgaaacaagtacttatatatatatatttttttcttttagtctgagaataaaggattagaaactaccaagaacaatgtagttcagccagtttcggaagagggaagaaaatctaaatccaaaccagataagcagcttatccagtataccgcctttccacttcttgcattcctcgatgggaaccctgcttcttctgttgaacaggcgagtacaacagcatcatcagaagttttgtcctctgtagataaacccatagaagttgatgagcttctggatagcagcctagacccagaaccaacccaaagtaagcttgttcgcctggagccattgactgaagctgaagctagtgaagctacactgttttatttatgtgaacttgctcctgcacctctggatagtgatatgccacttttagatagctaaatccccaggaagtggactttacatgtatatattcatcaaaatgatgaactatttattttaaagtatcatttggtactttttttgtaaattgctttgttttgtttaatcagatactgtggaataaaagcaccttttgcttttctcactaaccacacactcttgcagngctttcaggtgttactcagctgcatagttacgcagatgtaatgcacattattggcgtatctttaagttggattcaaatggccattttnctccaattttggtaaattgggatatctnttcttttacaaatacgg

SEQ ID NO: 248680 - DNA, 588 bp, Homo Sapiens
ttgggaaaatatctatttggtgtttgacacatcagtaggtactttaaagacctgaattttatagtagctttaggagttatattttataaaaatcagttatgactttatatttccagacaatagagagttcagtacatcatgctcttgtgcctctgcctgcttttcctgcgttcccaccctgtattccccccgcctttcgggtttccagggcttcgagcttgatcttttgaaagttttattctattaaatttttgctatatcttctggttttctgaaaaagctttagaatggtttctataccctttgtatcactgcaatttttccatatcatctccggttcgatcgcgtccagatggaaaacggaagcagaggcttctaatcgtcgcatttactggctccagtgcaacacatccatctgaaaacactcggaagtctggtgcttggagagggtgccattgtctcttgtacataaggtcatgacgtgtctatgtcaaaagttcttatatatttcttttataagctgaaagaaggtctatttttatgtttttaggtctatgaatggaacgttgtaaatgcttgtcaaacaat

SEQ ID NO: 248681 - DNA, 479 bp, Homo Sapiens
  misc_feature (30)..(30): n is a, c, g, or t
  misc_feature (66)..(66): n is a, c, g, or t
  misc_feature (94)..(94): n is a, c, g, or t
  misc_feature (106)..(106): n is a, c, g, or t
  misc_feature (405)..(405): n is a, c, g, or t
  misc_feature (414)..(414): n is a, c, g, or t
cgctgaaggtaattgaaggaaacaatcacnaaggagaactaataaccaggaatggtggaacctcangctgaagtacccaggcctcttgcccccnaagtgccccagnactcaaggtgactttgacccaggggcccaagttcccacattccttctagcgtgccttacatcaggtactttgtcagcttcatcatccagttccagttccacgaggcactgtgccaggcagcctgccacacgggccccctgcataagtgtgacatctaccagtccaaggaggcccgggcagcgccctggcgaccgcccatgaagctgggccttcagttaggccgtggccggaagccatgcagctgatcacgggccagcccaacatgagcgcctcggccatgttgagctacttcaagccgnctgctgganctggtccgcacggagaacgagctgcatggggagaagctgggctggccgcagtacaactggacgcc

SEQ ID NO: 248682 - DNA, 338 bp, Homo Sapiens
  misc_feature (135)..(135): n is a, c, g, or t
gctcctaggtgctagggtggccttgggcaggtcagatgctgggggaaagttttatgctccggaggggatcgacgtgttgggggatggggtgggacagaagttgctattaatacacgtttcttccagcgtacaatncctcaggccttattgtagcttcaggagaataatcctaaggatgaggcggattttatgatctccatctcacagggagaaaacggagactcagaatagctgagggatttgcagacacagtgtcgatgctggcttttcagacacagtgtcaatgctggcaggaatagaactctgtctccaaaccattatccttcactgtgccgaac

SEQ ID NO: 248683 - DNA, 917 bp, Homo Sapiens
  misc_feature (619)..(619): n is a, c, g, or t
  misc_feature (826)..(826): n is a, c, g, or t
  misc_feature (844)..(844): n is a, c, g, or t
  misc_feature (853)..(853): n is a, c, g, or t
  misc_feature (869)..(869): n is a, c, g, or t
  misc_feature (877)..(877): n is a, c, g, or t
ttggctgcctgcccaggagctggaggagtacaacaagatcctgttggatatggaaaccacctacagcgtggccactgtgtgccacccgaatggcagctgcctgcagctcgagccagatctgacgaatgtgatggccacgtcccggaaatatgaagacctgttatgggcatgggagggctggcgagacaaggcggggagagccatcctccagttttacccgaaatacgtggaactcatcaaccaggctgcccggctcaatggctatgtagatgcaggggactcgtggaggtctatgtacgagacaccatccctggagcaagacctggagcggctcttccaggagctgcagccactctacctcaacctgcatgcctacgtgcgccgggccctgcaccgtcactacggggcccagcacatcaacctggaggggcccattcctgctcacctgctggggaacatgtgggcgcagacctggtccaacatctatgacttggtggtgcccttcccttcagccccctcgatggacaccacagaggctatgctaaagcagggctggacgcccaggaggatgtttaaggaggctgatgatttcttcacctccctggggctgctgcccgtngcctcctgagttctggaacaagtcgatgctggagaagccaaccgacgggcgggaggtggtctgccacgcctcggcctgggacttctacaacggcaaggacttccggatcaagcagtgcaccaccgtgaacttggaggacctggttgtggcccaccacgaaatggggccacatccagtatttcatgcagtacaaagacttaccctgtngcctttgagggaagggtngccaacccngggctttcccattganggccattngggggaacgttgcttagccccttcttcaagttgtcttaag

SEQ ID NO: 248684 - DNA, 476 bp, Homo Sapiens
  misc_feature (56)..(56): n is a, c, g, or t
  misc_feature (120)..(120): n is a, c, g, or t
  misc_feature (131)..(131): n is a, c, g, or t
attttggaaggtgtctcctgcctctaaataaaacaacagtttccaaacccatcaangggattccccaaataattattggggcctggggaaggagaaagatggatgacattttttaacagnattagtttttnagaaggccatgtcctatatctcgccccaaatgctgtggtcgggaggtgtcgcatgatccgccactcaagagacaagaaaaatgaacccaatcctcagaggtttgaccgaaattgcacacacaaaggagacaatgctctctgatggtttgaactcactcacctaccaggtgctggatgtacagagatacccattgtatacccaaatcacagtggacatcgggacaccgagctagcgttttggtacacggataagagacctgaaattagccagggacctctgctgtgtgtctctgccaatctgctgggctggtccctctcatttttaccagtctgagtgacaggtcc

SEQ ID NO: 248685 - DNA, 988 bp, Homo Sapiens
  misc_feature (679)..(688): n is a, c, g, or t
aaataaataaaataaagtacatgatgcataggaagatttttttaaaactgaactattgcacaaatcaatgtgagattatgcaagtaatataaaaatgcatttaaatatattgtcacaacatatttcgtaagtcataaatctatttcacttactgtttataatctctgggctctggaactagatgatttcttaccaactcatctccatgtggtacattataacattaatttactactgtaaaattcagtgagaaacaaatgtgtgccaattatttatctatcctttccttgagcagacaaaaagaattatgtggtcttaaaaaaatacttgacaaaaaaacagtgctcagtattagataaaacaagtttaaagttctttatatgatttataacagaagtgatttaaatggaaatctaatatatgcattcatcttctaaattcattacagcttattttagttgatggactatttgtttctttgttttgaccaataagactgaataaagataactgaggggaaaaaaattaacaactaatcaggaaataaactgtaagtaaaatgacaattcctattaagtttgtaactcctgcccaaactaaactaagctaataaatttcagataaattataagccacaattctttacattgtgtcttatagttgatcagaatcataaacnnnnnnnnnngctaggaattatataagagatttgtttgtacctttacagtaagatcaaagctctcttaggtttgattgaatagaaattactacagaattactgccatcaaggcaatctactactaactactatgatatactgaaagtgacaatgattaagagctgtgtcgtgatcaggttaaagagaaaaaaataattaaatttgtgtgtatgtttaattaggtaagtcaattatgcattaaaacaatacattttcagtgggtccttaatgtgacgtgaatggtgtttcaacattaaatgctaaagccaa

SEQ ID NO: 248686 - DNA, 753 bp, Homo Sapiens
gacagaatcttcgctcatgcacttacctgctttttcttctgtttactcaggaataactgtgtttatcaatatttgggctcttcaccacaacccctatttctgggaagaccctcaggtctttaaccccttgagattctccagggaaaattctgaaaaaatacatccctatgccttcataccattctcagctggattaaggaactgcattgggcagcattttgccataattgagtgtaaagtggcagtggcattaactctgctccgcttcaagctggctccagaccactcaaggcctccccagcctgttcgtcaagttgtcctcaagtccaagaatggaatccatgtgtttgcaaaaaaagtttgctaattttaagtcctttcgtataagaattaatgagacaattttcctaccaaaggaagaacaaaaggataaatataatacaaaatatatgtatatggttgtttgacaaattatataacttaggatacttctgactggttttgacatccattaacagtaattttaatttctttgctgtatctggtgaaacccacaaaaacacctgaaaaaactcaagctgacttccactgcgaagggaaattattggtttgtgtaactagtggtagagtggctttcaagcatagtttgatcaaaactccactcagtatctgcattacttttatctctgcaaatatctgcatgatagctttattctcagttatctttccccataataaaaattatctgccaca

SEQ ID NO: 248687 - DNA, 684 bp, Homo Sapiens
gttccttttagactcaccagagatattgtggatggcatgggcattacgggtgttgaaggtgtcttcagaagatgctgtgagaaaaccatggaagtgatgagaaactctcaggaaactctgttaaccattgtagaggtccttctatatgatccactctttgactggaccatgaatcctttgaaagctttgtatttacagcagaggccggaagatgaaactgagcttcaccctactctgaatgcagatgaccaagaatgcaaacgaaatctcagtgatattgaccagagtttcaacaaagtagctgaacgtgtcttaatgagactacaagagaaactgaaaggagtgggaaggaaggcactgtggcttcagtgttggttggacaagtgaatttgctcatacagcagggcctagaccccaaaattctcagccgatttttcccagggtgggaagtttgggtgtgatcttccgtatttggattaccctttcattcagcctttagaaattatattttagcctttatttttaacctgccaacatactttaagtagggattaatatttaagtgaactattgtgggtttttttgaatgttggttttaatacttgatttaatcaccactcaaaaatgttttgatggtcttaaggaacatctctgctttcactctttagaaataatggtcattcg

SEQ ID NO: 248688 - DNA, 660 bp, Homo Sapiens
ttttttctctgccgaatttgttcctagcatttatttccaattgccttaacgaaaataaaatcatcccatgtatagaagtacttgcttagaaatcatggtgaattagtacgtaggctatgctgagaataataattggaaactgaaaaacaaagattgactatagtaattaaatggaaactttaaaaaccatcatttaaaatgtaaatctcttctccaataagtgtattcggtcctttgaaagaaactcctttgcaatcactctctgaaaaatatagattgtaaagaatcctggctgtgagaaaggaagctgaaaagggtttgtttttccctctgacactttcccagcagagacatctcagaattgcctaagtgtgaatatctaaaattacaaactagtgttctctagaaatcttaggatacatgtgtgatgataaagagagctacagctgtactcattaccagtgaaataactcatgaaaaagttttgggccaactttcgatagcatgttgaaagccactgcgttttctttgtctctacttgcttattgttcatttttgcttcattacctatggtggcttctctgtatcccatagtgagagtagggcctggacaaggtttgtaatcctatcacacttccaaaattattgaataaaataata

SEQ ID NO: 248689 - DNA, 419 bp, Homo Sapiens; identical to SEQ ID NO: 179698
  misc_feature (115)..(133): n is a, c, g, or t

SEQ ID NO: 248690 - DNA, 358 bp, Homo Sapiens
  misc_feature (339)..(339): n is a, c, g, or t
attttaaagactttacaaactttattttgaaacaagctataattacatgaaattaagaacagctctagggccaatattattgtactattttagggtctagcaattacacactatagaagatggatattttattcttgctgtggattaaattatgaaatacttttggggtgccttctatatttaaggtattctggtaggatatgaaagaaaaaaataagaactgaatctaaactttcaaagactgtacaatatagatggtaaacaccccctttaactttcaaacataatgggcagatgttcgtggtcccaggggtaacttcctaactttttgaccctcgngccgaattcttgggcctcg

SEQ ID NO: 248691 - DNA, 1242 bp, Homo Sapiens
  misc_feature (431)..(460): n is a, c, g, or t
ttgggttcgatttccaaaatatgtaacttattttttaaaggaataaggtgtgctgtgtatttgttgattaaaaatcatttgtcttgcagagtatccttttttgaaggaaatatacatccttataacacatcaggtagttttcttttttctgtatttaaattatatatttgaattaattgaatataatttgagttacatataattctatataaaggttacatattgaattatggttctaatctgtttaggaaagaaatgaattttctaagcatttaatacatttggaataattttagtttctaaaaagtactaatgtaagttaagtttatatcaaatgcaaattaccttgtataactaacaagcacagttattgtttaacattatggattttaattgtgttgacacccttctttgaatttgttgctttacannnnnnnnnnnnnnnnnnnnnnnnnnnnnncacgcatgtacttgtatgcaatgtaaaagtaacagcagaatcattgcatttggtttacttaaaattttggagttagcaagtaaacaaaaagctgatagttttatgaagtctcggttaaaataaaatttctttgctatctcactcctaggaagttatggagttcatattttcaaaagatatgttaaaaatggttacacactctgctggccacattaaaaattagaagactcatgttaaattatctcctccaaaggactttttatttacagcttttcttttcctggactctacctgcttggttcagtgtcctgaagagttatttaaatgaaccactacttagtaattagttcttttttaaagtatctacttctaaaattacctagttgaaaatatgaaggatatgcttagttttagaaatatcatgaagcaaggatctagtcagtgttacagggtaaaggtggagttttttaaagtctgtatttaaatggtgcactgatggattcatttttaatttgcattacaaaaatgttgctcaggtaatcagtattttcttcccacgtatgtgcatattgcactgttagatcatagaaatatctgaatgctttaatttttatgtatgcaaaatctataaatcttttgtataatgtattttatacaaatgtaactgtagaacattgttagcatgtgtatctgtaaaaccagtttttaaaattttttgccccttatttttcatattttgaaagatctccaacatgtaataaagtttctcttattcaatctaa

SEQ ID NO: 248692 - DNA, 623 bp, Homo Sapiens
  misc_feature (391)..(391): n is a, c, g, or t
  misc_feature (409)..(409): n is a, c, g, or t
  misc_feature (512)..(512): n is a, c, g, or t
  misc_feature (521)..(521): n is a, c, g, or t
  misc_feature (578)..(578): n is a, c, g, or t
  misc_feature (581)..(581): n is a, c, g, or t
  misc_feature (588)..(588): n is a, c, g, or t
  misc_feature (592)..(592): n is a, c, g, or t
attttgccttacaagtatgtaggtcattctgtggtgggatttcccatcacatctagtaaaaaacaaccttttcatttccctcctttctaatccaagatcatatttttaaaaagtaggtttctgatgtgccatgaaatatttctgtgaatctgtgtttttgaccaaggaaacagctgagatattaaaccatgtggttgttccacggttcatctggctaccgttctgggtcccctctgaccacctcaaaaagaaaatgaaattgggagattaaatcaagcttgacctcctcttttaatgaggaactttcacgttggacttcctatctcaggatattcttcagtttcatactgctgaggagaagggaacaagctgcagacactgtaactggtcntccagatgtgtgtatatngcgtgtaaaaccttcaccccgtgtgtgttgtgttcaatgttgtgtcaatctacaaactgactcaaacaacagttttacgatagagaagacagtgataatggcnaaaaaaacncccaaccccctttttccgtcaaagtgcttgctatggctttcatagctgggacaagtnacnttaagtnttcnggagcaaagtgttcttgaaagaaaatggtgt

SEQ ID NO: 248693 - DNA, 456 bp, Homo Sapiens
atttcttacatttcagacaaaaccctgttagtattttatgtacattaaacattcaatttaatttggaaataatagcttcacaacattgaattgtctcatccaggaacgtggtaaatctctgtttattcccacattcctttatgtatctcattaatgtttgtagctctttctcccattgtgttttctagtctggttgttattggtatataggaaaagtttatttttgtgtatattatcttgtatttagctgaactctcttatgaattctaacaatttctcagcttcttctcttgagtttttaaagtaaacaaccatattgtttgcaaataacttatagcttagttgttcctgggccaagttcagacattaggctatcataaggtaaactcaaatcctattggcacaatataataatacattgtaattttgttcctaaagactcatctcacactgtaa

SEQ ID NO: 248694 - DNA, 1299 bp, Homo Sapiens
  misc_feature (978)..(990): n is a, c, g, or t
ccctgcaaatttgggttttgattacttgagcatagtgatcaaaaaagatcactgggcatccatataccgtttcattaatgattaatggactacaatattgacttgtctcatgttatcaaagttataatctgctttatatagcaagttcactttgctttaaacagcttttaatttatattattgttcttgaaaaggtgagtaaatatgcaaatcgaataattttaaaatccaaggcaggttttgtaagaaacttagaggcagagagaatttttgtaaagagaaaaattatttattttataaatttatctgttcagaacatttactttaaatctgttaattcttcacttaagcatggcagggtggggattagtttctgtggtggtaaggatctggaaggaaaggctttcaaatttatgtaagtgtatctgtggaagagtggtgaatgttcaaagtggtttacattgaaacgttactttcctcttaagtttctcttctggggttataaatgactgcagatcctccctactgtcttgctgaagcccctcacgcccctggtttgaattcttctccaatcttataaacctcttacaggttattctaacatttttatatctgggggagcttctgcttgtcccataacaaaccctcatttacagcagtgggactggtagctaagttgaggtttgatacatgtttttacttttacttttctttaggttactttgcatcagcagactgcaaactttttcttaaagagccagataggaaatagtccaatcctgaagtgggccatgtggcaatacgtaagcaaataggcctgctgtgtttcaataaaactttatttaataaaacaggtggtgggctgagctgctttgtataatcttaggtaccttgaatccatagtccaaggatggtagaaagacaagagagagaaggaattgggcccggaagtaaaggcttgttaaataggttcattcnnnnnnnnnnnnnctcaacaaattgtgagcaactgccttttttcaagaattggtctcagcacaatggttaaactggtgattaaacagatgagtccctgctttatgaaatttacattttctacctagtgtacattgttcactaaccctaacatgagtcagaaataacatgtaataaagaatggcttggttatatgcattttctcaaaaggagatacatagaaaacacttaaaagagcccaacctaaaaatctgttacctaaagtaagacatcccataattttcttcaaatcagtggttctcagccttgattctacattaaaaa

SEQ ID NO: 248695 - DNA, 702 bp, Homo Sapiens
  misc_feature (238)..(249): n is a, c, g, or t
ctcattttccggaagcagcagttaccactagaactgaattccgaaattatgacttctggcttgtcttaacaatctagaaaggtttcaaatatattgatcatatttatttatgagggaatttccaggagctataattttagctagcagttcaaaccaaatttataaataagcaaatcttttcactgaatattcagtctgctaacagcttttgtatcattcctcctttgtctcagacttnnnnnnnnnnnntctattacatgtaatggaaatgtttcaagatccagaagagaaaattgatatgaatgtaactgatatggtatatgtgcatttaaaggtttattccaacaaaatgttactcacactcttttctgacacatgcatacacaaaagatgttagcatttgcagtctgattcccaaatggcccattgcttgtgtggagagatgaagtaggatttgaaggtttttcagccttttgacagctacatatggagtcactgtaatttccttttttttctctcttctgaaaagtaggtttcgggaggagggcactgccctcctggaagagatgcattagatcggtaggcacagaatacctttacatgagaccatttagagaatgattaggggccaaaggtagggggtggactgttaagccaacagggactcagagaaagcaagggtcagggtgaccagaaatagag

SEQ ID NO: 248696 - DNA, 679 bp, Homo Sapiens
tatgacttcagccttttaattcattaaaataaatcaatgactaaaataaagttttttcagattttcagatacaatatagacaatattatttttgcatttctgttctaactttatcttaccatgttaccatatgggcacttggactaaataactgacttgtaaaatctggcccaactctgaagatttttttatctcattataccaaaattatacacatgctaaaaacactgtattatcctctgattcacttttaatcctttttggttatgaaactaatattactacagtagtggcatcaaaatatagctcaaaatatttgaaatgctgtttttcccattattctgattcagataatttttctaaagttcaataaattaacaatgctgaaaaatcctacatagttttctagtgttgatttcaatttcctttgttctatggtttgttacgaagcttcatgggggctgctcaatcaagttcagcttacttggtccaagatactgcaatgggaagtagttgagtgactgagggatataatagagctggccactagtgctagtgctgactctaggtagctctgtgaccttgggaagatacttaatatctctgggcttcctttctttttttcctatcacgaaatgcaggggactggatgagctgtggctcctcctcgtgccgaatt

SEQ ID NO: 248697 - DNA, 592 bp, Homo Sapiens
  misc_feature (16)..(16): n is a, c, g, or t
tttccataggcccttntttgactcacgtgtctatatctgaatcaactgttacaaccaagcagatgcagagactgcgtgccctctcctggagctaggagctaggtgagtcaatcctgcactttctctacaaggcttgcaaaggtgagcaagaagattccccaaagtgaaatcagggtgctgttaccaaaagaagctatgctgggcaggcaaaaaacaacagctgtttcccatagggcaaaacctgaaacacccaattactatcccattgtttgcttcaaaattaaattttgttttgaccccaactagttctagtcaagtttttgctcgatggaccacgtgaaaaaaggataaacaatgtctctatataatgcatgatcaggtggtttatgaagatgtcaagagcactgaacaaaatccaaatgctcacataaaatgggattaggtttcataagccacccaagaaaatcagtctcattattttatgtaataatgtattactgtgcccagagctaacctgtagctctaggggagtacaatgtgtttgtattattcttcattgtacacagtgcctcagacatagtaggtattcaat

SEQ ID NO: 248698 - DNA, 304 bp, Homo Sapiens
tcttagtaaccttaaattttagtgaaaccttaggaagcaaaaaatcctaaactatcagatattagcattttatagatgagaataattccacaatttttggaaacatattcctccctatcataaccctttcttaattggaaatgactgagatatccaatgggcatcaaaaatacttttaagattttaaattacacaaaatttacctaatcattcatcccatttacatgtacttaagtctttcatttttaacagtttatctagattacttctgaaaactgagatattagacaccatcatttaaagc

SEQ ID NO: 248699 - DNA, 767 bp, Homo Sapiens
  misc_feature (361)..(361): n is a, c, g, or t
  misc_feature (590)..(671): n is a, c, g, or t
gtttgttatttttgcagccaacaaagtatgttttcgaggttaacaacgaagcacaggatagtacaagtggaagatcattaacatgactggataggaacctcttttaatttccctttcttggctttttccacaccctaggtgggattacactcaccctgacacacctagaaaatacacccagataccagaattgcaaaattcaggaagaatgcactgcacactgtatccaggggaagccaagctcacctaaaaatggtctcaaaaaggcaaagggctctgaccatcgactgatgggggttgcaagcccagcctgtctgcagggaattttttaaatctgaaaccacactacagaaattatttntatatattacttatttttaaaactcaactgtaaaaataagtgttgcaggaagagtgaggaagagggaatttaaaagaggaagttgggactgaatctattcgttccaacctccctaagcaatccacttattgatcagtgcttccaactcaaggaatatttaaaattttttaattaaagaaaaaattctatcaatcagagaatcttgaaggtagggggatcatttacaatnnnnnnnnnnnnnnnnnnnnnnnnnnnnnnnnnnnnnnnnnnnnnnnnnnnnnnnnnnnnnnnnnnnnnnnnnnnnnnnnnngagactcaaatatgccctttcagatgtgcttataaaaacaagtcagtgttcacatttactgtattaataggaatgtctttcagggggagtttacag

SEQ ID NO: 248700 - DNA, 719 bp, Homo Sapiens
ctaatgtatactctttctgatattgtatttattaaataaatggtttcaccattatgtgaggtgggtaaaagttagactgcatgcaacttggacatctctgagctggttgttaacttgcagaacaaaaatgctgtggggagaggcttcagggaaaacttgatgtgcctgtggttgttctccatctatttgccctgcctctcttgctgttctggttggtttgatattctgggtctcaccaatttctcttgatttttgtgagaatttggctttgtttcctgttttttaaaatcatattttatctaaatcctttttctgtacacatttttaaaggaagagaatactgtatttttaaataaaggtttttatcttgtccaaagcctaattacaggtaaaatatcctttgtaaaatgtaactaacaaagaatgagaaatttatgtcggagaacattttatgaataaaagggtaagagaattgagtgggtcagtagtaacaggtcttggtggcaagtctcagcttcacagttccaacagttaatgatggtcaggatctgctagaaaattatgttggtcataaaggtatttgataagctctgtttgtgtcatcttagtgaatgcaacctgttaatgataatggctttttcgctgcttgattttcttcttttcctcatttttaaaagctaattaagtttttttaattgaataaaccctaatactattct

SEQ ID NO: 248701 - DNA, 488 bp, Homo Sapiens
  misc_feature (299)..(299): n is a, c, g, or t
  misc_feature (412)..(412): n is a, c, g, or t
  misc_feature (423)..(423): n is a, c, g, or t
  misc_feature (428)..(428): n is a, c, g, or t
  misc_feature (435)..(435): n is a, c, g, or t
  misc_feature (447)..(447): n is a, c, g, or t
cagattcacaagctttaatcattactttttctgttatacattgaattgtggatgtcctttaattagtaaaacagccactaaaattgtttttatggtttgctatcacaaaagtcgaaggattgctagaatgctgtttacctgtttcaacagctcccatcaactaccgctactcactttacatagaaataaaaacagctactattcattgagcctatttctatatgggaatcttagtgtcctcacacacattaattcactcaattctccccaaactctatgagggtaaactattatgcccnttttagagatgaaactgaggtttaaagagattaagtttccaaaaatcagataactaataaggagtaggagtgaatctggaatttaagtctcattggcagagagctaaagtttnttacacaggcntgggnattgcgnccttttcaaccnccgggaaggggggcttgttgaagttttgcatataggtttgc

SEQ ID NO: 248702 - DNA, 774 bp, Homo Sapiens
  misc_feature (402)..(402): n is a, c, g, or t
gtactacatctttccagccatcagcacgttgtacaacttaactttttaacatagtccgtctgtttactgaggcactggcgagtcccagggctgatacagaaccttccctagagggaataccagagttagctgggtatagaggtggctcaaaggaagtgtccgtgggcagggggaggaatgaacaaaatggcgctgtttctttggctcagactcctagaatgcttgacaagacagaatttttttggaagaacctcatctcactatagttacttttttcacttttgttatatatgtatttattagagcatttgaatattggtacctttaaaagggtcatttggtgttttgctgttgagctggtttttgagtcatagatcttgggcttcctttagaagccacttnaacttccatacactattattaaactgtggaacatatttttgttacctaatggcatccactgatgaacatgcaaactttgggcataatgtgaactaaaattgaaatgggaaatgttagtggccattttgcaacaatgaagaggatagcactttatctagatgaaaactggatttcttatctttgaaatatcttgaactgtttattgctcagaacttaagtaagcatgccaacatttcgtttgtttatgcttgaagtgaaatgttttacttttcactggagaagacaaaacagggtgatcttcatggtattggtttatacaagtgatggaaatgtaccttgccttggttagaggcaatttcacatttataaata

SEQ ID NO: 248703 - DNA, 1065 bp, Homo Sapiens
  misc_feature (669)..(703): n is a, c, g, or t
gaattatgtttacatatcatatctgacaaacatctttgtaggaatgcaaagcacatccatctttctgtattcttttccaacaaagacattcataaaattatacctttgtgtgtttgcattttatgcttttattagttcaaaacgtttggttcatggaagtttttcatcgtggaaaccacatatttctgaaaaaatatctgacaatatacaaaccttccattcagtttttactctccaattctaccatgttttcaaaaaacaactgtagtaaaaacactcagaactttattctggttaacatcatgccttgctaggggacaatagtttccctttttgaaataaatttaaaccagatgtaccataatttgttaataaccaatgagggggtaatctagaataagtaacttttaccatatcatagttgacagcatttacaagttttttaagtccctaccacacttgtattgaatgaagaagtatggaagattataatatattcaatgcaagtaaaaatatcacaatccttaagaactctttaagaagcactgaatcccatagggatgaaagtgattaaattgtgcatagtaaccctcgcacagagcattcagtaggatttgcaccattaacaaccctccatgcatttgcctgtgggcattcaacatctgtcannnnnnnnnnnnnnnnnnnnnnnnnnnnnnnnnnncctctaaactctggataattattattcattcttatgacaggaactgtgtaatcagctgtcgaaacactgtgaagggcaaaagaaagaaagccacaaaatattgtgtttctgtgccaagattttacagcgagcaagggagagttagaaaaggaattctgagatttcagagtcttggtctcttcacctttgcttggaagaaaatatcctttcccttcattagccaacactttcttgatcctgagagtaggaaagggaacactgagtcttttcagttgaaggccgtccttgcctgctggactttgatctattgaagtggtgatgggtgttgcggtttcagccataaaggcatctggcatagtagg

SEQ ID NO: 248704 - DNA, 1207 bp, Homo Sapiens
  misc_feature (1113)..(1113): n is a, c, g, or t
cttcccccttttatcttcaattctcaggctatagaatagacaagttttagaatatacttcagccaaagcagaaagattttcatagatccaatatgcaaatagttctgctgtgacatagatcagaaattgtctgttccttaatatttgggggtggaggcaacaaaactgaagcatatttctgattggttagccattttggcctgtttcctcttgcatgttttttagggagagagggaaacagtcctgtatttcttctgatgccctttggggaagccgacgaccactgggcatttctcactgttactcctgttcaagagagggcttctcagtctgcactgaaaaatgcaaattaaaatggatctttatgtcaatgtgtacatagtacaagcttttttactggaattgaggtttaaaaccacacactgcccttttggtggtgtgcctgttgggccaaaaattgggtgataatgtagtgtcactttctcagctcaatgcagtttctactttttcttatgggaaaatttttcataaaacctttttgcaccaaaacccaggggtgttttttgcaatatccttgttatcctcgtagtgtgccaagtcagaggctttctcttgcccttttcctgctgtgttctcaggcctcccaagggctgtttgactcaacagtctacatccttcgttgtgttttggagaatgtgggggtgggggtcagagttcaaggtgtctgttcccttttcctgtgaactctttctagtccctatttggggagggtggctggaaacagatttttgctgaatttctggctcagatcttctagccaggaaaggcaagagcccccaagagcccttttttttgacatacactaatcattggccggggtcttggtgacaacttttaaaatcccaaatagttttatttggattatgtaaaagtaagtgtgaaacatgggaacaacggacttccactgagcgatctgaaaacgttacaggttcagtacttccaaaggaagaaacctccaaacccaaaaaagaataaatatgaatttgtatttttgaagaatgtgaaataatgggtgtttgcttaattgctcattttgtataaacttaatattgnactttaaaatatctgctaaaaagtgaaaatttaactttttggaattgaaaaagcaatattaaatactaatgaaatcctaattaaatgcttattt

SEQ ID NO: 248705 - DNA, 964 bp, Homo Sapiens
ttggctcttgcagtggtggggtcggacgccgtggactctgcacagtcctctgccctctgtccgtctcttgcagtggtggggtcagatgctgtggactctgggacctgcagctctgcctttgctggctgggaggtgcacacgcgaggtataggctccagactcctcaccaagatgggctatgagtttggcaagggtttgggccgacacgcggaaggccgggtggagcccatccatgctgtggtgttgcctcgagggaagtcgctggaccagtgtgtggagaccctgcagaagcagaccagggttggcaaggctggcaccaacaagccccccaggtgccggggaagaggggccaggcctgggggccgcccagctcctcggaatgtgtttgacttcctcaatgaaaagctgcaaggtcaggctcctggggccctagaagccggggcggccccagcggggaggaggagcaaggacatgtaccatgccagcaagagtgccaagcgggccctgagcctgcggctcttccagactgaggagaagatcgagcgaacccagcgggacatcaggagcatccaggaggctctcgcccgcaacgctggccggcatagcgtggcgtcagcccagctgcaggagaagctggcaggagcccagcgccagctggggcagctccgggctcaggaagccggcctgcagcaggagcagaggaaggcagacacccacaagaagatgactgagttctagagaccccacaagcactatggacgaagcgtgggaccccagcacggggctgccctcaaggaagacccagtgttgcccgaaggaggggccggcctgctggcctggggcgtgcggacactgctgagtggagacagagctgcggggtcccatctggacacttacttgcccacctgccagtgtcttgggcatttccttggcaaggacattaaagtgatttcatcacagtgtc

SEQ ID NO: 248706 - DNA, 896 bp, Homo Sapiens
  misc_feature (558)..(567): n is a, c, g, or t
ccccttacaacgtgcattttacttaaatgtagctgttacttaggggtgaggaaatgcaacagaagagattctttttaaatttcatgatatgattctattttaaattccaaaggtgttgggttttttcctgattgtattttcaaaacatcaccatgaaagatagatagtgcaagttcatgggactaacaatcgtgaagcacagtctctttttctggaattcacaaggtacctagaattcaaacaagaatcacacatcacatgctaaaaaaacttctagcatctaaaatacatacaagagctgtgcagggcatagacttcaaataaagccgaacactggttaatccatcagtcctatggcaagttgatcataaagcattccttacgcggagatctgggcaaggtaaagagtataagttagagcagcagcagttctgatgggtatcagaaaggcaaaatacaagacgagtcatgaggagcaccatacacatgaggaaagagttatttggggggtctcagtttgccccaaaatggatcaccatttttctcattctttgatcnnnnnnnnnnccagtatctctagctcaaactttctgttaacttgcccactctgcactgactgtaaaccaaacactaaataccctgcaaaagaaagttttaacaagactaggtataaggacaggtagtcactggaacattcttattttactgcttataaaaagtttttctattaataatagttctcaaaagaatacaagttttaaaattggttagctacagttaaatacaatacccaggatttctaaaaattttttctaacttgaaaacattttatattgtgaataactgggtttaaaaattttatctctagtactcacataagccaaacattcatccaa

SEQ ID NO: 248707 - DNA, 1432 bp, Homo Sapiens
  misc_feature (182)..(192): n is a, c, g, or t
  misc_feature (217)..(296): n is a, c, g, or t
  misc_feature (1012)..(1041): n is a, c, g, or t
  misc_feature (1328)..(1328): n is a, c, g, or t
  misc_feature (1355)..(1355): n is a, c, g, or t
  misc_feature (1359)..(1359): n is a, c, g, or t
  misc_feature (1361)..(1361): n is a, c, g, or t
ttggctactttgctttccaaggagcaaaaataactttggagccttctgggaagtgtgcctgggattcttcagtggtttcaggcagatagttgagactggggctttgatattcaaggtctttggcaagaatcccaggcttgaccaactggtaccaggtcaaagatttttgtattcttgtgaannnnnnnnnnngtccctattgcccagggatgtcatnnnnnnnnnnnnnnnnnnnnnnnnnnnnnnnnnnnnnnnnnnnnnnnnnnnnnnnnnnnnnnnnnnnnnnnnnnnnnnnngccaaaattatatgtaatatccagttataatattgacaagtagcttctcagatcacagattttaaataactcaatttagtgagatctaaaaattttatttaaagtataaaaactgtggattacaggcatgagccactgtgcccagccctcttgataatttttattcttgtttcttcttatctgtgggactccaattagaatggggttgagattgtggcattcagttttataccaatattttacccaagtgtgtcatggccttttttaatcattttaatatccccagaaatgctagaagtgtaaaggaataacagaggtaaatttgctgtcattttatgccacatcctcttttcttactttgcttcttgatacagattatagaggtaattgtgaagacagttgaaccttagaagattgagctaagattctttttttggcaacctgcaagtaatgtttcatttttctattacgtgatctctttgcccatacagttggcagatgttttttccccctttttctaccttaaacttttttgtttggagtacagtctaaaccaacatcagttagccttgattttctttcttttttggacaattgtctggttcattgacaaaagtaacaagtttggaactaagagatatgttacaagctgcacttaacaccacctgaaaacccaagaatcatctgaaggttttgtcagtagtaaggtaggtttnnnnnnnnnnnnnnnnnnnnnnnnnnnnnnaagatggaatagggtgaaggtgaagaaacagcttgacttgtgcctgttttcagataaaggagtaaagtgatctacaaactgtaactatcttgaaagagaaattgatcatcagatggtcgagtactcttggaatgtctctttgctgtttactgtggcctctttacaatggtgagacttatttctaccctctactttccactattatttttttcccctattggataatactagtctgagcagccctaatactagatgtacctaaacagagatacaagccaagtcattgntcagtgtagtcatttcctagtatctgnttanantttgtcacacatcagaatgtatattttatagagcatgtgtttgtctacttgtttgtctactataatatgtc

SEQ ID NO: 248708 - DNA, 615 bp, Homo Sapiens
ttttacaatcctaggaaggcccaccaatttcatttcacgcgccagggcggctgcagttggaggccgagggcagccctctgctcactgaatgtcttgcatgtgctgactgctgcccgcagtgctgaacatgccccaccgcccaggcccagcactgcttgttgggtcagcatctagtgctgctgtcacatctttgtctgcacagccagtaggattgcctcagccagggggtttatcagaaggtgtgcaaggcctttgggggaactgagcccctatagtgggcagtctcctttaccttcccacctccctgaaaagcacagaagacagtgccttggttttgtgtttttgaaggcaaacaagttcagctttctgggctttgccccaaaactgtgatggaacataataaaactggagatatggtttttaacactgcaaaaaggaaaaagcatcaagtttctacttctggctggaaagcaaaaccaatctcagctgacaaggctgggcaaactaagttttcctgagcccattttcctttgagccctgacctagcctggccttacctcattaaggtttggttaaagcagtggaaaggaggaggaggcaggggtgatgggggtg

SEQ ID NO: 248709 - DNA, 473 bp, Homo Sapiens
cacagggttttcaaaggcagaagagaagaaagttttggaaagcaaaaaacttacaacacataccattaaagaaaggcaagagagttgttagctaaactgatctgtctgcatgatagacagtttaaaaattcatcccagttccatatgctggtaacttacaggagatatacctgtattatagaaagacaatctgagatacagctgtaaccaaggtgatgacaattgtctctgctgtgtggttcaaagaacattcccttaggtgttgacatcagtgaactcagttcttggatgtaaacataaaggcttcatcctgacagtaagctatgaggattacatgctacattgcttcttaaagtttcatcaactgtattccatcattctgctttagctttcatctctaccaatagctacttgtggtacaataaattatttttaagatgtaaaactctggggctggacgctgtggctcacac

SEQ ID NO: 248710 - DNA, 216 bp, Homo Sapiens; identical to SEQ ID NO: 179753

SEQ ID NO: 248711 - DNA, 421 bp, Homo Sapiens
aggggctaaaacttgggtttgaaattttattaaaaaaatatatttgccaaacatataaaatttaagatgaaaaacgcctcattttaaaacatgtaataacttaatatttgcaaacatacacagatgctataaaatccatacccttaaaaatgttaatgatacagtattgcgctcatggaacaaaaatcttgctgtaattccagagcttctcgtccccatgtttcagggagctgagaatctggtacaatgaaagtcatgagagccacatggccaaagcagtaatacagaataaaaaaccatttagaacacatattttaaaaacatgtttcttaaggaatcacacagataaaaaggaaacacaattctgcattttccccactttgaagtgaatgatattgcatcttagcattttaaatgaagg

SEQ ID NO: 248712 - DNA, 756 bp, Homo Sapiens
gatagagcaatgcttttcctataaaagagccaactttgtacaaaaaagttggggttcaacaacccaaggcaaggcactccatggtggcctttgtcaaccgagccagcaacgcaatcctccgtgctcacctgcccccaggcccggcccgccacgcccacagcatcaccacactcaaccaccccttgaacctcaccaaggagcagctgtctgaggctgcactgatggcctcctcggtggacgtcctcgtctccatctgtgtggtctttgccatgtcctttgtcccggccagcttcactcttgtcctcattgaggagcgagtcacccgagccaagcacctgcagctcatggggggcctgtcccccaccctctactggcttggcaactttctctgggacatgtgtaactacttggtgccagcatgcatcgtggtgctcatctttctggccttccagcagagggcatatgtggcccctgccaacctgcctgctctcctgctgttgctactactgtatggctggtcgatcacaccgctcatgtacccagcctccttcttcttctccgtgcccagcacagcctatgtggtgctcacctgcataaacctctttattggcatcaatggaagcatggccacctttgtgcttgagctcttctctgatcagaagctgcaggaggtgagccggatctttgaaacagggtcttccttatcttcccccacttctgcttggggccggggggctcattgacatggttgcggaa

SEQ ID NO: 248713 - DNA, 511 bp, Homo Sapiens
cacactggggagaagccctatgaatgtgagaagtgtggtgcagctttcatttccaactcacacctcatgcgacaccatagaacccatcttgttgaataacaagtaaggaagaggaagacctccagcattggtcataaccttctgcctccctaatgagacacctctttgctgttttcttcctcctctataaaagtgagggctgtgtccttaaaagttatagttttcaggaatgcagcagaagacacaagaaaagcatttcagaggctaatttaaaacaaaaagtaaggcacctaaagggcaaggactttgttttaactgtaccttaagcggtcatgttctctgaagtggaatgtggctttcctaggaatgggtcgtacaaagctaagtggtaatgatgctatttggggaaaggtcttttttgcttaattttgttttttaaaactctgatgattgcttgagcaacaggcaggttatctgcctggttgaattctggttgaaccgtgtattctaa

SEQ ID NO: 248714 - DNA, 291 bp, Homo Sapiens
aaaattttaaacaaagcttctcttgcttaaccaactgcaaaccaaaagacctttgaacctacttatggcctgtaagccctcacttcaagatatcccacccttttaggccaaaaccaatgggtaacctctgtgtaatgatttatgaattagcctgtaacttctgctttcctgaaatttactcctacctttaaaagcccttacctgcaagccatcacggagctctggatttgagcgttagtggcctgatcctccttgcttagtgccctgcaaataaatgtcttcctttccacc

SEQ ID NO: 248715 - DNA, 566 bp, Homo Sapiens
  misc_feature (134)..(142): n is a, c, g, or t
tttcatttggtaaatagccatttattgagtattcttgctttgattgtctacgtaagcatgtaagactacaacattacgacccatctcttcaagaggaagtctggtattatggaaaaacattttgtcattcagannnnnnnnncttacagtatgcccatcacaaaccaggcagcaagcaaggtattgggtgctactcaatccagtgaagtcttgagggtcccttccctctgtgaagcatataatctagtggggtagactgctagctactaactatgaaaacaacatagtctgacttgagagtggggaaagtggaacaagggagtaatttttatatttttcttcacatttaaaaatattttctaaacaatccaatataatcttttctataatttcccaataccaatccaacatgtattacttggtaaaataatagcatacatatatcgacagactgaagaaggtatactattagagaacatttgcagaaaagaattccacatcttttttttgagacagagttctgctgtcacccaggctggagtgcagcagagcgagactccgtctca

SEQ ID NO: 248716 - DNA, 837 bp, Homo Sapiens
ttgggttttgtgcacctccactttaggtaatcatagggagcacatttacaggatggtctaataacatgaaaacaggctagtttcaagcaacagcaatgtcggttggaaagcaggcgtcatttgccttgaaaaaagccttttgacaacatacaggcattcttttaaaaccaggctgaaacattttatttccgagacttaacgttgtgtttcctgtttcttaaacctagcacctctgtgtatttgaaaataatgagacatctttcattggattttggaaaattgttccccatgggattctaacctcactaccaaatgagtgaaagcttgattaagagttcttccatatactagcctccttggaagaagtgatcagaaggtgataagaaggacagaaaggactattttaaagttggactgaaggagaaaaaagcaaaattcttgtttcatcccaattctagttagaacaaagttaaacccccgtaatcttaaagagaaaatctttggaggttttaattaaacattttatacatttaaagtcttgttaatggtgctttaagtgtcaatgtagcatgtaaaaggctttgtacagacaggtaaaagttccatttctgagtgatgaaatgtaacacttcttcatctttaacttgaaatcaaaactatcagattttatttttgtataatttaaggaaggtaaagttaggggactagaagactctaaattggcttctacagatccaataatttaaatgtaactagttgggggttttatagtttaaattattatttgtgtatataacataactaatctgtaaattgtaataaatatatttgcaatta

SEQ ID NO: 248717 - DNA, 881 bp, Homo Sapiens
ttggctgaatacatgtctaacaattttccttgcaacgttagctgttgtttttcactgtttccaaaggatcaaaattgcttcagaaattggagacatatttgatttaataggaaaaacttgaacaaatggacaatatgtctattacgaatacaccaacaagtaatgatgcctgtctgagcattgtgcatagtttgatgtgccatagacaaggtggagagagtgaaacatttgcaaaaagagcaattgaaagtttggtaaagaagctgaaggaggaaaaagatgaattggattctttaataacagctataactacaaatggagctcatcctagtaaatgtgttaccatacagagaacattggatgggaggcttcaggtggctggtcggaaaggatttcctcatgtgatctatgcccgtctctggaggtggcctgatcttcacaaaaatgaactaaaacatgttaaatattgtcagtatgcgtttgacttaaaatgtgatagtgtctgtgtgaatccatatcactacgaacgagttgtatcacctggaattgatctctcaggattaacactgcagagtaatgctccatcaagtatgatggtgaaggatgaatatgtgcatgactttgagggacagccatcgttgtccactgaaggacattcaattcaaaccatccagcatccaccaagtaatcgtgcatcgacagagacatacagcaccccagctctgttagccccatctgagtctaatgctaccagcactgccaactttcccaacattcctgtggcttccacaagtcagcctgccagtatactggggggcagccatagtgaaaggactgttgcagatagcatcagggcctcagccaggacagcagcagaatgg

SEQ ID NO: 248718 - DNA, 1154 bp, Homo Sapiens
  misc_feature (987)..(1035): n is a, c, g, or t
  misc_feature (1137)..(1137): n is a, c, g, or t
ttgggtgacgttttattacacgtactctttatcagtagtagctgccattccctgagtgttcctcccaccgtgcactgagaagggctgaggatttccgaacatcaacctcctctaaccctctgtatgggaattagatttttatcatcctgactgttggggctttctagagctcaggcaacttgcccctgggcgggatggagcctgcctggggggagtgtgaatgaggcttctgttgtctgtggcttggctctctgtggttggaaacttcagaagcagtagattccaggtgcaacatttggtgcccggacaagttgtaaaacctgaccttggggagggccttcactggcagccagtgtccacccgtgagcccggtgagcacagacgttagagccagggccggcgggctcagaggttggagccggggaccagtgggctcagaggtcggagccggggaccagtgggctcagaggtcggagccatgtccctgccgtgaagctctgagggttggtggtgacatcggggcgattgtggcatcgcgattgtggtgtcttggctgcctttggccggcgctgccactgccctggtttcatgacgtaggcaccacatggtcctgtgttgtctcacttacggctccacttctggcttttttctacttgctcacccttgagataaacttctatttcattttcatttcggtttatatgtgggttttcttccaggtctgatgtttaagctctataatattgcaattgtgatgttttgaagttaaggtgtaatagagccagtgaaccaagggttcaagccccagtgaaatacaaatattcagaattgagccactgtgttgccatactgattatgtaatgtgtgattaacaagtataatgtgtcactttcaacatcagtttcatgccaaagttgcattttattagattatttgggagttcactttgggcccaaaggctcgtgtctacataataataacttatgnnnnnnnnnnnnnnnnnnnnnnnnnnnnnnnnnnnnnnnnnnnnnnnnnctagaccatgccagagtaatctcagctttctttagttactggatcacacatatccttcctgagaagagcagtgactaaaatgggaatatctcttttaaggancagctcctctttaacaa

SEQ ID NO: 248719 - DNA, 454 bp, Homo Sapiens
  misc_feature (428)..(428): n is a, c, g, or t
ggccacgattttcttaccaatccgtccaccaatagacacttaggtcgttttcatagtttggcagttgtggaaatgctgcagtaaacatgggagtatagctatcttttgaagataatgatttcatctcttttttatatgtatacccagaagtgggattgctgcatcaaatggtggttctatttttaattttttgaggaaccgccatactgttttccataaaggctgtactaatttccattctcaccaacagttcactagggttcccttttctccacattgttgccaacattctttatcttgtgttttttaaataacagctatcctaacaggtatgaggtgatctctctcattgcggttttgatttgcatttccctaacggttgggtgatacttgagcatttttgcatacaccgggtcatttgttctttngttgttgacttgagtcccttatatag

SEQ ID NO: 248720 - DNA, 1152 bp, Homo Sapiens
  misc_feature (350)..(350): n is a, c, g, or t
  misc_feature (1070)..(1070): n is a, c, g, or t
  misc_feature (1096)..(1096): n is a, c, g, or t
ccaactttgtacaaaaaaagttggctgatttgtgtgtgcaccgcgtctccagcgatcccggatccactgcgctgccaggggcctgggggtgggtctcttgctgtctctgcgacgacatccttacgtttcggcactctaatgctgggtttgtgcgtgtgtgtctgcttagcggtctagcggtgctgttaggctccctcgcccccagctccttggctcgctcagctcctccaccgcagcccagcagtgagacgcgcgcgcagccagctccccacgagatggaacagaccgaagtgctgaagccacggaccctggctgatctgatccgcatcctgcaccagctctttgccggncgatgaggtcaatgtagaggaggtgcaggccattcatgtgaagcctacgagagcgaccccacctagtgggcaatgtacgccaagttcgaccagtacaggtatacccgaaatcttgtggatcaaggaaatggaaaatttaatctgatgattctctgttggggtgaaggacatggcagcagtattcatgatcataccaactcccactgctttctgaagatgctacagggaaatctaaaggagacattatttgcctggcctgacaaaaaatccaatgagatggtcaagaagtctgaaagagtcttgagggaaaaccagtgtgcctacatcaatgattccattggcttacatcgagtagagaacatcagccatacggaaccctgctgtgagccttcacttgtacagtcccaccttttgatacatgccatgccttttgatcaaagaacaggacataaaaacaaagtcacaatgacatttccatagtaaatttgggatcagaactccaaatgcaactttcgggctcgctggagaacaactaaggggcaccaaaccctctgaaggttttactttaaggttcgctgtatgtttgccttggacaaaaaggctacctaccacgtgctatccagtaatatacttaaataagccaatacttagatctactgtaaggcagatgctaattataaggcattaagtaagcaaatagtgccctcagctactgcagangaaaagtcccacttgagggataaganagtcttgtgatttttaaagggcaagtttttcaagtgctctcataggttcttatccc

SEQ ID NO: 248721 - DNA, 1360 bp, Homo Sapiens
ccataatgaaaataggtttatttgatttttcttattttaacgataatacatacaaattttaagcaatacaaaatggtattaaaaattaaaggtaatgcaaacttcccatctctagaggtgacccatagttattaacatttcaatcaacatccttcccatatataaagtttttatataaatgtgaatatcatgcaattctataacctgcttttttcactaaaaaatatgagttttccttgtcaatgaatatagctatatatcatcttcaatggctgtaaaatattcaacggtgtaactgtaccataattcatttaatcccctcctgatggacatttcaattggcttcagtttttgcaactgtaaacagtgctatgacgggcatttctggttagtcatcttcaaggatttggtttctagaagtgcctatgaggatcctcagtgaatgttctgacacacaggcaaatgcttcacatctcgttacacttatattcccatctagggcattgggaaaatgcttgcttcagacaggtgtaattctgagaatgaagatggggaagggagaaagggtgcttaaggtaccaagcccagcattaacccagcctcctcgggccacacagaagtgagaagtagcacatttgcaatcagtttccatgaggtgtcggcgctgttgggaaggactgggagataaagagggaaaggtgagctgggtcctttcacagacagtatgaacgccaggtggcagagcctgcaactggggaacaatcattcaacagttatctatttgacacctgttttgagcctgaacctttgctggggcccatggagttataaaggcgtaagaccccagagtttagcatttggtggagactgtaaatcacccaactttatcacaagatgcagttatcggcaggtgacacatgcaccagaggacaggcttcagttgttcttgtccatttatctcagatcaggcacgaccctgtccaaacatggagcagagaatcttagccagtgtctccaaagacagagtgtacatccaggcatgtgcgcactgtagcacagatgtgtcctcctatgtttggagccagggatccccattatcttctcccgccctccccttccccctaggctgccaagtactggtggggaaaatcccaccaccttggggcttgatgtccttgaagtctatgggcttcccgtgggccctgagtgtgctcggcaaaagacacgccctccatcaccacacactctccagccacatcttggccccatcctgagatttccaggagttcctccccttttttaaaacttgagttgcttcaaagactttttagggttcctagctacaggagcattcagccaa

SEQ ID NO: 248722 - DNA, 454 bp, Homo Sapiens
  misc_feature (20)..(20): n is a, c, g, or t
  misc_feature (37)..(37): n is a, c, g, or t
  misc_feature (43)..(43): n is a, c, g, or t
  misc_feature (48)..(48): n is a, c, g, or t
  misc_feature (56)..(56): n is a, c, g, or t
  misc_feature (99)..(99): n is a, c, g, or t
aaaaacctccaaacccatancaccaccctgaagaaanggtacnctacnggtccacngaaaactttacggaagtactggaagttgaaaagagaacctgangatcaccctagttccagagactaacgggaaacgttaggtcatttatggctcctcagacacgttaagccctgccataacattttttaaaatccttgaaattagttcccaacacttaattgagagctttcacagaaaaatctagatatgtggcttatttttaaaaaacagaagatttgctgacttaaacactgcaaaattaaacatttatatctgaatccagtatctctttttgctttgtaaatgaggtcaaggatgaaatccagatgttcttcctttgtatttgtattgtcactgtatggaatctaggtatatccaaggaaaaataaacttaagataagcttattttccttatttc

SEQ ID NO: 248723 - DNA, 407 bp, Homo Sapiens
  misc_feature (356)..(356): n is a, c, g, or t
  misc_feature (378)..(378): n is a, c, g, or t
tttttaaaggatacgtttcacttaataaacacgtttatgcctatcagcatgtttgtgatggatgagactatggactgcttttaaactaccataattccattttttcccttacataggaaaactgtaagttggaattatcttttgtttagaaagcatgcatgtaatgtatgtatgcagtatgccttacttaaaaagattaaaaggatactaatgttaaatcttctagggaaatagaacctaggacttcaaagccagtatttgtttaggtcatgaaggcaaaccaatgctctaatcaccaatattaactgttttaattaaaatgttgtaaccaggtattaaaaccgggggatgttagnttattacccaggggtttggtanttcccaaaaggtcctgggggtggaggccc

SEQ ID NO: 248724 - DNA, 416 bp, Homo Sapiens
  misc_feature (393)..(393): n is a, c, g, or t
tttatttggctcactgttctgcatagaactgtataggaagcatggcgctggcatctgcttctggtgagggcctcacgaagcttacaatcatggcagaaggtgaaggggagccagtgtgtcacatggtgagagagagcaagcgagagaggaggaagttccaggctcttttaaacaaccagctcttgcataaacaaccagagtgagaactcactcattactatggggatggcacaaagtcatacataagggatccgcccccatgacccaaatacctcctactaggcccacctctaacactgaatgtcacactttgaacatgagatttgggaggggacaaaacatccaaaccatttcaccacctgaggaatggggtacacttacagggtcacaggnaactttacagagtactgggagtt

SEQ ID NO: 248725 - DNA, 387 bp, Homo Sapiens
agtcacatgaattttggagtttatttttcagagaaggtcattaactcagcctaacttatataccaaaggcacagtgacgtcacacaacctctccagagtcatgaggctagtgagtggcaaatcattaaagcctagaatctgtctcctacctaacatattccaacctgaataaaggcaaagagtgtgtgacagaggtgggaagacgggggaccatggggtcaagggctccatgactgctcaagaccacaaaatagctgcccatggcatttcagacacagtgatgcctggggtggtctgcaggctgccctgatacccgctgccagactctcagtcaccaacctgcgcaggtgctttggggagaggcctctttttcactgtccacagttc

SEQ ID NO: 248726 - DNA, 408 bp, Homo Sapiens
  misc_feature (20)..(20): n is a, c, g, or t
  misc_feature (40)..(40): n is a, c, g, or t
ggccctccctcctgcagtgnccctgaagcctttaagtttnatgatagagccctgggtcagggaagggctaagatttaagtcaatgcagtgtttgttgaaaggatcgtgaaaatttgaaaaagattgctgcctttgtccatctcgatactatgggtatgaactatttaattattcatgggtttaaaaaataacagtggtacattcaagaaagccagtcagagccattgcattcatttgagtcattaaatcttcaatcaatagcatttatgttttggggaggatgccaagaaatatttctaaggagtctttgatttcactccttggaaatctgtcgtgaacagcgagcacatccctgccttatgtcctgctcagtcatgagcacttagggaagctgagagggagcagatg

SEQ ID NO: 248727 - DNA, 700 bp, Homo Sapiens
  misc_feature (134)..(153): n is a, c, g, or t
  misc_feature (322)..(349): n is a, c, g, or t
  misc_feature (670)..(670): n is a, c, g, or t
cttacctggacttgttgctggggaactgctatctgatgcccctcaatacttctattgttatgcctccaaaaaatctggtagagctctttggcaaactggcgagtggcagatatctgcctcaaacttatgctttnnnnnnnnnnnnnnnnnnnnctactaaccactgcaagctcttgtcaaattttagtttaattggcattgcttgttttttgaaactgaaattacatgagtttcattttttctttgaatttatagggtttagatttctgaaagcagcatgaatatatcacctaacatcctgacaataaattccatccgttgnnnnnnnnnnnnnnnnnnnnnnnnnnnncctttaagtaagctctttattcatcttatggtggagcaattttaaaatttgaaatattttaaattgtttttgaactttttgtgtaaaatatatcagatctcaacattgttggtttcttttgtttttcattttgtacaactttcttgaatttagaaattacatctttgcagttctgttaggtgctctgtaattaacctgacttatatgtgaacaattttcatgagacagtcatttttaactaatgcagtgattctttctcactactatctgtattgtggaatgcacaaaattgtgtaggtgctgaatgctgtaaggagtttnggttgtatgaattctacaaccctataataa

SEQ ID NO: 248728 - DNA, 952 bp, Homo Sapiens
  misc_feature (597)..(597): n is a, c, g, or t
actcaaaagtcaaaaaagtttttatttttgatatataaaaccaagaaaactttaatacataatatgcatagttttgttttttaaaaggagaaagtggcagaagtacagacctgtgtagaaaaaatacacccaagcagctgttctaagcagtaattcctaaaattatgaatagcacacaaatctcagtgaaagcctcatttcttaaaaaaaactcacatttgcttaacaacttaaaatgtgataagaaatataaccttctttcttgatagccgacccagttatataacagacattcaagaatcagcaataacttagtaaaagaacatttcctttgtgagggtaacattattagttttagttccacaaaaactgcttctgactgctggggcactgaacgacatgcccttcatcagagagcaagtccggggggtgcggatcctcaccggagaggtcatggggaagcatctttggtcttctcttgcttaggaacaaagggccagcaatccattgcatacaaataacatcaaacacaggtgcaggaattcacaactcctcagcaaaagctatttcttacaaatagaacttgcttttcacttnaatattcagacaaaatgcaaaatgctgagatgcagttttccctcttagcagttccatgttcacgaagtcaggacagttctgccactgaccagcaggtggtgctggaccacaaggagaagcagcgggaggtacgcagctccgacaacctagaaaaatatttctttacctgtatctgtatgaaagatttggtcagagttctcaaagtataaatgtaacattttattcaagcaaaacacattatataaaatttaattgtatcaaataggaatttttaaaattactaaatatataaacgttgctggaagatcaacataaagtgaggatgaatttagtatttgttaaaaatcactaagtt

SEQ ID NO: 248729 - DNA, 726 bp, Homo Sapiens
  misc_feature (20)..(20): n is a, c, g, or t
  misc_feature (59)..(59): n is a, c, g, or t
taaaacctttatttaccccnaattcatccatgtattctgatacgttcagtgaaaaagcnaggatcattggggctgttctctctatcaaaggaaagagctccgatcacctacattataattttctgtgcttattttctgcaggggaggaaatacacatctattcaacgccacactggacgttacaaaatgcatgcatattctgccccagtgctatctgttcattaccgttttgtctccttaaagaactatctaacatagtgtttcccaaaatgttctccacaggacattagtgagaggttcataagtatcccaaaggagaaaaaggtcctggtgtcaaaatagtttgggcaatgctgggttagacagtttttcactaccggatgccaagcccttagtgcgctaaagtgcattgtaagtttccaggtgcaaaaaaaggtttcccagcaacaccatttctataaaacactgatgaacatctcacagagcactcatattacatggagtgctatgggaaatgcttttccccatccaggttactggcaattccacaatttgggcttacattcattgtaatcccagaaatattttctccatttaccctcaagactttgtgaaatttaacagattccagaaggaagactcgaagccatctcagttaacagttctacacatttcccactagtttttgcctttgtttttcatgcattttcagagtgcacaacttcc

SEQ ID NO: 248730 - DNA, 790 bp, Homo Sapiens
  misc_feature (753)..(753): n is a, c, g, or t
  misc_feature (759)..(759): n is a, c, g, or t
ccccagcaactttgacccaaccactttgatccaatctggagctcacaaaaacgtgttgtatgaaatcaaggtttaagggatctagtgctgtgcaggacgtgctttgttaacaaaatgtttacaagcagtatacttggtaaaagtcattgccattctctagtctcaataaaccaggggtacaatgcactgcagaaagccacagggacctctgcccttgaaagcggggtattgtccaaggtttctccccatgtgatagtctgaaatacggcctcgtgggatgagaaagacctgaccgtcccccagcccgacacccgtaaagggtctgtgctgaggtgaattagtaaaagagggagcctcttgcagttgagatagaggaaggccactgtctcctgtctgcccctgggaactgaatgtctcggtataaaaccggattgtacatttgttcaattctgagataggagaaaaaccgcccctatggtgggaggtgagacatgttttcagcaatgctgctttgttattctttactcccactgtgatgtttgggtggagagaaacataaatctgggcttacgtgcacgtctagtcatagtactttcccttgaacttaattatgacatagattcttttgctcacatgttttttgctgaccttctccttattatcaccctgctctcctgctacattcctttttgctgcaataatgaagataataatcaataaaaactgagggaactcagaggccggtgccagtgncaggtnccttggtgtgctgtgtgtcggtgcccctggg

SEQ ID NO: 248731 - DNA, 1335 bp, Homo Sapiens
tacaagttttaaaatgaccacttactctttaattatttactaattgctagtgtactcagtgtggaaaagactacagattacacactcttttcattcacacttgtacatatagacagcaatgttattaggagcattaaattaaaaaactgaacagcctaatttaaatgtggcttgggcctggtagaagtttgaccaaatggaatggaggctgtgagcaatgtgaggattctatttatttatttacgtttgataaaacttactggaactagtactaccatgcgtattccctgtccaaagcatcactgctttggtatagtataagttcatgaaattctggtgggtagaaagaaatttttatttctatcagcagtactaaaatgtatcagccaaccagagaacatcagtgactttaacttctgcagagtttgccccagaattcagagttctatttagaggaagttaaaacaacaacaaaaaacaaccatttgaaaaatttttgtcaccagcaaaacttttcactaattagtgatatgaaatgtgatttttgtgttgttaaacttcagctttggaaaactcagtctctttcattatcatccattccaatttgaaggagttgggcagctaatttggttaaaggcagtcttgagggttagaagtattacttccttttcgggttccagaacctagcttgtgaactgaaagttttagaaaaaggaagtacatctatagccgaattgataaggttattactgtgttttgcacaaagtatattagtcaaaagtatttgctggaattattggtagatggcagtcccactcctacacctgctttgtcagatacagctgggttccctggctgactctgtaccttacttacgctacttacttaatagaaacacaaacttggaaattgtgccagtggtccagctggagcacaacgtttggtgaatatgctgtttcctcagttcagagaggtagcaactaggtaaactccttataaaaagcaaatacctggatttacaaaagtgaaagtagttgttcacaaaagaattcgccatggaattctttcagttaccaagctctcctggtaatgtttgtggttatatcatttacacaaaacttttcaggaacttctgtgttgtttaagcaagatgtatctgtactgatgtctcagtgaatcagtctgtttattaagcacttatcagggcttccacacacttatttattttgccctagttaatcctgttgtttgctgccattggcatgaaatggccaactgtggctgtacagttctgtcatcaattataactgtaaccagtactccaacggtccgagc

SEQ ID NO: 248732 - DNA, 1490 bp, Homo Sapiens
  misc_feature (406)..(420): n is a, c, g, or t
  misc_feature (425)..(462): n is a, c, g, or t
  misc_feature (464)..(492): n is a, c, g, or t
actttgtacaaaaaagttggcttatttaatcttttttagaaatgtgggtaatgaattctatctaataagtcaaggaaaccagaatttgacacactccaacaatccaaaggggcatgttgctcctgagcagcatgaagaactgaccaaattggttttgatgcttgggggatcatagagtatttatgtctgcttttctaaatctgcattataatagctctaaaatttgttgattggtaagaaattgggcattgcttggctctttaaacacatcagtgcttccacattcacctatgtatttattattcaaaagtgtcattttaatatttattgctaccttctgtgaatgcttagctcctgtcgggttcattaaggagaaatgtgtctgaaagcacagaactattattannnnnnnnnnnnnnngagannnnnnnnnnnnnnnnnnnnnnnnnnnnnnnnnnnnnncnnnnnnnnnnnnnnnnnnnnnnnnnnnnngttctgtgttgatgtacagtttctcctaagaagaagcgaggtggttgaattttggaagcacttcttgaatcggattaacccatgctcttattgaattttttcatctgctctgtttagtttgatattaaagcaaaattaagaggtcttagtttttcctatagaacttttaatatgtcaaaagctatattgtctaaatttcagtacttaagcaaatactgagtagtgttttaaattcagaaatagagcttctattatgaacacatgagaatgatttttttctcttaatcattattaaggaaatattttaatttcatggtcatataatggtgataagtaatacctgattgtttccttttctgttctagtaactcagaggagatacgtgttttatttgtgatagcaaattcctaaatgaacattaggcaagtggtatcattatcaggccagctgcagcctcttgccttgacctgcattcctagaatttctttgttgctgtaattcttgattaagtgaccttgactttcattttgtaattttgctaatcatcagcaaattcacttgcatgacggttactgccaaatatggaagggcagttgaattattatgagtgattgtggcagaggtttgtgccatggtgaaaactttgatgtttgtctgtgttcattggatccatctttttaaatgacattaccatgagtctgttgtcaaacctaaatatctttgtttgaatttaaaatgggactctatattgttgtagttcaggtcttcattgactaagagattgagagaaatctgacataagaaaatattgttttcactgcaggaataaagaggaagtaacagtgaatccaatatagttcatattgttattgtccaatcatcaagttaactaagcattatcagattacgtttatttctcatacatatggatattaacttaaggtaaaaaagctggatgtgaaggatctgaaaaagcattaatttatgtactaattcta

SEQ ID NO: 248733 - DNA, 1533 bp, Homo Sapiens
ttggatcacctgcgcgcctgagaggctcaacttccctgcttctgcctgtgccctcaaacgggcagcctggctgctgcggggccgtggggtcttccacaacggtctcaagatctgcgagaagtttgggcccaatctggacacgtgccctgaaggcaccatcctgggactgcggctggacagctctggggggctgcatcttcatgttaatggggtggaccagggggtagctgtgccagatgtgccccagccctgccatgcgcttgtggacctctatgggcagtgtgagcaggtgacaatcgtgaaccctgagccaggggctgccagtgggaaaagtgctggaacccaaggggacatggagaaagcagacatggtggacggtatcaaagagagtgtgtgctggggtccaccacctgccgctagtcctctaaagagctgcgagtaccatgccctttgctctcgcttccaagaactcctgctgcttcctggtgagtcccacagtccgccagaactgacttcattcccagggccaggcctagagccttggagagcagctggagggtgccactgtggttgaggtgggagccacagcaccaagcctgctactcactgtcccgcagaagattatttcatgcctccgccaaagcgaagcctgtgctactgtgagtcttgccggaagctgcgaggagacgaggcccacaggcgcagaggggagcctccccgggaatatgcactgccctttggctggtgcaggttcaacctcagagtgaatccccgcctggaggctgggacactaacccaagaagtggcacatggcatatcacggggagcaatgtttgccgctgtacggagagtgctggaccgaggggagctgggagcaggtactgcctccatcctgagctgccgtcctttgaagggagaacctggggtagggttcgaggagcctggcgagaactgtgcacctcctcgggaggagcagccccctcctgtgctgctttccccctcccttcaatatgctggggcggagaccctggcctccaaagtgcaattccgggaccccaaatcccagcggacgcaccaggctcaggtggcgttccaggtgtgtgtgcgccctggctcctacaccccgggacccccttccgctgcccttggagaacctcctgaccctcacttcagtccagccgaacttgagtgggtcactaaggagaagggggccacactcctctgtgccctgctggtacgggtggaatgaggggtgagacaccactactacaagcacagtcgggccgcgggcctttggactctgagtggcgactgcctccacctcattcccgtgactcgtggcatgcgcaggtgctggagcttggcagccgcgcaggagcatgtaggcaggctctcagatgtaggtggcaagtggcacagctccatgtccggaggcccagcactccgtcttgatgggaggagtcgtgggagcccagcttcagggccctggtacccctcttcatgtcactgatttgggggaacatgattcctttt

SEQ ID NO: 248734 - DNA, 892 bp, Homo Sapiens
  misc_feature (274)..(274): n is a, c, g, or t
atatttctttgatcctccacccttaatctttcagaaaggcatgtctaataaaataatccacagattgaatcttgccagagaaaaagatattctctggtccctttctcacagtggggttctccatttggaaaaataaatatataaaagcacactgtggatttatgcgctagagaagagggatggcatctagagaggcatcaagctagtacccagaacatccacagatttgtttccctggtctaatgcctaatttactataaatcacatcctaagnactaggattctacacaaatactttcgcaaacatttacaagtgatcggatgaccttatatgggatatctttgcacacaagacagataaactgtaagctgaacactaggatagaaggctgttgatcactgttaggttagaggaaaagtttcaactagaataacacagagttatgtcctcctggctctagacaaagaattatgccatgctcagtattttctattaacaacttacttttaaaactggctatcaagaagtattcattccctactggtagagatattcatatttaggctgggcaatgctcaacctcggtttcaaaaagcaattacctggagaacgtttctagcacagggagaataaggaagagaagtaacatttgacaaggtatgtacatatgtgtgtacaggaggagaataaaccatctccttcaagtgcctttttttaaaacccaagtgctttttaacatcattttcaaactgccagaaatttacttgagacttgaaagcaccagacaggtgtcatgatgctacttttagcgatggcaacttggattaaaaagagccaacattatatccaaccaactcttggctctagacaatgaaggtatggtggagccaa

SEQ ID NO: 248735 - DNA, 988 bp, Homo Sapiens
  misc_feature (512)..(528): n is a, c, g, or t
  misc_feature (551)..(712): n is a, c, g, or t
  misc_feature (938)..(938): n is a, c, g, or t
ttggctcacctttcaagggcttttgtgtttttccatgccgcatgccatatgatcagatgactttcattatgagtcttgctagcattacatttaggcagtcctcaaacaatgaggaaaagtaaaacactgcctcagaattttcactccctgtgtcatgtcattttgatgatcaaagtagcttcactagtagaacacacttacggaaacaataatgtctgtaaagctttttacctctaatatttgagcatgaccagtcttggtcattttgttactaaaaagtgtggaaatatttatatttaacatactttttttgttcaattcagacatactgtcaaactagacaaggtaactagaggctgttaatgataagaaattttttttctgtactagcataaaagttaatttctgctggagaataaactttttattgttgacttttttccattttattattagatttctttacctttcctgtcacaatttaaagataagccacacgcttctctctaagnnnnnnnnnnnnnnnnngagacagagttttgcttttgtcnnnnnnnnnnnnnnnnnnnnnnnnnnnnnnnnnnnnnnnnnnnnnnnnnnnnnnnnnnnnnnnnnnnnnnnnnnnnnnnnnnnnnnnnnnnnnnnnnnnnnnnnnnnnnnnnnnnnnnnnnnnnnnnnnnnnnnnnnnnnnnnnnnnnnnnnnnnnnnnnnntatattattttcactggaagttttgaaattccagaaatatgcttggaaatccccgcttgaaatctccttggttggaaaccagtccagtgggtgactgggcccagaatgatgcttctcctcggtggaccccctgggctgagcagcctgtgttcctgcctcaactcccctgaaccctcctgaactttctacacacatgtggggcactgggctttgatactgggcattngggaaggggcacttggggaaattcaggaggaagttacccattatttaagg

SEQ ID NO: 248736 - DNA, 1094 bp, Homo Sapiens
  misc_feature (966)..(966): n is a, c, g, or t
  misc_feature (1012)..(1012): n is a, c, g, or t
  misc_feature (1049)..(1049): n is a, c, g, or t
  misc_feature (1071)..(1071): n is a, c, g, or t
gatctatggcccaaaaggaattaggggaacctctccttcttttggtaagaaaagcaattatgtcaatttagaagacagtatttttaaaagtaggtatttaaaatttattcacttttaggggacttaacattttattatttatcttatttttaagagccaaatatttccaaattgctttaaaaaaaactcagctatacatttagaacttgatagtacccctcaaaatttttaggttgtgttttctcctcccagcatcacaaaatagccacttatttcaagtacttctgatattgaatataaggcttgatatgaagaagtatagcctattatgattgctaataatgctaaaatgttgctcagtttgtctaagccattcactcagctaatactaatgtagaaaatatattttaaagtctaattactaatacatagccaaaggaaacccataaacttgataatccataaggaaacaatagtaaaaaaatgttttggggcagtctgcaaaacagcaattttgtttaggaaaagtggactttgttatgcttttctgcatggccaaattataccagaagataattccatagagatgcagcaatcaccttttttaaagatttcattaaatgaagatattcttgttttctgtggtagtctttattattattttttagctattgatacatagcatggcagcaagattacatcagtaatgtaatataatacagcttttttcattgaagctttgtaccttactatactctaggctatttggagtgttcccccacttgcactaaagtacaactatgatgtctctactgcctctcccagtgaaatataaaaatattgcactacattacagatatagtttacaaatgtcattaggcaggcattactgaggctttctataattgtgggtctacagaggttaaatacttttaaaacatgaggtaggattcttataaaaccaangttttggcattatttcaacaggctctttcaaatggcatcagtttcnggcaacaggctggggggggatccagggaaacttcccnggggggtttaatccaataaacncccgggctacttacagggggggc

SEQ ID NO: 248737 - DNA, 226 bp, Homo Sapiens
gatccctagattttccacagaatgagcctcagatcaagaatcagtttaataagaagctatcaggaagacttgaaaatacaaaacagcaattgcagctgcctcttcatccttcatgggaagcaagcagaaggcgataaagaacagcaatctaatattgctgtgtttcaggggaaaaaaattacgtttgatgattgattagtgcctctttctgcaaacttttccatct

SEQ ID NO: 248738 - DNA, 379 bp, Homo Sapiens
  misc_feature (36)..(36): n is a, c, g, or t
  misc_feature (62)..(62): n is a, c, g, or t
  misc_feature (205)..(205): n is a, c, g, or t
ccccgtccccttgtaaaaatgtaccccattcccccnggcctcacagactgggagtgattttnctctcctttggagcctcgtcccagaatcccatcagccctcacacacatatttaccctgcaaatcattggaaaagcaaaaatgtttaactgcatgtataagatggttgtcatttgccttgaatacccccttgaaaaatgttgantcttgagcatcagtgggacatagaggtgtctgaagaaccattttacatgatttcataaataggaggtctctgcattaccatgtttgcttgcaaagtggaaaccttttagatgtgtaacttgaatatgtatcaagatctcaagtgcttaatgataaggtgttgacttgttaaata

SEQ ID NO: 248739 - DNA, 538 bp, Homo Sapiens
  misc_feature (16)..(16): n is a, c, g, or t
  misc_feature (79)..(79): n is a, c, g, or t
  misc_feature (82)..(82): n is a, c, g, or t
  misc_feature (131)..(131): n is a, c, g, or t
  misc_feature (140)..(140): n is a, c, g, or t
  misc_feature (160)..(160): n is a, c, g, or t
  misc_feature (334)..(352): n is a, c, g, or t
  misc_feature (432)..(432): n is a, c, g, or t
ctttccaaagaaattnctataaggcagtgtatctaggcagggattatgcttaattgagatgcacacagtttaacatctngtntcaaacctggcttccttctttgtgaccaccctatagatgtttgcttttnggaccactnagtaaaccaggccctgagantccaagcatgaatcccacttctgcccctacttttaaggttttacgttccatgcaggaaagcagataaccataatttctgaataaataagacaacaaaatgaaatgggatgctggtcaactctgatgcaaattttaagaaggagactatgcctctgtgtctcccagcttcacagnnnnnnnnnnnnnnnnnnngaaagatgctcagagtggggtacctacacttggaaaaaacgcaagtataagtctgccattcccatgaatccaagatgaancctggcacagagtaggtcctcaaattttgcaaaattaattttgaatctttatcaccctggccaatgcactgccataatgcaaatcttactatctacctttctatgt

SEQ ID NO: 248740 - DNA, 176 bp, Homo Sapiens
  misc_feature (18)..(18): n is a, c, g, or t
ggaattttattaaacatngtacgtttctttccgatcagttgggtgctatgtgctcagctttcctgctgcagcttcatttaatgcagagtggtgtttgaatttggcttagatgggctggcaggcatgattttaaaaaatgtaatcatcagtaagaagtacttccatgttaaagatgc

SEQ ID NO: 248741 - DNA, 820 bp, Homo Sapiens
  misc_feature (775)..(775): n is a, c, g, or t
  misc_feature (802)..(802): n is a, c, g, or t
aacctataaaaagacaactttgtacaaaaaagatgtttcactaatgtcattggaaaaaagagaatccctgttgtactttatctttttgtaatattatttttgaatttttcattattatgttgcttttgaaatttgatgcattcctcccatttactttattattgtacacatttaacacacagtagcaaattttgaacgatgtgattgatataacctaacaaatctgagccagttattattaaagttgcagaatagaaacttgaagtgctaaatggaataatccaaaggaaattttttaaatgcaggttctagctgaaaaattcaactataagaaaattgtatttatataacatttactatttttgaagactagtgagatttctgtaataattttaattctttaaaaagtgaaagcttgttgtaaagatattttctttttgttattagaaggaaatacaaagagaaaaatttctttctttcatgggcatttgataatttcagtctttgactgatttgtaagcctagaatatactaagctgaataacagctctttggcctcagaattttcagtagccagtatttctgattaactaagttgaaactcttattagaaactttcagttggtgatattgtattctagaagatataaatgagaggtttggcttcatctcagtttagaaatttattcaaagctaaagatgtatatatacatatacttttgtgtgtatatatacacatatgtgtgtatgcagttttgtcaggttatatatagantttctattaagggattttttaaatggncaagcattagtggggttg

SEQ ID NO: 248742 - DNA, 868 bp, Homo Sapiens
  misc_feature (276)..(324): n is a, c, g, or t
  misc_feature (352)..(362): n is a, c, g, or t
aataaaaggaaacacttatttactttctattgagaatattaaagtaaattaccacataccttgatttttcctcatcaattaaaacaaaccgttccactgccgtgtcagactaataacttagtcaactacagaggttctgtgaatatcagagtatacacttagggataatgtaaagaatttactgcttttaaaataagcagataggcagggcgcagtggctcacgcctgtaatcccagctactcagaaggctgagacagagaatcgcttgaacgcannnnnnnnnnnnnnnnnnnnnnnnnnnnnnnnnnnnnnnnnnnnnnnnncagagagacagagtgggagactctgtcnnnnnnnnnnngcacacaaacacacagagagaaatacgggatatcatgatttggaactatgcggtttgaataaagccacctatttaagactatatgaaattgttccccaaaagatatcatttggttctaatcacaagttagccaggttttaaactatcattaaaagcagttggaactcaggccagctgattcccagtaagatctagagcacaccattgctttcaaagccagagtcagtacttttggcctgaatggccattgggtctctaatgtaaccactcaacaggtagaggaatggtgtgaccggatttagcccatggactgaagtttgctgacctcctaacaaatctgaaaccaaccagtttcacatcagtgacaacagcagcatctattcctgttatttccaactcctcagtttctaatcactatctagcctagaaagccaaaccaaatcactaatatttatatattcactctttcaaaccccaacttttttgtacaaagttggctttatggg

SEQ ID NO: 248743 - DNA, 415 bp, Homo Sapiens
  misc_feature (325)..(325): n is a, c, g, or t
  misc_feature (335)..(335): n is a, c, g, or t
  misc_feature (391)..(391): n is a, c, g, or t
ggaatagagacgtttgtcttgtctgtcttcaacctacttttccttttctctttttttgtttctcatcctctctgtgccacctctccacccaggaggccatgtagcatagtggaaaaagtccctgagggcggttaggagttctgggtgaccatcctgggctcagctcctaactcaccatgtgacatcaggctatccctattccccctcttgggcctcagtttcccgacttgcaaaataagcagaaagaaccagatgctctccagggtctttttctactttgctatcttcatggggtcttcattttctcttatttttgttttctctnggatcttttnccatctgaggggtacagggaagtaccagggacctggttttcaggttttttgaaatncctgccaagcacatttccaagact

SEQ ID NO: 248744 - DNA, 1831 bp, Homo Sapiens
  misc_feature (362)..(385): n is a, c, g, or t
  misc_feature (1749)..(1749): n is a, c, g, or t
  misc_feature (1756)..(1756): n is a, c, g, or t
  misc_feature (1769)..(1769): n is a, c, g, or t
  misc_feature (1790)..(1790): n is a, c, g, or t
  misc_feature (1795)..(1795): n is a, c, g, or t
  misc_feature (1807)..(1807): n is a, c, g, or t
ttggcatggtggtagctccagaggcaggcagaggaaatattgtcagagactggtgggaggaagcctggggagtggggtgcaggaaaagccagagaagccggtggagagcagcacctttaagagtcctctctctctgcttgccaccctgctcagagctttccacccacagggagaagcacaatcaggaacagtgagtgctcctcgcccttctgatgtgggggaggctggagctccatgcacgtagtccagatgcctgggaaggaacatctcccttccagcatctgctggtagcaggctgggacagtcccttccttccctgaaaccctgctctattgcaattccctattatattctgcatcagnnnnnnnnnnnnnnnnnnnnnnnntttaaatgcttgtagcagaaccccgggtcatctcatgtcagaaacctttaatccaggcctaaatttgcatagacctgacattcagctgccttgcagttgcttcctcccatgagccaaggtggtgtcagagggcaactggatgactcgcagtaccacagcactgggacagacagaagccacacctttcttttgggtttttgccaagcctcctccatctcccatcagtgctgtgggctggctgcaagcctcgaaacagttctcctggaagggaggtttttgctttacccccgccagcacttccgcacacaatcatagagaacctctctgctctctgctggcctacagcttgtctgtttctcaagcagaggcaggaagagctagtcttagcatttatattttaatagaaagttgactctcagcatgtaaaagtgatccacgcagccggagtgtatgccgggagctaagtggtctatgggtgaacatatcccaccttgcttcctgagtccttggtcccaatcttctcatttgttcctctcgttttaaattttttccccccaactcttttgatgtaagagttcagtttgtcttcgggagtgggtctctgcaagggctctgggatgagtcttggcttccaagaggacaggctattaggttcttggacttttttctgtgctaccgctgctgcttggtggaagtaacaggacgtggattctgcctcataagtggcagtttcccttttctctctgacttgtcctaggccgatttctctatggcttccctgagaaaggtgaggcccaaaggagagaggccttcaaactgtcccaggtcctgcgcagctcagtgcgtatcttcttgcttccatgtgtcttttcccctgctgcctcactccctacccccacttgccaggtgtttgagccatttctacaccaaagcaaagtacggcctcaggagggagtaaaaagggtgccatctgtgtctggaggggcagctgtgttcatgccctgtgctactggacatttcacaattctggcaccttgcgattggtcagtcaacctcagaaagtaactatcttgaaggtttgaaaaacaaccaaagaaagggagtgaggactatggctgcatgtcctctgcttgccctgctgcagagcagagtatgtgcagccctctggtcagctggtccaggctggtccccgccggtccccttccagtccagcccaccaagagtccacttgtcccgggcttccacctggctgacaggaagaatttctcgagagcttgatgtgcatgccctgtggacgaaggtacagctcgcctgcctgccccaatcccagccccgacaatcacatgcagctgactcggacactnggccttnggaacaatgtttngagagaacacttggccccttngattntaggagccaganggggacccagggtttttcataagg

SEQ ID NO: 248745 - DNA, 1090 bp, Homo Sapiens
  misc_feature (320)..(359): n is a, c, g, or t
  misc_feature (1047)..(1047): n is a, c, g, or t
  misc_feature (1063)..(1063): n is a, c, g, or t
ttggcacttaacacatttttttaatggaatctttgtttttgttctccatcttgtttgttagagtctctcggcctttatttacaaattccttgcaactagagcgctccttccccaagatatggtagtgagagtaatttttcattgtagctgtagtctccatcagtaacagcaggccctggaagacttgatcacctttttctgtgtcattttcagtcaaagagggcctctcttacatcttgtttgctttcaaatccccaaatatcatctccatctcccaattaattttattgtctctttcctctctattcgctttctcctgnnnnnnnnnnnnnnnnnnnnnnnnnnnnnnnnnnnnnnnngtttgatatgccaaggacagattttgaaacagacttggtaaatgttttccttagctccttcatgggcatgctggtgaaagaataaatacatccaattaaagctcatgctggggtcggggagaagaggatactgaaacatttgtgaaatgtatgaatgcacttctgtaaccagatacttctgttcttctgttcaaattgtggggtttttgttacagttaggacgcccatgaagatttaggggtgaaaaaaacagcagagtatttattaaactacagcattgtacaattagcttagtaacactatggaataagctaaaacatatcacagtttttacatgggccaaaacatgaattgagtatgtggtcacatgaaaacacggatgaatgaataaaacactctttggtggtgactgaggcatcattagaaggcccagacgatttccactattcacagcatttccttttctcagaaggactctttatatttccatgtaaatctagatctttggagcatttaagatggaattacattttctagggagcattttaaaggaaaatgttttggctttttcataattttatgtcttacagtatggaattataatacgaaaatcttttatatgagttttggcttcttggtatttgtacttattcaggggaaaaagtctttcgattacttatgccctctntagagctttaatttcntgagaatttcaaccagtccttttcacc

SEQ ID NO: 248746 - DNA, 931 bp, Homo Sapiens
ttggcttttatgttgaagtggagagaaggtctgtgcaaaaaagtgatcagcagaatattaaagttccaggcaacttgacttcggtgctacttaacaacttacatcccagggagcagtacgtggtccgagctagagtcaacaccaaggcccagggggaatggagtgaagatctcactgcttggacccttagtgacattcttcctcctcaaccagaaaacatcaagatttccaacattacacactcctcagctgtgatttcttggacaatattggatggctattctatttcttctattactatccgttacaaggttcaaggcaagaatgaagaccagcacgttgatgtgaagataaagaatgccaccatcactcagtatcagctcaagggcctagagcctgaaacagcataccaggtggacatttttgcagagaacaacatagggtcaagcaacccagccttttctcatgaactggtgaccctcccagaatctcaagcaccagcggacctcggaggggggaagatgctgcttatagccatccttggctctgctggaatgacctgcctgactgtgctgttggcctttctgatcatattgcaattgaagagggcaaatgtgcaaaggagaatggcccaagccttccaaaacagggaagaaccagctgtgcagttcaactcagggactctggccctaaacaggaaggtcaaaaacaacccagatcctacaatttatccagtgcttgactggaatgacatcaaatttcaagatgtgattggggagggcaattttggccaagttcttaagcgcgcatcaagaaagatgggttacggatggatgctgccatcaaaagaatgaaagaatatgcctccaaagatgatcacagggactttgcagagaactggaagttctttgtaaacttggacaccatccaa

SEQ ID NO: 248747 - DNA, 296 bp, Homo Sapiens; identical to SEQ ID NO: 179843

SEQ ID NO: 248748 - DNA, 461 bp, Homo Sapiens
  misc_feature (201)..(201): n is a, c, g, or t
aatacccatcaaattaacaatacccaatcactagcactgaagatggctttgaactagaccctactgagaatccacaaaagcagttttgatagtcttaagctattaatagctaagtgtcttaaaatggagggttagggagaatgtgtgggtaattagagcaaaatcatctctcactttccacctcacctttaagacagctcncaaaaaactgagtgcctgacatgtcaccatatttcagccctattcaaaaatagcccaaaatgatgagttttcaactttaaattgtatgttctcacaagttttggacatgtctgaagtaaaaagctaaggtacagtcactggaccttattttgggtgcacttcaattatgactgtgactttagtggtgggttagtatggtttattgcaatgatgcttttttaagccctttaatacagatgatgggtaccatggatgccaag

SEQ ID NO: 248749 - DNA, 333 bp, Homo Sapiens
  misc_feature (17)..(17): n is a, c, g, or t
  misc_feature (47)..(47): n is a, c, g, or t
  misc_feature (67)..(67): n is a, c, g, or t
  misc_feature (82)..(82): n is a, c, g, or t
  misc_feature (138)..(140): n is a, c, g, or t
aagcagttaaaaatgtnctgttacctaaaatttgttaacgtgcctgnctgtgtccctacatcctcantcaggcattagtttncaagttcccattttccccccagcaccgtgtggcaccttccccagaaccctcacatnnnttttctaatattcacagggttattgtttgtaaaaaatctatttatttgctttattccatcaagtaatttattttcatgagatttcttggaaatgtggctctacatatcgttagtacaagtaatacattttgattgttgtttcctggaataacttgtattatttgatgagttaaataaaatgcctaattctaaa

SEQ ID NO: 248750 - DNA, 403 bp, Homo Sapiens
  misc_feature (383)..(383): n is a, c, g, or t
ggtggttgtggcatgaacgcctcccaagcatgggttcctttgcttctaggaaattcgcccccgtctgcagcatctgtgaaaatcccatcatccctcgggatgggaaagatgccttcaaaatcgaatgcatgggaagaaacttccatgaaaattgctacaggtgtgaggactgcaggatcctcctgtctgtcgagcccacggaccaaggctgctaccccctgaacaaccatctcttctgcaagccatgccatgtgaagcggagtgctgcggggtgctgctgagagtgcccgctgggagttggaacagaccactgagccccggctggggcactttccctggacttggtttccctttcctaacctgcttttgcacacttttccttntgagcctccatgggagacca

SEQ ID NO: 248751 - DNA, 420 bp, Homo Sapiens
  misc_feature (127)..(127): n is a, c, g, or t
gttatttcttacaaagctgctgaaggtaagattatcaaaattataaagcatttttcacactcaagtgaaacaaggttgacaaactcacttcgtcaggtcacatgcctatacatcacttattatattngggtctgaaacttctcacatgtttgggaggttttatgtgtcctcattgggaaaatgggtgtaattcagcataaaacctcatatgattgtcctgcctcatggagctgttgtatagatcccagatccatcccatgatttgttcctgtctgaggcatagaggcaggcaagcccgtggactttgcacatggtgactttcccactgtgcccatgatacagtctgcatcttatagcagtgccctttgtcctcagggcctctgctggcagtctagaccttttgggcagaaaggagccttc

SEQ ID NO: 248752 - DNA, 586 bp, Homo Sapiens
  misc_feature (76)..(76): n is a, c, g, or t
  misc_feature (87)..(87): n is a, c, g, or t
acatatgcaaaataatcttgtttattagaaaatgaacattcacaatgtaaagtagaaattaaattacaaataagtncttcaatggtncaaaaatggtgcccggaatttcttctcaaaataagttaatctattcttaaacagatgcaggtaagtagtttatccttgtcaaaacaaaaaattaacagatttcactttatgtaagagataaggtttatatgaacaagaagagtttatttttaaatgtaaagctgaacaagatagaatggagatgctttgtgaagttataaatcccttcaaaatatgaaaatcatcctttcaagtttaaatttgttttcaaaaacatattttctcttcttaaatatgtactactcttaacaatatatcataccttaaaatctcctgttgtcattttctctttatacgcaacttggcctactcaagaagacatcaacatggtgattttttttcctcaaactttatctccttgctcttttcccaatcccatgttacttcctttcgccttcttttgtgccaagatgagcaaggtataatcctccaaagaagaaaatgctccaaagaaaaccaa

SEQ ID NO: 248753 - DNA, 913 bp, Homo Sapiens
  misc_feature (700)..(700): n is a, c, g, or t
tgtttggcatcttagcacagaccagggcacactgggtgcctggagcatatctgtgcaatggaataagctatggggaactttaaagatgctacaagaagatggatgctcccgacccacatttcctggcagaaaacttcctgacccacccaggcattgttgatcaactccttcccttgctcatcaccactgtatcttacttatcacacgatttgcaatcctgaatttgccttcccgtcgaccctcaccttgagattctgagctctgagacatactcaccctttcctccccaggatcaagaaaacaagtgccttcaataaatgaagtatggacttttcctccacctcactcccagctgtaagcaagctgccaccttgttgtttaatcagcagttgccccgagcctgggctagcctcaatctctgagactctgcatctggctgagatatggggctgggtaggaaagtctgtggtgtgattcaagacgcacttaactcccacctcaattctacagtagaaactgctgaagagacaatggctgcctgccctgctaagcaggtggctgccagcctcaccttctgggtctgttccttccatggctctttctgcagacagcagagccatgctattgggaaggagagtgagaacctcctgacagagtgaccctgtgcattggaactacctgccaaggaagccttggtaanctggcccagccgggccattctcctgatgccatggcaaccaactggcactgaggccgaggagcgagaggggacagtgtggtcagcccatgcaaccactgcggttgcaaatatcagcaagaagaagtccaaagcctacgatgaaaatagaaatgacgttaggtcatattttttaacaattcaaagtaacacatgttcacatacacagccccccaa

SEQ ID NO: 248754 - DNA, 1612 bp, Homo Sapiens
  misc_feature (36)..(36): n is a, c, g, or t
  misc_feature (94)..(94): n is a, c, g, or t
  misc_feature (775)..(783): n is a, c, g, or t
  misc_feature (794)..(853): n is a, c, g, or t
  misc_feature (1084)..(1215): n is a, c, g, or t
  misc_feature (1281)..(1497): n is a, c, g, or t
catttattatgactgaaagggaagaaaatgataggngacaaatattacaattaaacatgtaacattattctcttgtaaccaatcataataacanactttgaatttttgaatggctatataatttcccagaaaataaaacttttcacatcatcagttacagaaaattgatttccttccatcaaaatattttatctctgctctatcaaaaataaatgccaagtctaaggtactacacagtttaagataagccttcactacttgtttaaattagaggagtgtggggaggggcttaccaaatgatgaataaactactgcctgagaataaagccctcacacataagtaacagctctgtcaagcctctggctcaccaactaattattaaatggctctctaggaacttagaaactcttctgtaacccagccaaaaggcttctgagagtcatcacaaactggttaccagtttattctcaaaaacaaatttgcttattcgatgggcgactgtggctcaaaagatgtaggggaaacagtcaattgaaatctattttgatggggtttaaaaaatattctttttgtcattatcaataaagtaaaatattatttgagcaatgtatttcttagttctgtcccttctaaggatgctaatacagtatggaacatttttaaaaggcttaatgtgagaacagtacattgccacagggagaaggcagcaaagaagaaaatatgaaggctcgggcaacaaattaattcagcagctaacatttctcaaattggttnnnnnnnnntgacaaagtgnnnnnnnnnnnnnnnnnnnnnnnnnnnnnnnnnnnnnnnnnnnnnnnnnnnnnnnnnnnntcatgattaccattacaattgaacattttaataatataattttcatgtcttatcacagtttcatttttatcatgaatatgaactacactgttgtgacacatactggaatgcactgaccacttacataacctaataaagtaatgcatttaagtactctatcaactaaaatttaacctcctttgacagaagaattattttctcttttcttttaaaaaatatttttgaggctgnnnnnnnnnnnnnnnnnnnnnnnnnnnnnnnnnnnnnnnnnnnnnnnnnnnnnnnnnnnnnnnnnnnnnnnnnnnnnnnnnnnnnnnnnnnnnnnnnnnnnnnnnnnnnnnnnnnnnnnnnnnnnnnnnnnnatgggcatggtggtgcatgcttctagtcccagctattcaagaggctgaagtgggattgcttgatcnnnnnnnnnnnnnnnnnnnnnnnnnnnnnnnnnnnnnnnnnnnnnnnnnnnnnnnnnnnnnnnnnnnnnnnnnnnnnnnnnnnnnnnnnnnnnnnnnnnnnnnnnnnnnnnnnnnnnnnnnnnnnnnnnnnnnnnnnnnnnnnnnnnnnnnnnnnnnnnnnnnnnnnnnnnnnnnnnnnnnnnnnnnnnnnnnnnnnnnnnnnnnnnnnnnnnnnnngtgcatacatatgtatgtatgtgtagggaatctattttcaaactataattagaaggtaatgtgtgaggagcaaagctttaagccaacttttttgtacaaagttgcctcagtaggg

SEQ ID NO: 248755 - DNA, 583 bp, Homo Sapiens
  misc_feature (16)..(16): n is a, c, g, or t
  misc_feature (62)..(62): n is a, c, g, or t
  misc_feature (65)..(65): n is a, c, g, or t
  misc_feature (87)..(87): n is a, c, g, or t
  misc_feature (136)..(136): n is a, c, g, or t
  misc_feature (320)..(320): n is a, c, g, or t
  misc_feature (340)..(340): n is a, c, g, or t
  misc_feature (384)..(384): n is a, c, g, or t
cactttattctcctcncgcagacccccttttcttgccccttcctctctcccccaccaggggncgncgcttaaatttccagacagagnaccagaaggtaaggtttagtaaagtaaaagaacacttgcccagggcagnctttgccctgccaagaggctccctcctgtctctaagttcaattccacccctcctcgaagtcccggcttccacccctctcctcagagtcccggcgtttacctcgtggtgtgtttgccttgggcctttcatgccccggctgcacacatcgtctgtgaattgtggctgttcactcccgaggatgtgntcctagactccgggtcgcgnggatctaccctctagtttacttgcctcgggagaagaaactgacncgttttatttagtgccctatttagcgagccccagagtaacgtacatttgtgcctgttttcaattttgtctatcgcaaatcacaaaaaaactgttatcaattcacattcatcatcagcacgagacccatttccttgtgctcctgcccagcctcaggatattatgtttcttttttcatttttgcccagtctgttaagtaaa

SEQ ID NO: 248756 - DNA, 914 bp, Homo Sapiens
tccctcttttcctgttagatgtgcaattccgagcaaatgtgcagtgtgcagtattgatttccagcctccttttaaactccttcaagtctgtgctattaaacggagacaaccacatcaagatagagtctgtcataggattccctgaagcacagaatgaggaggagactgagcaaacacgacccgggaaggcaccagttgaaccaagacaactctgtatgataaaatgtgagaaaaaataaaagtactcccataaacataattacttaaaaaagtgacaactcccacaagtaattccttctgggaactgggtagacagtttcccacaaaaagctcaaaaaatataggcacgctgctattcaagaacactcccaggagaatacaggaggcatacaatgtcactaaaataaaaacacaaacattttagtttcacactagcggcagtgagtcatatcagatagatcttcggggtgttctctttcctaagtattgactcaaaaatttcttcttttcaaaggtagttgataaagtttgacaaagcatcacacatctgccagctctttgctgcagttttctggagtagatacaaaaccattttattgctggatgggtaccagtttatctcctttacctttctggtggattattccagagcacaaaacaatttaccactatcatataattaaaaggattcttctcctgcttggtcacattcctgtagacttgttccataattttagaaagagagcgtaaaatctaagaataaatgtcagaaacattaaatgttactgaaaattacatatttaaagagattggttaataattgctttcaagcacaaaataaacattatgcagtatgtaatttcttgagaaacacaatggaattagtcctcaattttggaatgggttttagccaa

SEQ ID NO: 248757 - DNA, 430 bp, Homo Sapiens
  misc_feature (29)..(29): n is a, c, g, or t
  misc_feature (75)..(75): n is a, c, g, or t
  misc_feature (191)..(191): n is a, c, g, or t
cgaacgaaacgggaaaaggcaccggaaancccggaggttgggagcccgcctaagccttccctgctgaaaaccggnacgcgcacggctcctgttccggtgtccagaggcccgccctccccgctcctcagtctttgcggacaagaaaggggctgtgtgagacgcagggaaggaggcacacccgggggtggcgnagtgaggagggggcgcgacggccaggaggctggtggagcgacacccaggcaggagagggggaagaactctctccctttctgaagccccttttccttgagagacgagttgggggagtcctccacgcattacccactcgggccgcaaaaactcccttctttagccctctgcccccgcccttgcttataagcctttgagaccgcagaagggaccttgttgtggaacgggacggccaaggtac

SEQ ID NO: 248758 - DNA, 954 bp, Homo Sapiens
  misc_feature (652)..(652): n is a, c, g, or t
  misc_feature (850)..(850): n is a, c, g, or t
  misc_feature (855)..(855): n is a, c, g, or t
  misc_feature (864)..(864): n is a, c, g, or t
  misc_feature (884)..(884): n is a, c, g, or t
  misc_feature (891)..(891): n is a, c, g, or t
  misc_feature (902)..(902): n is a, c, g, or t
  misc_feature (940)..(940): n is a, c, g, or t
ttggcgaacctttctggccagctgtcggaattaaaggatcagatgacagaacaaaggaagcagaaacaaagaattggtcttctaggacatcctcctcacatgaatgtcaacccacaacaaccagcataagcaaatgaaagaaaggaattgtatttaccttttataattattattagtgtgggtatggctaatgagttctgattcacccacgaaggttacatttatgctgaatacatttgtaaatactcagttttatactgtatgtatatgattgctactctaaaggtttggatatatgtattgtaattagaattgttggcatgatgacatttcatttgtgccaaaaatattaaaaatgccttttttggaaggactaacagaaagcacctgatttgcacttgaaccagattatagatttaaaagtatatgacatgtattttgtatttaaaactagaatagccagtatttatgttttttataaaactgtgcaatacgaattatgcaatcacaatacatttgtagctcccgagtgtcctaaagggagtgcacttctttgaagctggtgtgttaatactatgtaataaatggttaactttcaaatgatgctgctgccaaaattatattaatagtgagtttcaggcccctgggcatntttgtaccatgtaattatcctctggtgatgctgtttctcgttagtggcagtagtgcctccgtctcctagtgataatgctccaagtctatgaactgttaaatcagcattcattttaaggaaaagcaactttagtttcaaaggatacttttaagcttcttaaattgatcattttaaactatttctttaaataaggagagnccaanttaggaggnccatacttttaggctttgtngaagganggttaatgganttttttttaaaggggggcctttcctatgggcaatgttncaggggttaaaggc

SEQ ID NO: 248759 - DNA, 806 bp, Homo Sapiens
  misc_feature (747)..(747): n is a, c, g, or t
  misc_feature (757)..(757): n is a, c, g, or t
  misc_feature (768)..(768): n is a, c, g, or t
  misc_feature (781)..(781): n is a, c, g, or t
  misc_feature (793)..(793): n is a, c, g, or t
ttgggttgaagaagtagtcaggaaaaagcgtcttggtcgcaggccggggaacatcttaaaagcaaacttctagcctgctgactcttggcaatgagtgttggatcctggctaaagtgccttgaatgcagcatgaggccaatccatgaatccaacttctcatggagaaatgttaatattttttcagtttgaatcaatcagggtgaaactaccatgctattggtttgcttactttttattatttcatgtaaaatctaagacaaaatacattaaatgcttattgacatatgtatttattcttcaccaggctgataatatctgcctaattttaaactttcttccattttgtaggtttcaacttattctattgtaagatactgttaaatctaatagaggcattgtcacttttacgtataattttattttatttcatatatttcctattggttttttacatttaaattatggagcacttcatcatataaaaaacttcaattatatttaaacagtaagtctttggatttttttgccttttaatttccatattacataataatgagataaacattaatgttttcagggtactttaaattttagataattactcattgtattcatgtgaaatttgtttttactgcatgtgtggggttgggaggactgttttcacttctggattcatctttactcttatctcatcagagctcatacctcttgtagttggggggattgcagtttataaatcccaataangggggccaantccaataatanccataataccaanggaggtttggangccaggggcaggg

SEQ ID NO: 248760 - DNA, 714 bp, Homo Sapiens
  misc_feature (339)..(352): n is a, c, g, or t
tttataaaacactacataaaagctggcgagttttaaagaggtaaaactgcattgaaaagtataaagtctcacaagggcaaagtcccatctggggcaacagttcccaacatcacggacctctcaggaggagaactggtctccatgagatgctccgtacacccctaccccacatacccttcctgtcaaaacttagaccaagcatgccacatctgacaagtcaacttcaaacaattcgtggtgcttttctttcaggctagaaatcatctgtagctattagaaccattcagcaaagcaatatggctttaatgggtacctatgctttgtgaagatatatttatnnnnnnnnnnnnnncgtgtgcttggggccaatcctgagaccatatacctgaggatcactgtctagcagtggctaatctttaagcggtgttaggacagacactctgggaaacacgcaggacattctggactcagtcctgtggtcaatggggggcagctttcattgcatcagacttgagacaccttgggacacatccttcaaagagttggggggctgtaaaggtgacctctgtgagaaggtgaccagacccatgtgggtcaaggttttgtgccctcacaccatacagtgccccaacacaggaggatcaaaccatccgtgctcagctagaactacggctcaaccataagggaggctgtgcctcatttccacaagagggc

SEQ ID NO: 248761 - DNA, 834 bp, Homo Sapiens
  misc_feature (312)..(320): n is a, c, g, or t
gggagaggcagcagagggagaacaaagagttcccaggctccatgtctcctccctccgcgaaagcctaaacttacccctcaccccaccccaggggattccaaagagtcaagttaaaaatatatagagatatagatatttctagatacacttttacatttctgtctctccaaacaaataaataatcagcaagagaaggtgcattacttccttcctgtccaaggtagggagggctgggagggggtcaggggtcagtcttgctgcactgagtgtgctgttgagggggggagaatggtgtgttccactgaggtggtnnnnnnnnntgtcctcttgcccactgtccctgaaagctgtgggaaacctggggagggggagggccattagatgactccagtggttactttggcaaatgcccagttcttcagagggagtgggtggaggcgaatttggcttgagaggaagaagacattaagtcctcatctgaggtctgggttcccagggacccattcatctggccgcccaggagcccctacccccaagagaaaccttcggatactgaactgcagaaatgtcacatattcacagaccaccccatccccagggacagagaagaaaggacactgaaacatccacacatggtaatcaaaagccaggtttgcctttatgaggcagagggcaaaactggtgaatattgcaccgtgaattgcaggggccctcacccccaccccgtgtttaatggtggccaagcccagcctagaaaggtgggcagactaatggtgggaatagcctgagaagggaaggccattcattcatttattgagcacctatcattcaact

SEQ ID NO: 248762 - DNA, 1125 bp, Homo Sapiens
  misc_feature (118)..(158): n is a, c, g, or t
  misc_feature (374)..(383): n is a, c, g, or t
cttttcccaggtctccttcactgaaaacaaaaatctacttacatacactgtcaccttagcatcagagtcggattaatgaactgcggaacaagaggttgtgagaatctaagatggaacnnnnnnnnnnnnnnnnnnnnnnnnnnnnnnnnnnnnnnnnncatccaacagcagtgtgtagagagaatattatgcagatgccgttaattttttaccctatgtttacgtcttgaggcagcagagtctgtctgcagctatgtggtgagctatgtaaggaaaaaaatctgggctgttagagtgaaaaagtgtgttttatgtcaattgtgaaaggaaaatgttaggagtatggtttttaaacttgggcttcattttaaacnnnnnnnnnnaaacccagttatttcacttgatttgctagcttcagagaagagatccgaatctgtgcccagcgctaaaggctcagtgttagcatggcttgtgctggccggtgtgccatattcttgttggagatgaaccgtagcaccagagcccattcttccttgtcagtcttggcccaaagatgtcaccattcctagttatttgtcaccacataattggtgttgattggaaactttttctgagatgggacagaactgctgggttgtctttttccatgtaacttaagcatagtaatataaataaagtaatagttggatgcttttggtcctgtgttgcttttaaaaacaccttataaaagaggagagtatttgataagcaattttcatagtagtaaagttttttttcatctcttaaactaaattgaccatgcatataatattctttgtttaaatgaaagcatactgttgaaacccgcagtgttgcatttagaaaacagttgaacagaatgtcaatgtgcattcatgcaaaaaaacatttaatctgcatctgttttagaaaagggggaaatgaagcaacttgtctaaaaatactgcttttacaaagcatttcagccttttccccctcagttttgcattgattttttgacaagtctgtagagccttatagttttccatcaagggcctagatctcttatttaacatttttttcactcttctctcagaagttcagctgttgaaacgaaaactgtacttt

SEQ ID NO: 248763 - DNA, 1141 bp, Homo Sapiens
  misc_feature (1065)..(1065): n is a, c, g, or t
  misc_feature (1072)..(1072): n is a, c, g, or t
  misc_feature (1090)..(1090): n is a, c, g, or t
  misc_feature (1120)..(1120): n is a, c, g, or t
ttggatcaaggtccagataaagaaaattcaggggcaatcgaagcctcagtgaagttaacagaactcttagatttgtatagagaagatagaggtgcaaaatgggtaacagctttagaagaaattccaagtttaataataaaagggttaagctatttgcaattgaaaaacacaaaacaagactcccttggccagttggtagactggaccatgcaagctttaaatttacaagtagcgcttcgccaacctatcgccttaaatgttcgacagctcaaagctgggaccaaattagtgtcctcactagcagaatgtggggctcaaggagttacaggactgctacaagcaggagtgatcagtggattatttgaacttctgtttgctgatcacgtatcatcttctcttaagttaaatgcttttaaagctttggacagtgtcattagtatgacagaaggaatggaagcttttttaagaggtaggcagaatgaaaaaagtggttatcaaaagcttctggaactcatacttttagatcagactgtgagggttgttactgctggttcagctattctccaaaaatgccatttctatgaagtcttgtcagagattaaaagacttggtgaccatttagcagagaagacttcatctcttcctaaccacagtgaacctgatcacgacacagatgctggacttgagagaacaaacccagaatatgaaaatgaggtggaagcttctatggatatggatcttttggaatcctcaaatataagtgaaggggaaatagaaaggcttattaacctcctagaagaagtttttcatttaatggaaactgcccctcatacaatgatccaacaacctgttaagtctttcccaacgatggcacgaattactggacctccagagagggatgatccataccctgttctccttagatatcttcacagtcatcacttcttggagttggttaccttgcttctgtcaattccagtaacaagtgctcaccctgggtgttgcttgcaagccacaaaagatgtttttgaagtttctttgcacagtcacagaagggtcttcttnttttttntgtcggattatggagcancaatttatttgatcccgagctctgtgtcantttatggtccaggtgaggggg

SEQ ID NO: 248764 - DNA, 485 bp, Homo Sapiens
  misc_feature (112)..(112): n is a, c, g, or t
gaacccctgcccctccccctgcttcccaattccttgcctaacagggccctgcggtaatcatctttgaattctagctgttagggcccctaatttccccaaggctctcaagccnaccaaccataagtgcccaccaccatgtcactctgctcatgtgcagtctgctattagacccagactttccacctgatgaaataatttccatcattgtgaagctaatcttaagagactgaattgtgctgtgtcttgagagatcctgtcctcttgccttctaagtgcccggtggaggcatcgggctagcacaaacctcttgagggtcccaatatggtagagaggggctgggagattgagaaaaagagagcaagaaagtttcagtcctgggagatgagcctgggacgtgtgtttattctcagcatggctgggtgggatagcgacgctgagctaggcgatttggccgattcaggctagtggccgtcctgtgccgaact

SEQ ID NO: 248765 - DNA, 933 bp, Homo Sapiens
  misc_feature (805)..(805): n is a, c, g, or t
  misc_feature (845)..(845): n is a, c, g, or t
  misc_feature (891)..(891): n is a, c, g, or t
ttgggttaaagagtaaattcctcctgtagccttagctctcttttctatctttggcttgctttttatgaactatctttagagtgccaaattagaacagggtaggcagaggcaggaatatgcccaaatttgggaagacctgattgggaatagtcgaaagccttgatatgtgcaaagaaagaaccatttgatcaacccagttcttaatacaggatactaacttaaaatttagactcaagttatacgataattcaaacatttattgtatttatactattctatatgtacttttccaggaaccaggaatacaaaactgacatttctctgtacagaggctcagactagtagagaacagttaggtacgccgttaattataaactaatatgtatcatcaattatgggtttttatgggggtttggcaggtggaagggaccagggagagatgatgagtgatgatggttatgtagtctttaggaggatgcaattataacattgctcttcctttcacgcaccacatgatttagcaagtacttcatattggctccaccattaacatggtcaatggcttctggatactcacagttcaggcacagtttctcctgaagattttttacctctcccatctttaagaaattgtctggatgtccatgaaagatgctgacacttgtattaattcattaaaaaacaccaccccctccctgaaataaactaaaaagtaatgaattcatagaaaaaaatttcaccaagattgaaactagagaatatacctagacttgcactttgagctttgagaaatgtgtacctattncaccattccaacgtgaaggaagctctgcagtagggaaaantaatttaacacacttattagtctactgcccatgtaagggtcagctncggcttaagggggcaaaggtggggtgacatcgttatggttct

SEQ ID NO: 248766 - DNA, 778 bp, Homo Sapiens
  misc_feature (689)..(689): n is a, c, g, or t
  misc_feature (736)..(736): n is a, c, g, or t
  misc_feature (753)..(753): n is a, c, g, or t
atgtagcagttatattgttactccttttcctcttggtttcccccccaaaaatacttttcttgcttaatttactttcttggtaagagtgaatagaggctaagtgataatgccactacactgattaaatgacttactggcacaaaactattgaggcttaactagttgactgttttaataacatcattaaaatttcattttggtttattagagcacatccatgcaaagttggaatctaaccattctcatgtctccttataatgcctaggggatctttgaaacagtatttttgccaactcatactttctattttcattctgtaaagataaaacatgtaagtgaaaacgtttaacaaacattaagaaccttcttcgaccaggcactctccttcgctacaaaatttccacattacctatttttttattagccatttttgaactctcttccatttctaagtttctccctgcagctttcctgaacatgaagcatttccttttcttttcatttctagctttcctttctctgtacctcatgtacacttggaagcttcagggacttagcactggtcatgccagcctctacagatcacatctctgtctataattggggtctccatggtaatgagaaggcagaaagtgctgaagtaggcgcactatgtaaagggactgggcaagaggaaaattactgttcgncgggcctctaacagggcattaggcatttggaattcccccatgggtgnccaaggaaggcccgtgnaggaaggcacggtgttgggtgtttt

SEQ ID NO: 248767 - DNA, 847 bp, Homo Sapiens
  misc_feature (168)..(168): n is a, c, g, or t
  misc_feature (230)..(230): n is a, c, g, or t
agaggaatatggtataattaaatgcatactaatatcttttctatagtatgtgagtacacataataaaattaaaaatgtatatatttattaaatatagatagatatattaccagaaacatgattatttcagatgagaaatcaaaataaacccatttttaagtatctttntgtcactccaaattgatattgctcataaaaaaatacactagttttccctgggggaaaaaaanttaattccataggcaatgcagttaagggacgtgttttatttcatagctttctgcaagcaaaattgctctgatacaaaatgagttcaatgatacaggtgctactgtccactcaagcaaaagaaaacctcacatgtatatgaacgcactttatacttatattcttacagtataataggtctaatatccaggatgcctctggcctcattgaaagcagtggcagagaaatgctgcaaggtacttgaatatcatagtactggcaagtgcttgaagtaacttcctgtgagttctctgtcagatactgcaaagactgcgtgtgggtgtgtttgtctttttgtcttccatcttttggtttacatttaaatcatctcacaaaatatcccctgcatgtatcattcagcttcttcagagtttccataaaaacaggaaaatgtcatgaggtatccctaacgtcagggaattgatgtagtgctgtggctgtcagagaaggatgtagacttacctgtaggtacagtaactgagtttagtgtgtgcccggcacgttacagtgcagaaatgttagttcatgttaaacttttcctcctcacatatgatgtgactttaaccccagaatatctgac

SEQ ID NO: 248768 - DNA, 1174 bp, Homo Sapiens
  misc_feature (957)..(957): n is a, c, g, or t
  misc_feature (1110)..(1110): n is a, c, g, or t
  misc_feature (1164)..(1164): n is a, c, g, or t
ttggctgagagtggacagcgagcccgtcctagttcactgcagtgctggaataggtcgaaccggtgtgttggtcactatggaaacagccatgtgcctaactgagaggaacctgcccatttacccactggatattgtccgaaaaatgcgagaccagcgcgccatgatggtgcagacatcaagccagtacaagtttgtgtgtgaagcgattcttcgtgtgtatgaagaaggtttagtccaaatgctggatcctagttaagacaactgtgaaaaagttcattcctctttcccaagggcatcctccttgaaagaggaggacagacctctctggaagcagcaagaggaaccagtagctgtgggaaaggaatgggcacctctgaacccaggcactttaaacttctatagaaaagatatcgtgtacataggaactggtgtagataagcatgcaattatggcatcatttaggcctgtatttctatggaaagatacaaaaaggatctcagtttggggcctgtcctaatgccttcttccctaacatcaccacacacacccctgtcggcatcctggagcaattgagaccggacacccacagagctgttgtcctcccagcaacaagatggtgtggttatcttgggtcatttggatgttttgtttgtttctgtgtgtcagactgtaagggctgagctttctgtgcttctaggtggagctggaacaattcagattcacccgccctgatgctaagaaaccctgacgtatgtactagatggcagggcactgggggtcaactgaaactgagcaacacctctctgccctccctccctttgtcccatctcccagcgacttccaatattcatgtttctgagaattgtgtccctcttcaggttccctcttggtgtcctaacctggtattagtaatgtgtcattcaggtgaattttcagtctgaggctctgagaactggntactctcagtgtgttctggtcatcttgtggcttagttgtagaagcaggtgtgtctcttgcctctgcttgcctcctactgcacactcagcacccaggactggaatcaccgactactgaatctcctacatgtattgctgctacttcaagctcctncacttgaaaccttatgattttcccaaggggagatgggacagtgtcatctaaatnttccgaatgt

SEQ ID NO: 248769 - DNA, 468 bp, Homo Sapiens
  misc_feature (55)..(55): n is a, c, g, or t
  misc_feature (61)..(61): n is a, c, g, or t
  misc_feature (66)..(66): n is a, c, g, or t
  misc_feature (77)..(77): n is a, c, g, or t
  misc_feature (88)..(88): n is a, c, g, or t
  misc_feature (203)..(203): n is a, c, g, or t
ttgaaaggttaacccggaacgggaaaatcccagtttggggtgggaatccccgaanccgccntgccngacattggagnccacggatganggaaggtacaaagccccttaagaccaaaactcaaacgggcccgttcctttcctaaggtgtcggtatgtggggagtggtacaaaatggtcctgatgctccttcaaaaacattcacnttttacaacgtcaaggaattaagcataaaaaagatgggttaaaagctttggtttctagtaaaggttagtgtgtgtggtttttttaagaagctgttttgctaaattatttttacttggaatgtttcaaacagatttcaggctgcaaacttgttttataatcgtttgcttctccaagtgaagctcagaaatacctcaaaatagctgtaacgttcgcgttaggaaagatggtgtttattccagtttgcatttttatggtgaaataaaa

SEQ ID NO: 248770 - DNA, 460 bp, Homo Sapiens
  misc_feature (45)..(45): n is a, c, g, or t
  misc_feature (102)..(102): n is a, c, g, or t
ggggaagaatgccccggccccccgaagggtgcgccacacgggagncggcggagcacaaggccaagtgagtttgccactgtcagcccccagacccgtaagctnggctacactgatgtttttctttactaaggatcctattcaaaaattaacattttcatctcagtaagtttttagaacatcaaaatgttttctgagccccaagtggctaggttgtaaaagttttataataatttgcaattaaaatacatgatacatattaatccattaaagactagtgggaatgtatcagccagagtagcaagtaatttttgttttataaatcatagtatctgtcatcttgcagtattaccaatgctgttgtaaattgaatttaaagtggtattaaaaaaaactgttaaacaatttttatctgtttgtatatcttactatagattatgtacaagtaacatctaaataaaat

SEQ ID NO: 248771 - DNA, 892 bp, Homo Sapiens
  misc_feature (419)..(434): n is a, c, g, or t
gagtaaatacatggttacaaagtgttttaagtttatttgctttatatagtgaccgggaaagtcaatccacagtgtcgatttttttcttgaagttgcagactttagaaggcaaaccctcaaacccgtctctttatggtaaagtgtgaaggcacatgttgccaactgttgcaccgactgatactattattaagtcaatgatgtccttcccttcttcacatcaaaattgttatgaatcacatatcacttaaccttattataatgaacgaaaatcacttttgtcttggggaattgtgaaaccttttgaaatcactagctctgacatagaagattaccagacttgagaatttttataataaaatatgtaaggccagaaagcttttggacaagttggaatcttaccctggtagtctccaaaatcnnnnnnnnnnnnnnnnaaagaaagtttactatgtgtaatgcaaggcacttatgtctctgcttaaagctacaagggaaaaaatgacaagcccagtttttttcaagggaaatattttttctctgtgaaaggtcagtagtaaaagagctagtttaaagtcatggagtttttgccaaaaaccatgtctcgaggttttatgcatttctaatggctttgcccataggagagatacccagagtggcaaacagaggctaaggaaaaaaatgctgttcatttagatcagaataacctcgctccaatctggaaaccactcaaatgacacatacaagtctgtatgaaaagcaaaacaaactcatggtgatatgcagttattccattcaacatgttaaaatgaagacagagtattttaaatgcactctagtttcctgttccatcttcaaattaaacaatcatcctgcttatttgtacaaagttggc

SEQ ID NO: 248772 - DNA, 438 bp, Homo Sapiens
  misc_feature (391)..(391): n is a, c, g, or t
  misc_feature (399)..(399): n is a, c, g, or t
  misc_feature (405)..(405): n is a, c, g, or t
  misc_feature (412)..(412): n is a, c, g, or t
taactgcaacctccacatttttgtcattccctttgacctgggtttatccttccaggtgactgtgtggatccttctctcactttgggttatctgctcaaacatcaaccttctcagtgaagcagtcctgatatttagaaaatcggagctccagcccccctcttggatgtgccccgtgttatattcctccacagcatgaaaccttcggatgaactgtgtggctcctttatcgctcagcccggtcctgggacacacactcccatgaaggcagggccttggttgatttgtttgctccgttcacatatgatgaatgagtggaacaaaactgcttcattgccccattcccaggtatcaccttggaatgtgtctagatctgcctggattagagcagctnaggtggtnccaggncccaggntacacacacacacgacaccagctaag

SEQ ID NO: 248773 - DNA, 875 bp, Homo Sapiens
ttggcctttacataacagacgaggtcaacgatccctcccttaccatcaaaatccccttgggtgttaagactcagctcactagactccaacctcagagtttctaattcagtcggtctagagtgggacctggtctatcaggtctccaggtgatgctgatgctgctggtcctaagagcatgctgtgagaaccactggcctagtacaacagagaaggtgactgaatggcagttacagaggttcagagaccactgaagacccaaccgagacaattttgaggtctgaaaactcagtaaagcctgtctctccactttccccttatagcaagtggcccatgtgatactctgctaccccagaaaagtgaagctttgagtgcagaaaaatctcatcagtgacgaagcccaaagctacacatacctcgagctgcacatagtactttgccttgagttcaaaataaggcctgcagaagacaggaaggaaagccatcagagtaatataatacagtgaccacaatcaactccacaagatgaacaagaggcatcagctaccactggccaggtcgtccttccaatatttagtaaactcttaacaaggccgtgacatgtcagtgatgctcctagctctggagactgacagacaccagatggaacgactgggctcacccagggctatattaacaggaggcccatctcaagacacggggaacccacacacacatatcttggggactctgcaacttagctcatgttcctcctctgtgggaaggctgttcagagcctcacaggttatacccagcagtaagggtggcctggatctgctctcctaatgaagttggctccccagggattgaagagcagctgaggctgggagaagggggct

SEQ ID NO: 248774 - DNA, 1297 bp, Homo Sapiens
ttggcaaggttagaggaaagccctgaagcagtcgtgtaagaagaaccaggcttaactcagatccaatgccagttacagcctaaatcccaccagctgaaaagcctcctgtcttttggagtgcctccgtgctgtagcctaatggaagccctcgtttccctcttaaagctcttttcagcctgcaccactgctgcagggtctcagggcttgccaggagcagggactggaaagcagggacatttcaaaaggtttaaagcttcagctgcccttaactccaaggtcttaccttcctggggagcctgaggcattcttgtctccagagtgaagccacacctgcccaagctgggagcagcccagacctccctcccagcctctccctccacagccctcaccattttgattttcttggcagagtggagcgtgttatatgttatcattgctacctttgtcattgttgttgccttgggaatcctgtcttggactgtgatctgttgttgtaagaggcaaaaaggaaaacccaagaggaaaagcaagtacaagatcctggatgccacggatcaggaaagcctggagctgaagccaacctcccgagcaggcatcaaacagaaaggccttttgctaagtagcagcctgatgcactccgagtcagagctggacagcgatgatgccatctttacatggccagaccgagagaagggcaaactcctgcatggtcagaatggctctgtacccaacgggcagacccctctgaaggccaggagcccgcgggaggagatcctgtagccacctggtctgtctcctcagggcagggccagcacactgcccggccagtcctcctacctcccgagtctgcgggcagctgctgtcccagcatctgctggtcatttcgccctgacagtcccaaccagaacccctgggacttgaatccagagacgtcctccaggaacccctcaacgaagctgtgaatgaagaggtttcctctttaaacctgtctggtgggcccccagatatcctcacctcagggcctcctttttttgcaaactcctcccctcccccgagggcagacccagccagctgctaagctctgcagctccccagtggacagtgtcattgtgcccagagtgctgcaaggtgaggcctgctgtgctgcccgcacacctgagtgcaaaaccaagcactgtgggcatggtgtttccctctctggggtagagtacgccctctcgctgggcaaagaggaagtggcacccctcccctcaccacagatgctgagatggtagcatagaaatgatggccgggcgcg

SEQ ID NO: 248775 - DNA, 738 bp, Homo Sapiens
  misc_feature (698)..(698): n is a, c, g, or t
  misc_feature (705)..(705): n is a, c, g, or t
  misc_feature (714)..(714): n is a, c, g, or t
ttggcttctgagaaattttgaaaagtaaatagatctcagtgtatctagtcacttaaatacatacacgggttcatttacttaaaacctttgactgcctgtatttttttcaggtagctagccaaattaatgcataatttcagatgtagaagtagggtttgcgtgtgtgtgtgtgatcatactcaagagtctaaaaactagtttccttgtgttggaaatttaaaaggaaaaaaatcgtatttcactgtgttttcaatttatattttcacaactactttctctctccagagctttcatctgatatctcacaatgtatgatatacgtacaaaacacacagcaagttttctatcatgtccaacacattcaacactggtatacctcctaccagcaagcctttaaaatgcgtttgtgtttgcttatttgttttgttcaagggttcagtaagacctacaatgttttgtatttcttgacttattttattagaaacattaaagatcacttggtagttagccacattgagaagtggttatcattgttaatgtggttaatgccaaaaagtggttaatattaataagactgtttccacaccatagggcaataatttcttaatttaaaaaatctaagtatattcctattgtactaaatatttttcccaactggaaaggcacttggattgtaccccgtaaggtgtttggagtgntggaccngtggatggntttcagaaggttggtggttttgtt

SEQ ID NO: 248776 - DNA, 868 bp, Homo Sapiens
  misc_feature (374)..(476): n is a, c, g, or t
  misc_feature (528)..(548): n is a, c, g, or t
  misc_feature (814)..(814): n is a, c, g, or t
  misc_feature (825)..(825): n is a, c, g, or t
  misc_feature (830)..(830): n is a, c, g, or t
ccatggtaaaagagcccattaacagtaaaacaaatttcaatggctttcatttcaatgagaacaactctgggccgtggcttgctaatgccacaggccgaagtaagcaagaaggtgagtaaggaatggagatcttgtctccacattaaccctttactgagcctcccatctccccccactccgccatctcagacccccagcctcaggcaatgacccttaggtatgtctacaatttcatcaagaagttaaaatttccctcatcagctaagatccattatgtctccccttctcttcaagcaaaactccttgcaggagttacctatacttactgtccttaatttctctcccgctagcttttcttaaacctgctccaaccnnnnnnnnnnnnnnnnnnnnnnnnnnnnnnnnnnnnnnnnnnnnnnnnnnnnnnnnnnnnnnnnnnnnnnnnnnnnnnnnnnnnnnnnnnnnnnnnnnnnnnntgggggtagtggggagagactcagtttaagtatgaagaggacattttaaggnnnnnnnnnnnnnnnnnnnnntggagaataataataatttcctttgtgtgaactctggtgggtctgatacaggtagcaatgtaatttgaaatcagttgaatttcctgtttttctctcataggttcaactactcaatttcatgctggcatgaggaagataatcctttgaaaacatcattaattgaagtgattttaaataggatttccttttgtaaatcaatgggttcttttgtgcttttgtattgtggaatattcaatggggacccaatatggaacacagcttatggntgtataccaanccctngcccggcacatggaaaaccaaactggggattttgtata

SEQ ID NO: 248777 - DNA, 1333 bp, Homo Sapiens
  misc_feature (895)..(895): n is a, c, g, or t
  misc_feature (901)..(901): n is a, c, g, or t
  misc_feature (908)..(908): n is a, c, g, or t
  misc_feature (911)..(911): n is a, c, g, or t
  misc_feature (932)..(932): n is a, c, g, or t
  misc_feature (958)..(958): n is a, c, g, or t
  misc_feature (965)..(965): n is a, c, g, or t
  misc_feature (1023)..(1023): n is a, c, g, or t
  misc_feature (1036)..(1036): n is a, c, g, or t
  misc_feature (1046)..(1046): n is a, c, g, or t
  misc_feature (1054)..(1054): n is a, c, g, or t
  misc_feature (1073)..(1073): n is a, c, g, or t
  misc_feature (1272)..(1272): n is a, c, g, or t
ttggggaacgatttcatgaaccgctccggggaggagcaggagcgggttcttcgctacctggaggatgagggcaggagcaaggcgcggaggaggggccctggccgtggggaggaccggaggagagaggaccccgcctatacaccccgcgagtgcttccagcgcatcagccggcgtctgcgagccgtcctcaagcgcagccgcatccccatggaaacgctggagacctgggaggagcggctgcttcggttcttctccgtgtccccccaggccgtgtacacagcaatgctagacaacagcttcgagaggcttctgctgcacgctgtctgccagtacatggacctcatctcggccagtgctgacctggaggggaagcggcagatgaaggtcagtaatcggcacctggatttcctgccgccggggctgctcctgtccgcctacctggagcagcacagctgatggcggccccgcggagaccccgctgccacctcgcccagccatcaagccctccgataccttcggctaaaatatctttcatatttttagaatttgtcctcggaaacctttttcgcttggggtggtctctctcactctgccccctcctcacgcagctcttggcagtcaacagacgctggcggctggggctgcccatgccatcccagctccaagcttcccactccgggacttgtgtttgggtggggagacctgacctgggcatgttcctgtttcttcatcgttgagcttttctggcccggtctgaagctcaagtgaggagggggaggctgggtttttatcacttttaatgaatttggtgtgatttgttgtagatttttaaatttcccttttggagagaaaaaccaaaaaaactcgccccactggtaaaacatgggtcttggtncccagncccctgnctncagcccctcccagtttttagncttgaatgagggtggggtctctgggnaccctgncccctcatgaccagaagcatcttgtgttgtatatgtgtgcgcgcgtgtgtccctgagnacccagtgacagnaagccacggntcctaagnaggccggttttatcctcgntcattctgcgtgtcctcccccacggccacctgtgtcggggctcagggtctcctgcctttatatgagcccccttcctttcctcccctcctttatgctgggggtccagggacttccagcctgaagcctctgcccttgcactaccttgtctgtcaccccatcccgtgttccctcgttccccagcctgactctgcctgatagntctgtgttcccatgctggtcttctggccagggtgaggagcagggtgggggcttcgaaccct

SEQ ID NO: 248778 - DNA, 585 bp, Homo Sapiens
  misc_feature (257)..(278): n is a, c, g, or t
cgatgaatccataggatagagaaaaatctgcttgttctattctgagagttctctgagatatcccttcactctgcttggcatttggccattgatattcaacaggtcactgaccaagcttttctaaatttttcagagagagttacttaccaataaggtctgttcttaaacctacctagttgattttcatatctttccataaagtgtcatgattctatcatagaccctgacttaacattgtaaggactatgagtcctccnnnnnnnnnnnnnnnnnnnnnnagcaaattaggacttcggcaggttttcctctcctaaactcattctttcctccacaggattggctttgtccatctcctgctttccatttcaagtgcattaaacaaaacctcaaagggcctggggaggtgagggcaggccaggagtctgtgttctgtgttggagtgttcaaggtatttgttaagaaggtctgcaacaggcctttggtgtggctctgccagagactgttctgaacactttgcttgagatccgtgccctgtaaaatggatatgatgttttactgatgtctgtaatacatttgtaaacttcc

SEQ ID NO: 248779 - DNA, 607 bp, Homo Sapiens
gggttcaggggtggtggacttttttgagtgtctcctaatttctctgaggtgtctttggctctgtgtcaccaaatgtgcctgacctctgcatcccagtggttgctgaaagggaaacagtatattgcgtagtcagatgtcaggagtagagatcttaatgagaaaggccctggcagctggagagatgagaggacctagtggtcagcttatacccagactatctctccactcctccaagagtttgagtcccatagctgatgaaagaatttacatatgggctcccccctgcctttccccactgaaaatcctattcctcatattttgggaaggagcatatgtcctttaactttcaatggtaaacaatctaggatagtgtttaaaggcatggattttggagtcacatatagttggtttgaatttctagcttcactacttaccagctgggtttgaccttggttgatttacttaacctctctgagcctcagtttcctcaactataataacatgggtggagggaggcatgttgaaaatatctacctcagggttgttggaataactgaaacaatgtttgtaaagctttagcacagtgcctggcaagcacttaataaat

SEQ ID NO: 248780 - DNA, 445 bp, Homo Sapiens
  misc_feature (77)..(77): n is a, c, g, or t
  misc_feature (323)..(323): n is a, c, g, or t
  misc_feature (415)..(415): n is a, c, g, or t
aagttgaaccctccctgccttggcccttcccaaaatgcctggggaactaacagccatgagcccactgtccctggccnaaaaaataccttttaaaataataatttgtttacttgatatgtctgcaggctgactgtttaatatcactgcatcctcccatgtgtgaagctgccctggctaaggtgaaccttccagagacttgcagctcaccatgctcggggcagaagggatggggacaccttccaaaaaacctgccccattctgggcagcctcagctgggacttactgtcggctgttgagtgggcctgggtcaggggacagtgttnttcatgggctaagaactcccctccagacactgagactgagaaacatccccaacaggtagaacctgggggcagtgctaacataggaagggacnaatttaaagggacaagtgaactgggaatca

SEQ ID NO: 248781 - DNA, 552 bp, Homo Sapiens
  misc_feature (104)..(104): n is a, c, g, or t
  misc_feature (108)..(108): n is a, c, g, or t
  misc_feature (120)..(120): n is a, c, g, or t
  misc_feature (125)..(125): n is a, c, g, or t
  misc_feature (135)..(135): n is a, c, g, or t
  misc_feature (140)..(140): n is a, c, g, or t
  misc_feature (150)..(150): n is a, c, g, or t
  misc_feature (155)..(155): n is a, c, g, or t
  misc_feature (163)..(163): n is a, c, g, or t
  misc_feature (169)..(169): n is a, c, g, or t
  misc_feature (187)..(187): n is a, c, g, or t
  misc_feature (192)..(192): n is a, c, g, or t
  misc_feature (205)..(205): n is a, c, g, or t
  misc_feature (217)..(217): n is a, c, g, or t
  misc_feature (276)..(276): n is a, c, g, or t
  misc_feature (527)..(527): n is a, c, g, or t
ttgggaagggggattgggtgaggtcatcctgaggactcgtccaccccaaaggtacctgtaattaccaacatttaggctacaaaacaggtgacctgggcaatggnaagnagtgaaacatgncaggnaccacagggnctcgncactgctggnctggncagcagtncacagnctgccgtgtactgggtgncctgncatgtacccaggnacagacccaggnaccgtgtattactcattagtgcacaagtattacttagtgcacaatatacagtctctagnaagatgacttcttgccttcagtcgccgctccctttgatgggctgtggttaggggtgtgctcgttcctctgccctggtttagacaggtacctgatagcacactgtggtgcttctcagtgggggtctgggggtcaaccagatcagaaacacttggatggggcctaacacagatgcccttctgggccctgttcatgcagtagagcatgtaagaaagctttaatcctcccaacatgcctgggagttaggtggatntcctattacagagtgataattttag

SEQ ID NO: 248782 - DNA, 514 bp, Homo Sapiens
  misc_feature (260)..(260): n is a, c, g, or t
  misc_feature (372)..(372): n is a, c, g, or t
  misc_feature (410)..(410): n is a, c, g, or t
  misc_feature (437)..(437): n is a, c, g, or t
  misc_feature (471)..(471): n is a, c, g, or t
  misc_feature (477)..(477): n is a, c, g, or t
  misc_feature (487)..(487): n is a, c, g, or t
ctaaagcctgcaacccaaagataaactttaaaaattaagaagggggtgctttcccctgtccttgtccatatggtaaccagggtctgcctagtctcatccccagcctctgggttccctcccctgctctagacttcagggcagttagaatggatgactctgctggatctagagctaaatagaaacttctttgccatagaaacttctctgttgaaggactgcgtccccattcaaagaggtcagatttgtgggcaggcaagagnctcaggaatgaagaaccaaaaaggaggctctcaacccctctccaaggccagacgctctctgtactcccattaacttcacaaccaagtgcagacgctcggtgagttcagaganccacttggttagccctgccccacccctcctggtgtgancctggtcactgggaacacacagattgncagtcagaaacctgttggttcccatttgtcactncagagncaaaccaagncagtcaccttgattgtccacttttcct

SEQ ID NO: 248783 - DNA, 1333 bp, Homo Sapiens
  misc_feature (104)..(148): n is a, c, g, or t
  misc_feature (314)..(373): n is a, c, g, or t
  misc_feature (586)..(622): n is a, c, g, or t
ttggctttgaagatccttaatgttttgcattttttacattgtttttaaagaaatattctaactgcttgcactgttactgttctttaccagccttttcaggagcnnnnnnnnnnnnnnnnnnnnnnnnnnnnnnnnnnnnnnnnnnnnnctttccttcttcccccttcctgatgatgagtgagaagtattgagaactttcggggtcagtgcccttctaaactccccttcccccaataatgcagctgtataatgaatggtaaatgcaccggtttggattcaggcacagccccagtctgcctacaggtaatttaacnnnnnnnnnnnnnnnnnnnnnnnnnnnnnnnnnnnnnnnnnnnnnnnnnnnnnnnnnnnnacgtactttaaaaagtaaccatgggtttgtcataattctcacttaaaaataatgcataaatgtatctagcaaataatatgattaaagaagagcttttgggggtaaagtttgacttggttatgatatactcaagacttgggaattttgtttagccatttagatgactccatttcttgcatatatgtctataattaagtatttcagagtgtgaannnnnnnnnnnnnnnnnnnnnnnnnnnnnnnnnnnnncttccattgtgctactctggcttaagctttttcaggggttggtgttccgaatacacagtgagctcacagtataaagacatcaattaggagttgacaggtatggaaaactagagttttgaaaggtaaaattaggctctaggttatatatatggtaaaaactcaacatagcattcattttaccttagtgcttctctctgtgactttataaaagtgaaagggaatagtaagacgaagataatacaaaaaaatttagttcttttaggagcaatgtgatttcagaactaatcgttttagcatttctaagatactagttctaacaaggagatgtgagcagtttgagattatcagaaaatcatggtttaaaccttcaaaaattacaggtttgaacagataggaggacatttctgaagcacaagatggctaagcacattaaccaaggacataaaatgtcagggataggactacaactcgtccattttaatagcctttctgttaggtaataaactaaactatcctctcctccgtctttaccccagtctacctacccattcttcctttctcctatacttcctaaagttttagttctgagcttttattattttgggatattgtcatctttctaatagtagaattttagtgaaagtaatcacgaccttttcagatagacttctgcataatttcatccctgtggctttggacgtactatccaaa

SEQ ID NO: 248784 - DNA, 1079 bp, Homo Sapiens
  misc_feature (372)..(421): n is a, c, g, or t
taactgcactgactttatatcttttgaatataattactgtgaaagtataaaggctgtgttctggaattttctgcctcacagcaaataaataaggtagtgaattaattattcattccattccactatcatgaaggactctgaatagacttggccaactgatgtttacaaaccagacttttatattttaattttacagattttactacatgatttttctaaattactatgtcaggttgtaaaagtcagtgcaataacaaaccttcctttttaagaagaaaattgtttctattactttcccattcactaggtaaagaatcatggacagaacttacactactttttaccatgtttcatcttggcataacatggttnnnnnnnnnnnnnnnnnnnnnnnnnnnnnnnnnnnnnnnnnnnnnnnnnncattgatatgcatctctgcaggtcctcattcatgttgtaaatttttgcagcaagcagtcaacattccacaaacgaacaaacattatacctcttctgatagttttattaagcatggagaaattgccaatttttaaaaactgcagttttccaaacttttctgccaacctcttactctgaattcagtgctgctttgggacatatacttgacctagcttggtttaccagtgatggaaaagtattttgatatcattaactttttcaaaagatccaactttttctctatgcctttgccacattctcttcagggtctctttccacagtggataaatgttttttctgtattatgacagtattgttgtgatggccatctgctggaaactcctgaagagcattatgtattacagtgagcagttgtattgcctgtttggtgcccaatggttaagtcattgtcacttagctttatattgtcagtttgatatttattttaaattgtggaactagatgcataaattcacatttctgcctttcctttgcatcttctcatatattgtgttttttccttttttcccagaaaaaatatttaaagcattgtttgacaggtaggaacctcatgtatctgtagtccatgagttatatcccgggctcagtgggagtgata

SEQ ID NO: 248785 - DNA, 1013 bp, Homo Sapiens
  misc_feature (357)..(366): n is a, c, g, or t
aataaaactacaatagactaggttttaatattttcatatcataagcagggtttgaaattgatcccttattttacatgaaataaaaacaatttctgttgcggcaggtttgatttcaacacagttgaatctgtaaaaaccaaagttggtttctgatgcaggacaaatatccacaatatttaaaactgcaagcaccatgcggttcatacaatcttgttattactgttaatttatcaactaatacaaactcaaaaatgcatccggccagcagcgccagcaatttcaaatgggaacttaaaaatacacttttattttggtatttttgtcagtgcaacttaaatccttttactgacctgcagnnnnnnnnnngtaataataaagaaaaacacccatatcttccctataactactatacaactgaagaattgaaggggggggacaccaccaagaactcttcctactatctcaaaagcagggaaagaaacgcaatgcattggtctaaagaacgcacttgaaagttgcaaaattacttgccaatgtttgggtttctggtacattctgagcatagcagttggttcagtgcagtgtctgcttaccagtgcactgccagggtcagggatggctaagcctctcaccctaggagcgctgtggctcctacaattagcgcaggcccagagggttcagaagggacctcagggtgattctggttacaataaaaagcagaggggaggatctgttttcctttcctttcctttcttattaagggtatcaatttgaccataagacaaggctgtagtccagaacactcctctggggtgcggagcttggcagcttccctgccctgccctgcccttgtactgggacctctcggttctctctctcagcaccaacaaggttgaaaactaaagcgagagaggaaaaagaggaccgaatggggataagggaaggaaagaaaacatgcaacttccaagtgtgccccaagacaaagttgttttctgatgcaaaatgcccggaac

SEQ ID NO: 248786 - DNA, 383 bp, Homo Sapiens
  misc_feature (19)..(19): n is a, c, g, or t
  misc_feature (133)..(133): n is a, c, g, or t
  misc_feature (143)..(143): n is a, c, g, or t
  misc_feature (154)..(154): n is a, c, g, or t
  misc_feature (322)..(322): n is a, c, g, or t
  misc_feature (346)..(346): n is a, c, g, or t
aacacagcgcctgcccccnagaacaagggaacaggaggagcttggcaacgaggtcatcacccgaacagcagtgacagtcctgcattcccaggcggctgtgcccaggggtgggggtacctcctccgcacccccnaccacaaaanttaaaagtccncacgggtctctacattcaaagcgggtgggggctgggggaaagaaaggcagatgggcaaatgctttctaaaccctccccccacccccaagagtactggccttttaagagggctgcgggggtggaggtcactgtctgccttgctctactgggccactctgggctggaagncagcctgtcggccacagccggttntgcctcatagaggtcacctgtcctggaggatggtcct

SEQ ID NO: 248787 - DNA, 441 bp, Homo Sapiens
  misc_feature (374)..(374): n is a, c, g, or t
  misc_feature (431)..(431): n is a, c, g, or t
aaatcatctttaatgtatttttaataatttttttgcctcatttaccagataaatcatctaaataaatagatgctatacagtctcttaccaatgtcagtacaaaaataaaaccgcgctctacatccactctgactctcccagcacacacacactcagcaaaggcatgtgcttggaatcaactcgtgcccccgacccctcccagatacattcatttagtctgaacaaagctcgaagctcattctgtgcaaaggaagcgctcttgtgctgagacctgggtgggccgcagctgggccacttcggaaaggcaaaagctaaaccacctcacaggaaggcacagcgcctgcccccaggaacaagggggacagggagggagnttgggcaacggagggttcattcacccgaacaggcagttgacagttcctggcattccngggggggctt

SEQ ID NO: 248788 - DNA, 405 bp, Homo Sapiens
  misc_feature (290)..(290): n is a, c, g, or t
  misc_feature (335)..(343): n is a, c, g, or t
  misc_feature (365)..(365): n is a, c, g, or t
  misc_feature (379)..(379): n is a, c, g, or t
gaagatgcagccccttcctccagcctgagagaataaagcatcattggcttatgcaaccatggcaatcccattccccttttctcatgattgatttgggaatgggcaagtgacccagttctaaccaatgagacgaaagaaaaagtctgttggtcagcttatctcagaagatttttgtttcctgctataaagagaaacagtaagttccttcctgcctgacttaaatgcaattgtgtgcaaacatgttacttgggagctacagcaacgattctgtgaccatgagggcaataagncaagggacaaaggatagaatagttgaaaagacagagtattgggannnnnnnnnatggatatccattgaactgctnggacccatgtgggnacccatctacttttttagtcctttcc

SEQ ID NO: 248789 - DNA, 420 bp, Homo Sapiens
  misc_feature (29)..(29): n is a, c, g, or t
  misc_feature (67)..(67): n is a, c, g, or t
  misc_feature (134)..(134): n is a, c, g, or t
  misc_feature (327)..(327): n is a, c, g, or t
ttaatttttaaatttaaattttatttccngccaaaacaagcctatcgatcggggaaggatccccccngttataatagataacacctaatatacaagccttgggaaatgaagcccatatgtggaagtggcccatnggaaaaggatacagagtagagtttcatgaaccctgaaacttggtggaaatttgatcctgaagaattagaaaagaggaataaacatggtgtgtctcgaaagaagattgctcagatgttggatcgttatgaatatcaaatgtccatttctattgtaatgaattcagtggaaccatcacacaaaagcacacaaagncctcctcctccacaggggagacagaggtggggaggctctcttggctcacataatcgtgtctgtgtcacaaataatcattaaattagctatttt

SEQ ID NO: 248790 - DNA, 1161 bp, Homo Sapiens
  misc_feature (494)..(502): n is a, c, g, or t
ttgggagcagtggcatggctttgacctagtatgaactggtgtctgcccagagagcagcatgtagcaggggggaatgctcaggtttgtgcctggctctgtggagctgtacaacccttctcaccctgtgggttggagccgagtcaggccactatggggaagcagttgccccacaaaatgtggtttgctgacctatttctaaactgttgaatatgctgcaccattgctgaaatgaaagatgactctgggggagcagagcttggccttgtgcccagctggcagccccctctgccagcctttctgctgcttttgctgctgtaacagcaatagtggagaaaaatgtaaaatttggtcttccagcttaatgcagtgtgaacaatagatggttaggaaaacaaaactgcttagaagcccctttctctagagcagttttatgtcatttgtaaaaacacatattagcaaattcgtttgcgtaggtttctattaaatatttgacnnnnnnnnncttattaagaaaatgaaatcccttacaccagatatcagttaattcaaacagaaaaccctttgggtatcaccaaattgaaatggtattcttccttaactcttccttctttcctttatttgtttagacgtgcttcatcctgaagtggtgctatggtctgttaaacagggctggcatcaggtagagggagcagagtggtgacctgatagctcctgtcatcgtgttagtttttgattctatttaagggaagtagctgagatttagacggatgtagatgctctttgggtgaatggaatcataagcaaaggttgtgttctggggtgaggatcatgagagagatatttatcacatgcacatgcctttatatagctggtctccttgggtggtttatgtgtgttttgtttatttattgaatatgttttcccttgctttaggggttttataggtcatttttcttaatagaagctgtgatcgacttagaatccaaatttgaggagtaagcagcataaccttctaccttgtaatatgtaactattctaatccagtggaatcttacggaaaacacagagaaaaccccttttatcatttgccacagaaggctgctgtctcccttctggatttgggtggggcaggtattgtttttgagccagtatttaacagag

SEQ ID NO: 248791 - DNA, 349 bp, Homo Sapiens
  misc_feature (75)..(75): n is a, c, g, or t
tcccccgaccccgactcccatatttgggtccatggacagtaaaggcagttggattcctcatagacaactgggtanccttatatttcctttgtaatcaagacttgagatatcgaagtcagttattggtctcccagagtgccagctctgggagccttttgaagaatcagcactcattaagagctgagaagagagaagacctgattgggtggttgactagcagtcacagaacctgtcctcccaggctgttcctgaggcctgaccacagtatttattttggcatgtctctggccttctgcagaggcccaccctcatgggcattgtctctgtttcccagtggggtggacagtat

SEQ ID NO: 248792 - DNA, 440 bp, Homo Sapiens
  misc_feature (426)..(426): n is a, c, g, or t
tttgtggactgcaaactaggagcagatcttttgagtgaagccgttcagaaaatcacagggctgaaaagcatatctatacattcggagaagtcgcaaatagaaaggaaaaacatattgaagggattacttgaaggagactatgaagttgtagtgagcacaggagtcttgggacgaggcctagacttgatcagtgtcaggctggttgtcaattttgatatgccttcaagtatggatgagtatgtccatcagattgggaagagtagggaagattaggtcaaaatgggaacagcgattactttccattcaataataatttcaaaaaggactttttctgggggtatttgccaaaacggagttaaagcccacagggttccctttctttcccccctcagtttttttaatttcccccttacctttcatggaccnggaggaggaaaggg

SEQ ID NO: 248793 - DNA, 744 bp, Homo Sapiens
  misc_feature (45)..(45): n is a, c, g, or t
  misc_feature (356)..(372): n is a, c, g, or t
  misc_feature (457)..(457): n is a, c, g, or t
  misc_feature (548)..(548): n is a, c, g, or t
  misc_feature (590)..(590): n is a, c, g, or t
  misc_feature (681)..(681): n is a, c, g, or t
  misc_feature (734)..(734): n is a, c, g, or t
attcggaacgaggggcaaaagcagtctgactcagtgggcagaatngaggggcccctctagccaggctcttacgccatggttatgagcaggttgatgagggtccttcggccagcacaaccttcctccctactcacggcatggagtctgactgcatggaagttccagatcctgacagagagaactgggaaggatccaggttcgcttccgttggtagcttgagtcccatgcctccaccctgccatctgaggaaggggtgacaagtggtcaaggagctgtggccacagacttttccagggtggtccttggcaggtgaggtgcgtctgtgccacccttgtcaggagccattgacgacgggnnnnnnnnnnnnnnnnngggacctcagagtgggggcaggcagaagggagaaccagctcaagacattttggaggatctggccctggggttcttcagagaacanttttttttgggctttggggacatggcctgtccccacatccagcccttgcctccgccatggtcactcggcagcccttttcccaggagaaganacctctgggagcctgctcagtgcttgtcctgccatcctgtgncctgggactgagggttactccagttgctctgtgttgcatactctcccccgcaagcctgtgtatgaagaattgtcccctggcttccagcagnccatggctggctgttttgtgactgttacattgtgacaggggtaattaatcaanttggctttta

SEQ ID NO: 248794 - DNA, 1266 bp, Homo Sapiens
  misc_feature (410)..(427): n is a, c, g, or t
  misc_feature (1189)..(1189): n is a, c, g, or t
ttggctaaaacactgtgaggaaaaatcattcaagtggcatgccaagtccctatgaaggaagggctgctatcaaacctaccttttttgagcaaactgagactaaacttctctcttttcaaaattgtgttatcttccttaatcctattttcataatttttccttttgccagtttttcacattatctttgatatgtgagcaacatttattatttacattagagtataccttttagtaataaaatgacttgaaatcatattatttttaaaagccctttgcttctttcattacttataatctcctctaaaacaacctctgcatgttttttttaaataaagcactttctgtcaaataatggacttttttctaaacagaaattattttctattaatttgcaaactgatgatttcacnnnnnnnnnnnnnnnnnncgattatcagagtacttagtaaatgttatatagtttagttctaagatagttccagggattaaaaggttaagaggaaaacacaaatcaccaaatttctgatttatgtttttatctcctgaacaatattttctcactcatattcctctatcttatcacttagctaaagacagcctaaatttcccaattttctgtccaaaatatttgtgatttacttgtatataagccttctcatttgccatgtgctgtgatcttacaagttagatgttactatacctaccatttattcagctggattgctgaacacagttctggattcatagaattaagaatatcttgttagtgcccaggatttccacgttttgtgttttattggcccttttctttattcagccccttaatctattttcagtcttctggcacgtaatttttttcacagttattattcttctattaacaaattatttttatctttcctagtacattttcacttagttctcttgcccttaaatatctttcacatgcattttaggatattcttttcaaatatttgtaggacaactttgaatcaaaataaattatgttccttctccaatttgaagcattgaggataaatgaccatttgaggtctaactgatcttttcctgccagaagagttatcttacgttctgctatatttgtatttgggccagttgattgtaggttgtccaacattttttaatattgggaaaattatgataaaatgctttaaaaattaatatgccnggattaaaataactggaatagtttactatttcattcaggcctgtttaaaaccaaatatttccctttcacccggtttt

SEQ ID NO: 248795 - DNA, 975 bp, Homo Sapiens
ttgggtagcttcttgtagcttagaaagcgctttatgcccatgatgtcatttcaggctcaaccaaagaggatcaaacaggaattccatcttggcttccctaagacagattggctttctaatgagtttaagtgggcagaagtgtagggttcagtgtgtcctgactcccttgaggcttataatgggccaagttgaagactgttgatgatccctggtgggtaaattgcagacatcaaatgctagggattggcataggctagtgtttagcttgtctatttgccatatctattttttttaaatttccatacacttgtaaaagtagttagttgcttttgattgagttatatagcagtttttcatttggtcttccactcacctttcactatatttgagtgttcccttacaggtatgttggcatgtgttggaaaatttacacaattaggtttaaattcagtaggatgtgattttaggatgctactgatcaaagtgatatctgtgtctgttggaatcttgatagctgattaatttgccctcaattctgctccctgaacttcacacataaatcttcccaagtgggttttagggtgtatagatcccagcaggattaaggaggtggaaaagcagctaacatttcttgaggctctaccacatagcaggcactgtcacagagtaatggcattaatccccataataatcctgtgaaggtgatattctcatcccatcttagacatgaggatattggaactcagagaggtggctattgcattgcgcagaacgctacagagcccatgctcttcccagagcagcacccacaaaagcaagcattgattttgtgctcagtgtgtgccaagcactgtgcagagggtacacagttcctgccaggttaacaccctcccttcaggcctcccaaaggcataggcttgcaaagagcagaaggtgtgaaatcacacttttcctcttggcaccctggttccctga

SEQ ID NO: 248796 - DNA, 1021 bp, Homo Sapiens
  misc_feature (598)..(608): n is a, c, g, or t
  misc_feature (908)..(908): n is a, c, g, or t
  misc_feature (942)..(942): n is a, c, g, or t
  misc_feature (978)..(978): n is a, c, g, or t
  misc_feature (992)..(992): n is a, c, g, or t
  misc_feature (1007)..(1007): n is a, c, g, or t
cagaatctcagtgtattctcaaagtaaaaaggcataaccaagcactctcttatcttgccttattgctatactatttacatcccactgcagaacagcagatttgaggcttttctatatacttctcaaagcactgaaaagaaaggaagggtttgcagaggagagtgtagaaatcccagtggtagcatgtaccaacaggtgagtagaaaggtagtgttagcctgacatttgagttatactctgtgctgcctgagcaagatttgtagaatcatataattaccttttcatgtatatttgaaatcagaggtgtttaaaatacctatgagataccaatgtagccttaacatatgtcaaaatgcattgctggttagataattatttggactacacataaactcctaatattgaatcattacctatcaggtattatctttatggaacttttcaatatctttgctttataaagattctaaacatgtatctgagctggtaatattttaaaatctccattatttgtgtaaaactgtttataagcagtgtttgagagggtctgctttaccattaccccctcaatatcatgatcatccaatctcaaatgtgnnnnnnnnnnngaaatttgattttagggattgtgagtaaacaagtttatatagagagacattgtgaagttaaagttttcagaagttacatttgtgcagttcttacccttttcctcatatagtgccattgaaatagactgaaattatcttggcaaaagttagacaaccaaagacgactttagtggactggttttcaaaacttgagcagctgaaaagcaaaagccgttgttttcccatgacaatgtagcctttgtggatttgggtttgtgctttgggttgaaaagaagttttttagtcctaggccagtagatngcagcagctttttcattgcagacaaaacctcttnaaacccttcccccatggcacaaactcgcccatgatngaaagcatctagantttctgccttccttntacagttaatccag

SEQ ID NO: 248797 - DNA, 413 bp, Homo Sapiens
aagggtaaaaggtgcctgttgggaaaacatttttaaccttcaataccccaggctctgtttccatcccctgcaacccccgcaccccccactcaactccccctgagggggttaaaatgcagaggtggttgaccctgaagggttctgattcccctccttccccaagccttagggcctacccctggagtgctgcagtgtgtgagagctgctgcttgcttgtttctccactaggcctgcttccaaatgcttagccaatctctggagccgacacagttgcctacggggtgacttagcaccaggttccattagctctccaagtgactgtttccacccagtacttttggcgcttgaggatggggggagggggattatttaaaataaataaaatccgaggtggcagtagaggattccttttg

SEQ ID NO: 248798 - DNA, 477 bp, Homo Sapiens
  misc_feature (11)..(11): n is a, c, g, or t
  misc_feature (28)..(28): n is a, c, g, or t
  misc_feature (62)..(62): n is a, c, g, or t
  misc_feature (82)..(82): n is a, c, g, or t
attctcccccnttcctaatgtcttttangttcccccagggggccaaccaactgtggaagcanttcctgccctgtgtcctganatttgaaaccaggacccctcatgaaacaggcccccagacccctccatgcatgtgccctgaaaaatgaggcccactcaagaggggaggagcacaaacggcaatcaaagaatgggaagaggccaatgaaggaagatccccaggtggtcatcttcaaatcacactcacaccagcagacacactaagatacatgcaggcctgaccccagagcggatgaaggacaatcccgaatccaaccttggcaaatcgattgctgccggtcctctccttgtgcaggctataatccaggagcctcttgcaaatggtctcagtgacttcgattaaccgcaagtcccaatgggaagtgactcagagctggaaggaagataggtcatctggtctgggggatctgaaatggc

SEQ ID NO: 248799 - DNA, 1047 bp, Homo Sapiens
  misc_feature (424)..(450): n is a, c, g, or t
ttgggcttcttctcctcgggtcttggtcctgcatcctctctctcccagagcctccgttagggggtgggaaaggactttgccataggtcgctgaggccaccatctgctctcttactggccaagggcgtaaaaagatagtcctcccattagctagagagcaaaccccagaaagcctattggctgcgccgtccgcgggccttggtccgctttgaaggcgggctgcggctgcgagaggagggcgggcgggaggctagctgttgtcgtggttgctcggaggcacgtgtgcagtcccggaagcggcgaggggaaactgctccgcgcgcgccgcgggaggaggaaccgcccggtcctttagggtccgggcccggccgggccatggattcaatgcctgagcccgcgtcccgctgtcttctgcttcttccctnnnnnnnnnnnnnnnnnnnnnnnnnnncggccccggagctgggcccgagccaggccggagctgaggagaacgactgggttcgcctgcccagcaaatgcgaagtgtgtaaatatgttgctgtggagctgaagtcagcctttgaggaaaccggcaagaccaaggaggtgattggcacgggctatggcatcctggaccagaaggcctctggagtcaaatacaccaagtcggacttgcggttaatcgaagtcactgagaccatttgcaagaggctcctggattatagcctgcacaaggagaggaccggcagcaatcgatttgccaagggcatgtcagagacctttgagacattacacaacctggtacactaaggggtcaaggtggtgatggacatcccctatgagctgtgggaacgagacttctgctgaggtggctgacctcaagaagcagtgtgatgtgctggtggaagagtttgaggaggtgatcgaggactggtacaggaaccaccaggaggaagacctgactgaattcctctgcgctcaaccacgtgctgaagggaaaagacaccagttgcctggcagagcagtggtccggcaagaagggagacacagctgctctgggagggaa

SEQ ID NO: 248800 - DNA, 373 bp, Homo Sapiens
  misc_feature (163)..(163): n is a, c, g, or t
ccaaaggatgtacagaatttttagcattgtgctcaaacagaatgtgtccctaccatttgtccccttctcccctggcccccagctctccccacctgggcagggggtcttgctttaacctcctcccttcccccagcaggggagagttcaagggaaggctgcgganaacttttcatcccctgttcctccctcttttcccctttgaagggtgggctaggccattttgccaagttctagctctcacaagtccctcctcaaccctgtcaccctcctctgctctggaactgactccctccccagcctatgggaaggtggaaatttcaggcaagaggggatgaagacattcagttgagggcattcagttgtctttttccat

SEQ ID NO: 248801 - DNA, 1145 bp, Homo Sapiens
  misc_feature (1084)..(1084): n is a, c, g, or t
acaaattcgatgagcaatgctttctttataatagccaactttgtacaaaaaagttgggttcacatctcaataggttgatttttctgtgttgtccaagttatagatttctaatgctaagtacagttccatgttggtagtgtgcgtagcacagtaagatgtttgtggtgccagtgggcttgtgtttatattgtgtagatgttctggaattccagctctagagaagatgtaaattaatagaaatcaccacttaataatatgtacacaggattgatattatgtggaagcatgattcaggaaagtagatgacttattcataaatatgaagcactgttacatgtaaggccatgttctagccacagtgaatgatagaaaaaggaaggaaggggcatggtgcctgggctcaaggaactcacagtttgatagaggaagcatcacagcaaaagttggggccacttacaccatggcagttacagaaggccaggagctcagtcatgagaacatcaccttcccctgcagaagagttgcgctaagttgcccagaatcatattctgtaccttcatctctcaaccttccccagtggcaggaaagggtcaagcaagacccattccctctctagtgggacaaactgattctgtttaactctcatatgcctgggagcaagctgaggtggaatttgggttcccctacctctactcctaattgtaaatgggctgtctagacatgtgttacattaatttgatgaactttgttctgaagaaatggaaggtctccccccccttttagaccaacactacctgtctccctgcattttatttgttttcacctggtacatgttaagtcaaaatgaataatcatgtttctgaccaatgtgtcttttagatcacataacattgcctttatgaagatttcatagaaaaaggtttttttatctagatctcagtaccaaggaaagctctgatcctaagcgcagtatgtgtacacacacacgtctacatgtgtgtgtaggatctgtatgtatgtattacaaacactgtggatttttgtaacttaaggctgctttttcttctctttgttctgggctggnggggaaagttccaacaaaacttacaggcccaccttcaacccaacttaccccccaacccata

SEQ ID NO: 248802 - DNA, 1273 bp, Homo Sapiens
  misc_feature (1221)..(1221): n is a, c, g, or t
ccaactttgtacaaaaaagttggctcatctgtcagagtgcacatgaaaaatcaggcagggaatcgaaacgacagcgctggaggagactcaggaagcagaggcgtccctgccgctgcccttggccctgcaagcacatcatgaccctttctggcagcctcttggtgctctgggtagtgagggatgaccagtcttgtcctgagaaatgtttctcttagtctttaagttcaaagactaacctgtagcaatcagactttccaaaagggggttctccattttttgtagttttgtctaaatttttaatgaccatttcctggaatcagtttattatactgaaaactgggggtgggagtagggagctagtttgttgataaatagttcccatttccccgtggagaatttgacataccctggactcctgtgtgcctcctgccatccctgcacacagcctggggagaagcctgtgcctccccgtgtggagagaaggcaaccccagatcccctgagctaccccggaggaaaggcagtcctggacagaagactgtcagcagaaggaaagtactggactacccgtgggtaagtcctgccattcaagactggagacacctgggaaataaaaagagcagggcactgctggtgggaagaggcattttaccttccagtgcaaatcctgctcctttgatttaatggggtgtactggggccaggggctgattcacttccttgggagatggtggtgttttcatgaacatctttgatccttccatttcatttattcatccatccattcaacaagtatttgctaaacactaacttaagctaatgctagggtagtgactgagatgtaaaaatagattttagaattaaaccaaaatccaagtcctcacacccctgtcatcccaggagatctttccttgtggtggtttctgtgagaattggccatcctgaggacacagccaggacggcagaggcctcctggctcagggcatgccctgcctaccttctgaaatgtttaccccattgaccaaacttggctccagccattggcggtggtttctagatagccaggcccaccaagagatattgccccttgatgagagtcaaacaccctgcctacaaggagatgtttttgaaatgggagagggaaaattgggcaccttcatctttttaaagggcagtaatgggaatttgatttttcagttaactgaattttgtggcacaaaacnttttaaacattagttgaagcctgttttcgtttgaactatttctgggttttgg

SEQ ID NO: 248803 - DNA, 412 bp, Homo Sapiens
  misc_feature (401)..(401): n is a, c, g, or t
ttgggacatgccatatccgtgcttgggggcctatggaacctccaaagcggccgtggcgctatctcatggacacattcagctgtgaactccttccctggggggtcaaggtcagcatcatccagcctggctgcttcaagacagagtcagtgagaaacgtgggtcagtgggaaaagcgcaagcaattgctgctggccaacctgcctcaagagctgctgcaggcctacggcaaggactacatcgagcacttgcatgggcagttcctgcactcgctacgcctggccatgtccgacctcaccccagttgtagatgccatcacagatgcgctgctgggcagttcggccccgccgccgctatttaccccggccagggcctgggggttcatgtaatttatccactaatanctggcctgaag

SEQ ID NO: 248804 - DNA, 297 bp, Homo Sapiens
tcttcccaggaggaagttgaaaccccggaaacggggcacccctgcagtctgggctcctccctcgtggcggactactccgactcggagagtgagtgagcgatccccatcctggagactggacccgctctagaggccgggacacacccaggaggcccctcacagactgcagacccccggctcgcccaccagccctgggagagctcagatgccgcatcctccccaggccgcgccttcctgcaaccgtggagttatttatttggtcctggtgagggtgtttgtgccttgtgagactccgta

SEQ ID NO: 248805 - DNA, 457 bp, Homo Sapiens
  misc_feature (23)..(23): n is a, c, g, or t
  misc_feature (64)..(64): n is a, c, g, or t
cgcagcccttttttggggaagcnaaccttaagggccggaaaatttaaaacccctccccttgccnggaaggacctatgaaaagctagaattgagtgtttaaagttcaacatgttatttgtaatagatgtttgatagattttctgctactttgctgctatggttttctccaagagctacataatttagtttcatataaagtatcatcagtgtagaacctaattcaattcaaagctgtgtgtttggaagactatcttactatttcacaacagcctgacaacatttctatagccaaaaatagctaaatacctcaatcagtctcagaatgtcattttggtactttggtggccacataagccattattcactagtatgactagttgtgtctggcagtttatatttaactctctttatgtctgtggattttttccttcaaagtttaatttatatttattttctt

SEQ ID NO: 248806 - DNA, 988 bp, Homo Sapiens
  misc_feature (353)..(353): n is a, c, g, or t
ttggattttatttgaataaattcttcctgtaggtaatgggaaacaaaattaatagttcatatgtcactcatagcatttctatatttgaaagtagcccaatataaaacttttgattctaaaattaaaccagcagcctattacaagcacattctttgattgagtcattggttataaacttactaaatgcagagaaagcagccaatttaggaaacttctgagttggtgggacactgttgattaataatgtactgtatgaattaagtgatgctttaactttgattttacattttaaagttaaaatgtgggcattatgtcagcaaacttaagggcattatgtcagcaagctaaaacanttttttttcctgtgcttttaatgtatctctttacatgatctgagagaggattcaagttgatagaaatagctgaggggaaaagggggaacatcttgggatgaagcttgtccttatggtgatggtttaattacagattaaaaaattagaaggaaatttcagtggattaagtgtatagctttcatatctacatttcaagaaattaccattgtaacttgataagagatgatttattttatgtaaacatctttgcaaagcaagggtgtaggcagctcagctaggatttattactgtgcacgaaagtaaatacctatctcaattattctttttcttttccaatataaagtttgctgaatgtacaagaagagtttatcacttaggatatagaatttttttaggggttgggggaggggatctgttaggaaactgttacctataaacaaagattgactgggattcgatccaaaagataaaacttgaagctattctgggaactaacatggaaaaatgaaatggctattgtttaaaaaaatgatagaaatacattgttgatgggatatgagttaagtttattttctacaactgtaattgatgaggacatggatatatcttcatgtttctgagagtaatctgtatgt

SEQ ID NO: 248807 - DNA, 1073 bp, Homo Sapiens
  misc_feature (1058)..(1058): n is a, c, g, or t
ttggataaatatgaacaagctgaacattttaggaaaaaatcctttaaaattcatcagaaagctataaagaaaaaaggcaacttgtacggatttgcccttttacgtagacgggctttacagttagaagagcttacattaggtaaggacacacctgataatgctcggaccctcaatgaactgggtgttctctactattcttcaaaattcccgtggaaacagctgaccagtttctgaagcgttccttagaaatgaggggagcgagttctaggaccagatcaccttgactgtgctcagtctttgaataatctggcagctctatgcaatgaaaagaaacagtatgataaagcagaagaactttatgaaagagctttagatattcggagacgtgcattagctcctgatcacccttctttggcatatacggtgaagcatcttgccatcttgtataagaaaatggggaaacttgacaaagctgtacctttgtatgaattggctgttgaaattcgacagaaatcttttggcccaaagcaccctagtgtagcttactgccttggtgaacttagctgttctttatagccaaatgaaactacacgttgaagctttgccattatatgaaagagcattatagatttatgaagatagcctgggtcggatgcatcctcgagttggagaaacactgaaaaatttagctgtgcttagctatgaaggaggagattttgaaaaagctgctgaattatacaaaagggcaatggaaataaaagaagcagaaacatcactcttgggtggaaaagctccttcacgccattcatcaagtggagacacgtttagcttaaaaacagctcattctcctaatgttttccttcagcaaggacaaaggtaatagcagcagttagaattctttgcaaatgtaccttaagacaaaataattaaacatttggaacatttgaatttgaaactttaaaaaaatgttgtacgaaattttactacgtgtgatttaactgctatttgtatgaagttgtattggattacattaagttggaattgtgatttgctgtttngttgtttaaagattt

SEQ ID NO: 248808 - DNA, 1472 bp, Homo Sapiens
  misc_feature (1177)..(1177): n is a, c, g, or t
ttggcttctctccctgactgctgctcacactgccgtgagaacctgcttatatccaggaccaaggaggcaatgccaggaagctggtgaagggtttcctctcctccaccatggttgacagcactgagtatgaagtggcctcccagcctgaggtggaaacctcccctttgggtgatggggccagcccagggccggagcaggtgaagctgaagaaggagatctcactgcttaacggcgtgtgcctgattgtggggaacatgatcggctcgggcatctttgtttcccccaagggtgtgctcatatacagtgcctcctttggtctctctctggtcatctgggctgtcgggggcctcttctccgtctttggggccctttgttatgcggaactgggcaccaccattaagaaatctggggccagctatgcctatatcctggaggcctttggaggattccttgctttcatcagactctggacctccctgctcatcattgagcccaccagccaggccatcattgccatcacctttgccaactacatggtacagcctctcttcccgagctgcttcgccccttatgctgccagccgcctgctggctgctgcctgcatttgtctcttaaccttcattaactgtgcctatgtcaaatggggaaccttggtacaagatattttcacctatgctaaagtatttggcactgatcgcggtcatcgttgcaggcatttgttagacttggccagggagcctcttactcattttgagaattcctttgagggttcatcatttgcagtgggtgacattgccctggcactgtactcagctctgttcctcctactcaggctgggacaccctcaactatgtcactgaagagatcaagaatcctgagaggaacctgcccctctccattggcatctccatgcccattgtcaccatcatctatatcttgaccaatgtggcctattatactgtgctagacatgagagacatcttggccagtgatgctgttgctgtgacttttgcagatcagatatttggaatatttaactggataattccactgtcagttgcattatcctgttttggtggcctcaatgcctccattgtggctgcttctaggcttttctttgtgggctcaagagaaggccatctccctgatgccatctgcatgatccatgttgagcggntcacaccagtgccttctctgctcttcaatggtatcatggcattgatctacttgtgcgtgggagacatcttccagctcattaactactacagcttcagctactggttctttggggggcctttctattgtggggtcaactttatctgcgcctggaaaggaccctgaatcgacctcgtccccttcagttcagcgttttccttcccgaatggccttctgccctctggaccaatctttccgggtgggctggttcccactttaccggggaaactataaactcccctccttcggaatttgcc

SEQ ID NO: 248809 - DNA, 1357 bp, Homo Sapiens
  misc_feature (210)..(224): n is a, c, g, or t
  misc_feature (641)..(655): n is a, c, g, or t
ttggccttcctcccatttctcttcctgggtcctgatgaggtgagctggaggaaccaatagtcaggatgccctggaattgatgttgctctgttttgtgctcacaaaacagccatgtaacacatgagcacctgagttgaagccatccagtcgcaagtcagcagacagcagttgatggaattctcagtagaaattcagtaagggtgcccaaannnnnnnnnnnnnnncacctatactctaccaatatatggtatttaggaaaacttcttttatccaagcacaaagaaaagcacacacatttttataatcatctgcttcatcaggttaaataaataatttaacaaatttgatcagcatctctagtttaccagtactttaatattagttttcttacaaattaatgtattttgcaatatttccagaaaatcactgtgggagaataatgtaatattctttaggatatatttcctgaccttttcttaaatggcttcatgtgctattcccccaaattctgctttctctattttcttttttatttaacctataattatactttctagtatattctgagtctatcttctaagccaccttacatttttcctggaacaagggagggaataaatagttgtctccactaaatcagnnnnnnnnnnnnnnntatcccaggggagctgtgattatgccaagagctctaaacagaagtttgagaaggtaaaaattaagttgtagtatctgagttgtttttattttcttcctttggtgtttatgaaggtattcataagaactttaatttcaggggaaaaaatgcctgatttgctatttttgacatttccttgtctcttaagaagtcagttaaatatgttttcatagtttatattcctgtttcatagattactgtgaaacatgtatttaaacctatgaattataaaatagtatttagattctagcgtgagttaaatagattagtcatatatcttttagatttgtggatttgacatgtaaattatgtgttgtgtataagtaagttagttactaaacatatggcatggttattgataaacttgttgctatttttttccaaatgctatcagtgtttgtggacttttaaaaattagtttgaattttggaatgttctgtgataaaatataatttcaactattttgtacatttaaatatgccatgttgtatatgtctgtatttaaaaatgttgtaaatatctgcattttaagaattatgaaagattttcctcaaaaatgacagaactctccatacttaattgtgacacattataagatatctgattttaagcttttggattttgttctaaaaattaagtttaaacatgctgaaaattccataa

SEQ ID NO: 248810 - DNA, 645 bp, Homo Sapiens
  misc_feature (322)..(334): n is a, c, g, or t
atatcaaacacatttattcttaaagtgagaagctcatcaaggatagctagaggagagtgaaatatttacagtagaaaagtatggatgctagccaaacttcaaattctgtcactgcagagttattccgatagtacttttccaccatggcacatcacacatgttaaaattaactgcattcttgtaacacctctcaatggttgtgcacaataatagaagcaacattctgggactctttttcttaagatcctacagaatgaatttatgcacacacaaaaacaagtataatacaaaacattcaaaacaagtcacatccatttttttnnnnnnnnnnnnncagcaagatgaaaataggcaagggatgggttgctacttctatgtgcaaggtactggattcttgcattgagaatcctagtgtcgggcctcacgtcaagcatcacatcaaaaaagtgtgcagaaaaatgagtcaccttcaatatgaaggatgtgagttgtgtacactgacaacggtctcaaagatacaacattattgcaggaggaatgcctgtgtacagagtggaccatcttatgaggccaaaaacccatgagttaccagatgaccattcagatatttgggccaacttttttgtacaaagttggctataatgg

SEQ ID NO: 248811 - DNA, 900 bp, Homo Sapiens
  misc_feature (148)..(216): n is a, c, g, or t
  misc_feature (738)..(765): n is a, c, g, or t
tttttactatctttggtagtacttttcttactatcctgtctagaatcatgtcttatgattttaacagatatagaaccactcctagaaaatgttctttcactttctcgtttcctttttaatctatcatcctgactactgaacttaaaannnnnnnnnnnnnnnnnnnnnnnnnnnnnnnnnnnnnnnnnnnnnnnnnnnnnnnnnnnnnnnnnnnnnttcctatctttatctatacttcgactcctctcctttttcctctcttgttctttagcctcacctttatgcttatgactgttcccactaagatttccacgttgatcatcaattttacgcctatctcgactcctactgcgactggcacgattggttcgtctatcccttgagcgacttctacttctacgtctctctcgggaaggactccgatttcgtcgtctttctctttcaatgctatttctattagatctccttctatctctaatctttaccctagccctattgctctctattttaattctgcgagaatagcttctactcctgctacgtctagctttgattgttggagatctactcctactgtgtctctttttccttttaggagaagaagaccgagaagaagtacgactactacctgagctagaactgtatgaagagctagagacagtactactagtactactagttctgctattgctactggaactaccactactagaacttcccgacctactccttccttgnnnnnnnnnnnnnnnnnnnnnnnnnnnnggttctaaaactgatgtggtttcatttggagttctcttcttttcattaaccacatcaccgtctgcttctcttgcttctagtagtgataaactattttgctctttatggataaattcaccaacttttttgtacaaa

SEQ ID NO: 248812 - DNA, 508 bp, Homo Sapiens
  misc_feature (78)..(78): n is a, c, g, or t
cggccacatccagcagcagtagcagccgcaagaccgggactcgaaggcccaccgcagccggactaagtcgtccaaggngccgccttcggcctacaaggaaccgcccaaggcctaccgggaggacaagaccgagcctaaggcctacaggcggcggcggtccctcagcccactgggaggccgggacgacagcccggtgtcccacagggcctctcagagcctgaggagccgcaagtcccccagcccggcaggaggtggcagcagcccctattctcggcggctgccgcgctccccgagtccctacagtcgccgccgcttccctagctacagccgccacagctcctacgagcggggcggcgacgtgtcccctagtccctacagcagccagcagctggcgccgctctcgcagtccctacagccctgtgctcagacggtctggaaaatcccgaagcagaagcccgtattcatctaggcattcaagatctcgtagcaggcacagattgtctagatc

SEQ ID NO: 248813 - DNA, 803 bp, Homo Sapiens
  misc_feature (352)..(364): n is a, c, g, or t
ccgctgggacgtactttccccagcgcccaccacaaaggcagccccccccaaggctgcccagcccaggcaagcctggcacataccaaggccagcacgtccgcggtgaccgggaccagtcccctccgggctggcacaagtgtgggagcagctgaggacccgcaggtcaggatggacacacttcagaaggacagacaggaccatggagggctgcccttagggtgggagagaggaaccagctccgaggaccagagccgctgctcccctctgatgacaatgtgtctgccgccaacctgagatggcttttccacagagacagagaagccacatgcagttcttcattctacgtcagttnnnnnnnnnnnnngcatctttcaaaaaagcaagagcaccaaggatgaccagcaatgtcacagctcagctacacctgagggtcccggctcccaccctgccctagagggctcacaactcctgtggggccagtgtcccctgagctggtatccaagaggccacttcactagccctggggggcagaaaggatttgtctcaagccccccaaggggcatgagccagtgaggcctggtggacgcagaagcccaccacccacctcttccagcaacaaagcccgcggggcacagtgcagggacagcatggccaggcagctgccctgagtgtcgccagcacgctgtggccaccgccagagtgcggcacagggcagggggaatcctagggggcctgctagcaggataagcggaggcccccattgctaaggcaggcgcccgagagtcactggttcacattcccaa

SEQ ID NO: 248814 - DNA, 965 bp, Homo Sapiens
  misc_feature (905)..(905): n is a, c, g, or t
  misc_feature (917)..(917): n is a, c, g, or t
  misc_feature (926)..(926): n is a, c, g, or t
ttggccctgcgccagtacctctaaattcaggaaatatttctgttcaagacagccatacatctgataatttgtcaatgctagcaacaggaatgccaagtacttcatacggtttatcatcacaccaggaatggcctcaacatcaagactcagcaaggacagaacagctatattcacagaaacaggagacatctttgtctggtagccagtacaacatcaacttccagcagggaccttctatatcactgcattcaggattacatcacagacctgacaaaatttcagatcattcttctgttaagcaagaatatactcataaagcagggagcagtaaacaccatgggccaatttccactactccaggaataattcctcagaaaatgtctttagataaatatagagaaaagcgtaaactagaaactcttgatctcgatgtaagggatcattatatagctgcccaggtagaacagcagcacaaacaagggcagtcacaggcagccagcagcagttctgttacttctcccattaaaatgaaaatacctatcgcaaatactgaaaaatacatggcagacaaaaaggaaaagagtgggtcactgaaattacggattccaataccacccactgataaaagcgccagtaaagaagaactgaaaatgaaaataaaagtttcttcttcagaaagacacagctcttctgatgaaggcagtgggaagagcaaacattcaagcccacatattagcagagaccataaggagaagcacaaggagcatcctttcaagccgccaccacaccagcagccacaagcattcccactcgcatagtggcagcagcagcggtggcagtaaacacagtgccgacggaataccacccactgttctgaggagtcctgttggcctgagcagttgatnggcatttcctcnagctccagntgtttcaagggaagaggctgtcatgttcaatgatggcat

SEQ ID NO: 248815 - DNA, 927 bp, Homo Sapiens
  misc_feature (257)..(384): n is a, c, g, or t
  misc_feature (781)..(853): n is a, c, g, or t
ttgggcacaacccaattataactttgttaattttgtttactatttcagttttctgtatttccatatgtaagtcaccatttcttttaataatatgcatgagccaccgtgcccggcctcttagttgttttttaaaaattatgtacattttaagtattttgcaataaagaaattcatgcaaacaagaaaaacacatttcttataccatcaaatttgtgtagcatgtaataaaaataactatttgtattaaaattaggtannnnnnnnnnnnnnnnnnnnnnnnnnnnnnnnnnnnnnnnnnnnnnnnnnnnnnnnnnnnnnnnnnnnnnnnnnnnnnnnnnnnnnnnnnnnnnnnnnnnnnnnnnnnnnnnnnnnnnnnnnnnnnnngaagggttattgtgtgttatattactttccagggacattcaaatgttttacattactttaagaatctttacttgatataagaacaaagtataagggtttaaaagttgtttttattaaacatactatataaatgggttaatggtctatttttcagtttttaccaaaatcatgtgtctcactttttgtcttcgctttttaaagaactggttcatgaaattagtgttagttcataaattgtttaagaagttccttttccattgaattagattgctgtaaaagggagaaaaagggaagcttcccataagaatagtttgaaaacaaattgacttgttcatttccatattatctgcttgatgatatggagccagtgtcaatttttctgttagtgaatgttttnnnnnnnnnnnnnnnnnnnnnnnnnnnnnnnnnnnnnnnnnnnnnnnnnnnnnnnnnnnnnnnnnnnnnnnnntcctccaaccatcccatcctggaacatattagccagaaagaaagtagtctccagaaacagaccatgctgacacc

SEQ ID NO: 248816 - DNA, 468 bp, Homo Sapiens
  misc_feature (130)..(130): n is a, c, g, or t
  misc_feature (292)..(292): n is a, c, g, or t
gaactacttaaagctctggattactgccacagcaagggaatcatgcacagggatgtgaaacctcacaatgtcatgatagatcgccaacagaaaaagctgcgactgatagattggggtctggcagaattcntatcatcctgctccaggagtacaatgttcgtgtagcctcaaaggtacttcaagggaccagagctcctcgtggactatcagatgtatgattatagcttggacatgtggagtttgggctgtatgttagcaagcatgatctttcgaagggaaccattcttccatnggacaggacaactatgaccagcttgttcgcattgccaaggttctgggtacagaagaactgtatgggtatctgaagaagtatcacatagacctagatccacacttcaacgatatcctgggacaacattcacggaaacgctgggaaaactttatccatagtgagaacagacaccttgt

SEQ ID NO: 248817 - DNA, 825 bp, Homo Sapiens
  misc_feature (349)..(362): n is a, c, g, or t
  misc_feature (443)..(455): n is a, c, g, or t
  misc_feature (503)..(555): n is a, c, g, or t
  misc_feature (632)..(744): n is a, c, g, or t
ttggttaatcttagtgtgctgtttagtaatgttaggttttgttttggaggaaacctaggcatacaagacatgttaataagacctatgtgaataatgaatttaaaaagatcttgagtatatactcataactccagaaataacattaacttgaagctttatttcttgacaaaagctttatgaatgttatgagtttaaaatatgtcaatttaatactatgatttaaaaaacaatagcagatttcgtatgactgtggggacatggaaaaatcaagatcctattgattgctagctctggctcacttattctccggtaatgatactattggatatataccaaaattatataagcnnnnnnnnnnnnnntaagttttcctggcccaggtcttccattcttctggtccccttactatagtaattctagttactctcatcttattctgaggnnnnnnnnnnnnnccaaaactttttaaacttattttttgacatagggtcttactgtgtcannnnnnnnnnnnnnnnnnnnnnnnnnnnnnnnnnnnnnnnnnnnnnnnnnnnntaggctcaggtgatcctcccacctcagcctaccgagtagctgagacatggtggcacaggccaccatggcgggctaannnnnnnnnnnnnnnnnnnnnnnnnnnnnnnnnnnnnnnnnnnnnnnnnnnnnnnnnnnnnnnnnnnnnnnnnnnnnnnnnnnnnnnnnnnnnnnnnnnnnnnnnnnnnnnnnatgaaccacagcgccagcaaaataaactttatttattttcaggtctagaccatcagatagatttactcgaatattttctgg

SEQ ID NO: 248818 - DNA, 879 bp, Homo Sapiens
tccctctctggaactcaacgcctaaacttgcaaattgaatgcgctggatggaatgatctgaaagtgcttctagctctgagattttatgatttggagcagaggacagaggcagagacaggagaaaggctgagacagttaccccatgcactcttcagaattcagttaattggattcaggcagccacaggcatcaagaacatgcctcctgggaacctccaactggccctgagagaccagggatgcccgatctctgaaaagcccagctccagccctcagcaaacatgcagagcaatctcttgcacacactcacactcacagcccccagtcccacacccaccttcctccagcgtgataccctggatagggacactgtctcggaagccgctgctgtagccacccctggatttctcctgctccggagccccctccccagggccatagcctggccctaccttattgtatccctcagcaggtaggggatgcacatcactctgggaagggaaggggccttcaagcggtggggatgcaggaagaggaggcggccgaaagggggctggcggagagaatggcagccccagggggaaagaggagccccgccctccatacgggtcactagggaaggggcggggaaggaaggaaactgcaggtggttgggcacaacctgtggtacccctagtctcagggaacatccgcaggcccggtctgtaggatggtgggggccccgtctgggggtacagagggggcatgccatagccgaagccttctgataggtaaggagtttcgcaagcagggtcttcatggggataggaggggtaggggggcctgggtggtgagaagtccatgtcagtgccaaagggggttgccgatgctgaagggccaa

SEQ ID NO: 248819 - DNA, 474 bp, Homo Sapiens
ttggcttttacagtacacagaacttactttgagtaataacacattacacttaatagtagtgaactgcatcctcgatatcaaaagcgacttttgatgtagttcactctggacccgtacaggaacaccagccttgcagattctccacgcaatggaaactggctataaccctacctagatctgaaaagtgaagggggatcaacctaaaatatgtagctttgtaaacagttttatatcctgcatcttaggggggaaaatcagttgacgcagattgaaaacaagttgttccataaggtttattatgaaaaacagtatccctcctaccctgcctttaccccactttccttgcctcacagtagtctgtccaactcttggctgatttgtttgtatttacctccatgtctcaatatgaacatgttttcatgactattccttgatggttttttgtttgcttgttttaagacggtctcgctcttc

SEQ ID NO: 248820 - DNA, 895 bp, Homo Sapiens
  misc_feature (117)..(131): n is a, c, g, or t
ttggctgaaaaacagttcagtttgactttggaaatgctgcatggatatgtatcctaagctatgggggtagattgccagatctgatgtgtttctgtatggcaagagggctgtcttccnnnnnnnnnnnnnnncactttctgatgtcttaagagctgtaccttagtccattcaggcttctataacagaattccatagactgggtggcttataaaccaacagcaggaatttatttctcgtagttctaaaggctgggaagtccaagttcaaggtaccagcacattcggtggctggtgaggactcacttcctggttcatagatggcagatagcagtcttcttgctgtgtcctcatgtggtggaagaggcaaaagggctctctggggtcactttcataagggcattaatctcacacatgaaggcttcaccctcatgacctaactacctcccaaagacccccctcctaatgctatcaccttgggggtttcaacatatgaatttcggagggacacaaacattcaatctataccagagtgattgtttggctttgtttgatttctgttgtattttgatgtgtttttctctgggggttattttgttagagggaatcttagaggttaacatcatccagatgacagacgtcctgatgccggtgccatggcctgaaagctctctaatagactttgtcgtgacctgccaagggagcattcccacggaggtctgtaccatcatttctgaccccacctgcgagatcacccagaacacagtctgcagctctgtggatgtggatgagatgtgtctgctgactgtgagacgaaccttcaatgggtctgggacgtactgtgtgaacctcaccctgggggatgacacaagcctggctctcacgagcaccctgatttc

SEQ ID NO: 248821 - DNA, 505 bp, Homo Sapiens
  misc_feature (17)..(17): n is a, c, g, or t
  misc_feature (40)..(40): n is a, c, g, or t
  misc_feature (53)..(53): n is a, c, g, or t
  misc_feature (58)..(58): n is a, c, g, or t
  misc_feature (491)..(491): n is a, c, g, or t
taaaatcaaggaaaaanttcccccttgacgttgctgtggnctgtaaaccgtgncccangtttcccaattggagggtttaatcggatccccccctggtcggcccccttggtgaaataaaattggcaagaaaaaggggccttgctgttcaaacaacatattttcctatcgtgccctgcgatcttaatgggatgcaagcagagtcgcccacatcatttgagcttatcattatttccagacttttggtgggaatatgtgcaggtgtatcttccaacgtggtccccatgtacttaggggagctggcccctaaaaacctgcggggggctctcggggtggtgccccagctcttcatcactgttggcatccttgtggcccagatctttggtcttcggaatctccttgcaaacgtagatggctggccgatcctgctggggctgaccggggtccccgcggcgctgcagctccttctgctgcccttcttccccgagaatcantaggtacctgctga

SEQ ID NO: 248822 - DNA, 480 bp, Homo Sapiens
  misc_feature (15)..(15): n is a, c, g, or t
  misc_feature (37)..(37): n is a, c, g, or t
  misc_feature (115)..(115): n is a, c, g, or t
gcccgattttacatncctcaaatttccctaaaatccnccttgggttttagaactgatttttttcattccggaaaacctaaaggtttaaatcaaatattttaaaagtgaattattnatacattgcaattgcaacctttaaacaggtattttgattctttacctcctacagaaattcaaatttattcagttgaactcacattttaaaattctgtgtttctgatgaactctaaccttctaatgttgccttctaagcaaattgaaagctgccttatactgaatgaggaagagcacaaatacttggctgaatgaggtattgcaaaagactgcatgcacttttgagaaagacttgagttattatgtcatatgatttccattctttttatctttttcttaaatatatgacaaatacctatacaaagagtggtatttcagtcaatatagtaaatttattttccagactgaccttcagcttaaatccaa

SEQ ID NO: 248823 - DNA, 968 bp, Homo Sapiens
  misc_feature (235)..(245): n is a, c, g, or t
ccccacagggggacagtgatttttcaaaatgaagctttaaacacaacaaatcgtggacagacacgttgataggaaaagaagccttgaatataggcaccagtgccccagttcaacaatatccatcccaatgtaataaagtttgaggaacaaaatatacactatattctggatgtaattacaaaattctgccatgggaaaactagaacacaagtagggcaaaagcactttttatgannnnnnnnnnngccatatctttggagcatgaaattagcagaaagggaagatgttggtatgtccctaaaatatcttactttttgattgcttggacacttttatcactagatttggatccaaattctatcctcctattaacccttacttctcaacaaaaatgaatctctgtgaaagtcttgatgaacctgctttggaagaagatgcaataattcacacaaggagtccattcattggttctcgccttgcacaaagggtggactctgtctcaaacacttcaaatttctagagatgaaatccagaaagaaaaagtactgaggcgactgtttccactattgatctcttttcaactcacttcaagttgtggtttttgttgtggagaaattattgcttgtgaaacccaattaactgagaagggccccagtctgcagcaggttgtgcacatggaacacttgctttgagcatggaagagaatttgtttatacagcttctatctctttccccagccaagtaacagggagaaagataataattcaggagattcattttcagaaacagaaacactatgagaaatgacattctcttaatgttttctaagtccattagtacttccatgaatcagtactgtcagagaccttgttctacacagaaagtgggaggagtttcatttctctgatgttggacccaacttttttgtacaaagttggcttttaaaggaaaagcattgctcatcaatt

SEQ ID NO: 248824 - DNA, 906 bp, Homo Sapiens
  misc_feature (78)..(519): n is a, c, g, or t
  misc_feature (545)..(559): n is a, c, g, or t
gttgaagaggttctcctgcctcagcctccttagtagtgggattacaggtgcccgctactatgcccggctaatttttcnnnnnnnnnnnnnnnnnnnnnnnnnnnnnnnnnnnnnnnnnnnnnnnnnnnnnnnnnnnnnnnnnnnnnnnnnnnnnnnnnnnnnnnnnnnnnnnnnnnnnnnnnnnnnnnnnnnnnnnnnnnnnnnnnnnnnnnnnnnnnnnnnnnnnnnnnnnnnnnnnnnnnnnnnnnnnnnnnnnnnnnnnnnnnnnnnnnnnnnnnnnnnnnnnnnnnnnnnnnnnnnnnnnnnnnnnnnnnnnnnnnnnnnnnnnnnnnnnnnnnnnnnnnnnnnnnnnnnnnnnnnnnnnnnnnnnnnnnnnnnnnnnnnnnnnnnnnnnnnnnnnnnnnnnnnnnnnnnnnnnnnnnnnnnnnnnnnnnnnnnnnnnnnnnnnnnnnnnnnnnnnnnnnnnnnnnnnnnnnnnnnnnnnnnnnnnnnnnnnnnnnnnnnnnnnnnnnnnnnnnngtgtgagccactgtgcccagcgtgannnnnnnnnnnnnnnaaagcaaacttgtcctttggttttgcagaacaggcctgctccctctcatctagcccaccatttcttggggcctgaaccccagtggtccaaagtattgcttgtgaaatttaaaaaatgtgaatatgatgtggggatgggcctcttctacattaccttggcccagggggatcagctggctgggaggattagtgagcacctctgtattttgaggtctgagtcttctggacctgtgttgttaatcttcggtttctgataacccctgggtccatctggccatcagcctcagcagtgagcaaagcataccatactcatttctatgtttctgttccttcctctgctcctccctt

SEQ ID NO: 248825 - DNA, 1124 bp, Homo Sapiens
ccaaggctacaaagtaacatgaaaatgggatctaacaaggggaatatgcagcgtaggcacttgggaaattcagattactttttttccttttaacctgtttgtctttggttcaaaaaatgacagcatccttgcccaacaactccagggctccataagagccctgtatcatggctgtggctctcctggccaggggagccacttgtcctgagccctaggagtattgatgcttggggagctttggggcagcacctcttagagacaaatcctcctgcagtgtgggggagcaggggtaagagggaggcaggtgtgggtgggagtagagagaaaaagtgactgccttataacctacagttctggcatccactcatgctccaatgaacagatgcctctcccaacccattcccaagcctggcctctctttaaaagtctctggtgggttgttctctgagaattggtttcactcccccatggatccctggaggcctgagtgagattaggatgaggctccttctgacccacatcaataccaaagaacaaacttcaaagattaggccctagccccagtctggagcaaacagaaccactgtgagtggggtggaacagatctgaggcacacatgtcagaagctactcgtcctatcttccctgcaactgctaggggaagttggggagtggtgggagggaggagcctgaaagcaagagacagaaacaagaaaccaaacctcaaaactgggacagcagagacagaagctgaaccccagaggtggagctgggagctgagggaacagcaactaagacatgcactgaagtggagagggagtgacagcagcagcccatggttgggacggaggcagggcaggcaggccatggtggtcagttaataaataataatgaaggacccaaggatgagggggcaggtatgtacagtgcccagacccctggaccagcccttagcatgcgccactcttggggccagttatcttgaaggaagggagggaaggagagacagaacacccagggaaggacaagctgtccctttactgcctccccatcctgcctacttcttaagaggcttcttaaagattttgaggggaagcttcttccggcctgggctggagtctgtta

SEQ ID NO: 248826 - DNA, 848 bp, Homo Sapiens
ttccattttggaaagaagtaacaaaaatagtgaattaatgagcaatcggaaagactcaaagcattttgtactccacagttcatttcttcacacaaaacgtccattactgcagcgggcatgaaaaccggcagggtgttaggctcatgggcctgaagagaagtcacatcaccagccgatgttttcatgcaaaaggcaatcgtgatgattcagaacctggttctgaatttctccaggtgtgctcgtgagctgaaggtcatgcccattctgtgcatcctgtgtctttctactggtaaacttggatgtcattttagagtatcttggcaaaatggtgagaggatctcactttcccaatatcactctgtaatgaagctgcttgggggatcctccatttgattgtggagagaccaaggcaccgtgggctgaagcaacgaatattaacaacactaacaacaataaggataaagtctaagtctcttccaaaaaaggcatatccaaaaataagggtaaagagctggtcttatttcatccaagtgattctgtgcactggaaattgtccttccgttcctccctttcattaaaagtgtttatatttctgagtcggatgatcatttaaatacatacaatattagcaccaaggcagcatatttttttcccagagatcacatgaaactgaatacttatttaacatagttaatagttggtacaatctgtgatatcactaacatacttattggctgatacttgcctagaaatgccaaaaatatcttttatacaactcttatagcaccttgatgatggctagattgttttaaaaaaattcattttaaaaaagtaacaataaaacccaa

SEQ ID NO: 248827 - DNA, 823 bp, Homo Sapiens
ttggaatgaatctaacttgttttgctcttttttaggggtattattgaagctcgttttgtttatgtctttgtccttggcattctgttcacgggcaccaaagacttacttaaatctcaagtcattgctgcagacttcaaactcaagactgtaggtttatgggagatatatagtggattagttcttctggcagccttgctctttagaccacataatcttccggtcttagcatttagcctcttgattcagactctaatgactaaattcctctggaagcccctgagacacgatgccgctcgagattactgtgatgcattattggtttggtcaagcattcttctattttcaggtaggttttcattattatcatgggtagtagacttcatgttttacatatttattttaaatttttctttgagaaaatgttcccataagttggaaagtgactgtcagtgtggcatggtgaattacgctgaactctcgtgtattttataagacaaagtacagccggttgtttaagacacgcgtcccaggtgtggatgtgtgggtgcttaagacagcagactgctgctttgctgggccaggcctgggtttatttattacaagcagttcaggaagcacagacatcacgttgttcacttgcttcactgatgaatgtaataattgttctcgttcatgccctttgcccctggtgtcggggctgtccacactggggaccattggtgcccccatgattattagctccctgaagcctggtgggtcgtcagggcttctgtccggtgtttaaagacccatcccagacaagcccaaaccacctcagtttgaa

SEQ ID NO: 248828 - DNA, 1143 bp, Homo Sapiens
ttggcatcagcttatcttctctaatcaacttctcttcttcaaccctttccatttttcagtacaattccctacaccattacataaaaacccgtgttattccagttggtcatgatatcattaatgagtaaaatcagaaatttaaaaaatagacaacatctcacatacaagaacatgaagggtctacttaatataaaaataaacacagtgaaagcaggttagtttacaaaagaaaagttaactaaatcaaagatcaaatttgtttcttaacagctttatatgccatggaaattaaagttgaaaaagacttgaagactggagaaagtacagttctgtcttcaatacctctgccatcagatgactttaaaggtacaggaataaaagtttatgatgatgggcaaaagtcagtgtatgcagtaagttctaatcacagtgcagcatacaatggcaccgatggcctggcaccagttgaagtagaggaacttctaagacaagcctcagagagaaactctaaatccccaacagagtatcatgagcctgtatatgccaatcccttttacaggcctacaaccccacagagagaaacggtgacccctggaccaaactttcaagaaaggataaagattaaaactaatggactgggtattggtgtaaatgaatccatacacaatatgggcaatggtctttcagaggaaaggggaaacaacttcaatcacatcagtcccattccgccagtgcctcatccccgatcagtgattcaacaagcagaagagaagcttcacaccccgcaaaaaaggctaatgactccttgggaagaatcgaatgtcatgcaggacaaagatgcaccctctccaaagccaaggctgagccccagagagacaatatttgggaaatctgaacaccagaattcttcacccacttgtcaggaggacgaggaagatgtcagatataatatcgttcattccctgcctccagacataaatgatacagaaccggtgacaatgattttcatggggtatcagcaggcagaagacagtgaagaagataagaagtttctgacaggatatgatgggatcatccatgctgagctggttgtgattgtgatgaggaggaggaggatgaaggagaagcagataagtggggtcc

SEQ ID NO: 248829 - DNA, 919 bp, Homo Sapiens
  misc_feature (592)..(605): n is a, c, g, or t
cacgtatgtcttgatcattttcccatatggaaccaatcgctcactgccactaccaccactatgctgtacccttgtagccaccaatgtcaggccaacatgggcatcccttcttatcctgcctgggctctaacacccttgactgggctcatgccactcactatacagaaattctctttaccctctgtggttataaacaccattcttggccactgcttctctcccacccacaatgtggtaccctattccacttttagatttcctgaaagtcagcagtggtcttcttgaccttcactgcccagtcctttcaatagtaatgtacatctctcattccctacattctgattctattcaaaatacttagaatagctactattactcaaatcctggcagacacagtcattagccattatttaggcattgatggaaaaaactatttttaatattcaactaaagtttgcttccttagattcaagaagcaaatgaagcccatgtaaaatcaaatgaatctatacctgcatcttttttatgtaaaatttcactttactttaggcaagggcacaaaaaaagccctgaatcaatgaggaaaagcagnnnnnnnnnnnnnnctacacatgtgcaggacatgaataatacaaaacatactggacatcttattttgatctgctcaatatcttctccactgcttttactaaaagaatcccaatttttttcttgcagtattactcctccccataatagtgtctcagtagatatatgaataaacgtgtctctcaagtgatccaaatttccaattgtcttaaatagttggagctatgttactgacaacagtactgcagagacttcttgctacgtcaatcataggaagggtactagtcctagcccataaaaactggtagttcatgctattgattatatgaac

SEQ ID NO: 248830 - DNA, 1077 bp, Homo Sapiens
  misc_feature (154)..(466): n is a, c, g, or t
  misc_feature (784)..(793): n is a, c, g, or t
ctttgtacaaaaaagttgggccaaattatcgcttggctgttctgtttttttcttcatattcccttggtgaacttgcccacagtcttggcttgaactgtacttttatataactgattttcaaatcttgaactcttctaaatttctacctgctggnnnnnnnnnnnnnnnnnnnnnnnnnnnnnnnnnnnnnnnnnnnnnnnnnnnnnnnnnnnnnnnnnnnnnnnnnnnnnnnnnnnnnnnnnnnnnnnnnnnnnnnnnnnnnnnnnnnnnnnnnnnnnnnnnnnnnnnnnnnnnnnnnnnnnnnnnnnnnnnnnnnnnnnnnnnnnnnnnnnnnnnnnnnnnnnnnnnnnnnnnnnnnnnnnnnnnnnnnnnnnnnnnnnnnnnnnnnnnnnnnnnnnnnnnnnnnnnnnnnnnnnnnnnnnnnnnnnnnnnnnnnnnnnnnnnnnnnnnnnnnnnnnnnnnnnnnttctacctgctggtgggaagcgtcttcatttgaatggcctatggtgacactggcctgtcctattgttctaaataaaagtcaccccaccctgccacttcagatttctttcattatgtgagtgagaatctttgaagtaatctttcacttttttgctatccttgttcctaatacttagtttagcatgaagccttctggtttcaccatttaagatttgggtttcccattccctcttcatttcctcttcttcactatccagaccctcattatcatacacctttaattcactacccgcgctttcccatcaccccctgccttgcnnnnnnnnnnaagcttcccaatgcttcttgcagtgacttaaaaacgtataccaagttgttatggcatattttctttaaatagatagtaattcttgaagagtttttatttaaactttcttttggatcctttgtagctcttgacataatgctggatgcagtaggaacttgataaatacttgttcactcattcattcagtagctaattagctattgggttccaggtactaaacttgtgctccagtgatcttccttcatggagttaaagctacacacctctgtagagccagtccgcta

SEQ ID NO: 248831 - DNA, 1021 bp, Homo Sapiens
ttggattttttaataaccgatagttgcaatgaactgtggctcagagaccttcttaaagtagttgagaagggagggcgtgggcaaagcagtgggaagaacatcccaaacttttgggggccagagggctctctccttagtgatgatcagctagccgagctgggccgtcctggggatcggtacagctccctggggtggtgacaggccctttgtgaaagttgtgtgcttggtcttccaccccagccccagacactgcttcaaatagcaccaaccagatgggagtccacatctgtggtggcaaaatgctgacattttcccaagaggtacacaaggtgggagaggcctgctgtagcagaggtgtgtgttagagaaagcaggggcctgatttagtagcagagaactgggtgagaaaaatggccagagaaagtgacctgccagctaccagtgtttccgaaaatgagggtgggatgggcccatttgcagagcaggacagcagtcatccccatagccctctgaggaggggagggatgcttagagcaggcagttctgtcagttctgacgtggcaggtgccattgcaacttgtgcggaggagtcttaggaagtgctgtcataattcataaggtcaagagcaacatctggatgaatgagccacctgaaatgtgtgtgggctgagccacaggaagggtgagtcctcttgcttgtggtgctttatggtgtgcaggtttgcttgcttttcccacattctctcattttgcttgaaggcagcctaacaaaagggagtctcccaaagagctccatgagagcttaagaaaattcatctcctgaggacaaagagaacaaagatctgtcctgtggtcacactgttgaggctctgtcttcacagctgatgttctcctagtggaggtacagctgaagaacattcagccccagcacgagaagatacagagcaacttgggaaacccaaagggagaccacccttaacatgccgtgctgtgctgtgccgtgtctgaagaggaagagcct

SEQ ID NO: 248832 - DNA, 1168 bp, Homo Sapiens
aaagttttgaagaagaccttaaaacctacaaagctattgaaaagatcttgagaaacaagtgttccaagtcggttgatactggtgagactgacattgatcctgtcatggatgatgatgacgttttcccaccatatgtgttgaggcctgacgatggtggtccacgagtcacaatcaacacggccattggacacatcaatagatactgtgctagattaccaagtgatccgtttactcatctagctcctaaatgcagaacccgagagttgcctgatggtacattttattcaactctttatctgccaattaactcacctcttcgagcctccattgttggtccaccaatgagctgtgtacgattggctgaaagagttgtagctctcatttgctgtgagaaactgcacaaaattggcgaactggatgaccatttgatgccagttgggaaagagactgttaaatatgaagaggagcttgatttgcatgatgacgaagagaccagtgttccaggaagaccaggttccacgaaacgaaggcagtgctacccaaaagcaattccagagtgtttgagggatagttatcccagacctgatcagccctgttacctgtatgtgataggaatggttttaactacacctttacctgatgaactcaactttagaaggcggaagctctatcctcctgaagataccacaagatgctttggaatactgacggccaaacccatacctcagattccacactttcctgtgtacacacgctctggagaggttaccatatccattgagttgaagaagtctggtttcatgttgtctctacaaatgcttgagttgattacaagacttcaccagtatatattctcacatattcttcggcttgaaaaacctgcactagaatttaaacctacagacgctgattcagcatactgtgttctacctcttaatgttgttaatgactccagcactttggatattgactttaaattcatggaagatattgagaagtctgaagctcgcataggcattcccagtacaaagtatacaaaagaaacaccctttgtttttaaattagaagattaccaagatgccgttatcattccaagatatcgcaattttgatcagcctcatcgattttatgtagctgatgtgtacactgatcttaccccactcagtaa

SEQ ID NO: 248833 - DNA, 1135 bp, Homo Sapiens
tacaaaaaagttggcctttccaagggagtggttgtgtgatcgccatcttagggagtgagtgtggccgggccttctcctgtggcgggtgtggggagcggagcccagagctcctgtggggccgctgctttggcggtgggcccagccgggagcagcctctttcgaaggccgccgtgacctcttcaagggcgtggagacgggaaggaaaaggccccggttggggttccagggcgccggtaacgttaaccggcgccttgcctgtcctctaaccgtcgctccctcctcccctagaaagatgttctcgtccgtggcgcacctggcgcgggcgaaccccttcaacacgccacatctgcagctggtgcacgatggtctcggggacctccgcagcagctccccagggcccacgggccagccccgccgccctcgcaacctggcagccgccgccgtggaaggtgagatcagaccctgcccaatacagtcgtgtggtctacttgtgggccgcccagcctttgaggcctggacccggcttggaggacagggaaggacgagtccagcccgctgcaccgtaggacggcgcccagttgcttgccctggggtatcggccttttccaccataggcgggtgtcagatccttggccttccctcaagggcgtggaagcgctgaggccctgtgtcccttcgtgacctccgtgtgcccgagggaagagaggccgtgactagctctttctccgccgtgagctcgcttggtcagcaaactaagtactggggtaaactctcctcccgaaactactgaccacccacagttctactaactatattacctgtcctttgatttgcccttagttttcttaaaaatagtcctttcctaagttttatatttgtcgacgccaggtcagtcatttttgcacttaattgtatatgagataactagatgtcctgttttcgtgcgactggaggaggcagcttgcagccctacataggcaatagataggagataattggtgggcgtccctttggtgtgattatctcttgggattcttggtgcttgggcccagcttaacttatttgtgtgtgttccaaatcatagtgattactgataaacacggttacctgtaacatctttcctgtcaagctttcc

SEQ ID NO: 248834 - DNA, 959 bp, Homo Sapiens
ttggcaatattttattagataggcgtttaattagaggaagtctgtgggccagattcttccctgcatgtgtgattcatatttggaaatttctgatttatctccccccaattgtgccatgtggcctgcacttaaaatgtaagtaattctgattttattctcaagaacttatttgaagattcaagccaagcaatgctgaaaaaagctaggcctgcaaaactaaaacatagcacgagcctctcaaaatttccaccaaatatacaaaatccagtctgctctgaatgcgcatcagaaactcaactttggttattagccctggaatttggtgccaaaaacaaaaatttggttttgttgtcaagcaatttctaaaggaagaaacaatgtaaatattaatctgtcattttaaatgttgttgaaactgccatgagtgtgcacacagctctctgtttcatacctgtaatcagtattcgcatgctttcagtccactgtttctacttaaagcattattccgtatttcagcacagaatgactttggtgaaactgtagctgttagtgagtaattgcgttacaggcagacccagtcttaaattaacaaatctgggttcccttaactatcaggtttatgttggttttatttgcttctatctggatcccttctctttgcctgggaccttattctgattagctagatttttaagagcttttaaagttacattccccagaaagactttttttctctggactttctcttttatggtctgtaaacatttctcctctgatggtcatggacttagttctgagactggccttcctctagtgtgatggtatgagtctattctattgctgctaaattttacaaattgaactgcagaagagtctttctaggtaatccctgtaacagagcaagtttctttgaaccctagccatgtatgtgtagtgttccattattggaacgctaagca

SEQ ID NO: 248835 - DNA, 996 bp, Homo Sapiens
  misc_feature (783)..(797): n is a, c, g, or t
tgcaacaaattgatgagcaatgcttttcttataggtgggcaactttgtacaaaaaagttggcaacccaaagtgcgtggttggcttctggctagccttgatggccaaacaacaggacttatacctgcgaattatgtcaaaattcttggcaaaagaaaaggtaggaaaacggtggaatcaagtaaagtttccaagcagcaacaatcttttaccaacccaacactaactaaaggagccacggttgctgattctttggatgaacaggaagctgcctttgaatctgtttttgttgaaactaataaggttccagttgcacctgattccattgggaaagatggagaaaagcaagatctttgatatctttcatgtttgcctgcagttgaacaatactttagagtactttttaaaattatttctcacaaagaaatgaatgtacaatccaatgaaaacatttgttattggctatttcaggtgttttgctgctagaaattattaaagttacacactagtatgttggtctggtgacctggttacattttattatacacattattggaccataaggacatttgtttcacctagattttaagattatggagactgctgtcatttttatcttatttaaatctctaggtttattggaagagtaagattgatgaactatagcatgcacagtttggtacagtagagatcattaatacttttaaaagttctacattaattgacttggaatccttagaaatggagtggtgacatgtcagtatgagaacaggcaaaaggtaaannnnnnnnnnnnnnnacaaccttaagtaatctcaataataaaattttctgatctgtattatatccagtgttgggtgtatattttcacccaccaacaactgacactgctatcttttactgtatttttaaaaatttaatttgaaaaagcacccagaagcattctgaaaggaatgggtctagaattataggagtatgtagcccctaatagttttccc

SEQ ID NO: 248836 - DNA, 834 bp, Homo Sapiens
tgtacaaagaactggaatttcgctctggaggggatgtggaccacagtactctagtcaccctcttcaagcttttgggctatgacgtccatgttctatgtgaccagactgcacaggaaatgcaagagaaactgcagaattttgcacagttacctgcacaccgagtcacggactcctgcatcgtggcactcctctcgcatggtgtggagggcgccatctatggtgtggatgggaaactgctccagctccaagaggtttttcagctctttgacaacgccaactgcccaagcctacagaaccaacccaaaatgttcttcatccaggcctgccgtggagatgagactgatcgtggggttgaccaacaagatggaaagaaccacgcaggatcccctgggtgcgaggagagtgatgccggtaaagaaaagttgtcaaagagctgaaaaacctcttggagctggagcagtttcccatccacaccatagatggcgccctccacaccatgcgagaggagtgccacgatgcaggagtccgtgactcggtgtgcaggtaactgtgcaaaattctgcagtttctcttgcatttcctgtgcagtctggtcacatagaacatggacgtcatagccccaaagcttgaagagggtgactagagtactgtggtccacatcccctccagagcgaaattccagttctttctctccagtgaagtgcacattgctcaacaccagtgctaggccacgaggccgagactgcaacctatatgccagctggaagtgtgttcgtaaaattcaggagtgcaaggctcacctgaaggcagacaggaccatctttattgtacgga

SEQ ID NO: 248837 - DNA, 1031 bp, Homo Sapiens
acaaaaaagttgggtgagaacaagctcgcggcagctgaacctcaacaacgagtggacgctggacaagctccggcagcggctcaccaagaacgcgcaggacaagctggagctgcacctgttcatgctcagtggcatccctgacactgtgtttgacctggtggagctggaggtcctcaagctggagctgatccccgacgtgaccatcaccgcccagcattgcccagactcacgggcctcaaggagctgatggctctaccacacagcggccaagattgaagcgcccgcgctggccttcctgcgcgagaacctgcgggcgctgcacatcaagttcaccgacatcaaggagatcccgctgtggatctatagcctgaagacactggaggagctgcacctgacgggcaacctgagcgcggagaacaaccgctacatcgtcatcgacgggctgcgggagctcaaacgcctcaaggtgctgcggctcaagagcaacctaagcaagctgccacaggtggtcacagatgtgggcgtgcacctgcagaagctgtccatcaacaatgagggcaccaagctcatcgtcctcaacagcctcaagaagatggcgaacctgactgagctggagctgatccgctgtgacctggagcgcatcccccactccatcttcagcctccacaacctgcaggagattgacctcaaggacaacaacctcaagaccatcgaggagatcatcagcttccagcacctgcaccgcctcacctgccttaagctgtggtacaaccacatcgcctacatccccatccagatcggcaacctcaccaacctgggagcgcctctacctgaaccgcaaccagatcgagaaagatccccacccaagctcttctactgcccgcaagctgcgctacctggacctcagccacaacaaccttgaccttcctccctgccgacatcggcctcctgcagaacctccagaacctagccatcatcagcttccagcacctgcaccgcctcacctgcctaagctgtgtacgattgcggta

SEQ ID NO: 248838 - DNA, 1458 bp, Homo Sapiens
agccaattcgtatcctatgtgttccaagactcttatccaatactgtgatataaagttaggatttgggaaacatgtagttaacaacttggaaacatgaagatattaaaatggcagctggctaactgtctctttaagccactatgcaatttctaccaatggagagattagggaagcaaattaagcctcattcagtaggtctgctgtctggtggaacttacggaactcatttcctcctctatccccagcccttctcctaactactctggtgataaccagggccatagaagaccttttctctcttacctttctctgataggatcgtgtccttcagtcaagagctcatgtgaactccagactttatattacatctctgaagttcttgatgtggggaagattgacttttattccatttttatatgaaggtgttagatatagccatcaatttatttttctacattccctctacgcttatgtaattttctatttttaaatcttctcttaaatatactgagaatctctagtctcctttttaaaggctgatccaactacacttgtgggctattttttccaagctttgtgtgaaacttgatgactttgggccagcaaaatgcaaagaagactatagtttcaggcagaaaatcacgtcctaagaatttggcatggattaaacaacctctaccacactatagctctcacataggctgaacattttcctaaattctacctgtgcagacactgaggggctctctacctttgaaactatgagaacgtcttaaattaatatgaatatttctctccatgtatagtgtgagctgccaatgcattatcttaatacatcaagaaggaaatcagatttcaggcacacattagcaatggtttgttaatgtccttggcaaacgtgtacctgctttccttcattgttctcttcaggggctttcttccactttcctcttatgaaacgaatgtgtttttgactgttaactgggttcgctttccagatctgtctttcccaaatgaaaggttagtcccatagaccactggctattcagggaaattactctctacctccccatgacatggatgataagtgttgagggatgaacactctggaaactcttagcatggattttgaattccagatttctttataggagatgtataaaaaggagtttatagcatacaaaaattatactgctcttcccagtaagggactaaaaggacatttgaaatctttacattttagatgtttttgtgaattataaatatctcctttttcctcgcttcatgctaacttgtctctagataaaatcttatttcttcatacattggaccacaaagcataaagaaggtagctcagcgccactgagattgtgttctgcataatatttggaaggcttccatttccattgaaaacaatccatgagtgagagggaaagtctagtatcaattcttctgttt

SEQ ID NO: 248839 - DNA, 937 bp, Homo Sapiens
tttattagagttggtggttccttttcatgttttgcctcatagaagtgtaccatgaatctaacagcactattatattgaatgtacatgtttgcagctaaattacaccctcatttaagaaatgtggaacagttggggggaaagaggaaatcttaaaactgagttaagtcagcaagttcagcaagtgcttacgaaagacagtcaaaatataggcaagttactttaaatgggtattatttgtccttactttcccaatgtaggcaagtgcctgtgatataacaatttagggaataatgggagaataaaaagcatattagtttcaatcagatttcctggcatatatcacagaccctaaggaattacaaagacaaaaaagcaagctctttggtttctgcatggttctttgcagactacaaggctgcccctgcaagcacttggatgaaaagaccgggattctactggaagtttgcactttccccacatcagccaagatgggtaaactgccttaacacaaaagtcacatgccccacaaaatatttccttctatctcaaaacagtattagcttctttaatctaagaaggtaatgagaggtttttaaactgattaaatcagcttagttcatacaaagtctattatgattaaatattcaattaaaacaatttccaaaccaaaatctgacaaaatcctctctgaaagtaatttagatgataggtttttaacattaggcaaattaaatccttctcacagttggtattttctaaagggtcagaaacagttgcagaagttcactggggcaaaaatctactttgtgtgctagtcatgttccatgatcataaacagaaactagaaatattaacgtgagcctaacattcctatttatttttacttcaaaggctacatacatgcaaaagttgaacatgtcatcacaaatgcttccaa

SEQ ID NO: 248840 - DNA, 361 bp, Homo Sapiens
aaattgatgagcaatgctttttccataaaagaaaactttgtacaaaaaagttggcgcggagcttacctgtcgccacctcgcgccgggtccgcgcggcccacgggaccccccactgacgcccccggcccgcggtccacatggacgtgcggggccctgaagcccccggcgggcgcgcgctgcgggacgcggcagaaaatctatttcaggaacttcaggaacattttcaagctctgacggcaacattaaacctcagaatggaagaaatgggaaatcgcattgaggacttacagaagaatgtcaatgacttaatggtgcaagctggcattgaaaattctattaaagaacaaatgctgaagaccta

SEQ ID NO: 248841 - DNA, 1055 bp, Homo Sapiens
  misc_feature (81)..(141): n is a, c, g, or t
  misc_feature (160)..(185): n is a, c, g, or t
  misc_feature (213)..(454): n is a, c, g, or t
caaaattagcctgggtgtggtggtgcatgcctgtaatcccagctactcaagaaggctgaggcaggagatttgctttgaccnnnnnnnnnnnnnnnnnnnnnnnnnnnnnnnnnnnnnnnnnnnnnnnnnnnnnnnnnnnnnagagcgaaatttcatctcnnnnnnnnnnnnnnnnnnnnnnnnnngtgacaaataatgtgacaaataggctgnnnnnnnnnnnnnnnnnnnnnnnnnnnnnnnnnnnnnnnnnnnnnnnnnnnnnnnnnnnnnnnnnnnnnnnnnnnnnnnnnnnnnnnnnnnnnnnnnnnnnnnnnnnnnnnnnnnnnnnnnnnnnnnnnnnnnnnnnnnnnnnnnnnnnnnnnnnnnnnnnnnnnnnnnnnnnnnnnnnnnnnnnnnnnnnnnnnnnnnnnnnnnnnnnnnnnnnnnnnnnnnnnnnnnnnnnnnnnnnnnnaaagaaccaacatgtactaaaataccagttgtgtaccaggtgctttgcatatattggtttgggatatattggttcagaggagacaaagctgctccagagccaacacggaatttcccacttcatagaactttttagttatatctaaattatgtccaacaatgaggtttcattttactattttagcataatatgaatataaatgtgactgagagttatcttgacccagacaacctactgcagagtccaaaggatgctaagtgaaaacaggtcatttatatatagttcttgaaagaaaagaggaaccaaaaactgtgactggaattatgtgatatacgttcctttttatgttctgaggtagtcatcaaaaatgatggcagaatactgatgtctatggagcagaagtacaactgacagtaagtcagaagttacttgccaatcccattctttcactgtagtaagcttgacagaagaatggtggcaatctagttgattcatcacatattttatatattagattagagctatgccccccgcccccacccacagagtatattttactgtgtcagtgaactatagattcttatccgttcaaggtaagtct

SEQ ID NO: 248842 - DNA, 518 bp, Homo Sapiens
cgtgctgttcttgtgtggctttctgggcagtagggatcttgaatttcctttctaacactgtgcccggcaaggcggggagcattcctctgccctttgtcttgtgccaacctggaaaggtgcagtctagatttcagtgagaaccctgccagctgagccctgtgcatctactaccttgacacagagtgttttcccactagaagctctgctctgctctcctggcccaagtaggggattccatgccttccctttcatggtcttagcaccagcagcctagtttctcccttccagagtctccagggatgacaaattggattggagacaatcttttttagatgctcatcccctaaaaggttaattgtgtatttgtggctgcgtgtgcctttgtgttttcattctcttcccatttttgtacattttggtcttctctgtggttttatacttggtcaaaagtactcgtcttggtattgcactgttgtgtgcatgagaaaactgggggaagctcactgtcccagtatccg

SEQ ID NO: 248843 - DNA, 1103 bp, Homo Sapiens
  misc_feature (503)..(585): n is a, c, g, or t
  misc_feature (621)..(633): n is a, c, g, or t
  misc_feature (699)..(912): n is a, c, g, or t
  misc_feature (959)..(1014): n is a, c, g, or t
ctcaagagataagacagcaccaggacagccagaatgagtccaaatcaaagagaacagactacagattaaagcaactgcagacttcacagcagatgccagcagaattcccaggagtgaggacagacagctattctcagtggacaccagctaacatacatccacagtaagttgtcaccttctcccctcaacactaccaggacacagcaagttcttatatatccaaccaccattttgagaagagtaaggaaactccaaaagactgaacgtttaagtaaacattcagttcaatcttatctttaataagggagtggacccttcaagagaagaaatatttaacccgaaagaagactgttgtaactgtaagagcccaatatattgttaaatggaaaaacccaggcatttccattactcagattctataaagatcctcaggttagtcatagaacataattgactgttggaggggcacattaactatgtgtgaatttgtgatcctgccgctnnnnnnnnnnnnnnnnnnnnnnnnnnnnnnnnnnnnnnnnnnnnnnnnnnnnnnnnnnnnnnnnnnnnnnnnnnnnnnnnnnncgcaaatagtgtataatatacccattacctgctacnnnnnnnnnnnnncgaattatagctataaaatttagttcacattaaaaatacagatgaggccaggtgcggtggctcatnnnnnnnnnnnnnnnnnnnnnnnnnnnnnnnnnnnnnnnnnnnnnnnnnnnnnnnnnnnnnnnnnnnnnnnnnnnnnnnnnnnnnnnnnnnnnnnnnnnnnnnnnnnnnnnnnnnnnnnnnnnnnnnnnnnnnnnnnnnnnnnnnnnnnnnnnnnnnnnnnnnnnnnnnnnnnnnnnnnnnnnnnnnnnnnnnnnnnnnnnnnnnnnnnnnnnncatgccactgtactcctgcctggcaacagagcaagactccatctccnnnnnnnnnnnnnnnnnnnnnnnnnnnnnnnnnnnnnnnnnnnnnnnnnnnnnnnngtagcagaatacttcagtactatttctgcaaattcagtaatggcaagaagtgtgtgatctgtccatgggtccagattatctggagccaa

SEQ ID NO: 248844 - DNA, 1676 bp, Homo Sapiens
  misc_feature (675)..(713): n is a, c, g, or t
  misc_feature (1107)..(1126): n is a, c, g, or t
  misc_feature (1514)..(1514): n is a, c, g, or t
agcaatgcttttctataatagccaactttgtacaaaaaagttggaaatttgtgccctacaccttgagttgtgtacacttgtaaactctttatgatcaactgttcccccttttgaaataagtgcagatatttatttaaccctcccttccccaccctctgccccacttccagccctctgaaagattggagtcaagcagatggaagaatgcagtggtgatagttgtcatgcgacagcctgagaacgctgggcagcaccacaccctccaattcacactgccttctagttgtgccaactggaaccaccctttggctgtgctgcgaagcatggaccccagtgttgttgtgggtgtgtcaaatcccctttcatcctcaagagcttcctgcttcccttagattatttcaatacggtgatatccttatttgctagcagaaaagggactaacgtcccattcctcttttctgctgcgtccactggctagagagcaggcggtgcgcggttgggcagacacctgggaggagtctccaagccatgtgcacagcacacacgtgcagtgcacacaaagaaatgacatggaaatagatgcaggcaggctggtccctgctgtgattaacgagtaactccaagtacaaggccgaccacaatggatgctgcaaaaacgttgactggggcaaaggnnnnnnnnnnnnnnnnnnnnnnnnnnnnnnnnnnnnnnnaggggatgggaggtggtgtgtgtttttctcctcttggttttcatttgctcaagcacacaaaagggacttttgtttactctatcatgaacaaaggaactgtccacatactgtaaaccatgagcagtgttgttgttgtttttttaaacagtatatttggtggtctctttgtctgcttttatttccagttcgatcttctgggtttagttttgtctttcaaaagaattcaaaaaaagactgacaatgacagttttgagttggatagtgaaaaagtggagcctccataatcagtgtggttgccttcagacctgagtacttagctgagggtgggtgagagccctttgttccaaaagtccattagttttgctgttgtttaggagtaggtggttgttgttgnnnnnnnnnnnnnnnnnnnnggcttttgtaatggaatccatgttcacatcctgtgaactctgtctcctgaaaccctgaagtatttcctagaacctgaaatattgttttcttccttgaattttctctagaaatgcagaaattaggaaggtgatgggtctgtatccccctgcccccttctttcccatgcttgactcccgagagtactggcagtgcagcacccatcattgacgtaagcggctgtcttgtccagtgtttgtaggcatcactgcctcagctgttaaggagacctgtgtcaaaacttacatccacattcctacacccccacaacccatcactttctggtgttaaccctaaaatacccacatgtatttgagctgggtcttctgcatttaagtatttctcccccgntttttttcccccactgtgtgtggggggggagggtcccattaaaccccgaagtgtggccttttgcttttccaccccttggctaaaacacctggggaagatgcaaaaccaacctccgaaattttattatttgggttggtaaaagttttggtaaaaaaataattc

SEQ ID NO: 248845 - DNA, 867 bp, Homo Sapiens
  misc_feature (184)..(193): n is a, c, g, or t
tacttgatttctcacatgtgctgaatgtgctgattcatcttggtgtagtgttctcatataaagtgcttaagagttggacagtatacctttagacatcataactaacataatcgagacgtgtttacattcctaccagggcataatattgtgaacacttccactgagattgcagaattgctgtaannnnnnnnnnctaaaacatcatgccatctgcacacataataaaataatccagtagttgccatgctaaaacaggacttctagtgaagggcacagacagctccccaaagggaacttgagttatgcacagtgatgaaaactggaagcaattttccagctaatggtctgccaatgaccacttggaatgagttggcattatattatgcacctcattttaaatccacagcaaagcaagatttttccaaaacccataatattgactgaatgggtgcttttttcagttaatccagttaatctgtccacgatccaaggatatcttctggcagtgccatgggttagtctttctgtgaggaacaggccatgttcatatcaactggcaggacagcagcttggaaggctaaccgtgtttatggagaaccctcagatgatgcttgtgtgagtaactgtagatttctgacttcttctcgcaccttcagctggagcacctgttgtaagatatgctgccggaggttctcctgggcaatccccattcgctcgagctttttgtcagtaagtctcagcagggctcgcccagttatgtcatgctgtttggaatgactcactgtagatctgatactgattcggacaatgtttcttcaaccacttgcagacatcctgctgggtccatagagccaccggtttagccaa

SEQ ID NO: 248846 - DNA, 1169 bp, Homo Sapiens
  misc_feature (418)..(455): n is a, c, g, or t
  misc_feature (469)..(728): n is a, c, g, or t
  misc_feature (890)..(1103): n is a, c, g, or t
ttggcaaacatatacaggagtgaaccactaccacaatcgaaatatagttgcatcacccccctaaaactctccaggcccttttgtagtcaactcctacccccgaccctcagattctgctaaccactgatttgttttctgcccctatagttttgctttagtatgactgtcatatcaatagaatcatacaatgagtaggcttattttatgccttcaggttttaaaaattataaacatttacattacagtaaaattcactctggtatacagttctataaagctctgataaatgtgtagagttgtgtaaccaccaatgcaaccaaggtacagaacagtcctcttagcctctccctaccaaatttattcctgctactttgtagtcaaaaccagtcccctacacccaaaccctggcagtcactgnnnnnnnnnnnnnnnnnnnnnnnnnnnnnnnnnnnnnngggacagaatctannnnnnnnnnnnnnnnnnnnnnnnnnnnnnnnnnnnnnnnnnnnnnnnnnnnnnnnnnnnnnnnnnnnnnnnnnnnnnnnnnnnnnnnnnnnnnnnnnnnnnnnnnnnnnnnnnnnnnnnnnnnnnnnnnnnnnnnnnnnnnnnnnnnnnnnnnnnnnnnnnnnnnnnnnnnnnnnnnnnnnnnnnnnnnnnnnnnnnnnnnnnnnnnnnnnnnnnnnnnnnnnnnnnnnnnnnnnnnnnnnnnnnnnnnnnnnnnnnnnacgcctggccaacaatgtagtatatttttctcttttctgaacctctcttccaatccttatatcttctctgactctgatgcttcctgcctctgcacttaaaaggactctttgttattactttgcatgcattgggatcatgtgaggatgaatgctccacatgcnnnnnnnnnnnnnnnnnnnnnnnnnnnnnnnnnnnnnnnnnnnnnnnnnnnnnnnnnnnnnnnnnnnnnnnnnnnnnnnnnnnnnnnnnnnnnnnnnnnnnnnnnnnnnnnnnnnnnnnnnnnnnnnnnnnnnnnnnnnnnnnnnnnnnnnnnnnnnnnnnnnnnnnnnnnnnnnnnnnnnnnnnnnnnnnnnnnnnnnnnnnnnnnnnnnnnntttgtatcggggtaatgctgacctcatagaatgggttgggaagtgtttcctgttcttgaatagctt

SEQ ID NO: 248847 - DNA, 1015 bp, Homo Sapiens
ttggggctttcgccggggcccaggcccagggaccaggcggaggcgtcgcgggagcctttggggcaccacagagatgcgggtttgcctgcaatgagatttcattctctacatttaaaggacatcctttctgagctgctgtgaataaatttggaatggtactgtatattttcatctaatggagaactagctgtactttgaataaggattgctgcactggacgactttagaacatccctcacaatgtcgtcaacccggagccagaacccccacggcctgaagcagattggcctggaccagatctgggacgacctcagagccggcatccagcaggtgtacacacggcagagcatggccaagtccagatatatggagctctacactcatgtttataactactgtactagtgttcaccagtcaaaccaagcacgaggagctggagttcctccttctaagtcgaaaaaggggcagacacctggaggagctcagtttgttggcctggaattatataaacgacttaaggaatttttgaagaattacttgacaaatcttcttaaggatggagaagatttgatggatgagagtgtactgaaattctacactcaacaatgggaagattatcgattttcaagctaagtgctgaatggaatttgtgcctacctcaatagactattgggttcgccgtgaatgtgacgaaggacgaaaaggaatatatgaaatctattcggtaacaaatgctgttttaaagctgattgaaaaggaaaggaatggtgaaaccatcaatacaagattgattagtggagttgtacagtcttacgtggaattggggctgaatgaagattatgcatttgcaaagggccctacgttaacagtgtataaagaatcctttgaatctcaatttttggctgacacagagagattttataccagagagagtactgaattcttgcagcagaaccaagttactgaatatatgaaaaaggcagaggctcgtctgcctttttcatatattcagtaa

SEQ ID NO: 248848 - DNA, 981 bp, Homo Sapiens
gccaactttgtacaaaaaagttggagataaaagatgtatttgaggctgggattattataggcgtgagccaccatgcccagtgaacttggccattttcttacattcatatatagcaaagttttcaacttgtctaccgagagactttctttaggagccaggacttctacatttgtaacttgagtatattaatattcaaatcatagttcaaaaatactgaaatacttgtttattatgttacataaatatggacacaattactgccaaagaatagagagatttgcttatgagaacattctgtcatttgttttgttctgtttgtagatgagagacatgcttttaaagtacaaaacgtttctcttctaccttaccccctgttctactgacgtgctttgcatgagaagctcatctagaagagagcaacgctggaatagagaagtctagaccctggcctttgagggaaaggactgctttttttctctcccaaattagaaaattaaaagtgaaacataacacataaggacgaaatacaatgttctgaatatcttccactaattaattgttgaatgattaagtctctaagtatcttaacttccattgtcttcttgttaacctagacaagagtagattattcagtagccacatgtgacagttaaaattaagtaaaattaaaactatagtttctcagtggcctagccacatttcaagtgttccacagtcacatgtggatagtagttacctatcagacagtacaggtatagaacatttccagtattgccaaaaatgctattcaacagcacttttattgcccagagagaaaataagacaaaataaagcagtgaagtaacttaagacaactctgagattttaccaccatacttagagaaagtttttctgttataaaaattaatactaatcctttttaaagaccttggaaaaaatcaaaaccccattcctttaagctagtcttcagtatatattttt

SEQ ID NO: 248849 - DNA, 933 bp, Homo Sapiens
ttggccatcttgtttgggaacaggttttatttagccaaactgtggtagaaaaattgtatatactggaactgcaaaacaaggactggctgcactttagtttacataatagacaaattgaaacttcaatttatttttttcttctaaattgtgactaacaattggccctttgttaatgagcgtatcttctgatactgaagctacaaagaaaacactgaaaatattggactgtttttttcctacttcatactaatgtatggttctctgtggggttttgttgtttttagatcgaatttcaaaagaatccggcaaagtttttgaagatgtccttgaaagtttctattcaattgactgtattaaatcacagtttgaagcatggcgttcaaaatactacacatcctacaaagatgcttacattggcctttgtttgccaaaattattctaccccctcatacgacttcagctcctcacttggactcctcttgaggcaaaatgtcgtgactttgagaatatgctgtggtttgaatctttgctgttttatggttgtgaagaacgagagcaagaaaaagatgatgtagatgttgccctactacctaccattgtggaaaaggtgattcttcctaaactaacagtgatagctgaaaatatgtgggaccctttttctacaacacagacttcaagaatggtgggaattacactaaaattaatcaatggatatccttcagtagtgaatgcagaaaataaaaatacacaggtatacctaaaggcacttttattgagaatgagaagaactttagatgatgatgtatttatgcccttatatcccaaaaatgtcttagaaaataaaattctgggccttacttgttttttcaacgacagttttggtcttcagttaagctgttagcaattttcttcagtggtatggcattttctcaa

SEQ ID NO: 248850 - DNA, 1130 bp, Homo Sapiens
  misc_feature (596)..(646): n is a, c, g, or t
  misc_feature (1003)..(1049): n is a, c, g, or t
caaaatactaaccaaaaagttaagcagaactattggctaggtattgcttgcttaatttccataaaatttgaagctgtgatctaaaagtcttatcttcacgttttaccaataatacttaatagtcattaaatgatatgtgaagttttctttccattcattttaactgagttccagaaaaatcaactacattaaaataattaaagaagaaagatagaaaaaaattggttgttacaaagaacattcaacgttgggattattaaatcctggctaatgagaagtagaaccggttttagacttttgctttcatttgaattcttaaggtttaactagatactttatggatattatgaacctgcacaaaagaatgggcagtacaaatatgaggttcatgtggactatggcactctgtaggtaatgaccaactaaacataattagttttttataatacatacatttagaaatggtatcaagccattgtttcaaaaacactgaagcacaaattgcccagacctaacaaaagcggcaatgtcaggtaaagattcaaacaaacatggagcaaaaacatagtactcttctgtacgctgtcacactaacnnnnnnnnnnnnnnnnnnnnnnnnnnnnnnnnnnnnnnnnnnnnnnnnnnncacacattttggatgacagtaaaattagatgtcatggacttcactctccaaaagagcaaaatcatttgtccaactatctcaacaaaagatattcaaaaattaatggttagtgagtttatttaaactggaaaaatgtagctggccacaaattatactatgagcccacgtatgtagactccacacttgcattagtttctgaacaggtgtctactccaaaccaagcacagctttttgaaagcaagaagcatcaaaagtcttcattataggatttcaggtattttcccaagaggcacaaggaccttcatgctcatagcctagaaccttccttctctcaaaatggctagtttttccagtttnnnnnnnnnnnnnnnnnnnnnnnnnnnnnnnnnnnnnnnnnnnnnnntatagatgcatagtgaaaaccaagagggatgacacagcagtgatgacactttcgtgctgacatgcaccaggacccttcatt

SEQ ID NO: 248851 - DNA, 906 bp, Homo Sapiens
ttggtgggaacattgaagtttatttggatatcaaggtcccagaacaaggaagtcacttttcagtggatccaaagaatctattccttaaacctggagaagaacatgaggttattgtttcatttactccaaaggatcctgaagcctgcgaggaaaggatcttgaaaatatttgtgcagccatttggacctcagtatgaggtagtgttaaaaggcgaagtcatttcttcaggaagtaaacctctgtcacctggaccttgcttagatattccatcgattttgtccaacaaacaatttctggcttggggaggagtccctctaggtagaacacagcttcagaaactagctttaagaaataattctgcatctacaactcaacatttacgactgcttattagaggacaagatcaggactgctttcagcttcagaacacttttggttcagaacagcgattgaccagtaactgtgagatcagaattcacccaaaggaagacattttcatctctgtattatttgcacctactcgattatcttgcatgttggctagactagaaatcaaacaacttggaaatcgatcacaaccaggcattaagttcacaatacctttgtctggatatggaggaacaagcaatcttattttggaaggcgttaaaagattatctgacagttacatggtaacagtgaatggcttagtacctggcaaagaaagtaaaattgttttttctgtccgcaacactggctcccgagcagcttttgttaaagcagtaggttttaaggattctcagaaaaaagttttgctggatcctaaagtattgaggatttttccagataaatttgtactcaaggaaagaacacaagaaaatgttactttaatatataatccatcagacagaggaatcaataataaaa

SEQ ID NO: 248852 - DNA, 1223 bp, Homo Sapiens
ttggccatcccttctctctctgccaccatttcggacaccccgcagggactcgttttgggattcgcactgacttcaaggaaggacgcgaacccttctctgaccccagctcgggcggccacctgtctttgccgcggtgacccttctctcatgaccctgcggtgccttgagccctccgggaatggcggggaagggacgcggagccagtgggggaccgcggggtcggcggaggagccatccccgcaggcggcgcgtctggcgaaggccctgcgggagctcggtcagacaggatggtactggggaagtatgactgttaatgaagccaaagagaaattaaaagaggcaccagaaggaactttcttgattagagatagctcgcattcagactacctactaacaatatctgttaaaacatcagctggaccaactaatcttcgaatcgaataccaagacggaaaattcagattggactctatcatatgtgtcaaatccaagcttaaacaatttgacagtgtggttcatctgatcgactactatgttcagatgtgcaaggataagcggacaggtccagaagccccccggaacggcactgttcacctttatctgaccaaaccgctctacacgtcagcaccatctctgcagcatctctgtaggctcaccattaacaaatgtaccggtgccatctggggactgcctttaccaacaagactaaaagattacttggaagaatataaattccaggtataaatgtttctctttttttaaacatgtctcacatagagtatctccgattgcagctatgtaaaagagaaccaaaaacttgagtgctctggataactaatatggaatgctttctaagaatagctgaagctaatctaatttaaatttaacagcttgaagaggtagctaggtgtttaaagttcctccagatacttttacctgagtgatgcttcccttcctaaggctgaccaagacctgttgatccttttagattaaaaataaaatgtcgcatgtaaaggctgaagtcgcgttttatcagaatgccttgccttcttaggttcttttccattatgtcaaaggtccaggctccagcaggagagaaagaactcctcataggaatactgaagaagtgggaaggaaccaagcgtgacacaggcctcaactgcaatttgatatgcctgctgatcagagtctcttgggcattttatattttgcattctgatgta

SEQ ID NO: 248853 - DNA, 1186 bp, Homo Sapiens
  misc_feature (206)..(233): n is a, c, g, or t
ttggctacttttactcagttctgttttgcattttctttgccctagagacacaagtgtaatctctccctttatccctccactactccacctcagagtagattgtagcctgccaaaggattccttccctcatcctattgaagttgttttttcattgccccatattaatatgactatagaagagccaattaagtagaaatcaagatatnnnnnnnnnnnnnnnnnnnnnnnnnnnncccatacatgtatttatgtggtcttcagagggtccttaaagaatgaattttagattgaaaaatatttagttgtctcattacctcttctaaacacaaaccagctgatgtattttaatctgtttctgttctatcttgtaattaatttggtgggttctacttgttttaacatccataaagagtatgcagcacgtttaataaaatcagaactcttaattggcttatgcccaggtctaggctgagaagtcctttttcttcttcccacctttatttccttagtttctgtccaccttaatcgaaacaacacatggttatgtctttttcctgctacaactacagggtacttgagcctttcccctcaagtgcattcgaagtcacccaggatgatcctcactagtagcctgctttggcagtgtggctttttgcacacttgccctgtcttcctgagactacttcagtaagccatgcttccttcttccccacttttatttggtgtcatgaatagaaacttccaaatgtaaccatggaagctaagtttggcctgctttgctttttagtctccacaccatgggcagaactgctgtctttactacttcatctcacccaagtcccgttcccaggcagccaggggcctgggtttgaataattgcagggccagcctgccatgatctttctcacttactcctctcccattcagcaatcaaccagactaaggagttttgatccctagtgattacagccctgaagaaaattaaatctgaattaattttacatggccttcgtgatctttctgctgttcttactttttcgaatgtagttggggggtgggagggacaggttatggtatttaaaagagaataaacattttgcacatacatgtattgtacaacagtaagatcctctgttaaaccagctgtcctgttctccatctccatttcttcccatgctgtaacccc

SEQ ID NO: 248854 - DNA, 876 bp, Homo Sapiens
ttgggttatgcccaattggaaatatgctgtcagtttgtgcaccatatggtgaccaggcctgtgctcagtttggcagctatagaaggaaatgctgtcccataaaatgccattcctattttctaatataaaactcttttccaggaagcatgcttaagcatcttgttacagagacatacatccattatggcttggcaatctcttttatttgttgactctagctcccttcaaagtcgaggaaagatctttactcacttaatgaggacattccccatcactgtctgtaccagttcacctttattttacgttttattcagtctgtaaattaactgggccctttgcagtaacttgtacataaagtgctagaaaatcatgttccttgtcctgagtaagagttaatcagagtaaatgcatttctggagttgtttctgtgatgtaaattatgatcattatttaagaagtcaaatcctgatcttgaagtgctttttatacagctctctaataattacaaatatccgaaagtcatttcttggaacacaagtggagtatgccaaattttatatgaatttttcagattatctaagcttccaggttttataattagaagataatgagagaattaatggggtttatatttacattatctctcaactatgtagcccatattactcaccctatgagtgaatctggaattgcttttcatgtgaaatcattgtggtctatgagtttacaatactgcaaactgtgttattttatctaatccattgcttaatgagtgtgtttttccatgaatgaatataccgtggttcatatgttagcatggcagcattttcagatagctttttgtttgttgggaagttggggttttggggggagggg

SEQ ID NO: 248855 - DNA, 1133 bp, Homo Sapiens
ctttgtacaaaaaagttggtgcaaggaccttaaatagaaataggaatgaaataaatagctgatatttgaacatttttaatgccctaggcagcgtcttaagaattctaagctttcatttatcaatcctgaggtagttaacattactatttccagtaatgttcactgggccagtttacttttgaagaaattgaatctcacggtttaagtaaagtaactagctcaaggctatatagttataactaagccacagagcagggaggctaatctaggcctacctcatgccacagcctgagttcttagttgtgatacaaaacaaggtaaagggggacctggggtgacttagttgcctcctgagaattctgggctgtggtggaattacccatcagactgggggcgcccatctcttcacttatgatgtgtccttaacagactaaatgcaggctctgctgcactttaatgtaattctttccctattaagggaagcttgcttgcctttgcagcaaagccccctggatagtttattttttagcagttcagcttgtgcttggacccagttgttccagaaatcagtaaaacctatttgagtattcaagaaaaaggatctttttgttaactaaggattaactagaaaccttattttataagggttcctgaagtctgcttatttactaaggaatttcatcagaggtggttagcattttgtgaacaagtatgatgttgttcccacttcaaggggaataaataacaaatttaaccagcttgctgcttaagaagcagaattagcagtgggctagtcattggcctctcttcagagttctcatgtgactcacttagttttgcagagtgaggtagattttaaccacttttcaagtcaagttgattggccattcatgagctgtgtgcagggagagaagagagacgagaacaagttagcagaaagctgaggtgtgttagacgggagttgtaggtaagtcagggaggatattcttcatttagaccctgagcttgagtaagacacctttctacaggagacattgcggatactttctagttagtactagcgcagtgttctgcaaactacacctgcttttgtgtggtccacgaactaagaatggttttgtatttttaaattt

SEQ ID NO: 248856 - DNA, 1302 bp, Homo Sapiens
  misc_feature (129)..(215): n is a, c, g, or t
  misc_feature (372)..(389): n is a, c, g, or t
ttgggttaacagccaacagatcaagaatctgtctctgaaccatgtcttaaaatgcctctggacccataactgtatatccaggcattcattgtcttagcagacttaaccaagctaactacttttattcannnnnnnnnnnnnnnnnnnnnnnnnnnnnnnnnnnnnnnnnnnnnnnnnnnnnnnnnnnnnnnnnnnnnnnnnnnnnnnnnnnnnnngcaactgtagtcaggaaatgaattaatgtcttaaactgtggccaaatgaattgttatcaaataaatatttgagggagatctgagtttagatgcacacttttttttgaaatagcaaagaagtaatatcaattattatagacttccccattttctttcnnnnnnnnnnnnnnnnnnaatatatattttcttcccccctttcccctgactctcctcctcccagcagcttaaaatgtaaatcatggttatatgaaaactctggaatgggtaagatgtgttactatcttagtacttttttccattatgagtcatcaaagtacagttttcttctcaaactgttttcatacccttattggcctaccacatgaggtggttgtattccacagtggattgtgcagttatagatgaagaactcagaaaagcactttgggatccttcatgatgaaaggcactgataaacatgaggtttgctaatgcagaaagagtgcctttaggagtctgtgtggggacagttttgtagcataaaccttacatgtctgccagtacagccagttgaatccgtttatttctatatttactttaggcttgactttcagggatcttagtaatttttgcctgttttgtcactacatatgtcatcagatcagactagaacaaagaaaagcttactgttttcaaacagggaaatgtgcatagtaatgctttactctgaattagaaacatgtttatgataatcctattagaaaatttgattgattgattaaagtgtctttttgggtcgacatccctagtgtttctgatcctgagtaatcagatttaaagactacccagcagcaaaacttttattaaataattatctacttttattaaggctgtatgcctaggatttccatctgtttgttataattagaaataccagtgtgagtaaaaatcttaggaagttatttggccttggattccagttctactcctggctccttggctcttgattttcgcatattcccatgttggaaataacattagagcttaatagtagtaatggggtgggagagggtacaaacttcttgaattgcttcagcatctgtgtata

SEQ ID NO: 248857 - DNA, 1061 bp, Homo Sapiens
  misc_feature (294)..(333): n is a, c, g, or t
  misc_feature (857)..(879): n is a, c, g, or t
gtagcccagtgttagatttttttatcaccttttaaactctctaaggcaggaaatatgtgtggtgggaagatgttaccagagggagaaacaaagacaattaacatgtctcagatcttgaggaaaactggaattgtaacttaagttttctctacttataaccttgcagcgggatggcaaaggagacaggatctcacgggattttacaaattgtgtttacaaggaattggaattgggaccatagataaggtctgctggtcacagaaaagtgggcttttaacattccttttagtttcnnnnnnnnnnnnnnnnnnnnnnnnnnnnnnnnnnnnnnnnagcttacaacaaaattttcgctgtttatagctttcttggggaagaaaacacaggcgcaaattctgatgttaggaatgttttaagcacatatcttcaatattattcatccaggaccaaagtaagtccgcatgcaggaaatgagtgagtttcacagctttctgagcccctacttgacccaggaagcccagctggaacctcctctcactttctactttcttctgatattccttgaaaatacttctccttcatagcggagataagtagttttaaacagcttggttccttccctgctgtgaagtattgagttttatttcaggaccaaaggacataaaccagtttatgacataaacaggtttagacaatctgcaaaagacaggacagagattgcatattgtatttactaggacaagagatttacactgaccactctggaataagactgtgcttacttagttcaactaagtactgaaaagtcttacagagactgaaaagccaacactttttctgtgtgtatgtaattgctnnnnnnnnnnnnnnnnnnnnnnnctttgaaaaaataatgctttgtcatggtgacagttttatctttgatatctttaaatagggggaatgaatggaaatttgctttctcagctgttcaactacactgtgtttttaatagacactttctttcagtaggatgctatgtatttaagcatgcagattcttcctgggtatttctgaatcgg

SEQ ID NO: 248858 - DNA, 933 bp, Homo Sapiens
ttttttaaacttacgttattataaaaataactttccgaacaattccacagctacccacattaccaaaataagattaatgaaaatcatgagaaaattcaatgaagtcatgataaaacaagtcctttagaattatcacatttctttcaacttgtacactttattagacttgatcaacactacagattagagtatcatcaactttgattctgtttttatctcacaatccacacttgaactcctcaagggtaaaagacctttcataatttatgactgtatactggtcctgcacagtgcgtgtcacacagcaagcaaaacacgtgaattagccataaacaacatgattgcttaaatacgaagaaaagcataaagaagcagtccctctcctttaattacatacttcacctatgaagaatggccaaaccccaatcttcaatcctccagggaatttactagaaattaacgtaataaaatttaagtagcgtgaagtagtaaaagttcacatataaacgtacaacagtcaagttacagtttaattgttggataacctcgaactccaaactctgaagcaatgctagaataggaagtagcatccatctttccaaccttaactggagaaccaatgcttttcatctcaagaccaacttcattccaaattggttccagctttttacaatggccacaccatggcgcataaaaatctacaagccaaatgtcatcatttcgattttctttaaacgattcatctaaatcttctacaaatcctttacagacgaccatatcaagtacaacaactgtggcgcagagccgcagggccgtccaactcttccacgctgccatgctagcccgggagagctgcagaagctgactgtgcaaaagagggataaagacactggggtccgccgcctgcccgcccggaaagggaaacggagccaa

SEQ ID NO: 248859 - DNA, 892 bp, Homo Sapiens
  misc_feature (286)..(392): n is a, c, g, or t
ggcttggataaaagctcttgaattttttacaattattgtccttggtcattcttcaggaacagcatgctggttaatgatttcttgtttacaggctgaactaatcaacagagaggattagtattctgggaacagcccaagttccacaaaatatagtaaaggagcctatgacagatgattataaaataccaaagtaccaaaatcttctgtccttgcaatgtgcagcaaaacttggtctacagagttttagtctgtatataaagtgatttcagactgggcagtggctcannnnnnnnnnnnnnnnnnnnnnnnnnnnnnnnnnnnnnnnnnnnnnnnnnnnnnnnnnnnnnnnnnnnnnnnnnnnnnnnnnnnnnnnnnnnnnnnnnnnnnnnnnnttttttaaaaaattaggtgtggtggtgcatgcctgtggtcccagctactagggaggctgaggtggggggatcacctgagcccaggaagtcaacactccagtgagccaggacagcatcgctgtactccagcctaggcaacaaggtgagactctgtctcaaagaaataaagtgattccgccgagtaacccaaaagcccaaaattgaccaagcccaagaatttttgaaggaagctataattgctaaaattactattaaggtggttagcacagcagtcagccaagcaaactctgaaatcaggcctggactggaatgtcactccatgttttactagctacgtgaccctgggctatcaacttaaccgcaacctgcctcggtttctcttcttcaaatgggtgtgccatcaatgaaagagctgtgatgagaagtgtgaaataaggagcaaagcactggtccagccacgagaagctactgtgcccatcaccaaggataaactcacccaa

SEQ ID NO: 248860 - DNA, 912 bp, Homo Sapiens
  misc_feature (508)..(530): n is a, c, g, or t
ttggagatgatcaagttttaaattgccatttggcagtgaaggtgctgtctccggaagatggaaaagcagatattgtaagagctgctcaggacttttgccagttagtagcccagaagcaaaagagacccacagatttggatgtagatacgttagccagtttacttagttcaaatggttgtcctgatcctgatttagtattgaagttcggtcctgtggacagcacattaggctttcttccctggcacatcagattgactgagattgtctctttgccttcccacctaaacatcagttatgaggactttttctctgcccttcgtcaatatgcagcctgtgaacagcgtctgggaaagtagtggtcattggttgcataatttgatttgaggcttgtggaggaaaggaaccaagtgactctgatgtttacaaagcacctgtgaaaccctgtacacacctagttcataatcctcataatttatcaacaaacacaaaaaagtgtcttacttgagannnnnnnnnnnnnnnnnnnnnnncacgtgcacacatgtgcacgtttgtatgtatggaaataaacttataaatggggacgtattggagaaggaaatacatagacctacaactttgagcaaatagcagtgatgttttaggaactgaaatgtcacacttaaagtcttcagcccagctacttccctatttttgtggggagaagagggcctgattagaactgttctggttgtgtttggcgggaggggaataatttttgttcagtccttcttagtgaccaaactttaatttttaagaataatatattgacttactgaactgaagcattctgagttgaaaggagctccagaaggagtggagttctgtgttgctcacatgttaaaatcttgctcaccttcagagcagagggaa

SEQ ID NO: 248861 - DNA, 1266 bp, Homo Sapiens
ctaataacaactttgtacaaaaaagttggctggcggttgtccctgaattggcgaccgcgggagacgctgctgaggcggcttcggttgcgggtcggaacggcgctgctctgcggggccggtccaggctggcagctgccggcgcttggcggtgagggcgggctcccgagtggccccccaccgaaggcggtgggaccagcggctgaggccaggatgccgtccaggcggcgcggcggctcctcactcatcccagatgttggttatctttctgaagtagactgtccatggcctgaacattttccgaaaatcattttgagcaaaatatctgtttaataacaagataaccacatcaagatggttggaaagctgaagcagaacttactattggcatgtctggtgattagttctgtgactgtgttttacctgggccagcatgccatggaatgccatcaccggatagaggaacgtagccagccagtcaaattggagagcacaaggaccactgtgagaactggcctggacctcaaagccaacaaaacctttgcctatcacaaagatatgcctttaatatttattggaggtgtgcctcggagtggaaccacactcatgagggccatgctggacgcacatcctgacattcgctgtggagaggaaaccagggtcattccccgaatcctggctctgaagcagatgtggtcacggtcaagtaaagagaagatccgcctggatgaggctggtgttacgtgatgaagtgctggattctgccatgcaagccttcttactagaaattatcgttaagcatggggagccagccccttatttatgtaataaagatccttttgccctgaaatctttaacttacctttctaggttattccccaatgccaaatttctcctgatggtccgagatggccgggcatcagtacattcaatgatttctcgaaaagttactatagctggatttgatctgaacagctatagggactgtttgacaaagtggaatcgtgctatagagaccatgtataaccagtgtatggaggttggttataaaaagtgcatgttggttcactatgaacaacttgtcttacatcctgaacggtggatgagaacactcttaaagttcctccagattctatggaaccactcagtattgcaccatgaagagatgattgggaaagctgggggagtgtctctgtctaaagtggagagatctacagaccaagtaatcaagccagtcaatgtaggacctctatctatatgcattcagaa

SEQ ID NO: 248862 - DNA, 1457 bp, Homo Sapiens
acacgtggtttcgcttttacacatgtagtaatcctgtggatttgagtaacccagctattataagctctactcccaaatttcaggaacagttcttgaatgtgagcggaatgccgcaagaattgaatcagtatccctgtccttaaacatctgcctcaaatattttttcgtgccatgcgtggaatcagctgtctggtggatgcattcttaggtatttctggaccccgatcagacagtgctcccccaacacccgtgaatagattaagtatgcctcaaagtgctgctgtcagtaccaaccccccacataaccggaggcaccgggctgttactgtgaataaggccaccatgaagacaagcacagttagtactgctcatgcctctaaagttcagcaccagacgtcctccacctctcctctgtcaagtccaaatcagactagttcagaaccccggccactgcctgcccctcggagaccagaggttaacagcatcttgaatctctttggatcatggttatttgatgcagcatttgttcactgtaaacttcataatgggataaacagagacagcagcatgactgccattacaacacaagctagcatggagtttcgacggaaagggtcacaaatgtccacagacaccatggtttccaatcctatgtttgatgcaagtgaatttcctgataactatgaagcaggaagagctgaggcttgtgggacactgtgtaggattttttgtagcaagaagactggagaagagattctgccagcttatttatccagattttacatgcttttaattcaaggtttgcagataaatgattatgtgtgccatcctgtcttggccagcgttattctaaactctcctcctttgttctgctgtgacttgaaagggattgatgttgtggttccttactttatttcagctcttgaaaccattttgcctgacagagaactctcaaaattcaaaagctatgtgaatccaacagaattgcgaagatcctccattaatatcctgctttctttgttgcccctccctcatcattttggcacagtcaaatctgaggtggtcctggaaggaaagtttagtaacgatgacagctcttcttatgataaaccaataacttttctgtccctgaagttgagacttgtgaatatattaataggtgccttgcaaactgaaacggaccccaacaacacccaaatgatattaggggcaatgttaaatattgttcaagattcagcacttttggaagccattggttgccagatggagatgggtggtggagaaaataacctgaagagtcatagtcgcaccaatagtggtattagttcagcaagtggtggaagcacggagcccacgactcccgatagtgagagacctgctcaggctctcttaagagattatgctcttaatacagattcagctgctgggctcctgattcgcagcattggtaccggctc

SEQ ID NO: 248863 - DNA, 1026 bp, Homo Sapiens
  misc_feature (969)..(969): n is a, c, g, or t
ttgggccagcatggacaatctcctttacagtttcggaagcaggtttgttgccatggagttcacattttgacgggagttgagaagtataaaggtaaccatttgttttagtttcaacgatctgacaaaaagataggctgttgctcttcttctggaaaagcctgattggtaagattcctttaagggctcagccccaaagagctttatcccatcccctcgcagactgaaaactaaagcctgcagagacctctgaaggaaaacctgtcccgggctctgtcacttcacacccatggctaaccctggaggtggtgctgtttgcaacgggaaacttcacaatcacaagaaacagagcaatggctcacaaagcagaaactgcacaaagaatggaatagtgaaggaagcccagcaaaatgggaagccacatttttatgataagctcattgttgaatcgtttgaggaagcaccccttcatgttatggttttcacttacatgggatatggaattggaaccctgtttggctatctcagagactttttaagaaactggggaatagaaaaatgcaacgcagctgtggaacgaaaagaacaaaaagattttgtgccactgtatcaagactttgaaaatttttatacaagaaacctttacatgcgaatcagagacaactggaaccggcccatctgcagtgccccagggcctctgtttgatgtgatggagagggtatcggacgactataactggacgtttaggtttactggaagagtcatcaaagatgtcatcaacatgggctcctataacttccttggtcttgcagccatagtatgatgagtctatgaggacaataaaggatgttttagaggtgtatggcacaggcgtggccagcaccaggcatgaaatgggcaccttggataagcacataggagttggtaggacctcgtggctaagttccatgaatgtagccgcaaggtattgtnctatgtgaatggacagttcagaatatgcgacggttatactctagatatcggctatga

SEQ ID NO: 248864 - DNA, 1031 bp, Homo Sapiens
  misc_feature (218)..(271): n is a, c, g, or t
  misc_feature (357)..(400): n is a, c, g, or t
ttgcgtgtattgcaaaaggacacaaggaaactttggagggtcatgaaaatgtttaaaattataactggtagtttcatgggtgtatatatttgtcaaaatttgtcaagttatatacttcaaatatatgcaatctgttgcacacaaattacaacttaataaagttgtaaaaagaaaatgaatatcaatatctatcccttggctaccttttcccctatatnnnnnnnnnnnnnnnnnnnnnnnnnnnnnnnnnnnnnnnnnnnnnnnnnnnnnngtgatatcactttttaaaataaatgaggatcgtatagtttggtaatctacttttttcactgaatgcttgcattagtatcccatttnnnnnnnnnnnnnnnnnnnnnnnnnnnnnnnnnnnnnnnnnnnngtatcacaatcccttactattcaatattttgatcatttatatattttctcttttaaatactatagtgacaaatatccttgtagttacactttagcgcgtatctgtaatatttccttagaacaaattcctaggaacagtttccgggttagaggcatagattgcatatgacctatcctccagcttacctctttacccacttttgccaagcccccactaaagcatatcaacaaatagctcaattactcttctacctgggtaagccttattttatctattttgctttttctgaatctatttctatgagcctttatgtgcagaaatgtatctagccacacactgactgctagatatttggcctagatcatctgatactgggaaacaatcagttgttagccttaactagccacatttacagagcaatcacatcaaaaataacttaattgtctcagttatcttttacttggtggtcactgacccacctatgtcttttccatcatcattaggatcatcactatatttttacacttgctaatatttgtaagcatttgttaaatacgtactatgttccaggcactgtgcctgacacttttctcatattacctcacttaatctttgagatgtatgtagtagc

SEQ ID NO: 248865 - DNA, 746 bp, Homo Sapiens
  misc_feature (498)..(519): n is a, c, g, or t
  misc_feature (533)..(606): n is a, c, g, or t
taattagtacatagttttcactcacttgcagcttactaaagacaagaaattatgtacatgtactaatgtttttcccacaaaaaaatcctttacttctgatgtatgaattagttatctaaatagttaagcctaatacctgaataagactcaccaatgtgattgtacaataaattctatcattccattaaaatcctacatttattcccaggaatggtaatttcacctccctacatctatactccactccctcagtaaataagtgaaaattgttaacccatgtgcccattcctgagtagggcagactcttcacaagaggcccatgacaagaattctagggtccagattgaactttaatatagacctttgtctgtgtagaccagtttgtcttgtaaactgtcttacttatgtgtgtaaacattttacattcacatgaaaagttattttcctttatataattggattcagaatcataagggacaagatcgaaacgctgtctcnnnnnnnnnnnnnnnnnnnnnngataaattaattannnnnnnnnnnnnnnnnnnnnnnnnnnnnnnnnnnnnnnnnnnnnnnnnnnnnnnnnnnnnnnnnnnnnnnnnnagtgagccatcacgcctggcctctaaaagacctgatgtttgtggtgaccattttctggaaaaatttgtgacattaaattgtggatatgtcttctttgaccaatccagcagctgtgggagacatgtttagaacagcgttgt

SEQ ID NO: 248866 - DNA, 1072 bp, Homo Sapiens
ttgtcttctgtagtaataactgctttattctttattcatcaactgcacaagcgaaaaactcagaaaacaaggaatccattccttcattgccacaatcacctatgagagaaacgccttccaaagcatttcatcagtacagcaacaacatctccactttggatgtgcactgtctcccccagctcccagagaaagcttctccccctgcctcaccacccatcgccttccctcctgcttttgaagcagcccaagtcgaggccaagccagatgagctgaaggtgacagtcaagctgaagcctcggctaagagctgtccatggtgggtttgaagattgcatgccgctcaataaaaaatggagaggaatgaaatggaagaagtggagcattcatattgtaatccctaaggggacatttaaaccaccttgtgaggatgaaatagatgaatttctaaagaaattgggcacttcccttaaacctgatcctgtgcccaaagactatcggaaatgttgcttttgtcatgaagaaggtgatggattgacagatggaccagcaaggctactcaaccttgacttggatctgtgggtccacttgaactgcgctctgtggtccacggaggtctatgagactcaggctggtgccttaataaatgtggagctagctctgaggagaggcctacaaatgaaatgtgtcttctgtcacaagacgggtgccactagtggatgccacagatttcgatgcaccaacatttatcacttcacttgcgccattaaagcacaatgcatgttttttaaggacaaaactatgctttgccccatgcacaaaccaaagggaattcatgagcaagaattaagttactttgcagtcttcaggagggtctatgttcagcgtgatgaggtgcgacagattgctagcatcgtgcaacgaggagaacgggaccatacctttcgcgtgggtagcctcatcttccacacaattggtcagctgcttccacagcagatgcaagcattccattctcctaaagcactcttccctgtgggctatgaagccagccggctgtactggagcactcgctatgc

SEQ ID NO: 248867 - DNA, 963 bp, Homo Sapiens
ttggccaagtcatagaaatgggaaaagcaaatggtcattcctgttcagtttgacagacctgaaatcaatcaagcaaaacaaagagggtatgggctggtcctatttggtattctgtctaaaggatgacgtcgttctccctgctctacactttcatcaaggagatagcaaactactgattgaatctcttgaaaaatatgtggtattgtgtgaatctccacaggataaaagaacacttcttgtgaattgtcagaataagagtctttcacagtcttttgaaaatcttcttgatgagccagcatatggtttaatacaagcaggactgctagacagaagaaagctgttgtgggccattcaccactggaaaaaaattaaaaaggacccttatacggcaactatgataggattttccaaagtcacaaactacatttttgacagtttgagaggcagcgatccctctacacatcaacgaccaccttcagaaatggcagattttcttagtgatgctattccaggtctaaagataaatcaacaagaagaaccaggatttgaagtcatcacaagaattgatttgggggaacgccctgttgttcaaaggagagaaccggtatcactggaagaatggactaagaacattgattctgaaggaagaattttaaatgtagataatatgaagcagatgatatttagagggggacttagtcatgcattgagaaagcaagcttggaaatttcttctgggttattttccgctgggacagtaccaaggaggaaagaacccaattacaaaagcaaaaaactgatgaatacttcagaatgaaactgcagtggaaatccatcagccaggaacaagagaaaagaaattcgaggttaagagattatagaagtccttatcgaaaaagatgttaacagaacagatcgaacaaacatattatgaaggccagatatccagctctaactgggccgg

SEQ ID NO: 248868 - DNA, 1053 bp, Homo Sapiens
ttggctggaaaaggttcgccagctgctgccactgcccaagcagacccgagatgtcatcacgtgtgagccacagggctcccttatcgataccaagggcaacaagattgctggcttcgattccatcttcaagaaggagggtcttcaggtttccaccaaacagaagatctcgccctgggatctttttgaggggttgaagccgtcagcaccactctcttggggctggtttggaacagtccgagtggaccggcgagtggctcgaggagaggagcagcagcggttgctgctctaccacacacacctgaggccccggccccgcgcctattacctggagccactgccactgcccccagaagatgaggagccgcctgctcctaccctgctagagcctgagaaaaaggctccagagccccccaaaactgacaaaccgggggctgctccacccagtactgaggaacgcaagaagaagtccagcaagggcaagaaacgcagccagccagctaccaagacagaggactatggaatgggcccgggtcggagcggcccttatggtgtgacagtgcctccggacctcctgcaccacccaaaccctggttctataacacaccttaactacaggcaaggctccataggcctgtacacccagaaccagccactacctgcaggtggccctcgtgtggacccataccgtcctgtgcgcttaccaatgcagaagctgcccacccgaccaacttaccctggagtgctgcccacaaccatgactggcgtcatgggtttagaaccctcctcttataagacctctgtgtaccggcagcagcaacctgcggtgctccaaggacagcgccttcgccaacagctccaggcaaagatacagagtcagggcatgttgggacagtcatctgtccatcagatgactcccagctcttcctacggtttgcagacttcccagggctatactccttatgtttctcatgtgggattgcagcaacacacaggccctgcagatcctacccgccacctgcaacagcggcccagtggctatgtgcaccagcaggc

SEQ ID NO: 248869 - DNA, 862 bp, Homo Sapiens
ttggccaggagctgggagcgggtgaccggcggcggggaagcggcctgggttggccctcagattgcggggtctgggggcatctcgccgggcaaacccttggcccgcctacaaggacttcccccggccagagcaatggccgctgagaacagcaagcagttttggaagaggagcgctaagctgccggggagcattcagcctgtatatggagcacagcatcctcctcttgacccacggctcaccaaaaatttcattaaagaacgatcaaaagtcaacacagttcctctgaagaataagaaggcctccagttttcatgagtttgcacggaataccagtgatgcttgggacattggcgatgatgaggaagaggacttttcctcaccttctttccaaactctgaactcaaaagttgctttggcaactgcagcccaagttctagaaaaccacagcaagctgagagtaaaaccagaacggtcccagtcaacgacatcggacgtccctgccaactacaaggtcataaagtccagcagtgatgcccagctgtccagaaactctagtgatacatgcctgaggaacccactccacaaacagcaatcactccctctccggcccatcatccccctcgttgcccggatctcggatcagaacgcttctggggcccccccaatgactgtccgggagaaaacccgcctagaaaaattccgtcagcttctctccagccagaacactgacttagatgaactgaggaagtgtagctggccaggggttcccagggaggttcgacctataacctggagactcctgtcgggctatctcccagcaaacactgagaggaggaagttgaccctgcggcagaagcaggaag

SEQ ID NO: 248870 - DNA, 1065 bp, Homo Sapiens
ttggattgcattcatgtggacacaatagaaattctgaggcatatagatggccctcagcagcctgtcaagcatttcaatcttgtgatgaaccactatagaatatgcctcagaatttctattgcattcatgtggacacaaaatccgaggattcctatttagctgcagtgatgggcatcgcttcctgttttagtaatgtctttgtggccagccgattggagagtgtggtttatgcatcgtggagccgggttcaggctgacctcaactgcatgaaggatctctatgcaatgagtgcaaactggaagtacttgataaatctttgtggtatggattttcccattaaaaccaacctagaaattgtcaggaagctcaagttgttaatgggagaaaacaacctggaaacggagaggatgccatcccataaagaagaaaggtggaagaggtggtatgaggtcgttaatggaaagctgacaaacacagggactgtcaaaatgcttcctccactcgaaacacctctcttttctggcagtgcctacttcgtggtcagtagggagtatgtggggtatgtactacagaatgaaaaaatccaaaagttgatggagtgggcacaagacacatacagccctgatgagtatctctgggccaccatccaaaggattcctgaagtcccgggctcactccctgccagccataagtatgatctgtctgacatgcaagcagttgccaggtttgtcaagtggcagtactttgagggtgatgtttccaagggtgctccctacccgccctgcgatggagtccatgtgcgctcagtgtgcattttcggagctggtgacttgaactggatgctgcgcaaacaccacttgtttgccaataagtttgacgtggatgttgacctctttgccatccagtgtttggatgagcatttgagacacaaagctttggagacattaaaacactgaccattacgggcaattttatgaacaagaagaaggatacacaaaacgtacccttatctgtttccccttccttgtcagcgtcgggaagatgacagggtctgctctgttgcca

SEQ ID NO: 248871 - DNA, 884 bp, Homo Sapiens
  misc_feature (744)..(773): n is a, c, g, or t
aaaattggtgtattgatatggtatttgaataatgagaaaatgggccaataggaagattttcttctttattctatttgatttaaaagaaaaagatttgccaagggatgggtagggttaaattaaaaacattttaagaaacatttctttatatggagcatacttactgtttttgctttgagtgcattctgatgaaatatagattccaaattccccttggatctcacccttctgtctagtgctttgccctctatttggggcagtaattctatacatatcctgtaaatgtctgtcctgatgatcaggatgcccaagctctgaatccaactgctgccaccaagagaacggctcctttttggagccattacacacagatcatcactcaaatcagtagtttctctttagaaaactagcaattttctggtagtctgtcaattaagaaaagaaaatgaaattcagttacttagtaaggaaaactggataaacaggaggctggtccaaacggagatttatatttagacattccctttcttccttgcctcattcctttcacacagctatttcccttcttttaacacaccaagttctttttatatgccaaataacaaaacataaactccctgagggcaggaagcttattcttttggttcactcttagaacactatgcccaggcatgtagtagcctggcaaaaagccggccccaaataagtgccaaattaagtatttattaagcaactactacgggnnnnnnnnnnnnnnnnnnnnnnnnnnnnnnactgtgttaagtcctggggccccagaagcttagtatatgtattttttattttggttggaaaaaaatgacttgcttaccatctagagccaatgcttctaaatttttccccaa

SEQ ID NO: 248872 - DNA, 863 bp, Homo Sapiens
aaaaagagtaagtcaatctttgtttcctcatggtaaatgagaaaagtgtgggtttgagcctgctggctatgattgcctctatttaactggccagggaaaacaggttcgtgataacaaattgcttttctcctgaaactgtagcctttactttgtgctgcttcctgtgctcaagtggaaaatggactggacagagtcagcactggggaaatctagggtctgtggttgccatggtctaaggctgtgatttttgtctccagaagagtcaagtcaaataatagtagcatttatataacatcttccattcgtgaagcatcctttgtccaaaatgttctcagcacacacccaggaacttctctttttgtaacgttgcagaaaccaaggtttggtgcacatgggcaatgaggggaatcaggtcgctctgtaagtcattcagtttagaggccttaaggagtaaccgcttggtggagaaagagagtgaattattggatgcttgcactgagctctcccttcctcctggtaatgagctccctttcaggatgctagcaccgtgctggggttggttggaattgctcccaccacatcaccgtggagtgagtcagaagctagtgcagaaagcattctttacccacagtgtttttttctgaggcatcattcccacctgagaactagcaatatgagttcatcatcactccaggcatcgggcatggccagggaatgaggcacggcaaagaagggaattttccagacagctggacatttccccaccctggagttttatgttttaaattttgttgttttcaaatgaaaagttttacaaggtgtgtgatagacccaacttttttgtacaaagttggcattaatgg

SEQ ID NO: 248873 - DNA, 850 bp, Homo Sapiens
  misc_feature (411)..(430): n is a, c, g, or t
aagtataaaagttgataatgaagacagaaatgatttgtgtctgtcatttcaagctccttacaagagtctagtatacatttaatggttactacatacagaccaaaatgagagcatattaaatctgccctcaaaaaatatgctgcagcaaataagcaagctcttttaatcagtataggttcccttcctataaaatggtgtgtttggtggcaaaaaaagtcaatgttgcacttatacagagatattaaatgtttctctggcatcaatgtgaacattgatgagttccctatcccataccctttaccaatacctatcgtcaacatctaggaataagcctcagaatggcaatgcattcctaaaacaagaaatcttcaggagcttaggaggtcagtttccaagtatgaactgaagggnnnnnnnnnnnnnnnnnnnnggcttagagctggaattacaaaatcaattgtctacaaaggccaagaacgtgatgaaaacaaaagaaacgagctgagtggggactgacggaggtgaactgtttttaaaaaggcccttgctctattctaaaggggggcagcacctagacaagtctagctgaaatcaggacataatgatgctatgcagaaatcagaacacaatgttaccagatgttccaatccttcaagaaaaactgaaatttggattttgtcaattctgatttttaaaaacaaacagatttttaaaattttgaaatattgtgtgaggttaagaaggtgcattttgctggcggtggtggctcacatgtgtaatcgtaccactttgagaggcagaggcaggaggattacttgagcccatgagttcaataccagcctgggcccaa

SEQ ID NO: 248874 - DNA, 893 bp, Homo Sapiens
caccagaatttttaattattccaacaactacaggaatttttaaaatagttttttaattttatgaaattaaagctgaagaaaataactgatttagaaaccataataaaaggacaaatatttagccagagatatcagttcctcgtgaaaaaggatatttatctcctctcactgcagtttttctgcaaggtatcttaactgatttcagatagaaattaaaattcaccttaaaaatagaaacaaacaaaaggacaacttaaactgacattaactaataaaaatatgttcaaatttactgacagaatcatgggcacttcatataatacttagactctaccagttttaagtaaaataaataaggaaaaaattataattacaaagccagtctttccccttggggaaacaaaaagccacttttgaccaattgctccctacatatacatatactgtatattattataagcttcttcagagaagcaaaacatctttgtcttcccgacactggattatctagcatgttagtttttacatcaggaaggcaactgcaagtgttgggcccaaaagtgtttctggtttactcttgaaaggaccactgaatatgcttctatacatactgaaccaggcaaatttatgcagtgtgttcaacatcatctccttatcagtacggcacagattccgattctttctactgcacccccaaggaattcgtggcattattggtgcaattaataaagagaaaatgcgtgccaatgactggaaggctgttttaaaagaggagctggtatctctgatttcacctccttgttgtatggaactgtacagacagcatgatacctgagcaaataaatcaactaccatgatcggaagggcttgtcaatccatcgtctttgctccaa

SEQ ID NO: 248875 - DNA, 950 bp, Homo Sapiens
taccatgatcggaagggcctgtcaatccatcgtctttgctttatcgtgtgcaaagtgtgctactgccccatgagcctcctgcatttctcttttcttgaaaaatcagtgcttgatccttcccaaaataaccagagaagaaatgaggcagaaagtgtctcttcatcacggttccctctcagtcccgagactgatagaaaaggatgtaaccagactcagagttctttgagatatctgatgtcaacccgtagaattcttcaatagcttgtgcatctattttttctacaatgtcgtcatcaaaccacaaccgaaaatgcatgactcttaactattgcaatataatggcctcgattgggaccactaaaacaaacgaagaagaagttaattcaatatatttattaatattactctttcatgctctaaattttgttttataaagaaacagaaacagataaatagcagtaaaaaagaactgcttcttttttataccccttacctattcttgccaaaagagataaagctacactgagttgaactggtcatcaattttaaaatcaaataattagtactctaagagatatatcagtattcttttcacatacagctatattattgaaattttttactgtctttgtaataattttcaattttgcttctataataaaagacatatttttctatcattttataagggaggggatcacagcagaacatgctgagttggactataaaacaatgcatatagaattatttctaagtctcactcccttggtaatggtttttttcttgaggaaagatccaatatgatgcttgaaacaggcaaggatatcaaatccttggttccaaaatcaagcctgaacttcataaaatgtctttaaaagcaaatgacctttgctcaatggtaagtcattattaagtacctaattcttaataccattataactatgacccaa

SEQ ID NO: 248876 - DNA, 677 bp, Homo Sapiens
  misc_feature (239)..(295): n is a, c, g, or t
cacattctaccgtttattacacatattacattcttaaataaaaatgcgtcacataacattttttgcatagatatcttacaatataccaatttaaaaaagaattatgaaacagaccagtaacaaaaataaattttttcttcattaataattttgtaacattaacataccaccatcatataatacaaataatagttttaaatcttaagacttttgtacagcaaaaaaacttgacaaagtannnnnnnnnnnnnnnnnnnnnnnnnnnnnnnnnnnnnnnnnnnnnnnnnnnnnnnnnggcataaccgagggctataagactgggtacttctgtgatatattataaataccagagaaggcctgagagaatgtgatggggggaggcggggaaggagacggggctgggagtaggtctctccaaacacacttgttagacacatctggcaaaaagaaaatgtatagtgcaaaaataaatttattcaagcaactgttaagaggataatagagatttgaaagagaagtttcagtggctgggaagttgtgtgggagtaggaagtgggagaaggagctttacgcgggggcgggtgggggcttgtggaaaggaaggggaggcttcaaaaacattagacatttatttttgcctctgtgttagcaaggagatcttggccattaacagccaa

SEQ ID NO: 248877 - DNA, 886 bp, Homo Sapiens
atattcttggctgattagcttggtatcttgccaggatgttgtattaagagagaaaagggtgagggtatgaagatatttgcaaaatggtgatgagtactgattctctggcctttttatgttggcttcctagggtttagggtttgatgaggtcatcaaaccctgggccaggtgtatgccatgaagatcatgaacaagtgggacatgctgaagaggggcgaggtgtcgtgcttccgtgaggagagggacgtgttggtgaatggggaccggcggtggatcacgcagctgcacttcgccttccaggatgagaactacctgtacctggtcatggagtattacgtgggcggggacctgctgacactgctgagcaagtttggggagcggattccggccgagatggcgcgcttctacctggcggagattgtcatggccatagactcggtgcaccggcttggctacgtgcacagggacatcaaacccgacaacatcctgctggaccgctgtggccacatccgcctggccgacttcggctcttgcctcaagctgcgggcagatggaacggtgcggtcgctggtggctgtgggcaccccagactacctgtcccccgagatcctgcaggctgtgggcggtgggcctgggacaggcagctacgggcccgagtgtgactggtgggcgctgggtgtattcgcctatgaaatgttctatgggcagacgcccttctacgcggattccacggcggagacctatggcaagatcgtcccactacaaaggagcacctctctctgccgctgggtggacgaaggggtccctgaaggaggctcgagacttcattcatcggttgctgtgttccccggagacacggctggggccggggtggagcaggcgactt

SEQ ID NO: 248878 - DNA, 939 bp, Homo Sapiens
  misc_feature (56)..(70): n is a, c, g, or t
  misc_feature (564)..(583): n is a, c, g, or t
ggaaaaagaatgtattttccactctcttgagataccctccatggttttggaatttnnnnnnnnnnnnnnntttacaatcatttggaaggaaaataaaatagggtttggtttaataaatcattttgggatgaaatttggtttctcccaaaattaaagtctaaaaaccaggtggctttcccttgattccaaagctttttcatgttctttcgtgtgtcaagcgaaaacacagttgctatggcaaccactcattatttttcaggagttggctagatattttaacaacaaaaaaaatccccaaatctttctagcctccaaatattcttaatttatatcctacagtggtttctaattttcatatttccttcactaagtgctttgttgagctctaacaagcctaaccaacccacaactttgtcactaaatgagcttgggaataactcagttgctggctctctccccatattgttcgtatctaagagactttcaagattttctgacattttggaatcttgcttcatcttcaaggtgaaagatatatttgagtttagcaatgccttaaaatgnnnnnnnnnnnnnnnnnnnnacatatgcactgaagtttgaaagtcgtaatataaattgagaaaacaaatattctttaaacattctatattaagccccttttctgtgcttttttcagaatctcattgtggtgctaaaatttctgaaggattcaatgaaagcagatgacaacacaactactttcagcactcttaatgtctgcttggaaaaagcaaatcaaaacatgaaagagatgatatataaaatacagtcctgaatgcattcacatgtaatttacagagagttgagatcatgaaggaaggaagtagacacactgtcggaaatatctaagtttacagaggatacttgtacagccagggttttgtgaaagaattccaa

SEQ ID NO: 248879 - DNA, 942 bp, Homo Sapiens
  misc_feature (73)..(82): n is a, c, g, or t
  misc_feature (278)..(286): n is a, c, g, or t
ttggcttcaagagaacacactcagtgcttgtttttattttcttgacacatttattaacaaaatgcatcatggnnnnnnnnnntctacctcttaaaattccatttgcttttatggttagacatgcttgaccaaaaatgttcagaagaaaatatgtacctggtccctaattaagctgcgttaaatttggtagaagcatttaaatggtctatcttcagttttactgaacaaaaaatgtaatttatttagcattctttataaaagaattgatgctagaggtnnnnnnnnntacttgtttttaaaaaatcctttacgtcttgtgtaattaccccattattaaattcaagtccttgaaaatcaactagagattataaagtctctaaagaaggcaataacaaaatttatcaagatatagtacttttcagtttttgtttagtgtcttcagcatcactgtgtctgtatttcaagtacaaatgtttttaaaaaggattctttatacatatgtgctgaattgattttaagaaagttgcatgatcctgtaggagcaacatttttacctaaaaaatgctaactttatagtatttctaattgttcaaggattttaaaattctatttcagggagtatatcttctgtggttttgaaggaggtgagttctgtatgtgccttgcagtactgtaattcaaaaataggaatctttggctgcaaaattttaatgaaatgttaggaagtaattttcgtgctaacattaaaattataactttttgaaaggtaatagattttccagaagtaaaatctgatggttctaaatcaatcaatgtgatagttcatttttaactctttagaagaattcagaggaaattaacccagctaagtaaaaaatctgtcttgattttgttacttattcctcagaatattaaacattgatcacatatttttagagtttt

SEQ ID NO: 248880 - DNA, 370 bp, Homo Sapiens
caaacgcagagaggacaaaaccaccatgcattaagatttatttattcgtatttaaacctggtgagaggacaagtgaggtctgctcagaccttgtaggcttctatcaaaacagcaccctgcttgctcaccaggcctagagaatggctgtaggtggccgctgacaagtgcctttagttgaagcgcacatttctttcatctctcttgtctatacctgatagacacattcctctctgccaccttccttcagggaggacccgccctctgcagactgggcttagcgtgagcaggcacttcccatgtacgtgccaagggtaagctggtctgctgagcccaaggcgacagaggggcactggtttacactttgccggga

SEQ ID NO: 248881 - DNA, 1014 bp, Homo Sapiens
  misc_feature (656)..(687): n is a, c, g, or t
ttcaatttctacaccaatgtctcgcatggaggagctgttccttcctccttccttctttcttgcctactaaacttttcactccttaaaaccactccacgtgtgtctgtgtcgttttatccaaaccggcgcgaaacgaagaaccctgatgttcctccagtcattggagccgtatcagtagcacaaaaaatatgcaagaagtatacaagggaaaaatttaaaactttatgaaatgattttaacagaggcctaaagaaatataaaaatatactatgtccacgcacaggaagatttagtaacatagagattttgatctctccaagttgcatttagtgtagaaattgaacgttcaatttctacacaataatgagtgatttctgatgacatagcaggtgaaataggaacttacagaaaggaaggggaatgttttggagcgaacggatggtttatgcaagtgtagcaaaatcttggtgattactgaatctggtcattatgctagtccctctgcttgtgtacattaagtttttcctaaaaggttgagggggtgggtattttgcagaaggcactctttggtgctttacaaagatcttcagggtaggcttaggaggtttgactttcccattttactcagggaactgtatttaagaaaggagacatannnnnnnnnnnnnnnnnnnnnnnnnnnnnnnnagacaccgtgccctgccttggtagctgaatttaatgctcaaagagacggccccacttttctactccttaaactctggcattgttcactagcttctgaaatcctctgtggttcttgcaggcacttccaggttggcttaaagggttaccctacgccagcagtcagctcagtcagggtggtgaccaaagaccctgaacaaagtgtttggttcaccgggccgacatcaggactggagtccagcctccctgcagattccacaggtgcttccctcacccgtgtccacatttatccttcagcatcctgcctggaagtcctctgctgtgccaccc

SEQ ID NO: 248882 - DNA, 844 bp, Homo Sapiens
  misc_feature (112)..(166): n is a, c, g, or t
aagcccactttgtacaaaaaagttggctacagcttacctgacatcagtaaggtagcattcattacctgtttattctctgctgcatcttacagaagagtaaactggtgagagnnnnnnnnnnnnnnnnnnnnnnnnnnnnnnnnnnnnnnnnnnnnnnnnnnnnnnntgacttgttacatgaagatgttaaaatcggtttttaaaggtgatgtaaatagtgatttccttaatgaaaaatacatattttgtattgttctaatgcaacagaaaagccttttaatctctttggttcctgtatattccatgtataagtgtaaatataatcagacaggttttatagttgtgcatgtatgtatacagttgcaagtctggacaaatgtatagaataaaccttttatttaagttgtgattacctgctgcctgaaaagtgcatgggggaccctgtgcatctgtgcatttggcaaaatgtcttaacaaatcagatcagatgttcatcctaacatgacagtattccatttctggacatgacgtctgtggtttaagctttgtgaaagaatgtgctttgattcgaagggtcttaaagaatttttttaatcgtcaaccacttttaaacataaagaattcacacaactactttcatgaattttttaatcccattgcaaaacattattcccagagtatcccagtattagcaatactggaatataggcacattaccattcatagtaagaattctggtgtttacacaaccacatttgatgcgctctgctcagtaatataatttgccatttttattagaaatttaatttcttcatgtgatgtcatgaaactgtacatactgcag

SEQ ID NO: 248883 - DNA, 1077 bp, Homo Sapiens
  misc_feature (526)..(588): n is a, c, g, or t
  misc_feature (918)..(974): n is a, c, g, or t
ttggtttgttcttaattgtgaaccaggttagcaaatgacctatcaaaaattattctataatcactactagttaggatattgatttaaaattgttctacttgaagtggtttctaagatttttatattaaaaataggtgtgatttcctaatatgatctaaaaccctaaatggttatttttcctcagaatgatttgtaaatagctactggaaatattatacagtaataggagtgggtattatgcaacatcatggagaagtgaaggcataggcttattctgacataaaattccactggccagttgaatatattctattccatgtccatactatgacaatcttattgtcaacactatataaataagcttttaaacaagtcatttttcttgatcgttgtggaaggtttggagccttagaggtatgtcagaaaaaatatgttggtattctcccttgggtagggggaaatgacctttttacaagagagtgaaatttaggtcagggaaaagaccaagggccagcattgctacttnnnnnnnnnnnnnnnnnnnnnnnnnnnnnnnnnnnnnnnnnnnnnnnnnnnnnnnnnnnnnnnaacaaaggaatgagaatatgtaatacttaaataaacatgaccacgaagaatgctgttctgatttactagagaatgttcccaatttgaatttagggtgattttaaagaacagtgagaaagggcatacatccacagattcactttgtttatgcatatgtagatacaaggatgcacatatacacattttcaaggactattttagatatctagacaatttcttctaataaagtcatttgtgaaagggtactacagcttattgacatcagtaaggtagcattcattacctgtttattctctgctgcatcttacagaagagtaaactggtgagagnnnnnnnnnnnnnnnnnnnnnnnnnnnnnnnnnnnnnnnnnnnnnnnnnnnnnnnnntgacttgttacatgaagatgttaaaatcggtttttaaagtgatgtaaatagtgatttccttaatgaaaatacatattttgtattgttctaatgcaacagaaaa

SEQ ID NO: 248884 - DNA, 392 bp, Homo Sapiens
  misc_feature (163)..(176): n is a, c, g, or t
gtacaaaaaagttggcaactacctgtagatcaaagctttattttagaacgataaactgattttttccaaatgggtgaaatcttctccccatgactatgttttcttaactttgcattgaatctatttactgggttacattctatgtgtagtttgctttcttcannnnnnnnnnnnnnaaaatgctcatgtcttattccaagcaccttcctccaaagtccccataaagctgcatctccaacacattgttatgccaataaggttttatttaactttatttaaggatgattgtgtctttgaatgacaaatgtaatgctgcttcctacctgcaagaagcacaatgtatgtttcaagggtgagcaagtgctctttcttaaatttatcaaatgcctgta

SEQ ID NO: 248885 - DNA, 987 bp, Homo Sapiens
  misc_feature (431)..(451): n is a, c, g, or t
ttggcttttcatactttctaaaacaatatttagggatttttgtgttagccactctcctatctcatttctccaattgaagtaatgcataaatcttccattctcttttttctctcattcatggatagaatgaatgtctataatgaaaagagcttcttatcaatagccctctcagatttgttctgaattttgccaaatatttgtataactctgcaaaagactttctttccctgccttctcctttagagggaaaaacaaactgtaggtgtgacagcttacctcctagcattgttgtgaggtttggctggcacaagataaagtgctgtgtaattactctgaaatgtttgtaattaataaagaaatgaattgtaggcactttgtcagtagaaaccactgtgatttggaaacgcaatgtttcaataataaagactatnnnnnnnnnnnnnnnnnnnnnttaattctctccaaattataaattaaatggtatacctaatgactttccttagaacttgaaaagcttaacccaaaatttatatgaaaaggcaagagcctggaatggttaagacaacgttaaagaagaagaagaatgtgagacttacccttatagagaccgcaattaaccataaagccatagatgttctcaagcctagtatagcgcctgacacacagtagttaatgaatgtttgctcagtagactgatgggtggaacaatgagttgcttgggggtcaggattaactctggaagtggtagttgtgggaagggttgaacctgaagattatggcgactcagaactgcaaagaccagggaagttgggttctgagaaggggcaggacagagagctgactaatttgtttcatttgtctacacatacccttaagcaaattttatcttgtacagtttgagtatggggtttatgttttcttaaaattcagcaagcctttaacaggaatgtactcagatattaagctgtggtgtcagattcggctgca

SEQ ID NO: 248886 - DNA, 923 bp, Homo Sapiens
  misc_feature (682)..(682): n is a, c, g, or t
  misc_feature (717)..(717): n is a, c, g, or t
ttggcaatctttagttttcattagttttaagtagcagtaattcatgaaacagtagcccagggttttcagagtttaattaatgttttgaatatgattaatttatcacccagggaaaatgttaactacctaggaaaaatgacagaatataacttcttatgaggccctttacttaaaacctcattaagtagcaaatcagaattttgttttaaaaaattgaaatttattagaagactatgcatctctctatattgaaagtcataattgatataatcctataaaatacaaaattcctggaaaactggaatcacaaatatatatttggaaaactcgtgttaagttttatggaagcacaagtctatggcagtagttgctactttggcctttttctttcagtgaaagatgtcatgtatatctgcccatttatgggagcagtgagtggaaccctgacagtgacggactttaagctgtacttcaaaaatgtcgagagggacccgcattttatccttgatgttccccttggagtgatcagcagagtggagaagattggagcacagagccatggagacaattcctgtggtatagagatagtgtgcaaggatatgaggaacttgcggcttgcttataaacaggaagaacagagtaaactagggatatttgaaaacctcaacaaacatgcatttcnctctttctacacggacaggcactatattgcattcnagctataaagtaaaaatttccaatataatggctggaaaggtttatagatccagatatctagaatataacgagacagggcttgccaaagtgagagttggaaaatatccaaaataaacagtaattatgagttctgtgacacctaccctgccatcattgttgtgccaactagtgtaaaagatgatgacctttcaaagtggcagcttttc

SEQ ID NO: 248887 - DNA, 938 bp, Homo Sapiens
ggccttagagagaaaatatcccagaacagagagttattagttatctaccaaacacagcttgagggaaatctcccttaaaaacacttactcatttttgtcttattttggtactcaccaaacaactttctgatcagagaggtgatctcaaatagtctccatgtgcctcaaggagtgtcccaagcacatgcccaatgtccatcaccctgcagcctgacctcccatcccagaagcacttctaagtgcccacctatccttagttccagggaagattagtgttcatgtgtagttcatttgttcctttgttattgttactcctggatctttcaggtttctgtaatcatatactatggtgcatttagatgttttagtttaacttgttttgcatataataaacatttcacctatgttctacaaataaatagggctgcttccttgggctttttatggccttcctatggccacctagctttattctgcctattaattaaggatgcattttcccactactcccttatcacttacttataggaacagcttataactcaaatgcaagaaaatattagagaactgacttaaattggccccaaatctcaatcaaaaagttctctccatgatacccatgctctctgatgcctaactttgtagacaactctaagatgttccatccccacacgcacccacctgcaacccatcactagttacatgccaggaaaaaaagcctactgatcagtgtatcttagtcacaaaacctgtctataagaaggacctgcccaccccgagaaactgacaaggcccttatcagtgcattctagagatatcccagttctgccagaatcttccctcagatcaggaattaatcttcaaaagcctgaaatgttgagagtaactcacatcataacaaggggtccttccctgctgactacaaggaatgcagccaa

SEQ ID NO: 248888 - DNA, 725 bp, Homo Sapiens
  misc_feature (194)..(248): n is a, c, g, or t
  misc_feature (258)..(328): n is a, c, g, or t
  misc_feature (540)..(572): n is a, c, g, or t
ctttgtacaaaaaaagttgggttttttcttccccaacattgaattttaagaattcattgtatcttttaatattctgaatgctagttatttgtcagatacatgttttgcaaaccatttatctgtatttggtttctttttgttatcttagcagtgtatcctgaagaatagttttaaattttgatgtaatccaaaannnnnnnnnnnnnnnnnnnnnnnnnnnnnnnnnnnnnnnnnnnnnnnnnnnnnnnatagatatgnnnnnnnnnnnnnnnnnnnnnnnnnnnnnnnnnnnnnnnnnnnnnnnnnnnnnnnnnnnnnnnnnnnnnnnatccttgtctacctaattaggctttgtgtaactcagtgttgcaaagctttgacatctgtttgagttaatgtttatatatgttgttacttaagggtttcacattaaatttaaacatacttatattttataaccaaacaagtcatgttggggcatactcattaggattgagtgctttcttacaccaaaatacatgtaatacaaagatttaaaannnnnnnnnnnnnnnnnnnnnnnnnnnnnnnnngtgtaagccaccgcggccggcccattctttctattattatgtgtaatttgttaagagttttcatcatgaagggatattgaatgttaccagaggctttttctccagctatggagataacacatttttgttctcattctgttgattacatgttat

SEQ ID NO: 248889 - DNA, 846 bp, Homo Sapiens
ttggcatctgtgtgaccacttctggcaggaactctacaaactcttgggatgcattttggcggggggtgttgtacattctctgagggaatcagaagttgttccttgcaggattttagagaatgcttgttggggaattcaaggtgtttcctttgctgaaggaggtgacttggtcttctaagtgtagagacccaagaccaggaaaagactgctttgtgaacactgcaataatagccactttccactactacaatatcctttggctgttgtttccaaaatgttgctttctttatgaaggtgtcaagcaaaagagttgaactctgaaatgttcgaagagatttattctgagccaaatatgagttgaccatggcccgtgacacagccctcgggagaccctaagaatatgtgtccaaggtgggcggggagcagcttggttttacatattttagggagacatgagacatcaatcaaatacacataaggcatacattggtttggtccagaaaggcggcacttcgaggttttggatagattttctgtttctcgtcgagaactggttatcactagaaaggaatgtcttggctacagtaagaggttgtggaaaccaagagtgccctattcaaggagggagtgcattcagatggttgctgggggcctttgaattttatttttggcttacaagcgggagaaggtcaaacatggacctcagaccttaaggggctcttaagtctgtgctgtggtaaggggtatcttcaggggcaggagggctctggaaagtttgggattagatggagaccaggaggatacttggcaggcagagagtgcttacacaaagttctagaaagtgac

SEQ ID NO: 248890 - DNA, 1160 bp, Homo Sapiens
  misc_feature (180)..(196): n is a, c, g, or t
ttgggtattaatcctaaagtagataagtgtagatttggttaagtgttctttaaacatagtgaatttccattctattaaatagaacttgagaaatgtcagttatataaaaagttatgttgtaagtgaatatattctatgataaatacctaaacttgaagcaaaatctcctgtcaagggttnnnnnnnnnnnnnnnnnttaactttcttatctatagattattattttgagaaattcataggttttcacttatacattttgagcttgtggacatatggagatgtgtgttcattctctaaatgagtgcctactatgtgctgggctcgaggaatacaaaggtagacaatatagattttgtctttgccctctgtggtggttgacaatgttagcttaatctggagtattcttgaggagccttttgctcataggctttaattttgtctgtgacttttgccaggctttggggaaattgactgccttcactcttccctgaaactttgaagtccacataagggctttctcatcagatggcagaaattataatttattaacctaaacaaccttacagtgttttcgctttgaattgtatgaattcttagaactgagaagctaaacaacagtgataacaattttacattatcttttctttctccttttgtttctctaaaggtctcccaggccttcccagtcaaaattttcgttatttttagtcatgtcaccatgatgtgagatttctgagctctgttagatacatttagaaatgtccctatttatcaaatggtgttttgtaccccataagttatcccttatgccctgtgacttctgtgaaatctttgtttttaagtgccagtaacaaattttagactatctagatgagggttagagagagcttatgcattgtttttatacatcactgttgatctatacaggatttgagttatcagaagggttttgcttttattggcatatgaatctgttatgaacatgtatatgggcactgagctaagagcttcttagactgctgccttctgaaggtggcttctgtatctttctcagaggaggaggaatagacttatacgacttctttgtcctccttcaatttttgtggtaatgaaaaaggatactagggcttaggcatatgtgatttacaggtagttgttct

SEQ ID NO: 248891 - DNA, 613 bp, Homo Sapiens
  misc_feature (94)..(102): n is a, c, g, or t
  misc_feature (107)..(145): n is a, c, g, or t
accagactgtggcacacagctcaaggggtaaccttgcatccaggcccttctgtgagagtaggatgggagggagttgcacccatctcctgtccgnnnnnnnnnaaaannnnnnnnnnnnnnnnnnnnnnnnnnnnnnnnnnnnnnnacctgtacataaaattgttgccaccaaccactaaatggttacactacaccaagacactaaaatggcagggagccctgggatcctggggttggcagacacagggaatagggggtagaggcccaggctaatttctcccttcacagcaaagcagggagagaaaggaaggagattcaccccttaacctgtctcagccctgggtcagaagagaagcctcccgcctggccaggcttcacctaccttagccaaattgtagccagacagacagtgccccctgacctcaaaaaaggaggtcaagctgaaatggccctgaccctgaccgtgtgtccaaaaccccagcgtgagagccagggctgcttcttgacagctgctctcctctgccctgcgtggcactgaaccaggagtaagggcttctctgttctagcctcccagggaagggaaaaagcaggggctgtgattgtcaagacccaa

SEQ ID NO: 248892 - DNA, 1399 bp, Homo Sapiens
ttgggttctatttggacgattcagaagagaaagttcataatcgtgattcaattaaaaattttcaaaaaagttcagtggtaataaaacaaacaggcatctatgcaggaaaaaagcttttcaagtgtaatgaatgtaagaaaacttttacccagagctcatctcttactgttcatcagagaattcacactggagagaaaccttataaatgtaatgaatgtgggaaggcctttagtgacggctcatcctttgcccgacaccagagatgtcacactggcaagaagccctatgagtgcattgagtgtgggaaagctttcatacagaacacatcccttatccgtcactggagatactatcatactggggagaaaccctttgattgcatcgattgtgggaaagccttcagtgaccacatagggcttaatcaacacaggagaattcatactggagagaaaccttacaaatgtgatgtatgtcacaacatccttcagagtatggttcctacccttactgtacatcaaaggattcataccggagaaaaaccatatgaatgtgatgtttgcagaaaagccttcagccatcatgcatcactcactcaacatcaaagagtacattctggagaaaagccttttaagtgtaaagagtgcggaaaagcttttaggcagaatatacaccttgccagtcatttaaggattcatactggggagaagccttttgaatgtgcggagtgtggaaaatccttcagcatcagttctcagcttgccactcatcagagaatccatactggagagaagccctatgaatgtaaggtttgtattaaagcgttcacccagaaggctcaccttgcacagcatcagaaaacccatacaggagagaaaccatatgagtgcaaggaatgcggtaaagccttcagccagaccacacacctcattcaacatcagagagttcacactggtgagaaaccctataaatgtatggaatgtgggaaggcctttggtgataactcatcctgtactcaacatcaaagactgcacactggccaaagaccttatgaatgtattgagtgtggaaaggcattcaaagacaaaatcctcccttatttgtcctcgcagaagtcatactggaagaaaaaaccttatgaatgcagtgtgtgtgggcaaagcctttagtcatcggtcaatcccttaagtgtacatcagagaatccattctgggaaagaaaccatatgaatgtaaggaatgtaggaaaaccttcatccaaattggacaccttaatcaaataagagaagttcatactggagagagatcttataactataagaaaagcaaaaagtcttcaagcaaactgctcacttatctcatcatcagccaaatcataatgggagagtccgtcacatgcccct

SEQ ID NO: 248893 - DNA, 958 bp, Homo Sapiens
  misc_feature (422)..(682): n is a, c, g, or t
ttggtgacctttattttcaacatctgaagcattgctacttatctatattgattaacttagctgagttctcctctaccatctaattagatttggtttcttcacagtggagcacaggctatcttcagtgtgttctgtacatacaagcaactttataaccatctttgtatccatactttgttagactggtttttgtgttgtgggaatgactgattcactaagatgtccaggatgttggcaatccagttgagggacgtggtataacgggacccagcactgcattcgaatttcatccttggacaagacaagtaacttctctgaccccaaatttctaccggttgctcccctgcctgcaggctccgtgcttggtatctcagaaaaccttcccgaggaaaaagcccataagggacaagtcccggcccaannnnnnnnnnnnnnnnnnnnnnnnnnnnnnnnnnnnnnnnnnnnnnnnnnnnnnnnnnnnnnnnnnnnnnnnnnnnnnnnnnnnnnnnnnnnnnnnnnnnnnnnnnnnnnnnnnnnnnnnnnnnnnnnnnnnnnnnnnnnnnnnnnnnnnnnnnnnnnnnnnnnnnnnnnnnnnnnnnnnnnnnnnnnnnnnnnnnnnnnnnnnnnnnnnnnnnnnnnnnnnnnnnnnnnnnnnnnnnnnnnnnnnnnnnnnnnnnnnnnncttattaaaaagtagataaaagggttaataatctctctactgaacaattatcccccataatgaatcctgtttcatctgtactcctaccccaccttctcccccatattattttaaagcagcatattatttcatttataaatatttcagtagtttgtgtacttaaaaaatacataaccacattagtattatcatgcctaaaaaatttaacatgtaataaaatattcagtcagtgctcaacttttctaatcatgtttttagactgcttagcattttgtt

SEQ ID NO: 248894 - DNA, 902 bp, Homo Sapiens
tattataaaagttcaaaaataggttaaaaaaagtctatgttattagcaatcagaataataattacttgcagatagagcagatggtaatttaagggaattttattgtgaaatatgtacaatcactttgttaaaataattaactatatactatttgtgtatttcaataaaaatgtttaataaactatctcatcgttgttacttacatttattaaatagcatttaggcatgggtgaaaaggtttaacttgactggcctgaattgctcaaatactatacattccaaagaggggtccctctgcaggactagaccttagactaggagttcatctctgagcccttggagtattttgcttgataaaagtgttcttgttttcctgaagtcttgggccatactctcccagttggaccagaaaaggttatgttatcaacgtgacttatgtgaacatctgtttttactctgggtgtaggaagaaagttgtgcttaaatgtcatggagctgaggtcaatcatatgggcattacatgactatgcgactgatcccagtaaacaccttcgacaactagactccagtgagtgttcctggttggcaatgctttgtactttacatattgttgctgggataattaaacatgtccccatgcaactgctctgggaggggacacctgagagcttggacttggtttctcctggagttcacttcatttgtcttttctcttagctgacttctatctgtactgtttttactgtaatatactgtaacaatgagtactacagcttctgattcccttagagacttccaataaattaccaggtctcaagtggtcttgggaacccctggcatattactgaacttaaagttttcagaatatctgtatttggtatattccagggcaagcactccaa

SEQ ID NO: 248895 - DNA, 369 bp, Homo Sapiens
ttggatctaatagagcatcactttagatactatcttaatttaaccaaagtctctagtgaatatttcaactttgaatgtaaactaacaaataaacctgtaccaccaaggagattgtttgcccagagtttcaaagcacattgtctacaaatggaaattgaaataatttataaaatattgacgttactatgttttttaaaaagttcctaattttttcactaaatggaggaaactattagttttattgttaaatatggtagatattaatattcctcttagatgaccagtgattccaattgtcccagtttgaaataagtaccctgtgagtatgagataaattagtgacaatcagaacaagcgtcagtatagata

SEQ ID NO: 248896 - DNA, 922 bp, Homo Sapiens
  misc_feature (149)..(157): n is a, c, g, or t
  misc_feature (425)..(434): n is a, c, g, or t
  misc_feature (870)..(880): n is a, c, g, or t
ttggcttttcactgcagctgaatgagttgtggcgcccacaatgctcccatgacaaggagctgacaagttccattttccgtcgcgggcatcttggaatcatgactcccacaatgccttgggcacttggtcgacagtggggccgcctctgnnnnnnnnntgtgagaggttggtactaagaagtgcctttcctgacgtctctgctgcttggaaccgcttctagagcagtctctgcttttgccttgcttgctgccagctagactgtgacgacagcacatccaccctccacctctagcccagacacccccatttctacttataatcaagagaaaagctctaagtatctggcattgccctaggctgctttagtgttaaaagaaaagtttgctgaaaaagtaagatatcttctgccaggaaatcaaggaggnnnnnnnnnntcattttctcgattttgctctaaactgctgcatctgtctatgccaaactaatcaataccgattgcaccaccaaactccattgcaaattcagctgtgaggagattccctttcagacaactttgctgaaagcagcttggaaattcggtgtcgaagggtctgccacgttttcatgcttgcattttgggctccaaattggcactgggaaggggttactgagagcacaaggctgataccaggccctacttttaaacgttcatctacttacaatcctagtatttctctaaaaaccaaaacctctttgaattaacagtttcatgctgtgaatttctagtgggagatcttttccttgatattgacgacacaattttccatgtacttttaaagcacggagtggggaaaagtattttgaggggacattttcatcatcagttcagcnnnnnnnnnnngggttgttgctctttttggggggggttgggtttgttggtttc

SEQ ID NO: 248897 - DNA, 1394 bp, Homo Sapiens
  misc_feature (436)..(466): n is a, c, g, or t
ccctaggagggggatggttgggggatgtactgaaagagatgaagcaaacccacaccctaagatggtaactgtgtgatttagaaacctgagtttactcctcaaatcgaattatgttctttttaaatttgggaaagagtaaatagacgttacttgcagtttatgaagctgccccccacccctcagttaattgccgtctaatgtcaagaggcacttctttattaattaccaaatagtctttgtgaccaaggactaacatttttaagttactcagctctatcctcatgggcctatatatttaatacctccaaagatattttcaggataggctttgtatacttttattggttatttagaatccagtggtatgtttgtggtataggaatgtcatggtaaattgtttttcaataaatattttgaaacatgtttccatatgaannnnnnnnnnnnnnnnnnnnnnnnnnnnnnngtgcacatacagcatttcctaggataaaaataaacaaatgacttacagcctcatcctccctaactccatttgaactcaacttagctcacactcagtgataaaacaacatggtatgtagaagcctaggatcacagggtgataatgtcaattggcagccagttgtgtttttttgaaacatcattattggcagtttctccttatcaccactgctttaatgtagtttttttgtaaatccatatactttaatgcatacactctagcttaagaaaacattgccattttggttagggatatgacttaatgtgctattatttctggttctaatgaagaataataccctatgactttaagtgtaagattcatcctttaagtagggatgtttaggataagttagatgtgtgccactatgatttattgggtttcttaaaaatcttgaagaaaataataaaatttatctcacaataagttaacttgcgcaaactttttacatatggtgaggtgcgtaaggaagccctggccaacttaaagatttttctggaggttcagcaaagttatgttaaattaggggcctttggtctcatccttctctgactcttctacccagtcttttcctaaagttcggtgctactccagttgggtgcatcagggagctccgtcagcactcgcatgtgtcgctcaatggccactcatgcctgcattccatttaatagagtcaattgggatttttagagcataatctttatggatcctcgaagctgactttgccaaagggattgagacccttactaccatcaaatctctgtctctgcttggttaaaaattggctcactattgctttgtagtaacccctgcccaggtattttttcacttgtgaaaataatttgagaaagacctttgttcctagcctattgggaaaagtttataatct

SEQ ID NO: 248898 - DNA, 1130 bp, Homo Sapiens
  misc_feature (718)..(727): n is a, c, g, or t
ttggcttcagcctgcggccgggcggcgctgggcttttatctgcggacccgccgggagggagccagatcccagcgatcttccccgacggcagcgctttacccagaggctgccggcggctcgtagctgggttcagctctgcgtccacgccagcccggagcccggggggcaaggggtctgtcccgggcgcagcgagaggatggtcatccgcgtgttcatcgcctcttcctcgggcttcgtggcgataaagaagaagcagcaagatgtggttagatttctggaagccaacaagatagagtttgaggaggtggatatcacaatgtcagaagaacagaggcaatggatgtacaaaaacgtccccccggaaaagaaacccactcagggcaaccccctgccacctcagatatttaatggcgaccgatactgtggagattatgacagtttttttgaatccaaggaaagcaacacagtcttttcatttttaggcctgaaaccacggttggcatcaaaggcagaaccttagagaagaagagtggaagatgacggagatgcattttgaagcacccctggtactcagcacacacatgcttacctaatgcatcactgtgacaaaagccacacgcattatcagtaactttgcttgccacggaaaaggtgtttttgaaagatgtggctataatgagaattgcatgattgctttaaaccaaatcaggtggtggannnnnnnnnncttattctatttgcctgcagttgcctcactcacctggaaataccgtcacctgttacaggtgtactttcttaatgactgaaagataagtgggtagcaccgtcagagagaaaatgttggatctgccctaggttatagtagatgccggaattgcgtaaacccacttctctttaagctgcctggattgcacctttgaaatatgtctgccaagttgttagaatctttgaatcagaaggaaaaaaagcagcgctggttgacaaagggtgttgaagatttttgctgcagaatcagttacaaacatcacagttcccatgctttgtaataacacctggtgaaaaagttagatattctagacttgttttagtaatggaaactcttacctccacatattatcctacagatgttt

SEQ ID NO: 248899 - DNA, 898 bp, Homo Sapiens
caaagaagtgttctccccagaatcaccacgagagcccaactgctgactgcaggtctatcccccaccaaagcctctctccaggactgattcttctcatgagagttcgataaggacacagaaaagttaatgggctgagccagattatagctgtgatcaggctgagcaatcaagactggaggattctgcagagactcagtgggcggtgaggataataaacttgcataaccagaactcgcctgggactgaagggcctcctcctctcccattttgggaggattctcaaggttctcagaagcaccaatgccacctcggctctgcaccggggccgccgagcttgggttccgtgactgctgcccggacatcgcctcttctggaggctgaacaacaggtggctgaggttttgcacacacataaagcgccggggctgcaggggccagaaggacgttgcctccaaaatctggcagctcactttgcgcccacagggtcgttgctgggctctcacacttcacgggcccctgggtcctggctgaaggcctcttctcgggtgctggatacacagtatccaagggcggtgcccctgcgtgcggaagcatgtgcacagcttccgtggtggagttaagaggcaggggacagacctggggtgcacagagggtctccatgttgtctggtggctgctccaggttgccaggggaagcatcgggcagggcggcagctggtctgcactgcttctggcggacacaggtctcccttacttcaccaaccacgttggcgcgatctgcctcaaatggttttaccccaactaagtgagattttaccggttcgaaagaactatttgcacttgtctgaaatattcctgtaggtttcggggggctcggggttgagggctgggacacgccaa

SEQ ID NO: 248900 - DNA, 878 bp, Homo Sapiens
  misc_feature (473)..(497): n is a, c, g, or t
aaataaactcctccagctccagtcatcactttggtgtttatggcagtaagggggggaggaggtggcctagctgcatatgtatcttaatcaggaagtaaaagttttcccagaattcccaaggccaaagctgtgtcctgaggccactgagagttgttagttgcaacagaggctgaaaggggagcaattagcttttctgggttctttagtgaaggcaggtaagggagaagggggttgggaatggctggcaaattggagcaccaacattacctttatggataatttctttttcaaaatgggcagctgatatgtgaagaaatatctaacaacaattttaaggttgtaatttgaaactcagttctgctttcaatcatgacatttttaacagatgcatttcagctatactattttttcttgtgccccactccccaacattctagaatggaactaaaataaaattacttaatctttcaagnnnnnnnnnnnnnnnnnnnnnnnnnggccaacagtggcaagatactttcaactactcttgatgtcattgtccttctacaccatagaacatctggaaaacatccccacatcctttggtgtttaagaactgatagagctgaccaaagtccatgtggtttcccctggctccattaacactgaacactttttcttcaaaaatggaaaatttcctttgtctttccgtttcatcatttgtaccatcaaaaggaatgtcttctcgatggcgaattaaaattctcttccagtttaattttctgagtcttgaccagaattcttcacaggcactttgtgggccttccacacaaacaacaccaggttttccaggcatgctaaacccagacagggaaagctccttttggccttatcga

SEQ ID NO: 248901 - DNA, 939 bp, Homo Sapiens
ttggatcaaactgcaaatctgggatacggctgggcaagaatccttccgttctatcacccgttcctactacaggggagcagctggagcactgctggtgtacgacattacaaggcgtgaaaccttcaaccacctgacctcatggttagaggatgcccggcagcactctagttccaacatggttatcatgctcattgggaataagagtgacctagagtcccgcagggatgtgaagagagaagaaggagaggcctttgctagggagcatggacttatattcatggaaacttcagccaaaacagcctgcaatgttgaagaggccttcattaacacagccaaagaaatatataggaagatccagcagggtttatttgatgtccacaatgaggcaaatggcatcaagattgggccccaacagtcaatttcaacatcagtgggacccagtgcctcccagcggaactctcgtgacatagggtccaactctggctgctgctgaacatctggcttgaactttttttgtccttcctggaatagcttcagatcaataggcttaatgaaagaggtctttcttgctttggctgagagcagcctctttttaaagtgtgatgttttgcctttccacctaaagaccaggagagaatttgggcccttactgacctgtcctccttcagggacatgagcattccctatagattagggttcttcttatcctcccaaagtgctggattacaggtgtgagccaccgtgcctggcctaaataaataatttcgtaagcatatacaatccacttcccactaagaattagggtcaaagacattctatttgaacacttgcaattacctagatctatttggcctttggttgatagatcctctgcctcggaatttcattgagtttttttcttccttgcctttgggtgtctgcttgccacttcgtgggcag

SEQ ID NO: 248902 - DNA, 822 bp, Homo Sapiens
aaaagaaaataatctagaaagaaatagtctaattcttctgggttttatttagaacactgattaaatgtaagatttatctaatcctcacacacatctgcctagattacagaactatccagatatataaaatgttaatatcatacctgatcaaacagcaatcgtagctgtctttcagattctcctacccatttacttagacaatcagcacctttcctcatgaaaaatgctactcttttatccccttgactgcactcattggcaagtgctctggcaaccagagtctttccagttccaggtggcccataaaacaaacaacctctgtaaaacaatacattaacattttagtattacatttaaaaagcagacttttaaaacaaaaattagaaaccaatttcatgattcatttaattagaaaattaaaatgtgtaagacaactgaattatggtacagtttcgcaccacaaagcacaacttaaaacctgggagttaatactgatactgtaaaattaatattgaaactgtaaataaaactctatttgaaacattttaacaattcattcatcatgttcatcatattatcttaccttgcatatgtaatcacatatcacaatcatataattcaatttgtattgggggaaaacgtatattgtaaggaagaagaaatgtgaaagaaaattcaagatatttgtttttaatttactaaattactttaactaggcacttccaacatttcctgtaagaagtaaatgttatttaatattaataactttctgacttatttttaaagatgggggataatgtgatagccgggatatctaagcag

SEQ ID NO: 248903 - DNA, 963 bp, Homo Sapiens
ttattttaacccacttcgttgtacttacacatttttccatttctaaaccatccttaaagaaaatcatatatggggtcacaccatccctcacggtagtccaatagagcaaccatgccatctggattcatgttttcaccaataaagaacttgggaagcaaacaaaatacctagaattagactattacatacaaatacatgccattcaaaacaaactacagtacaagggaaggtttagaccaccacaaaaatcaaaacttcagtacccaaaagctctgatgctcacttatcatagacatctgttcactggattaaggcaccttaatagtgacctaaatagaaaaataacgtacagagcaatccaggaacactaggctttcaggaaacctttactctcaatcctaaatacaatcccaaaccctaaagcgtgcttatatagtcaaccacagggaacataaggctgacagtgatagaatatatcatacagtctggaagtatcttatggccaggggatgcatgaagctggaaaattagaggaaagggaaagccactgacattttccaaaagtagaattaacaagctcagatacattagaaggaggaccagtagcaatgagacacattaaaattgtaagcaaaaaactgaaagaacacttaggtggttaagcaattcacaaaaagaaaaactgagaaatgtcatctgggaagcaaattttcaatcagaagacaagatttggaaacacctgcgagctgggaaagccactttctacacctgcaatactagtatagaattgaagattaatcaacttaatttttgctcttgcagttaaaattgtacaatcctttgatccagatacttaaggtatttacctggtagtttttgaaattagcaaggatgtgcttgatttgttctgcagcccctgtcataaaaggttttactctttctggtctctgttcttcaagccaa

SEQ ID NO: 248904 - DNA, 765 bp, Homo Sapiens
ttgggttatatttaatgtgaccacagtggacctgaaaaggaaacccgcagacctgcagaacctggctcccggaacaaaccctcctttcatgacttttgatggtgaagtcaagacggatgtgaataagatcgaggagttcttagaggagaaattagctcccccgaggtatcccaagctggggacccaacatcccgaatctaattccgcaggaaatgacgtgtttgccaaattctcagcgtttataaaaaacacgaagaaggatgcaaatgagattcatgaaaagaacctgctgaaggccctgaggaagctggataattacttaaatagccctctgcctgatgaaatagatgcctacagcaccgaggatgtcactgtttctggaaggaagtttctggatggggacgagctgacgctggctgactgcaacctcttacccaagctccatattattaagattgtggccaagaagtacagagattttgaatttccttctgaaatgactggcatctggagatacttgaataatgcttatgctagagatgagttcacaaatacgtgtccagctgatcaagagattgaacacgcatattcagatgttgcaaaaagaatgaaatgaagctgggctgttttctgtcttatttctcagttgagtgagcaaggatacgaaaacagtgtgtttgaaaacaaattacgtttgggttcaattccttcaatttttaaaaaactggtctctgagagttttttaaatcattgagagcctgtttt

SEQ ID NO: 248905 - DNA, 1508 bp, Homo Sapiens
  misc_feature (57)..(122): n is a, c, g, or t
  misc_feature (1462)..(1462): n is a, c, g, or t
gaaaaacaattatgaaaattctttttaaaaactcccataaaagaattacacatctcnnnnnnnnnnnnnnnnnnnnnnnnnnnnnnnnnnnnnnnnnnnnnnnnnnnnnnnnnnnnnnnnnncccagaaaggtatatatagccaaagtcagtcacaaaaactcaaggaaaatataggcatccccactgttttaagaacagtcagaaatgtattaaggtgtcaaatgaagattgttactaacgaacaaaaaaggagagtcatttgaactgtcagtaagatggcaacgtggggaagggtgtcctaagtgcctggaaacacgcacagccatgctaaggacatgggagggtagagtgatgctgaaacacagtcaacaccaaccagaaaggacgggaatgtctgtgaggctgctgaaaagagacccccaacgctaatgtgctttatgggtccatgggcagacgctgaacgctggcaaaaccgggtggccgttcttgcactactcgggttctgactgcaggaggggcagagggtggtcgatgtcctagtccctgtgtctaaaaagtcatgaggggacagagtacaacaggcagcacgttaagtccctgggctcttttccaaagccaagaggaggctccctggagaagcgagctttgcgaatgctcaggcccggagccgcacactaacgcggcgtgcagcaggtgtggctgggtgtgcacagctggcgtccagcgacagccatgccgggcctatgcctatagcgagtgtacaccccatgcacggccatcccccaggatgctgctgcttctctggccagatgggttctggaatgaggcttctgctactgctccatattcaccttcaatctggcctggccactcccatggcatccgtattactgaagatgagacttgccaactttaagttgctagtaccaatatttcagcagggatatgaatgaaagaaataacaacttagctcatggtcataaaatatacgtatgggtaaataaagtatacacacatactagagattcatcaatggagaaattctatcatcacatgacattgtcatgaaaattatatcattccctccctggaaaactgtgactattatcctgggtagaaatgttattttgctatatggaaatactgcaatattcatgcataaaccaagttgtcatcatgaaagtcggtattctacagcataaagcaaaacctctgtgcgaatttgttaccatgaaaacgggaaaccatcaggacccatgatgcttcattctggctggcatggttaaagccacttctcttgccttgatcaatcccaagaaactaaaagttagcatttgaaatcctcttgaggattctgaaagtaaatgtatctgtgaatctacatttaacttcctaatgagaatgaaaattgcttacaaagactagagtcacttcccattattctgtgaagcaggggtggnggccctccatcccccactgtgaatatggcatcacctcctgtccgta

SEQ ID NO: 248906 - DNA, 872 bp, Homo Sapiens
  misc_feature (220)..(298): n is a, c, g, or t
caaagcttgagttccattgatgcagaggctctttttgtcctttggtggcctctgtgtaggttttgtttcctgtggagttccaggtttgatatcatacttcttaaacaagccagtgagacatttttcctggggaatggtctcactcctggaggaaaaaatttttaagactatagctcttgaatagccctgaagcagcagaaacagatctgcatttgtttcnnnnnnnnnnnnnnnnnnnnnnnnnnnnnnnnnnnnnnnnnnnnnnnnnnnnnnnnnnnnnnnnnnnnnnnnnnnnnnngtcttatttttgtaagacacaaacaatactcaaaccccaaatactcttgagcctgttcttgtctgaatgttttatagcctgtaccttagccattggtaactcttgggaagatacaatcaataaatctcatttaattctaaagctaagctgcgtgggtaacttctttttagttatataacagagtgttatatgattttttatgttcacctgctaagaacatatacgtttgaaatgtgtgatattgttaacgtttttccttgagaagatatgtggaatagatcttacgatcccattttgatctgtttcttgcagaatgcagttcttcatgttcagttcaattaaaagatgtttgaaatggtctaatctggctggcctctttggagcaatgagcgtttgttttgttgaatgagggactgaatgatgatttagttactcagctaatctagtgtcctgagaaaattgtgagttgttattgcctctgaagagtaaacggttcactactgctgttccagaatgtttggacttaagacagtttgttgatagagatagaaggtttggttaggtctacctgaca

SEQ ID NO: 248907 - DNA, 1155 bp, Homo Sapiens
  misc_feature (626)..(634): n is a, c, g, or t
ggtaaattgatgcagaaaagtgatgctgctagtgaatgaagtgtgtgcactaaaacccaaaacagtcacaattacattttgtactaacatttctacacaacagtaatatttcaaaaattagaaaacatccaggaaacctagcaacatcataaataagactgaatcctagatgagactactaactctgctttaaatcttctaaagtaactgtcacccacctttatacacatgccacaataaagctgattgtttcagacacattttaatcaaacagttacttactgtgagcctgccgtttacgaggccctgagcaaagtgctaatgttcatattacaggcatttgtcctaccctaacaattagcttaaatagtaatatttaaaaaaaagcagaagaaaataagaatagaattttcagagtttttatttaagcttgcctcacgaaattcgccttgatgaaaataaacacttaatcttatcaatgaaaatgaattaaatctttttagtaaatgtgtcaatcactgtgtgaaacagcagattttccagaaagtaatttacttggtactcatgaattgaggacagtcttagaattttacatttagaaagttttaaatttctccatataattnnnnnnnnncccaccaccctgaaatgctatactgaatcaatattttcagactcacaaaatctttaaatttgaagggaccttagaaacagtttcataccttatacagattactctttgaaagccttatccaaatgtctaggaactagaaatgtttactttgaattcatatgctttttatgccttttctgcgtgtccctattcacctaacaaatgatttaaataatctctgctaaaatactaatacaggttaattcataatatggatgagaagtccctaattggttatgaccaggcctttagaagaatgtgctgccagagagtaaatgtgcctgtcaaacaaaacaaataaaaaataagaaaacaggggacctgaattgtgcatcagccagtagaactggaaaaagcatagcacaaatacactcaggctgggacagtgaaaagtctgatcagctagctccccagatcctgccaagctccctagtaaatcttggagtgtatcgttaggtctacctgtaagtcctgaagtcacc

SEQ ID NO: 248908 - DNA, 1109 bp, Homo Sapiens
gaaaataagcttcctgcaggaaagcacaagaacataatcacacccaagtacaattgagaatgtttctgctcctgtaattagcgcacatagtgtaccagataattgcacagttaacatacctaccaagtaaggcaagatccttactagcaatgattcctttaataatagcaatattcagaagaacaatcagaagaaatgaattaaacagttagtactattaaatgttgcaacttgtttaatagaagacttacaaatctgtctgttccacagccttcctggagtggggtgtctatcaaccctgcccagagccatagaacacatgctgtggctttaacaatccaagtttggaagttaacgctaattagaaaggtcacaaacctggaaacggctaccactcactctgattctcatcactccacaactgaacaatgggggaaaagagactaatggacagtaattaatgttccagcttgaaatacaagaaccacaaacaggacacttactaagagacagaggttagatgttaccagaggccatcaatagatcccacactactctaccacttgatttatcagaataaacattaattttggatttaaaaagaagcaagctgaataaagctcgtatttgctttggatgtcacagttgatcaaaaattccatcttcaatatgggggaaagccatgtgaatctatgtattaccaattggtcacacaggtacaaaaggagcaaatcaaatgacattccctgctgaatgtcaggaatggccattttgagtgaaggcaagctctagcttgtcccacagtatagactttgtggataaaaataaaagatagaaatactgcataggaactcacttggtcatcttcctcttcaatgtcatctcgaatacccctggaaaaacaagcggagaaacaaacttccctgcaaatgttccacatacccagctccatacttacagcagattagtgttgaattccacacagcacaggaactctcaacattaataataacaaagcagcaatgagcacactataaactatccaccccatatatatatgtgtagctgcactctatactcgcagtttgcatgtctattatatggatcgt

SEQ ID NO: 248909 - DNA, 898 bp, Homo Sapiens
  misc_feature (144)..(247): n is a, c, g, or t
ttgggctaagggaaataacagtatttccacaatagggttcaaattcctgcaaaattacctaccccagttcatctctgctgaacatttggaaaccatgcactagccaacccaactgacttctgctaggtagaggcatttgtcttnnnnnnnnnnnnnnnnnnnnnnnnnnnnnnnnnnnnnnnnnnnnnnnnnnnnnnnnnnnnnnnnnnnnnnnnnnnnnnnnnnnnnnnnnnnnnnnnnnnnnnnngagatgtaatgacagagagttctggtgagatacccagagagaaaaagagagagcagggtggggtaaggaggagaaaataaaccaacaattaggtctgcattttctcaggcagtaggcattctttagtctacataggcaaagttttccatttttgtcagtctgagtcatcaaaaagagtcttaattttctaaaacaagttggctagaagaaagtaaaaagaacaacacttgttatgagggcatgtgatattttcacatcttaattaagctccttcagtttgaaggctgcacactgacataatgtagtgagtgtagactggccatgcaagtggtttgggccccattcagaactctcagactctagacacacaagtagattgatctaaggcatgctcccagcatttgtccacccacttagtccactctgagtcgattaacctgcatgcagcaacacccaagtccaccccaattaactgaagcaaataccaaagcagttgggagtacatatggtagacaatttgccttaggaagtgacttgaatgtacaaagatacttgatgcacttattttttaatgtgagacagcaagtttataaaacatccatataggattatagatacttaaaggaacacgtgggtgagcgtgtgtggggg

SEQ ID NO: 248910 - DNA, 589 bp, Homo Sapiens
cagccagttcccaggtccgttcgacagaacggatattccccctgagctgccacctgccgactttttgcgccagccccaacccccactaaatgatctgatttcgtcacctgactgcaatgaggtagatttcattgaagctctcttgaaaggctcctgtgtgagcccagatgaagactgggtgtgcaacttgaggctgatcgacgacattttggaacagcatgctgctgctcaaaatgccacagcccagaattctgggcaagtcacccaggatgctggggcactttaaatctgagcaggatgcccatagaaacccccatggtgacatcactctaggaagtggtgtcgatccatacccgcagttgtctcccgttacaatttgagtggtgttgtcagcccatgcttatccctctctctacctgtgacaaaatggaaagctggtgatttttcaagctacgtgtacatatttgaaaattttgtaaatggttttcctaaacattaatgacagaagtatttatacttcattttgtgactttgtaaattaagcgacgggcttttgtttcagtagagttgtgtttactatgcattgttt

SEQ ID NO: 248911 - DNA, 796 bp, Homo Sapiens
cttcaaacacctgggagttttttataaacacgctcagtaaatttacatttgacaatctatgctatagtaatgtatcctgtggccttttattaaagcctcaatataataattgctgataatggaaatatttcctcagtaaatactgaattctaggaccacagccaccctgtacagtactgagtgggagtctgtagagtggttaatgcatatccttaggtcaagctcaagtctcctgttctaaaggtgagcctggaacaaacagcagaaggtaagcatgctcccatgatcctgccatctctagggcaagcttgctccaatggggagtgttaagttccatagcctctggcctttaacctagccagactgtagtggtcttatataaaccagacctgcaaatcgtactgggattaaggaccaaggccactggtgatgacagggtgccagctctgctcttcttaatgtctgtgtagcataaggtatgaaatcggcatgctggttagcagtagtgttcacctggatctaaaagggtaattgaggagaggctgctattctcggtcgggggaggcaaggcaagacgcagggagactgccatttgcattttatactctgaacagtgtggtgcctctactgggtttgttgggagactgtccttgtctccaaacatgggtgaagccaactgggacacataattcaaacttgtttctccagctgggatttctcccagggagttcatgtagtttttttctagtgcctttagtacattttcaggtgaggtcattagtcccagcatacccaa

SEQ ID NO: 248912 - DNA, 724 bp, Homo Sapiens
  misc_feature (569)..(601): n is a, c, g, or t
gatttgatggactcaaataacacgggccttgcagccctggacacaggacaggagaagccagccctgacacagatgagctggcagtggattcgaacagtgtgctcagtctcgtctgggcttttgtgctttctatgttgaagacccaaatactttttctttgagaatgaaactaggctccttatctagactgtgaaggggcccgtgaggacacagagtgtgactggaaaggaaggtcccaactggccctcaatgtggccccagtggctgtttccctgcaagaagctccttcctccagctcaggcaccaacacacggatcacaccggcccagaaacaaagagcaaaacatgcttttcatcccacgtggaatacagtatgagcaaattactctcctttttctattagtgtgggtgaaggaaaaagactgttttcaaatgaagcttttctttttcccaatgattaatacagagtagattaacttaatttgtgctagactccaatttaattccagcaacagttcacaggccatattcacagaaaagttaatctgggcttcatgataagtagccannnnnnnnnnnnnnnnnnnnnnnnnnnnnnnnnggcaaaaagagggtctctcatttgtgtggctcaggcgggaagtgtacgggccagtttcttagctcaatgcagccttaaattccggggcctcagaaatcctccaacttatacctcctaattagc

SEQ ID NO: 248913 - DNA, 1278 bp, Homo Sapiens
  misc_feature (457)..(469): n is a, c, g, or t
  misc_feature (518)..(536): n is a, c, g, or t
  misc_feature (912)..(920): n is a, c, g, or t
  misc_feature (1192)..(1200): n is a, c, g, or t
ttggccagcctgtgtacgtgtagatgggggccaggcacccccaccactcgctgcctcccaggtcagggtcccggagccggtgccctcacaggccaatagggaagccgagggctgttttgttttaaattagtccgtcgattacttcacttgaaattctgctcttcaccaagaaaacccaaacaggacacttttgaaaacaggactcagcatcgctttcaataggcttttcaggaccttcactgcattaaaacaatatttttgaaaatttagtacagtttagaaagagcacttattttgtttatatccattttttcttactaaattatagggattaactttgacaaatcatgctgctgttattttctacatttgtattttatccatagcacttattcacatttaggaaaagacataaaaactgaagaacattgatgagaaatctctgtgcaataatgtnnnnnnnnnnnnngataacactctgctcaatgtcacggagaccattttatccacacaatggnnnnnnnnnnnnnnnnnnncccatgtttcaaaattgtgatataatgatataatgttaaaagctgctttttttggctttttgcatatctagtataataggaagtgtgagcaaggtgatgatgtggctgtgatttccgacgtctggtgtgtggagagtactgcatgagcagagttcttctattataaaattaccatatcttgccattcacagcaggtcctgtgaatacgtttttactgagtgtctttaaatgaggtgttctagacagtgtgctgataatgtattgtgcgggtgacctcttcgctatgattgtatctcttactgttttgttaaagaaatgcagatgtgtaactgagaagtgatttgtgtgtgtgtcttggttgtgattggattctttnnnnnnnnnaactgaaacatttgtcatatactgaacttatatacatcaaaagggattaatacagcgatgccaaaaagtttaatcacggacacacgtccgtttctgtagtccgtatgctctttcattcttggtagagctggtatgtggaatgccatacctctgaccctactacttacctttttactgacagactgcccacactgaaagcttcagtgaatgttcttagtcctgttttcttctgttactgtcacgaaactgagtgatctaatggttctctcacnnnnnnnnngttcttttagtgtactttgaagtatcaatcttaacttggtttaaacaatacatattcctaacctttgtaaaaagcaaa

SEQ ID NO: 248914 - DNA, 993 bp, Homo Sapiens
  misc_feature (511)..(525): n is a, c, g, or t
ccatctttagtttcagtacatttcaatcgaacaatagatttgcaaagaaaatgtgtaatacagacgtaaaaatattcaccataggagcttcacaatcggttgtacaattgacaaacaggcctcttttcccaaactttccagttaagcaaatttataaaatgtaatcaatgcaacaagaaaaacatttctctttcacttccagggaaaagaatatgcaataaacagtataaatgcagacagcagttgctgcaagctaaccacgatactcccaagtggctgtacagtggatatgtgcagtacaaataaaagccacatgtgttgtatcacaactacagtataattgtttgcccagctaagagaatgcatgcacttccatgccttgggttataaagtgaggcctaattctcgacaggttgatggaatatgtgcaaatgaccttggcttttggcagtactaagtgcagccagtgtctgtgttccactggtttgggaatattttaaaaattttattnnnnnnnnnnnnnnnctgccaattttagactagaagggaataactgctcttggagtaaaaataagactccactcaaatgtggggtgttttgatctgtggtcttgacgccttgtattcccttgccagcaaagggatacaaggaagacgctagtataaagacattactagcaaacttcttcaatttatccagaaaatgggatactccttgagcatgttcttttgtgttctgcttgcagaaggggtccttatgtagaaggagttacagtaagtgatcccatcaagcctcttcattcactaaaacaaaagaaaagttcttccaggaaaccaatgcatagttgcaatgcaacttttccctttaatgcttagttatcaatactggtgacagtctgctccaaaaatgactcaaagaagatagggaagaaatactcagattacaaaggtgaaatcacatgctgaatctgatggtaatacattcactctgta

SEQ ID NO: 248915 - DNA, 895 bp, Homo Sapiens
  misc_feature (810)..(827): n is a, c, g, or t
caatgcatgtcagggattatcacaggtatgagcatggtaaagtaaaacaactgagaaattcttttccccttaattcttgttgacaatctatatattagactgtcttcaattaggccctaacatagatgcttcagaaattacatttcagtcatcagttttgccatatagggccaaagtaggacatgcttctgaacacatactgatgctctgatataacagtgtttgaaaatcattttatgacaaatccatcagttgtaaatcaagaaggtaaggaaactgctttctgcaaaataatcaactgccccaaaatgaccacacaggaccttgtcattgcacttatactctcagactcctttagaagcatttgagttttatattctttacaatgtctgtcttgaggagggttttaaaaacaagtactatttcctttgggtcatcacagaaaacatttagacatttagacaaaacaggcctgtctgccagctgtacccccaccccattttcatactaagatcctggtattatataaaactgaaggattaaaaactgtatagctcatacctcatttcttggtgaacttcaataaaattctaagcatttaataaaattagacttctcgttttgacgtgttctccatgttgattctttgttttagtttatccttatgtgggccgatggcagcttatgtgaatcctcatggatatgtgcatgagacacttactgtgtataaggcttgcaacttgaatctgataggccggccttctacagaacacagctggtttcctgggtaatattatggtggtggttgcnnnnnnnnnnnnnnnnnnaccttaattgggcagaaaaatccagagtcctaagcagagttgccacaatcttgataataaaaagccaa

SEQ ID NO: 248916 - DNA, 925 bp, Homo Sapiens
ttggggcaatgcagcgcgtctatggagcccagaatgagatgtgcctggccacacaacagctttctaagcaactgctggcatatgaaaaacagaactttgctcttggcaaaggtgatgaagaagtaatttcaacactccactatttttccaaagtggtggatgagcttaatcttctccatacagagctggctaaacagttggcagacacaatggttctacctatcatacaattccgagaaaaggatctcacagtaagcactttaaaggatctatttggactcgctagcaatgagcatgacctctcaatggcaaaatacagcaggctgcctaagaaaaaggagaatgagaaggtgaagaccgaagtcggaaaagaggtggccgcggcccggcggaagcagcacctctcctcccttcagtactactgtgccctcaacgcgctgcagtacagaaagcaaatggccatgatggagcccatgataggctttgcccatggacagattaacttttttaagaagggagcagagatgttttccaaacgtatggacagctttttatcctccgttgcagacatggttcaaagcattcaggtagaactggaagccgaggcggaaaagatgcgggtgtcccagcaagaattactttctgttgatgaatctgtttacacttcagactctgatgtggccgcaccacagatcaacaggaacctcatccagaaggctggttaccttaatcttagaaacaaaacagggctggtcaccaccacctgggagaggctttatttcttcacccaaggcgggaatctcatgtgtcagcccaggggagccgtggctggaggtttgatccaggacctggacaactgctcagtgatggccgtggattgcgaagaccggcgctactgctttcagatcaccacgccatcactggg

SEQ ID NO: 248917 - DNA, 1024 bp, Homo Sapiens
  misc_feature (366)..(397): n is a, c, g, or t
  misc_feature (551)..(592): n is a, c, g, or t
gtctacatagtgttgtgcggtgactcttttctgtgactcttaagtgtgttgcaggcctgactgtgtgtccctgactgtagcggtgtgggggcttgtgtgggactgtgatgtgtgtagggtctcctgacatgtctctctctgtttggcctggggtgggggtggggacttgtttgatctgtttggtgtctctgacaggctatgagcccactgtgtgtgagtatgcagtgacatgtgttgtgtgtgttggacacctgtctgaacaagggggcccctcttgtttactgcaaagtggcgcccagcacagcgcctggaagtcggcaggtgctcggtcttcactgtgggatgggtgaacgctatgccatggtnnnnnnnnnnnnnnnnnnnnnnnnnnnnnnnngtgccaggatggaggctgcggctgggttgtgcttcctaagggtgacagcatgggtgactctgggtatctaggacctctggcaaccatcaccccatatcacactgcagagtgagtgtcgtggttggggtgctggacccagagtgcctaccctcgnnnnnnnnnnnnnnnnnnnnnnnnnnnnnnnnnnnnnnnnnnccatccctgccctgctggctgccaggagcggctgtgagtcttcaggcgtggatgcagcctgggggaagccatagggcgctttcacaggcctggccttcaccatggcgggagggagaccgcatctgaagaggagtttctccatcatcccctgctttgtcttcgtggagtcggtgctgctgggcattgtgatcctgcttgcttaccgcctggagttcacggacaccttccctgtgcacacccagggattcttctgctatgacagtacctacgccaagccctacccagggcctgaggctgccagccgagtgcctcctgctcttgtctacgcagtggtcactgccggggcccactctcacgatcctgctggggagagctggcgcgtgcctttttccctgcaccaccttcagccgtcccagtcatcggggagagcac

SEQ ID NO: 248918 - DNA, 897 bp, Homo Sapiens
  misc_feature (67)..(128): n is a, c, g, or t
  misc_feature (760)..(801): n is a, c, g, or t
ttggccttttttctttgcagctccaaaataaggaggttttcagagagagagagaaagaaagatctannnnnnnnnnnnnnnnnnnnnnnnnnnnnnnnnnnnnnnnnnnnnnnnnnnnnnnnnnnnnngatagacatgctaggtactgctctgtagtggttagcatagttgctgccccctttctgccatagtctagtgtgatatttcgttgggtaatgatgaatacctggtgccatggaagagaaaagtgggacatatactccagactttggaaatccaggtagcattgctgtcagctaaattaacacctgaagtttaaatagaaatgagccagatgagggcaagagtggaagagatggggataaagcaagggtggtccaagaggaagaagtaacccacacacaggcttgaaggcaaaaggtaacataaccttctcaagacagtaagtatagagtgatggtgcacactggaagagatggtagaattaggcaggatattgtaagccttgaaaaagaattaggcaggatatcggaagccctgattagattctatcctaagagcaacagaagatcactgacagtgttttaaatagatagactagtttattagatttgcagtttagaagttccctttttttgtaattattggacagtgtagagaccggatggtgagagatgagttaggaagttgtgacagctctctatacctaccgctaatgtagaggattatttattttcatttcattaccattcgtgtaagnnnnnnnnnnnnnnnnnnnnnnnnnnnnnnnnnnnnnnnnnnatagctagtctctctatagaaattatatgggaagagtaagaacgcttcactttaaaatttcatgtttttagatgagagtattttctgaatatgaga

SEQ ID NO: 248919 - DNA, 859 bp, Homo Sapiens
  misc_feature (101)..(171): n is a, c, g, or t
  misc_feature (185)..(200): n is a, c, g, or t
  misc_feature (307)..(365): n is a, c, g, or t
actctgcccaaaaataacaaaaagtttgcccgggggttagtggcaaaagcctgtaatacccagctaacccggggagggctgaggcacggagaaattgcttnnnnnnnnnnnnnnnnnnnnnnnnnnnnnnnnnnnnnnnnnnnnnnnnnnnnnnnnnnnnnnnnnnnnnnnagaatccatttcgnnnnnnnnnnnnnnnnttccccacccctaccaattgttttacttcctcttcctgctcagggagcagatgggcctcactggttgagatggaatagaataactgggctatgagtcaccagcccannnnnnnnnnnnnnnnnnnnnnnnnnnnnnnnnnnnnnnnnnnnnnnnnnnnnnnnnnnaccagagttgcttagatgatctcctagatcctttccagttctcttgatttcgtaaagccaatggcttctccctctttaaggtgctatgccaaccagccctggaggctgggatctgccgctccttccatccaccagggggcaggagtgcactacctgctgtcagtcaccagagtggccgctcagtgcccagcccgccagcctcgctcttggaggctgctctttatcctgcctgtggttttcagctcagagctggacttctatttataagttacctgtatttatatttatatgcccgctctcatggtgaaggctggacaaggtgctcctctggcccctccttcttacctcagatgcctgaacagaacaaggcaaacccgtagcagcctctcaggagctgacaggtccttctttcggggctcaggagggtgggcacacacccagcggcctgcagagtaagcttattacccacaactgtgcccgctttgtgcttctaa

SEQ ID NO: 248920 - DNA, 880 bp, Homo Sapiens
ggagataatgtttactgtttaagactttaaatttggagtaatttgctattcagccatagaaagtgacactcatttcttcgtgcccgacactgctgtctctgtggtttcacatccctgtggttaaagctctccaagggctcatcactaatttcaggataaaatctaaatcccttaacatagcataggttttttacaaactgcctcctgtgtgcctctcagccccatccggcccactctgcctttcctccctgcatcactccagctactctgaaacatactgcaccttcctaaatgcggacagataaaattgacagacttttcataggatgcccagtgaaatttgaatttcagataaacaatgaataatgtgtgtggttatacaatatttgggacatacttatactaaaaatattgcatgacacatattcttcaaagttattattttatctgaaattcacatttaatagggcatcttgtactttccgttgctaaatctggcaaccctacagatgtgagctgttcactttcagctcctgctcagccccagctggatcactacagctccccttgactaattccctgccctacaagactcggcccagacatcagtgcccctagaaagcctaggtctaacttttctgcacaacacacacctaggatgggtcagatgtgcctgctgcaggctcccgcccacctgtcacacctctctcacaccacacactttgcaagtatttgttcacctgtctccagtactagactctgagcttcttgaggtcaggcactgtcttaccacgacgtggcttcagtgccaaaaacatagtatattcacagtttacaattactgaagatttactctaagctagttgctgttctaagccaa

SEQ ID NO: 248921 - DNA, 916 bp, Homo Sapiens
  misc_feature (98)..(126): n is a, c, g, or t
  misc_feature (185)..(193): n is a, c, g, or t
  misc_feature (818)..(849): n is a, c, g, or t
ttggctagctatcacctacctgaaaggtgcttagaggtgaaggtactgtttctaaaaacacatcactgtgatacctttctatcctcacattttcaagnnnnnnnnnnnnnnnnnnnnnnnnnnnnngtgtgagccgcagcatccagccagttctgtactttgaatatggagtagtttacagctannnnnnnnncttactggtaatcttaactaatatgattcccttgttagagagcctctcactcccccacccccaaaaatgtctactattcatgacagtaaccaattattctggacaaattgcttctttttaatttgagctatctgccatggactttctaaaatggaaacacagcctgagtgtatcttagggagagtttgattgaaaaaatccaaatcactatccatatagatcatggatataaagagatacctgatttttattaaaaagatactttttcaaatttaagagttaatcttggaaatttggaacaagtaaaggggcaagtaaaccttttgatgaaatataaaaggaactcattgcatgaagttgactatcaaattctgtgatgtgtggcttcttaaaaatattctcagtgtcttttgtgtgcgtgcagcatgtacatttgatgttatgtgaatgttgagttttttcttctaattttcacttcagcagtgtttagggctttcagatgccttattccagtgtgaacagaaaaagttcatattttatgtggttaatgctttgatgtgtcacataaagagtagtttgtagaaaatgttggcacaattttaacttcttagtggcttgtgacatnnnnnnnnnnnnnnnnnnnnnnnnnnnnnnnnctttataacattcctgtgtttagtagtgtaaatgttctgggcaagttttaatattttgaatgccttt

SEQ ID NO: 248922 - DNA, 952 bp, Homo Sapiens
  misc_feature (588)..(637): n is a, c, g, or t
ttgggtttgttcttgctatttattaagaacagaatatcaaaagattatgaatagcctcagctctagaatgcttaccactgttaaaacaacaaaaagactaaacctctaatttcatgcaaatctttgttagcttattctaagaaatttattaagtaaaacaaagaaaaaacagaagtgggagatagttattttgtgcgtaattttctttaaatcattttgaatgatgtgaaggcattcagtttgctgtatttttttaatcacttcatacaaggaaaacttcgacatttacatttctagatgtagtaacagtctactttgatatatgagtatttaaactaaggcattaagagatattagatatttcttaatgttttcatagtgctcaataggtgtagtagcaatgatattacctctgaaaccaaatactcttttatccttgattccactatgggaccttataactagtccatgaaaccaagctcagaaaagctttaactcttatatttgtgtatatgtatgctgcttctgaaaatataatttttctaagttgttgtaatgactttaatttgtaatcagctaaggcttaannnnnnnnnnnnnnnnnnnnnnnnnnnnnnnnnnnnnnnnnnnnnnnnnnatatttagttcagacctagagccagtagaagctctcacagtgagttcaatttgttagtgaaacattgtactgcatcaccagtttttcttaccttctgttgacagctgaatatttctgttactcagtacttgcaaaaacagtaactaaaatgcactatgctgagtggaaagcaccgtcataacaattgattgccatagcaagttccaaagtgaatttcagccttgcttcacatttgtatcaataaatatgcacatttttttaaactttctaacaatatagtctttgggatttgtttttagttgtgagcagcgttgg

SEQ ID NO: 248923 - DNA, 718 bp, Homo Sapiens
aaatttcaaatatattttattcaaaattctccatttaggagaaaagatatataacaatgtttacacatgctttaatcacttatttcactgtacaacttacattctgtataacagatacaataaaccagccaaagaaaataaccagttagcacttaaataagaatctaccatgtaaaaaacacagtatgggacactacaaggtagtatttatatattttttaaatgactgagctacagtacaacagtcatctagttcagtggttgtctaaaacatcaagctgtccacatctttctgattcatgatgggaaagctattatgacctttcacattcgaacatgtcattttgttgtgtaaatttggtgggtggggggcagaagggctctattacctttatccctttcttataaatatattttcccttttatattacttccagaattttaaataaaatatttatttgtgtttgtgtaactacaatgtcaacattgtgttagaattatattaatcagttattttatagccagcaaaatggtccaaacgcattaagaaaacaaaagataacttagctctgccaaagtagcacctaggaaaacagcacttcagtaaaatttctcctgctattccttatagcctattgcaggcaaacagcaacaacttcaaaaacataggcagaaatgcaagaaggaagtactcaaggaactattttctgtttcccaa

SEQ ID NO: 248924 - DNA, 827 bp, Homo Sapiens
  misc_feature (407)..(415): n is a, c, g, or t
  misc_feature (519)..(533): n is a, c, g, or t
ttggcgttcttccgaaatgttgattgggatatgatggagcaaaaacaggtggtacctccctttaaaccaaatatttctggggaatttggtttggacaactttgattctcagtttactaatgaacctgtccagctcactccagatgacgatgacattgtgaggaagattgatcagtctgaatttgaaggttttgagtatatcaatcctcttttgatgtctgcagaagaatgtgtctgatcctcatttttcaaccatgtattctactcatgttgccatttaatgcatggataaacttgctgcaagcctggatacaattaaccatgtttatatttgccagctacaaaaaaacacccaatatcttctcttgtagactatatgaatcaattattacatctgttttactatgnnnnnnnnnttaatactactagcttccagacaatcatgtcaaaatttagttgaactggtttttcagtttttaaaaggcctacagatgagtaatgaagttatcttttttgtttnnnnnnnnnnnnnnncactgcattaaaaaagtatctgttgcattaaggcacatagtgggattacatcataaacctcccataatttttgtcattctgtgttaaatcatttcagggtttaattttgaaataaaagattaatataaaatgcaacaactttttatattacctattagttttggagttctttatgtttaaaaattcacgtgtaaattttattgccttggataattaaattattgatcttttttaaggcagcagttattaaattggtaatagaagatgctgcttgcttagaattgggaaattcgg

SEQ ID NO: 248925 - DNA, 1115 bp, Homo Sapiens
  misc_feature (480)..(488): n is a, c, g, or t
  misc_feature (980)..(1004): n is a, c, g, or t
tcccagatgaatcatcttattatttttaaagtttattgctaattgtaggaaggtgagttgcaggtatctttgactatggtcatctggggaaggaaaattttacattttactattaatgctccttaagtgtctatggaggttaaagaataaaatggtaaatgtttctgtgcctggtttgatggtaactggttaatagttactcaccattttatgcagagtcacattagttcacaccctttctgagagccttttgggagaagcagttttattctctgagtggaacagagttctttttgttgataatttctagtttgctcccttcgttattgccaactttactggcattttatttaatgatagcagattgggaaaatggcaaatttaggttacggaggtaaatgagtatatgaaagcaattacctctaaagccagttaacaattattttgtaggtggggtacactcagcttaaagtaatgcannnnnnnnncccgtaaaggcagaatccatcttgttgcagatagctatctaaataatctcatatcctcttttgcaaagactacagagaataggctatgacaatcttgttcaagcctttccatttttttccctgataactaagtaatttctttgaacataccaagaagtatgtaaaaagtccatggccttattcatccacaaagtggcatcctaggcccagccttatccctagcagttgtcccagtgctgctaggttgcttatcttgtttatctggaatcactgtggagtgaaattttccacatcatccagaattgccttatttaagaagtaaaacgttttaatttttagcctttttttggtggagttatttaatatgtatatcagaggatatactagatggtaacatttctttctgtgcttggctatctttgtggacttcaggggcttctaaaacagacaggactgtgttgcctttactaaatggtctgagacagctatggnnnnnnnnnnnnnnnnnnnnnnnnnaacccacttcccctcctggtctcttccctctctgataattaccattcatatgtgagtgttagtgtgcctccttttagcattttcttcttctctttctgattcttcatttct

SEQ ID NO: 248926 - DNA, 841 bp, Homo Sapiens
  misc_feature (190)..(202): n is a, c, g, or t
cagctgcaccaaaaccagggtgttgagattttccatcctcctgtgaccacccagtgctattcctgtctcatttggatctgtaaaactagaaaactagttatctgctcccaaacaaaaggttgggaaagacctaggataatagttatatgtatatgcattgtttcaaaaggggaggaaatggaaggggggnnnnnnnnnnnnntggaaccaccaatcccaagaaaatctgaaatctagtttggcaaatgccactgggagtcaagacatgggaatatcacatggttcaggactctgcccactggactctcctctgctctgagtcatccttcctttctcatgaaaggtagcaagggcttgcacctgtttccgcagccagtcccatgtatagaatattacaacctttaactatcacacttgtacatgcctacaccctttagacttcatagctttcaaggtccctcttagacccaaggtgagcatttccactggtataagaattttcaagaattttgtgagtctcctgtacatcactgaaattcacaacattagaaaagaggtttatgctgattattcctcctagggaatcccctatctatatgtggggctttagctgagatgagtgatagtttacacttcttataagttgtgagtatcgaggggatctacaagtcacatttaatctcttcaaagagcttaccgtgtgacagtgtcctgatgtatgtattgatcccggtatcagcaaacgtcctgggctatctctctaaaacatctctctctctgaaacatctatctttcctaacaatgaatctcttaatttcaatggtaagttcgggaatcccag

SEQ ID NO: 248927 - DNA, 939 bp, Homo Sapiens
  misc_feature (476)..(516): n is a, c, g, or t
ttggattttgaattttgtatagtactaggttagaacattgcttaatccttttaaaaaaaatgcatttacgtaaaccctgaatactgaaattgttggattttttaactatatctgacataattttattcatcaattacattacacattcatttagcccagatttcaaatagtgggggaagaaagaaactgtatttcagagtaaaatctcctaaaggaaataaaaacacagagttgtaaatacacatgcttgcaaaaacattagtcgtgaaatccctagcaacaagtcactggatttttctctgtcagcacgcgtgtcagctgccaaagaatagacttaatgaagaagtgcccacatgctggcaggggccggcccactctggccagccagatactgctagattgtaatatttaaggtcgaatttcgacctgtggtacacagctgtgctgtggctcagtcagcaacctcagaactctgnnnnnnnnnnnnnnnnnnnnnnnnnnnnnnnnnnnnnnnnncatgcacctgtttcactgtgaatagtgaatgtaaaggaaagaaaggaaaaactgaaagcttgttctatcacaggtatgagctgctatgatacatgaagaacattccatgaagtatgttttaaaaccttgttatatctgagaggctttaaaagcctattaactgtttcagggcaaccgcggtacagacgtggtctctgtgagacttccacctgaccccagttttaagtggtacgaatgttgtgcatttaatgttaaaggacagtctgcaataataaagtaagtagccaacctgggtgcccagcagtgctgagacctgggctgctctattgtaagctttgggaacaccattttatggcaacagatgttccagatatgatttctatttatgggagaaaagtttatatgtgttttacaaatggtttt

SEQ ID NO: 248928 - DNA, 971 bp, Homo Sapiens
  misc_feature (43)..(90): n is a, c, g, or t
  misc_feature (173)..(207): n is a, c, g, or t
  misc_feature (534)..(534): n is a, c, g, or t
  misc_feature (553)..(574): n is a, c, g, or t
ttgggataaaattgctttactgaaccttccatatctgcaaggnnnnnnnnnnnnnnnnnnnnnnnnnnnnnnnnnnnnnnnnnnnnnnnntaagtttcaatcggtatgattataaaaaattaaaaatacaattatttcattgcacatgtcctattttgggcgttcagtacgtnnnnnnnnnnnnnnnnnnnnnnnnnnnnnnnnnnntacaaaacatttgcatcatcactggcagttttattgaacattattcgtctaaagattgacagtagttagcggtaacaaagcattttaaaaattgaatatgaagagttttcaaaatgcaaacgtttagccttttcagaggcagatcactggcttcctgttgccaaatagaaacagaaataattacccaagaatctaaaagagcttcctatacttaggatttattttccttttaagatgggtaaaagaagtatttaaaatgtgaagagtagctgtaggtatctagaatttacagtttgttaaattttttttaactctaagcatacacangatagatgtacataattannnnnnnnnnnnnnnnnnnnnnattataaaagtaatgcaatgtagttatggggggggaaattgtactaaattctataaagtaaaaagtcaaagtcttttactgttcttcatcccacatcccattttccagagtgagctataattgggtgaatttttccaaactttataaatacacttgcaaacatttatacacagcaacctagataataatgttacaggcattgccttttcagttaatgtgtcattggccctttttctagactatgagtgcatagtcttctagtactaccaatatcagcatttatcaagcatttactatatgccactaattctaacacatctgtgagaacacttcatgaagaacttgaggttccaggtaatcctgtaatttggccaagagcaccataatgtatgggaac

SEQ ID NO: 248929 - DNA, 909 bp, Homo Sapiens
aaacagcttttgttctgagggagtggtaatttacaaaggatgtgaagtttccaggaaatagggggaagggaattacattatcttcttgttctctgtctgccttattagttctgtttcatgcttgctttgcatgagaaggttggcaaaccttattttaactgctgagacttaagcatcactaaatctgaataccacattcttcagcagcacacttggtatccatatcactctccctgctaccaaatgaccagatgtgaccacctggatggggcttctctttctttccatgcagggaaaatcacagtgaaattgaacggcggcgacggaacaagatgacagcctacatcacagaactgtcagatatggtacccacctgtagtgccctggctcgaaaaccagacaagctaaccatcttacgcatggcagtttctcacatgaagtccttgcggggaactggcaacacatccactgatggctcctataagccgtctttcctcactgatcaggaactgaaacatttgatcttggaggcagcagatggctttttgtttattgtttcatgtgagacaggcagggtggtgtatgtgtctgactccgtgactcctgttttgaaccagccacagtctgaatggttgggcagcacactctatgatcaggtgcacccagatgatgtggataaacttcgtgagcagctttccacttcagaaaatgccctgacagggcgtatcctggatctaaagactggaacagtgaaaaaggaaggtcagcagtcttccatgagaatgtgtatgggctcaaggagatcgtttatttgccgaatgaggtgtggcagtagctctgtggacccagtttctgtgactaggctgagctttgtgaggaccagatgcaggactggacttggctctgtag

SEQ ID NO: 248930 - DNA, 1036 bp, Homo Sapiens
ttgggaatgagaggtgataatgcttgcaagggtgggtctaaattcaaaatgacttcaataaacagaaagagtgaagtttaggtagcatagtacagtatacatacttagatgtggaatacagacattgattatgtgtgaatgtgtctgaaaaagactcatcagggaaagtcaaaggaatcatttgtgtctttttagtttaaaaaacaatgtggttgtgaggctgtatgaaataggattgtggactttaggactaatgtggtaattgccaaattttgtacttttaagatgtttaatagaggaattatagatcctaacactggatacagtgaagaacatggtaaacatgaaaacaatttgaagtggggctaaaaatggatttaagtggacctttgagaaggattcagagaactgattcattttttcacagaattactaaaacggaggcttagtggaagtgttttcacataactagaaggtgatagacagtatgacagtggaatacctcttgttctcatttaggacagtgtctgaattgtagtgtgagagacttaagttagataatttagtgcatttcctagtagtgagagttgttaattgttaacacttggaaggaattggtatcataaggaattgacatcataagttttggaaatctttttctgctaggatgctttatagcctatctgaatttgaaagtgtagtgtagattaactgttttttagccatattattctgtggtattccatttaggtattgtgaattattcagaatgcagaccccacgatatagaggtaccaattatattccttcccaacttatacaccaactatattatgtgcttttctttgtaaaacagtttgttagggttgtgctatttgaacatattttctggtggatattctcagctttgaacactgtacatttactggtaggattttatttataattacaccttttaaggaaatttctatacttctaagactcgaaatattttttgaaagaggtaattgctatatatctgctttccttctgaatg

SEQ ID NO: 248931 - DNA, 1097 bp, Homo Sapiens
  misc_feature (618)..(651): n is a, c, g, or t
  misc_feature (673)..(923): n is a, c, g, or t
acgataaacttgtcacacttgtcaagaatgagacaagccaaattagaaaatcctatgtcctagtttccttaccaaggataattaaatatatcactaagagctttatatattgattatatattgttgacaactggtttaagcatcatagcctgtgatgataaacactgcctatatatgtaaatagcttttcatcaattcttaaatttcttaacctaggcttcagggagcatatgaaaccagaattatatggaacattttctgtgtgtacatgtacatgcatttttctagggagagagtccgtaggtttatcagaatatcaaggaaaactgtgacccaaagaagtttaagaatcacatacagtgctgctggctttttgtgcttggcaaatgagtgacaatagaagaaataatttttcttacacattttaaaacgttttctcttccttgtgattgaagatgaaaggagtaagaaattaaggcatttgtttaatttatactggtaacttatttaggggggaggggacatgaaggtaggtaactaggtaggcctctaattgaaccacctctctaagttatgtacgtatatataagctgaaattgtgtttgacattctgagggnnnnnnnnnnnnnnnnnnnnnnnnnnnnnnnnnnggtggggggctgggggtcagannnnnnnnnnnnnnnnnnnnnnnnnnnnnnnnnnnnnnnnnnnnnnnnnnnnnnnnnnnnnnnnnnnnnnnnnnnnnnnnnnnnnnnnnnnnnnnnnnnnnnnnnnnnnnnnnnnnnnnnnnnnnnnnnnnnnnnnnnnnnnnnnnnnnnnnnnnnnnnnnnnnnnnnnnnnnnnnnnnnnnnnnnnnnnnnnnnnnnnnnnnnnnnnnnnnnnnnnnnnnnnnnnnnnnnnnnnnnnnnnnnnnnnnnnngtgtgagccaccgtgcccggcccattctaagggttttctttgaagacaggtcaaatgctgttagtaagtttcacgagattgttaattcctcagttataccagattttataaaatatttgagaatagatggctaacagagttagaaatacttttccttaattttaatccacagta

SEQ ID NO: 248932 - DNA, 927 bp, Homo Sapiens
ttggctggagtgtacgggcccgcgggccacggccatgcagcccctggaggtaggtctggttcccgctccagctggggagccgagactgacccgctggctgcggagaggcagtgggatcttggcgcacctggtagctttgggcttcaccatctttctgacagcgctgtcccggccaggaaccagtcttttctcctggcaccctgtattcatggccttggcgttctgcctctgcatggctgaagccatcctactcttctcacctgaacactccctgttcttcttctgctcccgaaaagcacggatccggctccactgggcagggcagaccctagccatcctctgtgcagctctgggcctgggcttcatcatctccagcaggacccgcagtgagctgcctcatctggtgtcctggcacagctgggtgggagccctgacactgctggccactgctgtccaggcactgtgtgggctctgcctcctttgtccccgggcagccagggtctcaagggtggctcgcctcaagctctaccatctgacatgtggactggtggtctacctgatggctacagtaacggtgcttctgggcatgtactcagtatggttccaggcccagatcaaaggtgcggcctggtacctgtgcctggcactgcccgtctatccagccctggtgatcatgcaccagatttccagatcctacttgccgaggaagaaaatggaaatgtgagttcctgcgaacgctgaatctaggtgggacgcttgccttgaacatcatggttcctttggtgatctataagggatctatttaagaagtggtcaggttttcgcacttcttggctggtccagggactgcagaaaccaaagctgctattgttgaggagtaatagtctgggacgaagtgggggagtatgtgctgggtatgaatggaag

SEQ ID NO: 248933 - DNA, 910 bp, Homo Sapiens
gtaaattttccatttgggaacataacataccacttgttcatttttatctgagaagttatatttggatttatgacactttccattgaggacaacaatggagttgacacacttgctaaatgagctggaaaaatgggtggcgagacatgctgcaactgggccgaacaagcaggattcccattggctttggtctgtgatgtaaaaaatggatttgagctgttcaccggtgatggcaaaaaataaacaaactttccattatttggtgtatttaagttgttagctttctgaccttttttacttttgcgctgcattttaaatgcagcatattggtcagggtgtgctgtcttcatgtgtttcccaatactctgtgaagaattataggttcgagtacatccctcgacctggcagctgaatttctgaactggagcttttggaggcactgatggagttcctaatgaattacttaggtcggactgcggtggaacaaatgcaatactttctaatgtcttaagaggtaaattataaagattggatgatgttttaacattatctccagattcaaatttggaagttggtaaattgttttgaaatgctgcctgattttgcacagaaaaggtcatcaagttgttcacttgtctttctaagttttgtggggtaaggtcacctattttgagagtttctgaatttactaaagaattctgagtaacatgggcctcgttaaagcaatcttgttcttttctctcctggaaacctggatgacacaaatcattacaagtatcttcaactggcgtatgtaagtctgtgaccagtgcttcaccactgccttccacagttgagttttcttgctttccaaagttatcctcaatcccctgattgagagacaccttaatggacacagctacttcactgccaa

SEQ ID NO: 248934 - DNA, 469 bp, Homo Sapiens
cttctagctgttttggaaaaaagtgagatttgctatggcaagcatgccagtgttaattgaactcatgtgaactgtaacattttttgtcccactgttgtcatgactttgtaccaataaactaagataagattgtctggttcgggcagattctgataaagagacttgataagaaaaatgccgtagtgctggaaaatctacaagatgaaggggaaactgttaaccgttaatttataaattttaatggctctctgcccaggtgcagtgtctctttgccatggggaggtatacattaaacatcagagcccttaatttaatagctattattgtggttgtgtatagtctgtttctttatagtaaggaattatttatcaagacatagcttcccatcctctggcatttactgttaacccattattttctggactttgcctccctgacagtattaaaatcaatgtaactcaatatccag

SEQ ID NO: 248935 - DNA, 928 bp, Homo Sapiens
ttgggccttctccagtccgcggtgccatggcccccgcccgtctgttcgcgctgctgctgttcttcgtaggcggagtcgccgagtcgatccgagagactgaggtcatcgacccccaggacctcctagaaggccgatacttctccggagccctaccagacgatgaggatgtagtggggcccgggcaggaatctgatgactttgagctgtctggctctggagatctggatgacttggaagactccatgatcggccctgaagttgtccatcccttggtgcctctagataaccatatccctgagagggcagggtctgggagccaagtccccaccgaacccaagaaactagaggagaatgaggttatccccaagagaatctcacccgttgaagagagtgaggatgtgtccaacaaggtgtcaatgtccagcactgtgcagggcagcaacatctttgagagaacggaggtcctggcagctctgattgtgggtggcatcgtgggcatcctctttgccgtcttcctgatcctactgctcatgtaccgtatgaagaagaaggatgaaggcagctatgacctgggcaagaaacccatctacaagaaagcccccaccaatgagttctacgcgtgaagcttgcttgtgggcactggcttggactttagcggggagggaagccaggggattttgaagggtggacattatggtagggtgaggtcaacctaatactgacttgtcagtatctccagctctgattacctttgaagtgttcagaagagacattgtcttctactgttctgccaggttcttcttgagctttgggcctcagttgccctggtagaaaaatggattcaacttggcctttctgaaggcaagactgggtaatcagagctggagatactgacaagtcagtattaggttgacctcaccctacccta

SEQ ID NO: 248936 - DNA, 1067 bp, Homo Sapiens
catattggtagatttttaattaaaacatttagaaaaggtgaagtagatcactaatgccctctctagtcattcgataataaattatgcttaaaaaactaacccttaatatacaagcaattaatgaatgctgtgtttgaaaatggttcatcagtgaaggaataatttttagcatcatggaggagggagattccagttctttctttctttcattcaaaggtttcatctggaaccactacaagataattgactcaacctttggaagaaagaaaagtggaaagttagactaacttcataagtggggctggtgtccttagctaccaagtgtgcctgaaagggattttgtatccccatatcaagagatcgtcaggttaaggaaggaactgccaaggaggacttttggctacacatctggtcctcctatgctttggtttcttccaattctgcaatattgggctaagtgttgagagtgggtggtatagaagcagatttaattgaaccacaggctgtgggatgcgcctgcctcaaggcttgctgtttagatcactcaaagagctttcagacaaaatacctgagacactgaatatgaaaatgggctctgctagtttcttagaagccttgcctatcctggcagcctggcaggaaaagctagcctagaaggagtgcctgctaaggttagtataagtgagggtacatcagcagaccatgtggtaggtattactgaatcttttctgtatttcctttaatgtcattgtcttatgcagcttttatgaattaattaatcagttttcaaaaggccatgttagtgagactgtcagagcttttaacccctccttagtataattaaaaaaactacaatgtgtgaggggtggtgagggaacagagagaccctctcatattggtttatactcagaaaagaaaagagaagccaaactaaaggcaggtagcctggcacctaggaacagaccccaaaccaaggaacccgaccccaaaaccaggcctggggcctgccctgacctaagccctggtagttaaaaattctacccccttaccctagcaactgaatgttc

SEQ ID NO: 248937 - DNA, 1114 bp, Homo Sapiens
  misc_feature (68)..(93): n is a, c, g, or t
ggagtcctagaattcaatcccccatggatactgaaggacgaatgtatatattgtgtacacatacaaannnnnnnnnnnnnnnnnnnnnnnnnnattttgacttggattttggcatctacaacccagagttctgattaacacagtgctcaacaaatatgagttccctccccctctcttcgttcccccataatttcttcatgtctgacttagaagactgccaaaatttggtacattagactatatagactttttaactgtagactattagattatacaacaaatgaatttatgtgagagagaaaattgcttaaaaggaagaataaatattattgcatctgaacatcattttttaaaattactaattttatgtctgatttgtcatttcgaggtagaaaaatcccaatttctctttgactaaaagataaagtgacatgaattttaaaaaaagaactcattgtggcacaagaagacagaagaatacaagcttcacaagcctaattctagaaactcccaggaatattcaagagagcatacactatagcaggggtccccaacctccaggtcacggactggtactggtctgtggcctgttaggaaccaggctgcacagcaggaggtgagctgcaggggaatgagcattactgcctgagctccatctgcctcctgtcagatcagctgtggcattagattctcataggggtacaaatgctattgtgaactgtgcatgcgagggatctagtttgcatgctccttatgagaatctaactaatgcctgatgatctgaggtggagcagtttcatcctgaaaccattccccccatcagcccccagaaaaactttcttccacaaaatgggtccctggtgccaaaaaggttggggaccactgtgatggaggatacaaaaggcaattaatttatcctcacctcagagggcacatgtgacccaaaagcatctgctacactctccaaacctgatgccttttctgtatttcctacttagcgaatgcaacatctggcagcctttctccctttcttcctcacccatgggctctgcacctcatccctcacccccgccaacactgcagacaagtcacttcagattcaaagttcagcatt

SEQ ID NO: 248938 - DNA, 627 bp, Homo Sapiens
tgctgaggtgatctccaggattcctgggcgatcgccaagaagaaagtgtgagaagttgatgggcagcaaacctgctgtttaacatcaggtgaccacattaatgcccagtattccagttggcaccagaagatatggacttggaatgagggctacagggttcaccaggatgtaagaggagagaggaatccgcaggaccaccagagaggagagggaaccagatatgcagatcagagatagaggaagtggaaccagagagctgggagggaccaaggttgtaagtggtggctaagtcccaccataacagctaaggggacctgggagatgatggctcatttccacccagccccaggatttccagagcgcacattcacagggctggacctgggatgaagatgaatgaagaacatggtatgcacggtggatgtagtttggctcaggtgtccctgcagttggcaaggagtcagtactcagtccctgagtgtggctgaatatttgaggtccttgctgatccaaggagtaatggaccagatctacctcagtattcaagttcagtggggacaccagtggtttctaacttcctggtttcatgatatcttgggacgccttacaacgggagaacgggcgagg

SEQ ID NO: 248939 - DNA, 883 bp, Homo Sapiens
  misc_feature (318)..(333): n is a, c, g, or t
gagcaatgcttttttataatagccaactttgtacaaaaaagttggcactttttactccccaggagacaggaattgtttaaggttagctatagtgagtccgcttaagtcaacgccaagacaactgagaaactggcgaaaaagcagtgagaaaggaagaagaacccccaattttttctttgattgatttgaatgtaggctagttatacctttttggctgtttttagtaagaactatgttataaaatgaattggaggacctgttaccaccagacttaggaggtagtagttttccagtgacttttaatttccctaccagtcnnnnnnnnnnnnnnnnaaatacagggttctaggttagtgtaggaaaaaaaactggtgtattttattccacaagaagcttttggtaaattatttattaaggaaacaactgttggacattgagatggcttttaaagatttacctagaagagataataaaacagataaaactgatctgctcaggggcctgtcttcagtcttttcaggctcgtttactgtggtgttcatgccagcgcagcctggtagacagtgttgctgtggctgtagaaataacactgctcatttttatggaggatattgctgtatgccagttaaagaaattcaagttgaaagacctttaaattttttttactaatacacttccttccccacccccaagctgtcaccatgattatgatgccaggaaagcagtgcggtggctccaggattattctcccatgggctgtgtgccaggtggatgaagtagtcaggagggccacagttgggtttatgtacaacctagatatcatctacttgtgctggttgaccctccattttctaaaggcaatttccaaagggagttgcttttg

SEQ ID NO: 248940 - DNA, 956 bp, Homo Sapiens
  misc_feature (821)..(883): n is a, c, g, or t
gaggtgatgctggtgtcctgacgatgacttttgcatcccactcactagccatggaatgttaattctctaaactcttgttttgagagagaaagagaaacccctagagaaggaggggaaggggagcaggatatggacacacaggacttcagtggaaaaggaacaagacctcgaggctgctgacccacagcatccctctgcccacagactcctgcaggcacaaacccagaaactcggctaactccagcatttgacagttccggtagatgtgacgtaggagcccagagtacaatgaggtggccctcaaagaaggctggctggggatttttgagatcccactgcaggaacacatctctgggtctgaaacatgaccccgactctctccccacacttgaagcgggctgcctggaaagccacaaatactgtgggtcagcctgtatcactgcccaagccgttgtactcaattttgttacctaacaccatttcagataaaaaccattaagaccacacccaaccatagtagtttttcaatgatcgggagagaaacctgctcttacttaaatcactaaaataaatacatgtatttggtgggcaagaatgagaacccagatgaaaaaaagtgctccctctaatgagttacactagaagctggagatggggaagggattgcctgaaacacatgaataggaaaaatgtctcttccatgcagcgatcaactgggtcaaatgcctatcatgtattcttaagacatgtattgtttttctccttaaaaaaatgttttaaaatcacatttaaaggctccacacatgcagcaataatagtannnnnnnnnnnnnnnnnnnnnnnnnnnnnnnnnnnnnnnnnnnnnnnnnnnnnnnnnnnnnnngtgcaacttacttcgaatggggcctggacggctctctggcactagtgacccagtcactacggggagaacggtg

SEQ ID NO: 248941 - DNA, 1301 bp, Homo Sapiens
  misc_feature (90)..(100): n is a, c, g, or t
  misc_feature (255)..(286): n is a, c, g, or t
ttgggtttgacttagattttttcacctttgggatgctgagaaaaccatacacatccagtagaaaccgaactttacattttgagtttcgannnnnnnnnnncacctgggctagtaatacgtggtaggatactctctcacaatgctaggccacagcagcgagctgcagctcccagtgatcacaagggcaaagaatcgatattctaccaggcacggtgttgcctgataaccttgcccagctgtaggctaatgtgttcnnnnnnnnnnnnnnnnnnnnnnnnnnnnnnnnccacctgttttggggggggtacaggtggtatttggttacatgagtaagttctttactggtgattggcgagactttggtgcacccatcactcgagcagtatacactgcatccagtttgtactcctttatgcctcacccttttaccactctttccctctcagtccccaaagtccattgtatcattcttatgcctttacatcctcatagcttagctcccacttataagtgaaaacacacagtgcttggttttccattcctgtgttactttacttagaataatggtctccagttccatccagtttgctgtaaatgccattatttcattcctttttatggctgagtagtattctattgtatatatgtataccgtattttctttatccgtttgttggttggtgggcatttgggctggttttatgtttttgcaattgtgaattgttgtgctgtaaacatgtgtgtgcaagtgtgtctttcatataatgacttcttttcctctgggtagatacccagtagtgggattgctggatcaaatggtagttctacttttagttctttaaggaatctccatactgttttccatagtggttgtactagtttacattcccaccagcagtgtagcagtgttctcttttcaccacatccatggcaacatctattattttttgattttttaaaattatggtcattcttgtggtagtgagttggtatcaccttgtggtttttatttgcattttcctgatcatttgtgatgttgagcattttttcatatgtttgttggctgtttgtatatcttcttttgagaattgtctattcatatccttagcctactttttgatgggattatttgtttttttcttgctgatttgtttgagttccttgtagattctggatgtcagtcctctgttggatgtacagtttgtgaatactttttcctatcctgtgggttgtctgtttactctgctgattatttcttttgctgtgcagaagctttttagtttaattaagtcccatctatt

SEQ ID NO: 248942 - DNA, 986 bp, Homo Sapiens
  misc_feature (359)..(369): n is a, c, g, or t
  misc_feature (821)..(859): n is a, c, g, or t
ttggcacctttcaaaaggaagaaatctgtttcataaatagtagtaatctatgcttaaacttaacatttaatgttgacttcttacaacagccttgaaaattatttgtaattttgatcatgatgttggaaagcttgtaataaagaatatctttctcttctgcatccttttatcctcaaacttagcatggattcacatgctgagtaaatgtttggttaactagtgaacattttagatagttgtgtcaaaaataagggttagggataggtaaaaccagtaatttactgttttttacagaagacatctcagcatttctttggcatttttgcacaaataaatgactatatattcaccttggccannnnnnnnnnnaagtagccctatgagctgctcattctttttcatatacagtggaagtatacagatgttatccattttacaaattgttggatcggaatttgacagaattgggactgtggaacctgggtcacttgaattttctatattttgtatggccaaatcaggaaccagacagtctccatagtctcctttgtttttatggaaaattgccatattcacatatttcatttatcctaatgtattgtcatccaaaatgaaagaggtctttcttgaaggtgctttaaagacatcactacatgtattcaattactgatttaaatattcccagaattattttttacctttctctttttcctctcaaacacaaaattttagtagtacctccctctatttcttcactgatttttcatctgttttcattgttatttccactatagaacttctactttatactagcggggaannnnnnnnnnnnnnnnnnnnnnnnnnnnnnnnnnnnnnnatgtatcacatactgtgctacagttagcctcaatgaagattctattttgaactagacatcctgtcaatagtttgtcaagtaacttcattgcttcctttgatagcaattcagtgaaattttttcccaa

SEQ ID NO: 248943 - DNA, 1091 bp, Homo Sapiens
  misc_feature (144)..(154): n is a, c, g, or t
  misc_feature (606)..(644): n is a, c, g, or t
ttgggtgaacattttacatagttgtgtcaaaaataagggttagggataggtaaaaccagtaatttactgttttttacagaagacatctcagcatttctttggcatttttgcacaaataaatgactatatattcaccttggccannnnnnnnnnnaagtagccctatgagctgctcattctttttcatatacagtggaagtatacagatgttatccattttacaaattgttggatcggaatttgacagaattgggactgtggaacctgggtcacttgaattttctatattttgtatggccaaatcaggaaccagacagtctccatagtctcctttgtttttatggaaaattgccatattcacatatttcatttatcctaatgtattgtcatccaaaatgaaagaggtctttcttgaaggtgctttaaagacatcactacatgtattcaattactgatttaaatattcccagaattattttttacctttctctttttcctctcaaacacaaaattttagtagtacctccctctatttcttcactgatttttcatctgttttcattgttatttccactatagaacttctactttatactagcggggaannnnnnnnnnnnnnnnnnnnnnnnnnnnnnnnnnnnnnnatgtatcacatactgtgctacagttagcctcaatgaagatttctattttgaactagacatcctgtccatagtttgtcaagtaactttcattgcttcctttgatagccattcagtgaaattttttcccaagtgatattttcccccaaccttttgtgagtttgataaataggatgagtcttttatattggaaatactgtgaatggaaaattgccaaatcccttcttagtatattttaagcaccctacaacactttacctccctgcctttagtggtatttaaacatatggccaagttagtatttgggtttgattccttttggtgaagattaggcatcaaaacatttcttaaaaatgtttgagtacaggctaagttataatgtcaactttcaaagactatgtttgtgattcggtttgaatatgctgaagtgagcaattatgatttgcccaa

SEQ ID NO: 248944 - DNA, 1102 bp, Homo Sapiens
ttacccaatgctgcatccagcacacttggagtaggagcgaaccgagagtcctcaatatctcatttccaggttctctgaggagctcctgtgacagcgcctgcctccctccctgtgcagtatcaccacgtgggccccggaggtgagaggaggttgggcacagctggcacaggtccctgacttgcccaagtgaaatagatctgtgccctggggtctggcaggaatccgcgtggttgcaaatggagatggactcgtgcaggtcatttgtggaaagcagcaccactccctttgagaactccagagagggttttgggggaacctgagatgtggggatgctgagaacaaaaatatctgagaacagatgagatgggtgagcctcaagtgggaaatggggagagctgtcatttcaaggaacagcatgaggctgggaaggaaaccggtacatccaggaactctgggccactctgctctttacgtggaaagcaggaacccaggccaaaaggcagggcttggcaaaaagaccccaggagcattcttgccctggcaccttctctgccaggcccctgaacctggtggccatcagatgatttgtttcggggagccctgcagagcaatcaggctgactgtggacaatcagggcagagacggtagtcaggaggcagtcaggagcctctcccttctctttccagaggtagtttccttctgcctcttaaattcaggtagcttctgatcagatcaatccagaatctaggattatgctgatgtcgcagactcaccatgggaaacttgccctcatgaactaggatgactttccctgtttatcctcagcagaaagaaggcaaatgcgccccaaagtgctgggattacaggcgtgagccaaccgcgcccggccaggaatctttttaaagggcttttggactgctgtggccctctcaaagggtggtccagaggtgtgggttatcctctctcatggtgggcggggccgatagtgggctcagtcctggtagaggaaggccgaatagagcagaggctgcctctcctccccctgtctctgatttccacccagctgctgcaggtccagcactcatccatactactcgcggcc

SEQ ID NO: 248945 - DNA, 755 bp, Homo Sapiens
attacataagaggcactgatccttgctttattcatgtagaaatatccaacattgggaatcgtgtgggtgtagatacaaaaaaaggaaaatgggggcataaacagcagttgggttcatcgtggcagttggtggcagtttcagccagtgtgtgggttgagggccctctactgctttacccatcaccctccactgttttagccaaggtgtttgacaacacttggcctgtactttaagggtcacagtgattaaaagcaacacagtcaagacatttgggtctgagtgactgctcctgagctgcttagtacgaagtcgggcaacaagaaagcgaggagcagcgtgtatgcccttatcctcagcaagtgagaacaaggcagatcacagcaccgacacagaagatggccttctcccatgtgccagcggagaatccccttccagccaaatcctcaggaagcagagcaccacacaagcagcatttcttggtttctcatggtcatattcaacagcgacttttaaatcagaaaatagaaaaagcatttgtggtgggtctttttcaaacccagaacacaagttggctaggaaaacggaaagcttcctctggcatccctgtttggactcctcctcctcttggaggagtttcctgaaccgcacacacatcgcttcctcaccaagagagatgctcaactaggatctttttagtgtgcagttacagaccattacagcatgttctagactctattgcccgagcagggtctacc

SEQ ID NO: 248946 - DNA, 1063 bp, Homo Sapiens
  misc_feature (512)..(595): n is a, c, g, or t
ggaggcggcggctgcgggcaggaagcctccaagctcaaagcccccgtatcagtgccagctgcctagctacccctgtccacaccacccaccagaccgcaacaacgtgctccctcatctgggcttccagaggcccttttaacatctggctcttctgcttgttctgtcacttcaaattctagctggcttcaagatacctccctgtatgatcctgggcaagtcactttccctctctgagcctgtttcctccgctgcaaaatggagatgaaaacccctacctcccagtgttactttgggacggtctaaaatgggaacagctctcagcatggggcacagagctggtacacaacacacgtgagcgctaaggcacaagcctgggctgccctcacctgctcagcacacagtgggcatccaatcaacctgagcagaatgaacacagtgctggtgtgacaggcaagcgagcaagtgacattacaatgatggcatacagagttttctgtaaccaggtgctgtgnnnnnnnnnnnnnnnnnnnnnnnnnnnnnnnnnnnnnnnnnnnnnnnnnnnnnnnnnnnnnnnnnnnnnnnnnnnnnnnnnnnntgcccaaggtcacataaagctagactgtggaggaacagagatcttaactcacacttgactcccaatgtcaagcacttaattaccaaaaatgtcagaaagacacagttcagacgttcactgccagtccctacgctcctgctgtagcagacatcactaatggatccccgcagtctttctccctaggagtctggctggcagccactaccaatcgattgaaatggcacaagagatggaatctttctgctgtcactgaatgacacaatcctgcttctcaaatgaataaaggacaattgagcagcagctcagttgcaggggtctgcatagcaggaatacacagctaaccctgtgtcctctctacctgcgtgtcctcccttccaattcaaccctaggcactctgatacccccaaggggaggcagggaggaaacctccaactgttctcctgcctactgcaggaccactcggtaccg

SEQ ID NO: 248947 - DNA, 932 bp, Homo Sapiens
ttggcactaacctgccgttataagaggagaacatgcatcaccctggctctagaaagtttaacaccacggagagagtccttcagggtctgctcaggcctgtgttcaagaactccagtgttggccctctgtactctggctgcagactgacctttctcaggcccgagaaggatggggcagccactggagtggatgctgtctgcctctaccgccctgatcccaaaagccctgggctggacagagagcagctgtactgggagctgagccagctgacccacagcatcactgagctgggcccctacagcctggacagggacagtctttttgtcaatggtttcacccatcggagctctgtgcccaccactagtattcctgggacctccacagtgtacctgggcaacctctgggactccattttctttccctggtccctcggctgcctggccctctcctggtgctattcactttcaactttaccatcaccaacctgcgttatgaggagaacatgcagcaccctggttccaggaagttcaacaccacggagagggttcttcagggtctgctcaggtccttgttcaagagcaccagtgttggccctctgtactctggctgcagactgactttgctcaggcctgagaaggatggggcagccactggagtggatgccatctgtacccaccgcgttgatcccatcggccctgggctggacagagagcggctgtattgggagctgagccagctgacccacaatatcactgagctgggcccctatgccctggacaacgacagcctctttgtcaatggtttcactcatcggagctctgtgtccaccaccagcactccctgggacccccacagtgtatctggggagcatctaagactccagcctcaatatttggccctttcagctggccagccatctcctgaatactatt

SEQ ID NO: 248948 - DNA, 1324 bp, Homo Sapiens
ttggcacgcgctccaaaatatccgccatggagaaatcttggccaggatgtccattctaggcccatcggtgctgtcttgctgaaggttgggtcaggcatctaaagggactgtggtaagggagggtgtgacacaggtgtaagctgccatcgtcatcatgaactttgagggtctggaccctggactggcagaatatgccccagccatgcattctgccctggaccctgtcttggatgcccacctgaacccaagtctgctacagaatgtggagctggacccagagggagtggccttggaggctcttcccgtccaggaatcagtgcacataatggaaggtgtctactctgaattgcacagcgtggtggctgaagtgggtgtacctgtttccgtctcccactttgacttgcacgaggagatgctgtgggtggggagccacgggggccatgccacttcattttttggcccagccttggagcgctactcatcctttcaagtcaatggcagtgatgatattcggcagatccagagcctggagaatggtatcctttttctcaccaagaacaacctcaagtatatggcccgtgggggcctcattatatttgattacctgctggatgagaatgaggatatgcacagtctcctactgactgacagcagcactctactcgttggtgggctgcagaattacatactagagattgatcttaacactgtccaggagactcagaagtatgcagtagagatgcctggagtcaccatcatgagacagacaaatcgcttcttcttctgcggctacacgtctggcaaggtttctctgagagacctccgtacttttaaggtggaacatgagtttgatgccttctcatgaagtctgtcagactttgatgtgcatggcaacctgctagctgcctgtggcttctccagccgcctcactggcctggcctgcgaccgtttcctcaaggtgtatgatttgcgcatgatgcgtgccatcacaccacttcaagtacatgtggatcctgccttcttgcgcttcattcctacatatacttctcgtcttgctatcatctctcagtcagggcagtgccaattctgtgaacccacaggcctggccaacccagccgatatctttcatgtgaatcctctggggcctctgctaatgacatttgatgtgtcagccagcaagcaggctctggcctttggggattctgagggctgtgtgcacctctggactgattccccggagccttccttcaacccctactccccgtgagactgagtttgctttgccgtgtctcgtggactcactgcactcatctgactgagcaga

SEQ ID NO: 248949 - DNA, 1050 bp, Homo Sapiens
  misc_feature (257)..(279): n is a, c, g, or t
gtagacaccaagaacttcagtgctcccacaatcactccttccagccagcgccttacttgtcttccctccattccccaattccatcttctcatctgacccctttcccccctcccctccagtcccctcacctccagtgcacacatgccaaaggagtagatgtccactgctgttgtcacattagtgacttctagggaaaacagagaaggctttggttaatcagaggattgggggctagggttggcaggaatgccttaggnnnnnnnnnnnnnnnnnnnnnnntattttgtatgctggtagagaaggcctagaagtttcagttatattgcctctgtacctcaagttataaggtgcaaaagcagggggatgaggacagggcagagaaagcaggaaggctcacctccatactctggtgcaaagaagtgtagattcttctgctcttctcgacaagtcttcacatgattgttgatagtgtcaggagccactgggagtaggggagacacccacaatctgaccatcatcaatgaagaatagtctcactccagagagaggccccaaaagccaaattctctcctgaagtctcctttctgatgaccctcaacaggcacaaacgtattccctttcctgtcctgaactacagaccacacatggatgccacctacctcccctttcttaggcctactgcttctcatctaatgtccctaaatcaggagcaacaaaagcaccagactaaattaacagatacacaggggcttcaggctggtctagaagcaatgaagtttaaggaaaaattttcacttgtactgcgttcaccttccctacatcccaggtacctctaatccctgctcacatgaaaatatttggttttgagttttttcatccaccctgcaaataacataaaaacacaggcagcccttcctaatctgggacaattggagacctcaggaacttggataaataaggataagaagtattaacatacagctcaggaggtagcctccttcttacacacctttgctgagtgaactcaaacaggtcaaattgagctaatac

SEQ ID NO: 248950 - DNA, 917 bp, Homo Sapiens
  misc_feature (69)..(131): n is a, c, g, or t
  misc_feature (545)..(545): n is a, c, g, or t
tttattagaagtagtacaatagtactttttttatatgccttaaactttttccatagtgcagagcgacgnnnnnnnnnnnnnnnnnnnnnnnnnnnnnnnnnnnnnnnnnnnnnnnnnnnnnnnnnnnnnnncagcaatgtaaaaaccctctaaggccagttacaaaataattcaatacccttgcagtgaaatgtatgtcagctacatataggtattatatgtaacttgaaaagatatccataatgtaatattaaactaaaaaacaagtggtaaacaatatgtactgtacaatgacattttagcatgcatgcgtgctttcccagtaagcatgcacctactaaagttttatgtttcctacactcatttaaaaaatgtacatttaaaaatttattaattgcatgtagccttttagtagttttctattggcttcaatatagaaaaacattctcctgtctttgcgataagaggtctgggttaaggaagttggcagtattagaagggagaaactgaaccatgcaaggtaacatgagtagcaggattttttnaaaaaaaacaattttaaggcaaagaagtgaagaaagaaaagaatcataatccaggctaaagtggtatgcttagaggaacaggttaaaagtggaataggcaatagagattaaatgaaaggtatgcagagattttagtgacaaggttcatttggaaaaatgcaaaaagacaccaacatttcctaacttcttctttgctatctcctcctcagcgttctccttaacagtgtgaaactcccaacattcagagctgagttgaccctttactggctggagccggactccagttgagtcctatgaggctgccagatacactatttgcgttgggacacttcttgtcccctgtaggagggtggggaactgggcacaatccaa

SEQ ID NO: 248951 - DNA, 602 bp, Homo Sapiens
  misc_feature (213)..(260): n is a, c, g, or t
taatcctatatagataaaccatgtttttattatagtgtttaagatgtgggtgtggagggtcgccatttcactctagcatcaaaaaagaatagaagggcagtaacagagtaagagtgcaaagggctagagaagacaaagatatttctctcatttaagaaagaatcattcagatacacacaaggacacaagtacaaggacagtcattgtagcttnnnnnnnnnnnnnnnnnnnnnnnnnnnnnnnnnnnnnnnnnnnnnnnngtctatatagtacaaataaaaggggtaaatttaaaaattttttaaagtgcagaatacatatggtatgttagcatttataaaacatttttaaacatactaaatcatactgtatatatcattatgatagatttatttgtaaagatataaaaatgaaagtaaaacttttaatagtgcttgtttctgattggggttgtgggagaagaagagaatgggaataaggacagtgtttaaaaagaacttcaactataaccgatgttttatatcttttaagaatatggaagctaaaaaagcaacatcataatagatatttaatctgggaagtagcactagtaagctttcgac

SEQ ID NO: 248952 - DNA, 731 bp, Homo Sapiens
ggcaaggtgagaagatttcaaataattcaccttaagtcaagaaacatgcaacttgggttaaaaggaagttttttacacagatttacacacattccctaaaagcacataggttaaacaatgtgggcaatttacttatggaacttaatatgtatgacaaaattaaaagcaagctcatctacttttaggcaaagagacagtacctgggggtggggaaattctgacaattcactaaaattcactaactctttctgttaagatttcactctaagcttcttgaattagaacatcccatgacataatgctgatttctgattactaaggattatacgagtcattcttgatttgtctcctccatcttgcccaacttttgaatatttcgttacttcaacatcagcatatagaaaaaaggaggagagaactaaaattaagtccatggattttagcaatacataagggtatctgacataaagaacattaaacttcaagttccaattcccattattaatagatttcaaagaagtcatttagtctcatcatgtctcaaattttctcacatacttgcttacttgaaaggttattgattgaaaagatcattcaaaaagtgctctaaaaactaacaacttgccataaaaattttatcattaagggttcaataagaggagacagtgaggtgactggtaaaccaaggattaaaaactacctgtgaataggccaggcacgctggctcacac

SEQ ID NO: 248953 - DNA, 778 bp, Homo Sapiens
ttgggttaacatttatcaggcaaattcatatgaatgcttatttcaaataaagattgatagatttaatgatatccttccttttaaatttatatagatctaatgaacattgccaacagttttttttgtttctgtcccttaaacatttcccctgaaagtccacctcaaaggtacatcaagatgcaaacaatttttttatcttcataacttcctgctcttattaacttgtattatgaatcaaattaagttttatgtataaggcatttactattccagtgacttagctaatgaaaacatttaaaaatatgtattaatttacttggcctgctactaaagtgcttaacataactaaatggatctatagtaacatgtctaaattttttaatggaaataagggactaaccataatccttttgagtcagcttggtgcttacaattattttgttaggaaatcttgatgctttcttctttctctttaaatttttgtaatcaagcaacagacttgatccagcagtgtcgaattccaagcaagttatgatgattcttattgtagttcacgtacagatgagtaagtggtgtgacttcagtttattatcttcttggtgacctactttagtatgtgttctgtagcgattcatattagttaagggacgttttcaatatgcttgcaataagaaatagcattttactctacattacaagacatgactgtacacaaatgctaatcagtgatattggggccttttactgtctttaacagccatttaggtcagggtaccga

SEQ ID NO: 248954 - DNA, 924 bp, Homo Sapiens
ttggctatgatgtaggcaaggcagggtttatcattatttcccttttagaaatggtggatctgtggttcagagaagtgaaataagttttcttaaagcagttctggatgcaaacccagaacatttgactctagggtgctttctgctccaccaccctgatttgattgtaaggaggtaattcttaccaagtactgtcagattatatagagttgtaatatatcttaaaaatgcccattttaattttctttaaacagatcagttaaaaagttaactgtgatttgataccatcttgtttctccccaagtttaaacagcaatgagtctctaggaccttcggttaaaccagcatgtgtttttcaaaaatcaaatgtcaaagcatttcgtgaaccttgctttaatgaacaagagaagtgaaggtacaattccttttttgcatgaggtaattaggaaacaggatgtgcaaacttgctatatgaatttaaagaggagcacttctactgatgtacaaactggatgggcatattacagagggtttcatgctggtagaaattttaagtgaaataagttctcattaagcatatcaattatttttggactgtgtgaaaacttaatctgtttcatgagttggatctaaggtggtcaatacctctacactccaaaaaacagaagcatgactcaaacatctagttctgattgcagagtgcctttatctggaagactggacatgtcgtcagaatatagagcaagagggatggaatatgctcttaagtttcctgatgactttagggtttgccactatacttgcttgggaggtggggaggattgaattctctttggaaaatgcctttgaatctcttacacacatggtacccaataagcctagtgctgtattattagcatcatgtactagagtatggtagaaccgact

SEQ ID NO: 248955 - DNA, 340 bp, Homo Sapiens
tagggtcttagggagctatgatcatgccagtgcatcccagctctaggtgagacagtgagatccggtctccaaaataaatcaatcaatcaaatagagaccaaagtcaaaccgcacatcaggatctctcacacccttccaattttgccatctaccagcacttagctaaacccatctcccatctcttccaccatgaattcactctttcaaaaaggctaatgtcttcttactcacccttgcctctaagcctttgctatcaccatttcccccaagctggagggccctccgtctcccttttacccctcttccactacctccctaagaccgggatcctctagatcat

SEQ ID NO: 248956 - DNA, 810 bp, Homo Sapiens
ttggctttgtgcttggattttcgatcttctttgggctcgtccttccaagttacctcagacagaaccctctggtcacagggataacaggaatcgatcaagtgttgaacgtccttctcacaactgctatgtttgtagggggctgtgtggcttttatcctggataacaccatcccaggcactccagaggaaagaggaatccggaaatggaagaagggtgtgggcaaagggaacaaatcactcgacggcatggagtcgtacaatttgccatttggcatgaacattataaaaaaatacagatgcttcagctacttacccatcagcccaacctttgtgggctacacatggaaaggcctcaggaagagcgacaacagccggagttcagatgaagactcccaggccacgggatagcctttgctgtgccctgtggcttggccgcagtgaggcagtgtatctgtagttccttgctgagtaacaagaagtcaaatacatgtttgtatatctacatttacattctgcgccccagagctaagacagactgcgaatcacttttctgctgtgagggtgatggtgcctgatgcggtgtctcgcctatctccttatttaagcccttaactccttgccctttgagagtgtccattgctggccatggtcactaaatttgaagttccagtcctccctttggagtggacatttaaaatctgcagcgattccttgcttcagttcccttccaccacccagggctggctttcctataagccacctccagggtccaggggctatctctctctctccgaaacccctggacctgttt

SEQ ID NO: 248957 - DNA, 884 bp, Homo Sapiens
ttgggggatgccaaaaatgcagttactcatcatggtgtctgtcactggttaggggtaagatgaggggataaggaaagagacttttcaataagttgtgaatgccaacagtgggtttaatgcaaattttttttcctgtgaggtatgacagtttgctcaaacttcagccaacaggggtgtctgcttctgctgcactacacaggccaggagtggcattccatgccactagttggcatccttttgaacttttgtctcctttgcaaacagtggtcctaaaatacgaggtcttcacttgctgtgaatgacgtatccccagtcagggacttaagagaggcactgtgatatacttgggaccctttaaattaaaaagtgaagatagtcaccatggccagaaagctcatggagtggcggtaatgagaatatgtttgaagatcaaagagttagaccaatgcttgaataagtagaccccaagcatccttttctaaaaagtgacttaaaataagccaacagactctcccagaccacacaactagtggaatgattcctcctttttccattacttacttaatcacagtttagtttttttcttaacctcgtcaggcccagagttcacttctttgtttctctgtttcttttgtcttgtcttagagatgacgggggcctacagcaggcatctatgcaaagtagggaaaagatgaagggatggaagaagagaatatctctctgttctgataggaacggctctgttctattgttaaatggcaaatggcccaatttaaagggctttggatctaatttgcctctgatgtttcctttggaaacatttaggaatatttttctccccctaccccataaattgtgtagcactttttattccatttgctttc

SEQ ID NO: 248958 - DNA, 891 bp, Homo Sapiens
ttggagaatctctaacataaaaacttggaatcttgggagagaggactttacttactattgcttaaggaagagtcttttatcatcgttctgaatcacattgtctgtggacacaatcactagtgatactggcagagtgaattaggtaatctttaaaccaacctcccttttggtgttaaagtaaaaggttttctaaccactgggagatttgttggctcttggctcttgtaccatcagatacctacctttattcttggcttttcctgggaccaaaaactgctgcttctgttggatcccctgttctgtggttgtcttggtttcagaaagatctgtctctttaggacaccagacaatcacaggcgatatctttgtttttcactttaggtttggtttatgcacttctgcctcctgacttgattctttcacctaatacttcctgagttttgtttctttggtaactctctttgaataacagcagccctacccacaagaacaccgtggctttacagtggagatgggaaaagagttcaaaaccacctgcttatttctttctctaacatattttcaccttagccacagaaaaaagaagacccacagctacctcggaaaagctccccgaaatccacagcgcctgtcatggatttgttgggccttgatgctcctgtggcctgctccattgcaaatagtaagaccagcaataccctagagaaggatttagatctgttggcctctgttccatccccttcttcttcgggttccagaaaggttgtagttccatgccaactgcagggagtgccggctctgttcctgaaaatctgaacctgtttccggagccagggagcaaatcagaagaaataggcaagaaacagctctctaaagactccaattctttca

SEQ ID NO: 248959 - DNA, 1050 bp, Homo Sapiens
acaaaaaagttggacttgttcctcattagagagagagccacacttctcactgctcacaatgagaggccaaagattacccttggacatccagattttctattgtgccagacctgacgaagagccttttgtgaagatcatcactgttgaagaggcaaagcgcaggaagagcacatgcagctactatgaagacgaggacgaagaggtgctgcctgtcctacggccccacagcgcgctcctggagaatatgcacatcgagcagctggcccgacgccttcctgcaagggtgcaagggtatccatggagactggcctatagcacgttagagcacgggaccagcttaaagacgctctaccggaaatcggcatcactagacagtcctgtcctattggtcatcaaagatatggataatcaggtgaggcctgtccctctcataaagaatattttttaataatttttcaaaattcccaacagtagagagactagtaccatatacttccatcacccagattccacagttaacaggattttgccttctgtgtcttttatctttgttttttctctgctgaaatattttgaagtaaatcccaatcattatggcatttcacccctacatatttcaggatcatctccaaaatgcaaatggatcatacttccaaatacagtcacattctaaggagcttttttctatcaccatgaagtggaaaagtataatgatatcccacagcctaaaaactggaaagttggggtggagtgagatctggatttggaaacagttgcagaaataagttcccagtgccataccagtgcctttcccaggtagcccaagtagtgctcacaaaccttgcctgctttttggatgtgatggagagtcagtcaaggccattttgtgttgtgccttgaggggcccaattgttaagaaaccacggagaatacactgtaccgttcttgattgtacttttgcctgtgttacagttggtctttcttggaggaactagtgaaaactagttattaccccttgtccctgcactgttatctctccccgggatacag

SEQ ID NO: 248960 - DNA, 1745 bp, Homo Sapiens
  misc_feature (672)..(714): n is a, c, g, or t
  misc_feature (1468)..(1612): n is a, c, g, or t
ctaataaaccaactttgtacaaaaaagttgtccccgacgataagacagcatagaatgttagataactgtccagtttttattttctcttttccacttggctgtgatttacttgagatctcacttaagaggtgagactggaacctgggtttcctaacttcactgttagtttttttcctaacacaccatgctttcttggtttaagatgctctgataccctacttatgggcttgtccagctatgagttctgttacagtatagctaaccatttagtaacctactccacattatgcacataaaatctgtagttctccttaatatccacttgtacatattgttttggcttgtttctcccagaagcaatcctgaaatgggaatttgtgtaaaagcggcttattaggaggtgttctcaggaaaaattggtagaggagtggggaagtggccagggaagagaaggaaacaaaacaatggtacaatgtcaggcaaacttccaagcaagtaattttagctcagtccccctggagagccctggagacagtgtagatcatatctcagaactgttccaatcaggtacaagagaaaaaaactacagtgtgcatacttccctgcccatcagtcattgtttgaggtggagtttcttagccttgatactattgacattttgggggtaattcnnnnnnnnnnnnnnnnnnnnnnnnnnnnnnnnnnnnnnnnnnngtcttgggagtctgtcctgcgcattgtaggctgtctggctacaatctctggcttctatgtgttagatgccagtagcctcccagccacctttcccggcccggttatgacaaccaaaagtatctctagacactttgactcctggagctcaaagtcacgtcctcattcagaaccactggtttaagtgtccctggggagatgtaaatttccaggaaatttactcaggcaaaatggtctttggcagcttaagagcagccctctgactgacactggcattggctgtgggggtgaaagcacaccaggagccatgtgcgtgaaaaggttaatgaattccagtagctatggttggagtgctgatatcatgtgctacctgtatattgacttattaaatttctccttttcagccatgtgagcatatttgatataaaggcacagttttctttgaagggcttttggtggactgagtcaacccagtgtgccacatgttatagtcagtgccactagagcagtatctgactcatcctactgttgccattatacaccataaatacctctccactgaggctaattttaagctctgtggaattagtttgatcagaaacctgaatcaagaaagaatttcataagttggaaccattcctgctagactagacttactgatttttgtttcactctaatgacagaaaatcaatgtgttttggctgtgtttttctaatcttgaatctatttttgttgtacctgctgtgcccaatttacnnnnnnnnnnnnnnnnnnnnnnnnnnnnnnnnnnnnnnnnnnnnnnnnnnnnnnnnnnnnnnnnnnnnnnnnnnnnnnnnnnnnnnnnnnnnnnnnnnnnnnnnnnnnnnnnnnnnnnnnnnnnnnnnnnnnnnnnnnnnnnnnntagttacagttcaaggagcaggattgtctgaaaatagccttgaattctcactctaggtttcctggactgtgagaacgggggagttctcttctatgtcatgggagggggtgctttcacaggggatactctagag

SEQ ID NO: 248961 - DNA, 1043 bp, Homo Sapiens
gggaaaagaaaatgccagtagtaataactcagaaattatgtccaaatttacagtaccaaaataatgcatttataaacaaatgcaaaaacaatacccctttggtaaataatacagtgtctttttcagtcaaacgcataacccatgcttttttacaacacgaaaaaatttttatctacaataaacaacaagatcttagaaccctacccctccccttaaaaagaactgtaaacagaaaatataggtacaagtaaagttacacaaaaattgcacaaagccaaagaaaatggaaacaaagtaagccacaacccattagagttttatcagccagaggtaaggaatcacacaaatgctgaagagttctgagttgtgtgctattacagaaatcccaggaactcaaacgacattttggacacatttttgtctccactaactttgcttacaaccattgacttggccaaatgatacaggcacacagcgacaccatggactccttctccagttgctgggccaaactttccttttcaagaaaccttttcaatttgaagcccgtgtaacatggcagagcacactcaggaatttgaggtgacctaggtatatattcctgtggttttggggacaagtagtgacttatttcatggctgttctcatggacatccagctgagcagggcacacccgtggagactccttcttacctagaatcggtacttttgtatattctatgagaacaaacacaattccaaacacatttagaggtgcacaaaagatattactttaaatgcactggtttatattcagtacatagctcattaacacaggaaaagaaatatttctctacacaaaggcaatggtgtgaaatatatttcccatgaaaagtggaatgatgaggctgttcagtgctgcgctcttaggctgagagctgtaagggagtttagagggctgtccaggctgatcctttcatttcacagatggacaagtggaggcctagccagccccagggacttgcccaaggtcaccatccaaccctgtggcagagcaggcttga

SEQ ID NO: 248962 - DNA, 859 bp, Homo Sapiens
  misc_feature (225)..(251): n is a, c, g, or t
  misc_feature (258)..(384): n is a, c, g, or t
  misc_feature (468)..(478): n is a, c, g, or t
ttttccacttttaaaagagtacacaggagtgcaaaaccacgccctggaatcttgtttacacatagggaacaggagatcactgccgtccagccccacggaggaattcagccaaagtcccagggctgggtcttctcttttcatatgaacacagacttcagctccccttatacccatcttgtctatctggtcctgtaagtctgataccagtgaggctgtcctccccannnnnnnnnnnnnnnnnnnnnnnnnnncgatggnnnnnnnnnnnnnnnnnnnnnnnnnnnnnnnnnnnnnnnnnnnnnnnnnnnnnnnnnnnnnnnnnnnnnnnnnnnnnnnnnnnnnnnnnnnnnnnnnnnnnnnnnnnnnnnnnnnnnnnnnnnnnnntcgagtggcctggactacaggcgtgtgcccaagtagctgggactacagacatgttcctggctcgcatcaattctttacacattnnnnnnnnnnntctccctttacccaggaagagacaggtacaatcatgattagagagagacacccttaatgcagcatggaaatgttacattgtgatcaatggtgctacacagttcttcctttaggagatgcatgtccagaccctgactagcttggcctaggctgtagaccgagcaagaaggaaatgcagctagtaacagatccttggggatctttttcaattttctgaaatacgaggagtaagtcaaccaaaatatacgggagtgaggagtaaaacaaaatataaagaatgtgagtaaaacaaaaatagaggagtgaggagtacaacaaaagggaagttttgtcttcctacggctcctaggattgctgtgtgtctcacccagcccttccccaa

SEQ ID NO: 248963 - DNA, 706 bp, Homo Sapiens
gggcccagatctctgacgacaccactcacccgatctcctactacaagcccgagttctacacgccggatgacgggggcactgctcacctgtctgtcgtcgcagaggacggcagtgctgtgtccgccaccagcaccatcaacctctactttggctccaaggtccgctccccggtcagcgggatcctgttcaataatgaaatggacgacttcagctctccctgcatcaccgacgagtttggggtacccccctcacctgccaatttcatccagccagggaagcagccgctctcttcttttgtgctcgacgatcatggtggtccaggattgtcagcgtccggatgttggtgggagctgctgggggcacacagatcaccacggccactgcactggccatcatctacaacctctggttcggctatgacgtgaagcgggccgtggaggagccccggctgcacaaccagcttctgcccaacgtcacgacagtggagagaaacattgaccaggcagtgactgcagccctggagacccggcaccatcacacccagatcgcgtccacctttatcgctgtggtgcaagccatcgtccgcacggctggtggctgggcagctgcctcggactccaggaaaggcggggagcctgccggcgtactgagtgctccaggaggacaaggctgacaagctcttcacaagaggggggatcctgctaga

SEQ ID NO: 248964 - DNA, 1181 bp, Homo Sapiens
attatatgtccctgtttataatctttcaacggtactcctaattttgaaatatagttcaaactatttacttggtacataaaagccttcttgatttggccatttccctgtctcatactccttcccttaatctacatgtgatttcatgtctctgtacctacatggaaattttttctgcctatctttttcaaaactcaagaataaatttaggaattatgagtctttcctaactcctcagtgtgcgttaatattccacttctgtgtccttataatgtattcctcttccatcatacttgaagaggaactgcattgcttgtctctgtacctgactcagtgcctcgcacgaaacaggagcttacttgttttactgactgaatgaaataagtcaatgtaagacagtgaaatctgaagaatactcatggaatgctttaacttttgatactgaacaagctctgccaaaaaaattgtttaatttgcttattattactaatctgtccccaatcgtatttttaaataatttctttcatcttctattcaataaagtgtgctaagttgaaatcttcaacctttaaaaggcaaacacctcatttcaaacacaactagtcttacaagtaataaactctttaattaacatgtaatacaaaggcttgcattactcaagagactaaaaggaatttgggttaattcaacctagcaaatacctgtttgcctgcatacctaggacaccatctacacatcagcagcatgtaaacaaatctagctgtcaccaccccacagcccccaaatcaactacagtcacgtcagtaaatctcctgtcatgtatcatagccccagcatcccttcagcttcctatgatcaacccagtaaggtttaggttatttttaattcttaccaacaaagttaatttagttatttaaaagctataacattatttccacctctgtatgcaacataccaaattaaaattctagcaaagaggacctgaaagcaaaatatttttaagtaaagaaattaaagttatttttaaaatagaacttattcaaaaacaaaattgtcagtcaatgccttaaaaacaataaacacacctagtcctaacaatatcataatgaaaattaagcatgtgtaatcttcagagttgagtgttatttttaagaggcaatagagtctctgaacagatgacccaa

SEQ ID NO: 248965 - DNA, 1257 bp, Homo Sapiens
  misc_feature (125)..(125): n is a, c, g, or t
  misc_feature (199)..(209): n is a, c, g, or t
ccaaaagagtttttgaaagatgaaatacacactagaggatagagacttgtaaaaggatctctacaatcactgctttgggtcatgaagggaaacagctggtaaatggagaagtagtgatgaatagnggtagctcccaaaattgttgaagacagaacctatagagacaaagttttatgagacaaaggaagagagctatagnnnnnnnnnnntttgccctttaaaaaaaggggcaccagaaaatattcatcacgggtagggaaaatgggaacaggagtcctttaatattctgtcataacaagtatgaaaacaggtgagcttgagatagaaacagcccctttgagggaaagatgcagatagttcaatatcagtcttagagatccatagtcaaaaagcacataatagaggaacccgatcctcctagaaatggaaacttctcttgattcttctgagatggcaaaagatctctcttcaaaaactgctttatcttccaccgagtcgtgtaccatgaaaggtgaagagaagtctcccaaaactaagaaggataagcgcccaccaatcctagaatgtcttgaaaagttagagaagtccaaaaagacttttcttgataaggacgcacaaagattgagtccaataccagaagaagttccaaagagtactctagagtcagaaaagcctggctctcctgaggcagctgaaacttctccaccatctaatatcattgaccactgtgagaaactagcctcagaaaaagaagtggtagaatgccagagtacaagtactgttggtggccagtctgtgaaaaaagtagacctagaaaccctaaaagaggattctgagttcacaaaggtagaaatggataatctggacaatgcccagacctctggcatagaggagccttctgagacaaagggttctatgcaaaaaagcaaattcaaatataagttggttcctgaagaagaaaccactgcctcagaaaatacagagataacctctgaaaggcagaaagagggcatcaaattaacaatcaggatatcaagtcggaaaaagaagcccgattctccccccaaagttctagaaccagaaaacaagcaagagaagacagaaaaggaagaggagaaaacaaatgtgggtcgtactttaagaagatctccaagaatatctagacccactgcaaaagtggctgagatcagagatcagaaagctgataaaaaaagaggggaaggagaagatgaatggaagaagagtcaacagctttgc

SEQ ID NO: 248966 - DNA, 606 bp, Homo Sapiens
  misc_feature (50)..(73): n is a, c, g, or t
  misc_feature (79)..(98): n is a, c, g, or t
  misc_feature (215)..(232): n is a, c, g, or t
gcaaattactgtattcaccacaagctaaagaagagaacatgtatcctacnnnnnnnnnnnnnnnnnnnnnnnntttttnnnnnnnnnnnnnnnnnnnngatttatggaagactaaagacacggaaaaaaatccagcaccccaacatgtacagccaggaaggaaatcagttctgtaataggacaggtataatgaactacaaacaagaaggggtggnnnnnnnnnnnnnnnnnntgtgcattgagttttagacactgtaaaactcagaagacatatttactattcaagtataaactctgtaaggacttggcataaattgaaaggcagctgctgaggtacaccattataaaagaagttctatgaatttacaattctaccttccaatttcctgggagaaaaaaccaaactcttgaaggtcttcaccagagaccctgagagggattaacacttttgatgaagacatagtcaataattcatgattgaactattcaaaaacatgtatttatttagaacaatagaaatacgtgttctcagactgtcctctagagtttttgagactattagttcaagagtttcaaagtatattacttgtaaaaacaatactgatt

SEQ ID NO: 248967 - DNA, 780 bp, Homo Sapiens
ggaaattacccaggagtagtccacatgtagagggaaggcaaaggtccccgcctgggcctgctccagcagctcctcacactccttgtggtgcttcttcctggctatgtccagagctgtctcgcctgcttcatttactgtgccaaccaaagctctcccttcagcagcagcttgaggcagtcgggctggttgtagagtgctgcgtagtgcagagccgtgttcccgtcagcagccttggcatccaggtgaccaccgttctggatgatgaaatccaccagaggcagggaagcctggttggcgactttgacagccaaatgcaagacgagttcttcaggtgcctgaaaacacatccacacctctgagattccccccccagtgcacctgcctccaacccagtatttccctcttgaactcttgctaaccccttatccccccataggaagctgccagaaccctggagagatgagactgcaagggcagagcctcatgtctgggaggaaggtgaagggccattctcccattgttcccattcacggctcttcctcctctgcccccaacaagtgtttcccaaacttctttctcagctctcggctcctctccctgatcgcacttccccaccaagacctcagcaacctcacattttcaactatcacacatgtgcaggctgttccaaattcttacctcacctaagtgctgcactgcccattggatagcccaccaagatatcagacagacagttcaaagatacccgtttttagtttttctgatatcttgttggagctt

SEQ ID NO: 248968 - DNA, 805 bp, Homo Sapiens
  misc_feature (82)..(96): n is a, c, g, or t
gtatgtctcagggcatacatcagctatacaagagagctgggacttgcctctagcttctgcaggcacttattgatgggccctnnnnnnnnnnnnnnntggcctggaggagccagaacaactcttggcctcacctctctgcttccagaaagagtattcaggacttgagggaagcatcagattaaataccagtgaacagttcgaggtcaacttcgaggtcagcttcctgaagtgtcaatccttttcccaattgtttcaataactcttattccttgcactttggcagatgtcctgccctcctctttcattccagtatgttaacctcatcaaggcagcaaagtggaagagaaagcaagtctgccctttgccatactgaacagctatggaccctgaggggtagtacacatgcctgtaagaatgagatacaagtgtgtgctttccagctttgctaacagtgggagttcaaaggcgcagagagggaggaaggtccatgacactcagccacatagtgtagggaggcaatttaatattaagtgatgcaccatcctccctccctaggtgccttctcccaatcaaactttttccttttttcaagatgactaattatccctcaagaacaattaattatcccttaattgccttaggtggagaactttactcctagaagccacatcaaccaagctcaactctggtttgtccatatctactgtgtgagctacttaactgactcctcctctctccaactgaaggatcacccagtgttttttggattatagaattattatttcctgctttgttactctgggaa

SEQ ID NO: 248969 - DNA, 948 bp, Homo Sapiens
  misc_feature (587)..(721): n is a, c, g, or t
caaaagcattattatttgctgagaatgatcatctcttttaaaaatacccaagaatccacaaatatgttatcagatttaaaaagaatgtttagtaagctttctaaacaaatatataaaaaaatgtacaaaagacaactgcatttctttatataagcaagaggtaggaaatgaattttaaagtaccaagactacacataagaaagttacagggaagatttcaaaactttgagagacgttaaagtagagtaaaatataaggagaggtattccatggtcttggacataaaattaaattataataattagatcaattccatcaaaatccccacaagatttcttatagaacatgccaaactgattatgaaatttctaacagagtactatgtgacatgtcttacattatcaactaccaagacttatctaaacttacagcaattaagggaagattcagaactacttcaccaatgcaacacaatagtgagttcagaagctgacccatacacatatggaaatacaattataagaccaaggagacactgaaaatcaatggtaaagaaaaacctattcaataaacggccaagcgcggtnnnnnnnnnnnnnnnnnnnnnnnnnnnnnnnnnnnnnnnnnnnnnnnnnnnnnnnnnnnnnnnnnnnnnnnnnnnnnnnnnnnnnnnnnnnnnnnnnnnnnnnnnnnnnnnnnnnnnnnnnnnnnnnnnnnnnnntactggcaaaacgaatttggaatttgggaaagctgaagatggagaaactagttagaaagctaccttaattgtcttgtcggaagtgatgttggtttgaattacattagtggcaatggaaacaggcaagaaagtacagatatacaagacattttaattacaaaatagaagaactcctcaagtgtggaggacaagaagacaaaaatgttaatgcaaaagatatttgccaa

SEQ ID NO: 248970 - DNA, 867 bp, Homo Sapiens
  misc_feature (167)..(197): n is a, c, g, or t
  misc_feature (752)..(800): n is a, c, g, or t
taaaaaataaattttgggagtccatgatttacaaaatagacttttaggtttgaactgaaacttttaaaacctaggaaatgcactggcagattgtgtctctagattcctgtgtcacaaaattctataaaagaaatctctgtttcaccagataactcagaaaaaagggnnnnnnnnnnnnnnnnnnnnnnnnnnnnnnncatgccaagtgttaaaatgttccattaaagctcaaatcctttttattgttatacgaaccctaaattgctgtaattgattttttccagagtaagtaactcactagataatcttataccctaaaggttattggaaataatgcacaaagtaataatttactaattcatcagttctaaaagagtatacagttaataatcaatttataattataatcttaatggtagaaaatttacacaggcggtacggcagtctcatacagcaaataaaatatggttttccaaattttaaaaaatgcatatttccttatataattctattccattaaagatatattgattttagacctcctaaaagattagcagtataacagggccaacaagaaacaaaaatataaaaatgcacagccctcaggagctctcagtctgctaaaggaggaaaatttgcaaatggataaattaaaagaactagtatttgcagtatctctcatatctttgttctactgtgtcccatacttgtctaaaagctccttgcttttagtggaaaaacctcaaaaaaannnnnnnnnnnnnnnnnnnnnnnnnnnnnnnnnnnnnnnnnnnnnnnnntcaatgaacttcaatttcaagcccagggagtatcacagaaaccccaacattgccatgaaattgccaa

SEQ ID NO: 248971 - DNA, 951 bp, Homo Sapiens
  misc_feature (714)..(865): n is a, c, g, or t
ggtgtcagggtgcaaacaaacaaatggagtcaattcattcaattggtatttattgacacttgggtgtcatgggagatgagcaattatattggcctggtctactaggagtttataatgtggttgtggaatcaaccctagtgagaatgactgagaatgaggtggcaagaatcccctggaatccctacccagattggttgctgtgaattttccttcactaaaaaaggttgtcttttgtccaaagaaatgctgagatttggtggcttgatcatacgtcaactccactgactttaagctgtgagtagtaagagaggcatataggtgcccattttctgcctcaggctctctgagatccaccatatttgcaatgaacgaattcagtcctggatttggaagagtaatgacgatggctatttgcatttctttacagcatagtggctaaaattatgggttccagagactgttgcttgctttcaaatctaggccccattacttactagctatgtgacttgggcatattactaacatttctacactccagttttctcaactgaaaataaaggtaataatattaccttgtatattctgaaaatcaaatgacttatatatgccaaattcttgtactggtgcctggcacataaaatggaccaaaatactggctgttgttattaaaaagtctctcatattttgaaaagttaccaatccctaacctaatannnnnnnnnnnnnnnnnnnnnnnnnnnnnnnnnnnnnnnnnnnnnnnnnnnnnnnnnnnnnnnnnnnnnnnnnnnnnnnnnnnnnnnnnnnnnnnnnnnnnnnnnnnnnnnnnnnnnnnnnnnnnnnnnnnnnnnnnnnnnnnnnnnnnnnnttctagcgtccatccccttcatcactttgctatgctgctctcactctctaagtgcatttgtccccatggcaaggtttcttcaccaa

SEQ ID NO: 248972 - DNA, 971 bp, Homo Sapiens
ttggataaaaatgacctttctgccctgcagtataggaaatgctgccttaatgcctctttgctttagaaactcatccttgtatagtatctctccttgcatagccaagttgcctcattgtacgtaaattaaggttatttgcagtgattgaccctaactactatgaagaaaaactttcaatatgttagcaatgatgtctataataactgaagaagggacattccctatttaaggtcaggactgtgcgtttcaaataaagaaatgacagctcaaacatttcattgtacccccacttctaagtgagaagagggcacccttcgtgtctctcttttctgtttttctccctgaaatatcaggagagacatatatctctcttaaacctgatttggttttcgcattacctcacaggtacatattgtcagaactatttgcatacacgagactaaaaaaaatactaaacggattctccagggatccatggataaacttgaggtagtctataagctttgaaatcacaagcaaatatttgtgtccatgtgcctgtgcattttgaaggggggtttgtttatgaactctggctgaattctcaaagaatcctgtaccttcttcctaacgctgagaagtacttgctctaatctcttccccactccctttttgctgtcccctccccattatcttttttctttttgatatggactttaattaaaatgttgatgcttacgtcaccatacattttctgcattaattttgatttttaaaatattgcgttacatgacttaatcttgattactgaaactttttaaaggtaccccttaaattttgctcctggggcaaatgtcttacttgcctcagcctagcctggggcctgagcgggcacctccttcagccttctttcctctaacctctccctgatccaggctgttttccgcaacgccacctgagccattttcccagcctgtcaagatgacaattca

SEQ ID NO: 248973 - DNA, 842 bp, Homo Sapiens
aatttacatattctgcattcatctgcaaggcagggttttgatagagggccataaaacattgcatatagggcatttcttcccatttaccatgttcttgcaaaaaaagtccaattggagagttgcagtaagtgacccatattcagaccatctcttctgatctagggaatactggagccaggctgtattacagtaatatatcatttgctttttggtcatgggtggatatgcagtttccattgccagaggaggcaccctaataagctctccttccaagacctagttcacgacattctacggtctctgcacacagtttgaggggcttccaaactctggagattaatgatgacacaaatcccaccactcagcttgaatacttctggtcctctttgctggccaccatgcaaagccatccagaggtcctgggaagctgagaggataacagggatttcctttccctggatcatgttcggtccgggcagcctcccaggagatctcatggagacaatgaagtagttctggatccagctcaggtggtggggaggtaggtaaatcaatcaagtgagtgaggtgtttcctcagagaaagcacacacactgttcatgtaacctttgtatcactgcattctggttccagggatcatgatcccaccaaaactgccccctttgaaacttgggtctcctcatcaaactaacagcagtccttctgtgactgctgcaaaacaaagcctgatattttaggggttgccacagactaagggtagaagaatccagacttcatattcattcaggccacagacaagtaagaatattgagccctacagttataccacgtagggaacccaa

SEQ ID NO: 248974 - DNA, 868 bp, Homo Sapiens
acaaggaggctgagtccaagtcctgacgaactgcatcaggaggagggacatctggcttacatcagtgatgactctttttcattcatttattgagcacctactgtatacaggcagtgatggaggaacagggagcatacctattctaaatagataagtccacattgttgtgtgtgataaaatacacataacttaaaagttaccatcttaactatttttaagtgtacagttcagtggcattaagtacattcatattgttgtgcagccatcactataatctatctccagaactctcttcatattccaaactgaaactctgtacccatttaacagtaactccccattccaggctccccacagtctctggcaaccactattctactttcaggataattttcattggttagtaatgtttggataatttgattagatttggtggatactgaagactggccgggttatgtaagctgttgctactttcagccaaggagtgcatctagtccgtattacatcatccttggagtgttctacccagtgtcttgcattgaaggacatcagaaggaaaactcctgtattctcagtcgtggtaaatagtgtccacttcattacagatctccttgagtgataggtttcaaaatatctctaggcatgaagaaacatttccaaacctgcttgtcttctctacctttctcagtatgtactagtttagaaggtattcaaaatctttcactgagactattgagttttatgctaaatataacatctggcctagcactttttatcactcatatgaatctatttgataaggacagggactaatacaatgtctttttcatgtatcttaggcatctaattgactaatatgaaattt

SEQ ID NO: 248975 - DNA, 545 bp, Homo Sapiens
cacgttggcctgaagcaatgtgtattttaaaatgtgtttgtttgtattttatggagttagttatactactgccttagggcttccattgaagttttgcactggcatcatagcatttgatttactttttatcctttgttgagactaataaacccagggttactgtaggagctggcaaaggaaaattagcagaatgggccaagcgagaccagaaagcctgcagcagcactttgagaagccctggcctgtgtcctctcagactgagaatctacttcttgaaaggccttacgtaaccagtatattgaataactaactaaatgctaggtactaatacctgtttttttaatgtatttttaaataaaaaagatgatagatagatagatagatatagttctgtatttcccttcagaatgagccatctgctgctgtggcattcattttattctatctatctatctatctatttttgttcactgtggggtggggatctataaatacacactcttcccaaaccctctaaggcaataaaacatttttggataaaatgt

SEQ ID NO: 248976 - DNA, 921 bp, Homo Sapiens
  misc_feature (534)..(586): n is a, c, g, or t
  misc_feature (599)..(607): n is a, c, g, or t
tctctgctgtgtctgaaaatgcctctgcaatcctgcctccataccttgtacacagagctctccacctggaatgccgtcttcttctctgtctatgcagggcgcgcccccagctccttagattttccctctctgagaatccaggtgtctactatcacacatggaatgacctcaactgtcccctctgtcccaaaccagggaacattatggcctgaggccccagaggagtgggacagttacccagttgtgctggctgcagagccagggcctggtcctagccagcctctttctccttcaccctgccttgctcagctcatcggggttgttgggtcacatgcctggtggctggcaggctctgggcaggctgaccgggggcctctgagcccagtagcccagccaggggtggtgtcatagcctctgtggatccctccccaggccagcaggcagcctccctctagacactccacccccatccctgcctccttggagggacaggaggagtagagtatgtggcagcagagcagtttggagctttcnnnnnnnnnnnnnnnnnnnnnnnnnnnnnnnnnnnnnnnnnnnnnnnnnnnnnagactgtgtctcnnnnnnnnngaatatatgcctttactgattagctgtgtctgccatgggctcagaaagagaaagcagaggcagggtgctggggaaatgctaacgcctcatgctaagatggacacactggggtacacagaggagtcaggacatgcccagactcgtgaagcagatcgtggcaccaggggaacttgtgtagaggaacttccccagcatcacaagtggctgatagtatggagtctggaaacactctgtccttcctgttatggccccccacaaccccccagcacttaccacttccaggctgatggctgcagaacaacttctctcttcct

SEQ ID NO: 248977 - DNA, 752 bp, Homo Sapiens
ttggcatgtcggaagaaattcatttcttacctcaaaggcatctgctcaggtggtggaggaggtcccgaacgtgtgcacagagtccttttccggcggcgttcatgtccttcacgagttcctggggcggaggacaatgcccgcaacgagaccctgagtaacagatacttgcagcccacccaggtctctgagcaggaaatccaaggtcaggagctggcagagctaacaggtgtgactgtagagtcgccagaggagccacagcgtctgctggaacaggcagaagctgaagggtgtcagaggaggaggctgctggttccagtgaatgacgctgactccgctgacatcagcaccttgctggatgcctcggcaacactggaagaaggacatgcaaaggaaacaattcaggaccaactggtgggctccgaaaagctcttttatgaagaagatgaggcaggctctgctacgtcctgcctgtgaaagaatctcttcaggaaaccagagcttccctcatttaccttttctcctacaaagggaagcagcctggaagaaacagtccagtacttgacccatgccccaacaaactctactatccaatatggggcagcttaccaatggtcctagaactttgttaacgcacttggagtaatttttatgaaatactgcgtgtgataagcaaacgggagaaatttatatcagattcttggctgcatagttatacgattgtgtattaaggtcgtttagcacatgcgtgctcg

SEQ ID NO: 248978 - DNA, 875 bp, Homo Sapiens
  misc_feature (489)..(512): n is a, c, g, or t
cttccaacagtactttccgtggatgctgtccttaattgtaatcttttcaaagtgcatgtggatgtttatctgcagtgtggtcctgcagaagccatgtgccctgcagccctgtctgttccgtagctcgcttcctgccagggcggggaggagcctgctgtcatcccttttgtgtttgcccagggaggaggccaaggagatgtgggaaaagagagaggcagagtgggcccgagagcgcagcgcacgggacagactgatgagcgaggttctgacagggagacaacagcaaatacaagagaagattgagcagaaccgacgggcacaagaggaatccctgaaacacagggagcaacttattcgaaatcttgaggaggtgagagagttggctcgtcgcgagaaagaggagagtgaaaagctgaaatcggccaggaagcaggagctggaagcccaggttgcagagcgccggctgcaggcatgggaagcagaccagcnnnnnnnnnnnnnnnnnnnnnnnncccggcgggtcgagcagctctcagatgccctgctgcagcaggaggcggagactatggctgagcagggctaccggcctaagccttacggacatccaaaaattgcttggaactgacttcatgggtaccataagtacagagaacaagggatgctgaggcttctgatcccagccgccaggcagttttacagggctctgttaacagtaagtgcccggggcactgtcagatggctcagcagtgcctgctcaggttcatcattgaaacatcccagtgtttggccagacattaaagtgtcgtgagagtccctttcatgcctttcttacccaagcaagggtctttgatgggcacgtgtttacagcgctgctg

SEQ ID NO: 248979 - DNA, 916 bp, Homo Sapiens
  misc_feature (511)..(545): n is a, c, g, or t
  misc_feature (691)..(749): n is a, c, g, or t
  misc_feature (762)..(818): n is a, c, g, or t
gggttttttgatagctgaaattccctagcttaaagttcatcaagcacttattcaggtgggcaagtctttgtgcagttattttgagaacagcaatttcttgaactgttatagcccttttatctttggttcccatgtaggagaatatatttggcttgactcttaagtatttggagagtacattaatagcatccatggtgtctttgttttccttatatagtacgaagtggcagtaacttcccctagattttggccaagaatgttttcttggatcttgaaagcaaaagaattaacattatatataccataataaaagttatagatgtaagagctcatttttcgctatagaacctttgagtggaaaatcagttctagtctgataaagaaatacaggttaagtggttatagctgtgtggactagaggtattacatttcctgtaattggacacttaacattatctatccatattaaaaataaaaagctaaaatgtggctgggcacggtggctcacacnnnnnnnnnnnnnnnnnnnnnnnnnnnnnnnnnnnaagatggcttgagctcaggagttcaagactggcctgggcaacatggcaagacccgtctccactaaaaatagccaggcatggtggtacacgcctgtggtcccaactactcagatggctgaggtgggaggatcacatgaacatgtagnnnnnnnnnnnnnnnnnnnnnnnnnnnnnnnnnnnnnnnnnnnnnnnnnnnnnnnnnnnagaccctgtctcnnnnnnnnnnnnnnnnnnnnnnnnnnnnnnnnnnnnnnnnnnnnnnnnnnnnnnnnngccaggttaaatgttaacttctgagcagctagtgttacttcagttgttcaatcctgtgttaaacaatgtaagatttaggccgagtgtaatcccatgca

SEQ ID NO: 248980 - DNA, 909 bp, Homo Sapiens
  misc_feature (318)..(326): n is a, c, g, or t
  misc_feature (427)..(437): n is a, c, g, or t
ttggcgattctgcatatttcagacttcaagaatcgttctttaatctcccacaacttctttttccggaaaatgtaatgcagaataaagataatgccctcgtggagttggatcacaggattgattttgaactcagagaaggccttgtggagagccgctattggtcagctgtcacgtcgcatactgcctattggtcatccttggatgttgccctttttcttttaaccttcatgtataaacatgagcacgatgatgatgcaaaacccaatttagatccaatctgaactcttgaaggacatgaatggcctaaaactgatttgnnnnnnnnnccgttaaaatgtgtgtgtcaagatacggagatttcagggttaaagtatatttcagttttctttagggcaacatatatttgaatttaaaagcactttatttnnnnnnnnnnngaagttttcagttctgaagaagtcatttacagtttgcatcattttaattatgagtctgacaaaaccttctccagagaatcaagcaagacctggatgtgaagaaggtttgggtaaactgcatgtaaaggctacaaatcacaatctgattcctcccaaatataaaggcatatggaacataatgtattaaccaaagtatgttataaatcaaaaatggtcaaggttcagcatattctatatgaagatcacaaggtggtatcgttttagatttctatgaaggctttcatttgtacatccctttgaaaaaatataacagatttaaaatgttttgaatttaacttgtttagaaaaactaatgcttaaaacaatatttgaactactgtatttataatttattacctctaattgctttatttcagtgtatgagacattactgttttaatgtttgctttgaacataatttaagaaccagatt

SEQ ID NO: 248981 - DNA, 1145 bp, Homo Sapiens
ttggctgagtcatgggaggctttgcaggcctgtgcttccccagacacccaccctcgtgaggcctgggctggtcagcaagggcccccaggtccctgtagcccatgttagtacttgcctgggctgatgccgaagagagggaggggtgaggatgccactggtgagctgggacctcttaaggctacgtccctgggggaagcctcacacctccaaccctactagactgagtgcatgaacttcgtgaagttgctgcatgcctacaaccgcacccatttgctggcctgtggcacgggagccttccacccaacctgtgcctttgtggaagtgggccaccgggcagaggagcccgtcctccggctggacccaggaaggatagaggatggcaaggggaagagtccttatgaccccaggcatcgggctgcctccgtgctggtgggggaggagctatactcaggggtggcagcagacctcatgggacgagactttaccatctttcgcagcctagggcaacgtccaagtctccgaacagagccacacgactcccgctggctcaatgagcccaagtttgtcaaggtattttggatcccggagagcgagaacccagacgacgacaaaatctacttcttcttctccacgtccaggtgaggggcaggaggtagggagcgcccggggcgggccgctgggctccacccggcccctcacctcgccctggtcttcgcctccagcagcatcttccagggctctgcggtgtgcgtgtacagcatgaacgacgtgcgcccgggccttcttgggaccctttgcacacaaagaaggggcccatgcaccagtgggtgtcataccagggtcgcgtcccctacccgcggccaggcatggttcgtagcccagggacttctgctacaacccacttcaaagcctcaagggtttgagaacttggcctggggtcttcttggtgaatgtggtttcttcctttagttatgggtgggaaaacgtttccatcataagacaaggcttgtttcccgcctctgacttcctagggcaaggctgatctcctctctaattctcagggcagggttctgtccccatccaacctccatgttcccagaaggctgcgacactggagggctaccatatcaagccccctatatata

SEQ ID NO: 248982 - DNA, 730 bp, Homo Sapiens
  misc_feature (34)..(34): n is a, c, g, or t
cacaggctccatgaacaataaattatcgcgtccnctggacacagttactccatgtccatttcacctaatgtagatatttgcaccgcctgactagattgcctgagtgtaatgataccacttaaaattaaccccacaaactctccaggagaccacaaactttttcttctttgacctcagctcctggaacaggacaaggtacaaaggaaataattttaaaatatttgtttaatgaaacaaattgactagtttcacagatccctctgcataatacaaagttctgaaagtttatggtcctggttttcaattaatcctccaactaggtctaagaatactttactagtgtattatcttttatttattatgtaaagcttctttccttccttttccccaatcatgatatattagtgacaaaatattacagaaccggactattagtcacttaaaaaaacagtataattctaatgctagtaaacatgtaatttaatttagttctggaaggacagttgtctttgattaaagccccaccaaaacccatttaagtatttaatgtacatactattcatattattatggcctgtaaacactaatatctgagcaatcaaactgttttatctaccatttttgatgaaatttgaataaagtttaaaaacgtgtaagcctttgaacaaatgtatgaaagctttaaaagatcattagcacttttattttgtttacaaataagctgccattt

SEQ ID NO: 248983 - DNA, 1475 bp, Homo Sapiens
ccataaaagccaactttgtacaaaaaagttggctcgctgtgactacttcctggccaagatcaagcaggcagatgtagcactactggaggagacagctgatgaggaggagccagagctcactgccagcttgcctcgggagctcaccctgcaagatgtggagctccttaaggtaggtcatgttggccccctccaaattggacaagctgttaagaagccccggacagttaacgtggaagattcctgggccatggaggccacagcgtctgctgcctctacctctgttacttttagagagatggacatgagcccggaggaagtggttgccagccctagggcctcacctgctaaacagcggggtcctgaggcagcctccaatatccagcagtgcctctttctccagaagatgggggccaaaggcagcactccaggaatgttcaatcttccagtcagtctctacgtgaccagtcaaggtgaagtactagtcgctgaccgtggtaactatcgtatacaagtctttacccgcaaaggctttttgaaggaaatccgccgcagccccagtggcattgatagctttgtgctaagcttccttggggcagatctacccaacctcactcctctctcagtggcaatgaactgccaggggctgattggtgtgactgacagctatgataactccctcaaggtatataccttggatggccactgcgtggcctgtcacaggagccagctgagcaaaccatggggtatcacagccttgccatctggccagtttgtagtaaccgatgtggaaggtggaaagctttggtgtttcacagttgatcgaggatcaggggtggtcaaatacagctgcctatgtagtgctgtgcggcccaaatttgtcacctgtgatgctgagggcaccgtctacttcacccagggcttaggcctcaatctggagaatcggcagaatgagcaccacctggagggtggcttttccattggctctgtaggccctgatgggcagctgggtcgccagattagccacttcttctcggagaatgaggatttccgctgcattgctggcatgtgtgtggatgctcgtggtgatctcatcgtggctgacagtagtcgcaaggaaattctccattttcctaagggtgggggctatagtgtccttattcgagagggacttacctgtcccggtgggcatagccctaactcctaaggggcagctgctggtcttggactgttggggtcattgcatcaagatctacagctaccatctgagaagatattccaccccataggggatgagaaattatcagtttcttcagctcccaagccaacttcccttcccttagttcttggttgttagtggcacatgcagaatagactcagcctatgtcctgattccagctgggtagttctagaactttagaagctccatcttttaatgtttttatttgttatgtccccttctccgcgatcgaagtgtg

SEQ ID NO: 248984 - DNA, 1159 bp, Homo Sapiens
ttggcaagattctttattgtctccaggaaggcagtgtggagtctgagactctatccatgtctgcgatggaatcttttattgaaaaacagacaaagttactggaaatgcagccaacaaaagccccagaaaaagatcctgaacaacctcccaaaggacgtgtggacagttgcgtgtcagatgcagccgtgccagcccaagaccccagcaacagcgatccaggaacagagacagagttagctgacacagccctggatctgctcctcttgctactaacagaacagtggaaatggctatgtaccgaaaacatgcaaaagtttcttcgtcttatctttgggaccctagttcaaaggtggctagaggtgcaggtagctaatttaacaagtccacagcgctgggtgcagtacctccggcttcttcaggagtccatctggcctggtggagttttgcctaagtttccacggcccgtaaggacccaagagcagaaactggctgctgagaaacaggctttgcagagcctgatgggagtcctcccagatctcgtagtagaaattcttggggtgaacaaatgccggctgagctggggtctagtcctggagtcactacaacaacccctcatcaacaggcatttgatttactgccttggggacatcatcctggaattcttggatctcagtgcctctgttgaggagtctgctgctaccacctctgcctcagataccccaggcaactctaagaggatgggtgtctcctcttagctggttattcacgccttcttcccaggtcagggaagtagagttactcggccaccagagaccagtcaggaagcccgtgccctcttcaagtaggctacagctaagaaggcctaggttctcggtggctcacttctctcccacttctgctccatttgtagcaggtgacaggggtctgtgtgtcccagttgtatgcacgtttatttccctgttccttttgtgatgttgggattgttgctggtagagtagatcctgtttcctttgggaaaagaagctgtgaggtagaggaatgaaccccttttgcttctccttttgccatcctccctgagattgtttgccataatcctggccctgtgcacacatgtgcttaatccaccagcacacaagctctagatagaacaggaaaaaaa

SEQ ID NO: 248985 - DNA, 880 bp, Homo Sapiens
agcaacgtgttagcatgtgtttgatcacttataacaccctgcatgtgtaacacaaccaaagtcatcaaaattttcagaatttaaatttggaagcaccagctcagctggatatgagttaagccatacgcgatggatgaagcatgttatttttaaaacaaatgactgaagcaagaatggaaaagtaggaaagagaaaaggaaagaggggagaggcaaagagagaggtttgccaacctatagtaggctgagtagtagtaattgaagagtttgattccgaacgtaacattttactcccatgatgatgaactagaaaaaatgacacaggataccaatcacattaaagaatactgttagcagaagaagaaacaaagtacagtagttgaatatgcaaagggtgctcacatctggcctttagcacacattttagaagaaaagttgcatcaggaaaagaagcactcaagggattggctcaataagaaaaatgtatttggaagactgtgccacaggccatgctaaccattcctaagcaacccaacagaacactatgtattctgatttcttcataaatggagttgcattttaccttaggctacattattttcacaatataaaacaaacaggagcttttgttcttgttttacttctctcgcaggtgtgtctttggccaggagaagagcaagggctactgtataacatgtataacaatccatggtggccttggtggagaagcctgatgactgatatgtctatgtgtaccagatggtgacaccatcaccaaaaccaagaggccctacaggaggaaacctgggatcccacttggtagctgaaggagacagcactgacgtgaacatttgttgtttgctaaaaaggattacagccaa

SEQ ID NO: 248986 - DNA, 984 bp, Homo Sapiens
aaagaatcctaaaaagcaaatcaggcatttagcttaccaaacaagaatgccaaatcaattgtttccccaggtggttccactatggaacacttcgtaagacaggccgagcattgataagaaacatctattcgctcatggttccatgtttatatccatatttgttcctggccctcgagagctcacaaaggaacaggcaagtgaacaggcaaataccgcacagtatggaaactactactctacagagacgtgcaaaataagaaccctatatataactcaattacaacatttctcaattacactgaattctgcctgtttgtttgtatgtgagcctcaccagtgagatgatgcacgctcagaggcagaaactgtatttctttgtctttaaatccccagcatacagcacagctcttgcacatagtcaatgctaaatgaagtttgtccaaagactcaatgacttagaggccaagcggcctctgtaaaaatgaggtgagtagtgacatttccattaataactttgaggtttttatattttagaccagactattaattatagcattggaaagagaataacagactcctgattacagaactacaaagaaaagcagacagggggtggcggggggagactacactttataatcaaaataaatctgaaaatatagactaaagtctgcctctaactgggagtgtggcaacatctttttgtctctcaatttaatatctttttatttcaactgattttccttacaagtacaacagaaccatcaagtgcaaaaggagtaaaaggtgttctgcaaacaaaagcaaaggggacaaacccaaaccaccacagctcaggtgtgaggggtacttgccatgtgtcttttggaaaagaatgtccactggtggatgggaggagatgggcactatgccctccaggaacttggataccttttatgaggtcaaaaaaagccaacttttttgtacaaagttggcttttatagg

SEQ ID NO: 248987 - DNA, 928 bp, Homo Sapiens
ggctagttttgggtggcatccttactaatcctgtttggtgacataaaaacagcattctcctctaggaaaagacataagccatttcttcagcatttaggagatccagtcccttctattttacaaagccaccactgccaaagactctatctgattttgtaaggtgatgatacttttgggcaatgtcactaagctttccataaaatccttggacaagcattggtaataggatagggaaactgcaaggctgctaactctcattcctactcctgctgttattcctagctctaccgaaagtggtatcagttggatggctcatttgtgtctggtggttgcagttaaaagtataatgaaggattggttgttgggagctatattaatttcgggggctaaataaacaactgtataggttccagtccaattggctggtaaaacataagtaggaactggtcccacacgggaaaaagagtccttgtttttcaagacaaaattgttttctatggtgaacatgtgggttagcttgttgttttcactttcccaagttattaaagtccctggtaaggtggccaagggaaaatgtgaacacagctagtgggcctaccttaacggtatttagactatatatttaaagtgtccttgactagggatggtttccataaaaactgtacaggttttctaaatgatgcagcttgggtaactgcatagcttacatgatcatgtgagggtttaatctgtatggtgtagttacattggtgactttagatgtcccagggcgtgaccaaaattttggcttctctcaatacaaagtgttgcctggaattttagtgctttgcgcactgatatgtgcattgagattgggccccaaatgggtttctgaggggatgcaaccccagaaagtttgctctgataggactgggtcatgttctgtggg

SEQ ID NO: 248988 - DNA, 1096 bp, Homo Sapiens
ttgggaagtcgcgaccagagccattggagggcgcggggactgcaaccctaatcagagcccaaatggcgcagtgggaaatgctgcagaatcttgacagcccctttcaggatcagctgcaccagctttactcgcacagcctcctgcctgtggacattcgacagtacttggctgtctggattgaagaccagaactggcaggaagctgcacttgggagtgatgattccaaggctaccatgctattcttccacttcttggatcagctgaactatgagtgtggccgttgcagccaggacccagagtccttgttgctgcagcacaatttgcggaaattctgccgggacattcagcccttttcccaggatcctacccagttggctgagatgatctttaacctccttctggaagaaaaaaagaattttgatccaggctcagagggcccaattggaacaaggagagccagttctcgaaacacctgtggagagccagcaacatgagattgaatcccggatcctggatttaagggctatgatggagaagctggtaaaatccatcagccaactgaaagaccagcaggatgtcttctgcttccgatataagatccaggccaaaggtaggaagcacattgaggggctggagaaagataagtgcctgctgagaagccggagctggaagtgaacaggagaaagctccgatgagcagtagtcactgtcagacacaccccactgactacagtcctgctgccgtgcaaagctggaagtgctttgtggacggctgagctggaggtgcagctgagagacagtaaatgttgaggaaatgcatggcaaactaacagtgttttatttgagggggtgtctggtccacgcatgaccattcagaatttgcctgagggtcccacaggtgcctgtgctttgcttggtttccctttcttcctccacaaaattcctccttcctgactctgactgagaccccagtcaggaaggagaggaaagaacccctggactgactcctgtacccagcatccaggaaagacaccctctctggaaccccatcagaacaaagagcagaagattctgcaggaaactctcaatgaactgga

SEQ ID NO: 248989 - DNA, 939 bp, Homo Sapiens
  misc_feature (86)..(100): n is a, c, g, or t
  misc_feature (102)..(222): n is a, c, g, or t
  misc_feature (239)..(344): n is a, c, g, or t
  misc_feature (347)..(387): n is a, c, g, or t
ttggctctgcttatctttggtgtcttataatttctgctttttaaatattggctcgcccatccactttgttttttctccatctctcnnnnnnnnnnnnnnngnnnnnnnnnnnnnnnnnnnnnnnnnnnnnnnnnnnnnnnnnnnnnnnnnnnnnnnnnnnnnnnnnnnnnnnnnnnnnnnnnnnnnnnnnnnnnnnnnnnnnnnnnnnnnnnnnnnnnnnnnggcaccagccaccatgnnnnnnnnnnnnnnnnnnnnnnnnnnnnnnnnnnnnnnnnnnnnnnnnnnnnnnnnnnnnnnnnnnnnnnnnnnnnnnnnnnnnnnnnnnnnnnnnnnnnnnnnnngtnnnnnnnnnnnnnnnnnnnnnnnnnnnnnnnnnnnnnnnnnagcatgagccattgcgcccagccctccatctcatatttttagcctatttataggttctgcttacttatggcttcatcttcctcataagttttgcttgcttatgaccctcttgacctcacctctgcattgtgttggcttgctgtgtatcctttcagcttcagtttcctttgcgaactgtgattacttttaatagctcgattccaattcctgagaagacaaatttactaggcctgttgtatcccagtttagttaagatatttatatacccacagcaacagtttgtggatcttcacttttgttttctgccattaatatgatgattaccctgttttgctgcttttactttgcttgtttcttatagcttagcttataaagtatccattaaccactgactgttggacttctctctctttgtttccaggactgcaattgcaaatgcctgtaggatccagatgccataaatgtataagatggttctggtgttttcttcttttcttgaaacactgtcttgtgtgtgtgaaggggggtgatcttttgttcagtcatttttga

SEQ ID NO: 248990 - DNA, 593 bp, Homo Sapiens
cattgccgttattatgtgtcggtataataggtggaaatggtatctcattggaattttaaattctgtttctcttgatatgtgcaaggatggtcttctcctctcacacttccagcactaaagttttccagcccttcttgcaaaacataaaacaaagaattcaatctgtctttgcttacttacaatagttaagaaaattggaaataatatttgtcttgttttccaaatatgactctaatattaaacttacttttccagatggaacatgcctagcttaccccacaatccaggcatgccccagtccacctcctccacgagagactgatacaccaggtctctgtgctttcctgaaatcagaagcagctgatgcagcagtggattttgtaaacgtcacaggcaggacttggtactaggaacccatgaaggttgccttcatgaacagctatcactgagaatatgttcatggcaacccctagaagcttttgttttaggctatttcttcttgtctcttctggaataacccaagtatgagcactccgatgttatagtccagggagggactttgcaggatcatctagaccatcaccctgctgctc

SEQ ID NO: 248991 - DNA, 881 bp, Homo Sapiens
ttgggagttaatgtatttatttgactttagtactcactaaattattacttttgtccatggagaggaaaggttatgagaaatgtaaatagggactatgatatttgaattagaatacccaaatagagcctttttatttatcattcacttcatttcctgtctgttggtcctccagcaattctcagtgaaggagttctacctgaagatcatcccctggcgcctttacaccttccgagtgtgtccaggaacaaaaattaatttctttgtttttctttaccagttttcataccttggtcctgaccctgtccataagctgctcacactggtggtggatgatggcattcaacctcctgtggagctcagctgtaaggagaggaacattctagcagccacttttatccgctccctgcataagaacataggaggctctgagacctttcaggacaaggtgaactttttccagcgagagcttcggcaggtacatatgaaaagaccacattccaaagtcaccctgaaggtcagcagacatgccttgttggaatcgtctctgaaagccactcggaatttctccatctcagattggagcaagaactttgaggttgttttccaggatgaagaagctctggactggggagggcctcgccgggaatggtttgagctaatctgcaaagcactatttgataccaccaatcagctcttcacccggttcagtgacaacaaccaagcattagtgcatcccaaccctaatcgccccgctcatctgcgcctgaaaatgtatgagtttgcgggacggctcgtgggcaagtgtctctatgagtcctctctaggaggagcctacaagcagttggtccgagctcgcttcacccgctctttcctggcccaaa

SEQ ID NO: 248992 - DNA, 882 bp, Homo Sapiens
taaaactctggacaaatttttagctgacacagatatagtaggcactattctgaaacaattattttctcaagtaatttttctttcaattataatgtagaactgttaagaccaattaactaataattgtgaacagttgataaggaaacaaaaaaagtataaatgtccagatttgttcatgaatatacaaactaaatacttacaaggtatgaactttaaataggagagatttttgtcctaaaactgtgatctagtccttgagtaagagtataaatttataattattttaatggcaaaaattttaaaggtattgttttctgcggtttaaaataaggtgtaactaaagctaaatatgctttaaatatccttgaataactttgagatgttatatagtggtaaaccctggtccagtagtcagtaatctgtataaaatatttcagagcatatatcttctccaattccacacagcacagaaaccaacaaagcagagagagcaaaaggaaaacatgttttcttcagcagagactatttcattatgaaacactcattgtaagagctattgccagtagaaaaagtatgttgccatgccttctgatttaagggattcagaggtttcactgttatcatgacaaccttttgaaatgtcagggctttgagctcaagtagtaagtcaatgaccatgacaatagtgtggactgtgaatgtgcccaagtccttgaatcctacagaccttgctaatggctccgttcacgacacccaactggtcctgaactcttaggattaacccgtttgcttatggctgaggaacttggggtctacaggacaggtggctcctccaagtcttaagtctcatgaaaggcagaaccagaaggaagatccagccaa

SEQ ID NO: 248993 - DNA, 1102 bp, Homo Sapiens
  misc_feature (267)..(290): n is a, c, g, or t
  misc_feature (598)..(667): n is a, c, g, or t
tcccttaccctcagaattgtttacacttttatttgcaaatgaatcgttctgctgccttcctcccgccaccaaacccacacccttgcgtagattgcactttgaggcctctttggtgatggttttagctgttagagctcttcacagccatccaggctcaaactaaacttcagatttaacgggttttctgtgttagaaatcttggaattgtaggagttggaacgctgcagccaccctcccccgatgccccaaacagcagttcaagggggnnnnnnnnnnnnnnnnnnnnnnnncaacaactttgaatcctttctgcagttaaagccttaaacatttcagaagtccacattatacatttttctgtatttgtgactgcataaagagacactgttgaggtcagtacaactttatgccaagaatctaaaaacgctgtgagtgtaaatttactgcttatgttcggaaatacaccgccaagattgtcataatactaagtttaaaccagcagctttctgcccaactctatttttaaaagtagttgattctattttgggtggagatcaggggctttggtgttaagtagacctgagttccatttgtggtnnnnnnnnnnnnnnnnnnnnnnnnnnnnnnnnnnnnnnnnnnnnnnnnnnnnnnnnnnnnnnnnnnnnnncctgccttgcagagatgtgaagattagatggtatgtatttacttggtggtcagtaaatggaatcgattatttaaacaatggattcctttgagtggagatacagtgttacgttttacttatctcatttaatcttaagttttgtacatctttagttttttaagaaacagcctttttgggattttggtacaaaattatttgatttcagaatatttatatgtgggtgtatgctgtgtgattaacttcttaaaagtacaggagatctcagttatacatgagaaacttttcagtgtcctcagaagtaattgacaataccctgtggactgacagtactaatagaatctaatttctcttgaatatttctttactgcttaatgtgcattataagttgaaggtgaaagttaaaatggagtttgtttgatgatttcagacaactac

SEQ ID NO: 248994 - DNA, 901 bp, Homo Sapiens
ttggcaaggtttcttttggggtggtcgggagggagagattctagggaacaaggaagctcgctatggctttcttgccaggaggggtcgaagggaaagtacaagggagctgaccctgggtagaacgggtgaagggatgggggagcgtgaggttccgccctctcttgagactggaaccaattgagggactagtagggcagggggacagaaattgggctcctagtggatttgggtccgtttccgttgggacgttttgggtgtgagaacttaagagctcagttgaccggggatagcctgtgccggagttgatctgcagcttccagcactcgtagtcgggaagaggagcttcagcagcgctgttgtcccacagtaggtcttctgtccgcacccgctctgcgctgcaccctcttaacgctgttcccaggagctggggaaagggatgcttttgcccactcccatggcccctggaactggtggaaacctttcctctaaccagaaagcctcgatatccttaattcaccaaggatccttggcgtggagtcttcctcccttctcccaagtctttctccgtgaacttttcctcctggactttgctaaagcagaacctcccagctctttgctgtctccggttgtctcttccctgtattcatggcaacatcagctgacagccccagttcacccctcggggcggaggcatctcgtgagtgattcatcagaaccccctgggctcaaccaagtgtcgtctgaagtgacctcccagctctatgcttctttgcgcctcagccggcaggcggaggccacggcccgagcccagctgtatttaccctccacctccccgcctcatgaagggttagacggcttcgcccaagaattgagtcgaagcttgtcagtcggattggaaaag

SEQ ID NO: 248995 - DNA, 920 bp, Homo Sapiens
ttggcaaaatccacatgtgataacctatgtttggggtgggggctggtcacatgattccttgtcatgaaggctgctcttcactcttttgtacttgtgattaaaatctcacactaagtttactatttaacttaatcctttttctcaaattaaacctttttttatactgtcataccccaaacattgtcactttttaatgtaccagtctgctagaaatctacaaggatgatcccactatctttagtatgtaaggattacaccttagatatagaatagaatttgagactgccacacatttattcaggccttgttactttaagaaatatcttattttttccaccccaaaggagcaagtgaaccaattattgctgacataataggttcccttcctccataaaaggattatcagctatgatcattaacattaaaccaaatagatggagccaaaaagagataaaagtagcttcttaggccctattaaatcagggaaagactagaagaaaatttacattgcttctcttttttaatggccagcggggtatgtgtgtgatgtatactcagagtggttttttggaaaattaaactgtagctatagatgatgctttggttttcttaatctcaagaaaagagaagcaatggaaatacagaatgattaactggggaagaggacttttgtaagtgtgactagaacaatggtaatgtatgggccaatgggaagatttatgagtcagattatttttgaaaactatttttaaaagcaagaagactacactttccctaccaaaacagaagtaacatggacacacttaagttttggctcaataaatatcaatgttatttaacttagatcattgaaagaatactcatgtaaagataatgtttattatcatgctcttaacagtcattatctttaattttttaaa

SEQ ID NO: 248996 - DNA, 897 bp, Homo Sapiens
ttggctcagaagaagaaagactgttttcaagtcagcctatacaaatatatctttgatgccatggtacaaggaaaagtgacccctgctagcctaatccaccacacaaagttgtgtctagaaaagccactggggccatcagtgctgaggcatgcccagcagggaggcttctctgtgaagtctttgggtgacctcatggaacttgtcttcttgtctctaacactgtcagacctcccagttattgatatcttgaagattgagtatatccaccaagagactgccactgtgctgggtactgagattgtagccttcaaagagaaggaggtgagagccaaggtgcagcattatatggcctactggatgggccaccgagagccccagggagttgacgtggaggaggcttggaagtgccggacgtgtacctatgcagacatttgtgagtggagaaagggcagtggagtgctcagctctacactggcgccccaagtcaaaaaagccaaatgaatagaaggtatgctttcaagaatgttgatccttcctgctcctgttgtacctaagcaaaagaggaccagtctctgagcttggcttttatggagagtgttcttattttggttcttttttttatttccacaacctctaaccacattcagtccaggaccaatgctcagggatgagtgggagagatgggttatactgtccctggagcttcatcatgattgcctgagaagacagatgctcatcatggctggaatgaaggtatccttctagtaaacttttgctttcctaagaaaattcttcagtttctgataagtcatccctatttttatcttgatcaaggcttttctacagttacctaaataaaatgaaatggctgtccaggatattttatacatatcggcg

SEQ ID NO: 248997 - DNA, 890 bp, Homo Sapiens
ggatcagttggtcagtgggtggcctcagcatcggaggggcaatgacagtcttggggaggcatctggctctcagcctggggcctcctgcccactgtctttgcagcagggaccccatgactatagggggctgcagtcagtcaggccatgcttagctttccctggaacccaggcccagagagcttagtgtttctttggatggctcaagtcttttgctctgaagacaggagacagaagtgaggacctaagcctgcaggtgcaatgatggggcagagggcaggccccactctcttctgctcctggggaaaaggtgtgcaaaagcagaggtcctgttctatgctgctggtgaaataatacaaaacatctcacagaataagaaaggaggacagacgtggggggtggagagagaaagggagggcaagggagaagggaagagagaaacctacagaaaggaagaaacagagcaacaggaattagaaaagaaagaggaactgagaaagagggagccaacacagacaggaagagagctggctgtaggaagcgggagagagggcacagggagccagaggccgtgggtgtcatgtgtctgagggcgatcgtgggactctgctgctccaggccgggtgctcaagggctggtcaatggaaaagtcatgtgggtgggcccctccagtgctggccccattggagtctgcagggaggcctgggtgccgccgttagtacatgtccttgtagatctcctggagcagagggtgcagcgaggtctcggtttcggtcttcttgatccgctgcgtcatctgggcgtgctcggtgcccagttgccgcaggtcagccatcttctgcagcagcttggggaagaggtactgggcatcagggtggttggcctgcagccaa

SEQ ID NO: 248998 - DNA, 886 bp, Homo Sapiens
  misc_feature (409)..(428): n is a, c, g, or t
aagttgggggaggagagaataagcagatatagggccctttaaatcaccatctgctttactgttcagaggttaattatccaccagaaaattctccctagaaatttagggtcagttttaccaaaccaccaagccagatcgccaggggtgttggacaacgttatcataaactggtgagggtcacaaggtggtgaatgtgtatatgttgttgtatgcctatatgtctgatcatattccattggaaatattcatagtgtttggttactaattattgtgtgtctctggcattacttgtactttccatgagcaaagtaagtgaatgttttctgtaaacacataccatagaacttaagacaggcatacaaataagtcatatttttcttcttcaaaaatctggaattctttacaaagnnnnnnnnnnnnnnnnnnnnctaaaactcctgtccatgctgcttgttctagaaagggatattggcacatacacacagccctgcttttcccattccaggtggacaatatctgacagtgtcggcagccaaagccccagggggaaaagctgcacgcttggtgctacctctcggccgcctcatgcattcaggggacctgtgcctgtcattcaggcacaaggtgacggggctgcactctggcacactccaggtgtttgtgagaaaacacggtgcccacggagcagccctgtggggaagaaatggtggccatggctggaggcaaacacagatcaccttgcgaggggctgacatcaagagcgtaagtagatccacaaaggaggcaggacctgggacgttttcctttcataggagaactctgggatctgaatttgaagaagccttgctgtgtgaattcagctcagataaaggtttggggttttttc

SEQ ID NO: 248999 - DNA, 813 bp, Homo Sapiens
ctcctcccatcaggaccctgggatgcagccaccagcgggggcagcacagggccagggtggctggggcttacctgggcgcggcgtccgcggttcacataggtgcacatggggttgtaggcacctgtcccgcacacatacaggtgtgttcggttccagggctggatgagcctgacgaagttcccacactcgccctggggccacagggaaggctgcataggtgccctggccaggcctgccccctcactgggggcagtaccttcccacctgtggattcccccttcccacctgtggatcccaccaaactcacgttgacatccttgcctgagagcacgcattcctcgatgcgctgtggggaggctgcccagtgtatctgcagagaggggggtcagaaggtgcagccttctggacatgccctgagccctggggctccgtgcccaccccacgtcccacatcagggccagcccttacaatgaggggctcgcggttgatgtcgtgcaggtccagggacagcacgtagtccttgctgcccacgtacatgcggtcgtggtcctcgtccttgagcaagattcggtagtcggttgtgttgagcaggaagttgaagaagtgggcggtgcctgtggccttcagctctttgaatgagagccggacccggggcgtggccgggaggtggtcctgggtggggaaggatggccaggccccggtcagtagggaagcccagagaagaagaccggcgacaagcattgtgggaggggcctagggcccaggaagcaggctccactctctagaaacctcttccgcagcggcgggcctgta

SEQ ID NO: 249000 - DNA, 1094 bp, Homo Sapiens
ttgggacgaaagcctcagtaaggttcaggaagcagagtccccagtatttaaagagctaccaggtgccaaggctaatgatgacagcaccatcccgctcacgggagcagcaggggagacactggggacctcggaaggcacttctgcgggcagccaccctcgggctgcatacggaagagcactgtccatgacccatggctctgtgaaatcgcccatctccaacggcaccttcggcttcgacggccacaccaggagcgacggtcatgtgtaccacaccgtgcacaaagactcggggctctacaaagatctgctgcacaaaatccacatcgacaggggccccgaggagaagccagcccaggaaagcaactaccggctgctgcgccgaaacaacagttacacctgctacaccgcagccatttgtgggctgccagtgcacgccacctttcgagctgcggactcatcggccccagaggacagtgagaagctggtgggcgacaccgtgtcctactccaagaagaggctgcgctacgacagctactcgagctactgtaacgcggtggcagaggcggagatcgaggcggaggagggcggcgtggagatgaagctggcgtcggagctggccgaccctgaccagccgcgagaggaccctgcagaggaggagaaggaggagaaggacgcacccgaggttcacctcctgttccatttcctgcaggtcctcaccgcctgtttcgggtcctttgctcacggcggcaatgacgtgagtaatgccatcggtcccctggtagccttgtggctgatttacaaacaaggcggggtaacgcaagaagcagctacacccgtctggctgctgttttatggaggagtatggaatctgcacaggcctctgggtctgggggagaagagtgatccagaccatggggaaggacctcactcccatcacgccgtccagcggcttcacgatcgagctggcctcagccttcacagtggtgatcgcctccaacatcgggcttccagtcagcaccacgcactgtaaggtgggctcggtggtgccgtgggctggatccgctcccgcaaggcagtggaccgaaggcggtacc

SEQ ID NO: 249001 - DNA, 1113 bp, Homo Sapiens
  misc_feature (725)..(733): n is a, c, g, or t
atgtgggactttggtggaactgcctgggagaacttcataattactaccctgtatgtcatgccctttgcaggtaaaacagaagtggcagagcagaggtcaaaggcacagatcagcaaagggaatcttactggatttgagactagcctggaaggggtgtcatttgtcactgggaatagaggtgcacggcctggtggaccctccgagagagcttaagattcatttttaaaccagaggatttaaaagacacaataggcattggaatcgggtagtaagaagagaaaaccagagccccaagtgaggaagtgggtgatctgtcctcacacagttggtgggggagctgggcctccccactgactggactctcaggtccttaggaggtgctctgtcctgcacaccccaaatgaccacctaaattcaggcctgaagcagtaagaagtaccctgcctccaggtcttagcaataattctccccacatcagatgccaagtcgttttcttccccttataccagggaaggtgtaattggcaaatgagaaatgtgtatttatatgtttcctcttacacacacagatggctgaagatttttaatttgtatctctcaccagcagttttgcagatggctcagtatcactcactctcagctcttagatgtaccaaactcagctcctataatttcttaaaatttgtgatctagacatcaaacatataggagctattttaagtaatnnnnnnnnntgcaaaggtgattttcccagacaacctgcatgtggtgaaactctaagatgtaaagctacaggctgtccttggcctccatcttgaagatgcggctgtgctgccacacacctctgaattctaagccctctcacaaaatggctttcctaatactgcatgtgtcacaaccagataagcacggtggctttcccacctcacctccagctacttccaagggcccgttctttttccggagttccaggacagcttccacaaactccttgccacctttcttctccagcgtgtttcctagacaaggacagggtggggtcaggttgccattctgtgtctccggcacacacagacacttagcatgtcaggtgattacatacttcaaatgccaa

SEQ ID NO: 249002 - DNA, 1130 bp, Homo Sapiens
  misc_feature (547)..(598): n is a, c, g, or t
  misc_feature (938)..(938): n is a, c, g, or t
  misc_feature (955)..(955): n is a, c, g, or t
  misc_feature (966)..(966): n is a, c, g, or t
  misc_feature (991)..(991): n is a, c, g, or t
  misc_feature (993)..(994): n is a, c, g, or t
  misc_feature (999)..(1000): n is a, c, g, or t
  misc_feature (1038)..(1038): n is a, c, g, or t
  misc_feature (1041)..(1041): n is a, c, g, or t
  misc_feature (1048)..(1049): n is a, c, g, or t
  misc_feature (1056)..(1056): n is a, c, g, or t
  misc_feature (1058)..(1058): n is a, c, g, or t
  misc_feature (1060)..(1060): n is a, c, g, or t
ttggccctctgcggctgctcaccagcagcagctgtatggccgtagcccatcggcagttgccatgcaggctggccctcgcgcactggctgttcagcgtggcatgaacatgggggttaatctgatgcctactcccgcctataatgtcaattccatgaatatgaacaccttgaatgccatgaacagctatcgaatgacacagcccatgatgaacagcagttaccatagtaaccctgcctacatgaaccagacagcacagtatcctatgcagatgcagatgggaatgatggggagccaggcctgtacccagcagcctatgcagcctaaccctcatgggaacatgatgtacacaggcccctcccatcacagctacatgaacgctgctggcgtgcccaagcagtcactctaatggaccttacatgagaagatgagcaagatgaacttgcaatcaataacttaaatatatataaataaaggaaccttttatactgacaaaccagagaaatgtggacctttttccagttaaaatattgctgtagatttagaggannnnnnnnnnnnnnnnnnnnnnnnnnnnnnnnnnnnnnnnnnnnnnnnnnnngggttcattttgttctgggttttggttttcttcacaatcttgaacattttacagtagaactcatctaaaaatggatttggggatggggaaacatgcacaaaatcttttcataattaaaaagagccttactttctttacataccacatggacagaatttgtgtaaaagtgaattatctttattttaaaatgtatgtttcccctcactgtttgcagctcccaatgttgtcatttttaaatgttatatacatctcaagggttaaccagaccctttcctccaaacccaacctttcatttcctacttcattccagcaggaggcacttaggggagactcggatggngacatggagaacaaccncagctccttanacttattattattggtaaatatatnanntatanntataataaagtgaggcaggaaaatgcttctccttttanaantccctcnnactctcnananacacacctttctgaaacccttccccaagaaatgttccttataacacgaactccattgaaatctttggtgg

SEQ ID NO: 249003 - DNA, 1162 bp, Homo Sapiens
ttggtcggctgtgggaactctgtggaagtggctagccttgcacatcctctgatcatgttgacttcatcagggtgcgagaagcacttgagcttggcgtcggtgagttccctaagcctcttttgcgtgtgttgcagctcatgccagttactatgggagaatgaatgtgagagaggttctcagagaggatggccacctcagtgtaaatggggaagcgctgtgtaagtatggcttcgttttcctgtgggcgtcggtcgtggagttggtcccacacgctgtcatgttgggtactagcagtagagaatgaacggcccgtgtgacatggtggtcctcactgatgacgacgggctgttggagctgctgcttaagccctcatcacagaagctcatagccaccagatcgcatttgctttgattgttgactgtctcgtgtgtaattgagtttcccagtttctacagactgccattgctatgcacggctgagatggacagagtttgcttgtgaatccgccacactcactgcctgtcaccacacctgcaggcgacgactgtaagggcaagaggcacctcgacgcgcacacagccgcccactcgcagtcgccacggctgcccggtcgggcagggaccctctggcacatctgggcatgtgcaggttacttcttgctgcagattctgcgcaggatcggagctgtgggccaggctgtgtccaggacggcgtggtcggccctttggctggtccgtggttgctccagggaaggcagcctctggagtgttctggtgatctggggattggatggtaccagtttgttactttgatttcttggctgaatgtgtttcttcttaccaggtgccttcgaaacatctgcaagtttttagtcttgctcatcccactcttccttttactagcaggtctctccttacggggccagggcaatttcttttcgttcttgcccgtgttgaactgggcaagcatgcatagaacacagcgggtggatgacccccaggacgtgtttaaacccacgacttctcgcctgaagcagcctctgcagggtgacagtgaggcttttccgtggcattggatgagtggcgtggagcagcaatggcctctctgtctggacagtgccaccaccatggtgagaatctccgagagctgaccactttgctac

SEQ ID NO: 249004 - DNA, 1059 bp, Homo Sapiens
acccgcggcaaccccggcaacccagggctcggcgtcgctgccaccatgacgggaagcaatatgtcggacgccttggccaacgccgtgtgccagcgctgccaggcccgcttctcccccgccgagcgcattgtcaacagcaatggggagctgtaccatgagcactgcttcgtgtgtgcccagtgcttccggcccttccccgaggggctcttctatgagtttgaaggccggaagtactgcgaacacgacttccaaatgctgtttgctccgtgctgtggatcctgcggtgagttcatcattggccgcgtcatcaaggccatgaacaacaactggcacccgggctgcttccgctgcgagctgtgtgatgtggagctggctgacctgggctttgtgaagaatgccggcaggcatctctgccggccttgccacaaccgtgagaaggccaaaggcctgggcaagtacatctgccagcggtgccacctggtcatcgacgagcagcccctcatgttcaggagcgacgcctaccaccctgaccacttcaactgcacccactgtgggaaggagctgacagccgaggcccgcgagctgaagggtgagctctactgcctgccctgccatgacaagatgggcgtccccatctgcggggcctgccgccggcccatcgagggccgagtggtcaacgcgctgggcaagcagtggcacgtggagcactttgtctgtgccaagtgtgagaagccattcctggggcaccggcactatgagaagaagggcctggcctactgcgagactcactacaaccagctcttcggggacgtctgctacaactgcagccatgtgattgaaggcgatgtggtgtcggccctcaacaaggcctggtgtgtgagctgcttctcctgctccacctgcaacagcaagctcaccctagaagaacaagtttgtgagagttcgacatgaagcccgtgtgtaagaggtgctacgagcaagttcccgctggcagctgcaagaagcggctagaagaagactgtcggagctagacctacccgcaatggcccagcaccaagg

SEQ ID NO: 249005 - DNA, 1040 bp, Homo Sapiens
  misc_feature (264)..(273): n is a, c, g, or t
  misc_feature (384)..(412): n is a, c, g, or t
ttggctgttagtccagaaaggatacggatagatagcctgtctgactgaacagccagatggcccccagcctatgggggatctggcctctgccagggacctctgagtagctctgaggtggcactgtccagccctggatagggggggcagtgggccagctaccgtaagcaaaggctgttttttactgagagaatttctaaagtaggctcatcactttttttaaatatcattttgggaagggaagacagggttaaggaactttatttnnnnnnnnnntatttttttcctaaaaactataaaagaggaagggtttcttgtcccgggaagcaacggacataatctgttcccagccatggccttccagcttgtgtccctgattcagggagnnnnnnnnnnnnnnnnnnnnnnnnnnnnnggaggtgggttcccagagcctgccagtggaggcttatctgttgggaggaagacagctcttcacagaagcaaagaacaaaatggcatggagatcagctgcctgagcacctgcgctgtagcttatctgacaacgctgaggccacgagctcctgggtagctgtgatcagggacatgataatctgagctatgcagaggagcacatctgttgtcaactgctgtacccagaaatctagaactctgccgacagcctctcctggtgagtcgggactcagctgaggacacatccccatcctgcctcccatctggccctttggacaactggccctttgtgacagggctgactcaagtgttaggcagggtctcaggcctttgattgctcacccctgctccccaggccctgccctcacttttaccaaaggttctccctcggcgggagggcatctgtgttggaggtgatttgtctgggttcttccttttggttccagaaggaactgtcagtcatcagcatctgcgttgttagcagtcagtaccacccccgccccacaatgacagtaaggctgacttgttgactgaagccttttcccagaccccttatttcgaatccccaagcttcagtccctcttggggcc

SEQ ID NO: 249006 - DNA, 1084 bp, Homo Sapiens
aaaaagttggcaaataatgtgtcgggaaagaaaaatgcattatataataacaaggtaaacattcacaaagactttcgttttacaaagaatcatgacagacttaatcctgcttaacaactgaattttgtttctcaaccattaaaaaatatttgtggacataggagatgcaaatcatttagatgtgcttatgtgtatcaccattatgtctgaatgtatctgccacgattttaagaggcattatttctagcacattacaaccaatcttcattctctatcttcccaaaagtagagggatacaatgggcagtccatttttcaggaatttttcttagatttgtgattttgatttcctaggtacagagccagatggactccttcggacaaactacagttctgtgttaacaaatgttggtgctgctctgcatggatttcatgacgttatgaaagatatttccaaacattatagtcaaaaagctgcaatagagcatgaacttccaacagcaacacagaagctgataacaactaatgactgtatcctgtcatcagtagtggcattaacaaatggagcaggaaagattgcatccttcttcagcaacaatttggactacttcattgcttcactgagctatggacctaaggcagcgagtggattcattagtcctctttcagctgaatgcatgctacagtataagaaaaaagctgctgcctatatgaagtctttgagaaagcccctcttggagtctgtgccttatgaagaagcactggctaaaccgccgcatccttctcagctctactgaaagtcgagaaggccttgcacagcaagttcaacagagtttggaaaagatttctaaactggagcaggaaaaagaacattggatgttggaagcactaattagccaaaatcaagctagagaaagaaaacctagcgaattgcagataagctgaagtatacaggtagtgcccagctggttggtctggcccaggaaaatgctgctgtgtcaaatactgctggccaggatgaagccacagctaagctgtgttggagcccattcagagcaccagtctaattgggactttaaccagga

SEQ ID NO: 249007 - DNA, 911 bp, Homo Sapiens
ttggagaaggatggggatctccacaagccactgcaatggttttgaacaatctgatgtatatgacagcaaagtatggcgatgaactggcctggtcggaggtggagaatgtgtggaccacacttgcagatggctggcccaaaaacctgaaaataattttgcactttttgatcagcatttgtggggtgaatagcgaaccaagcctcttgccttacgtgaagaaggtccttgtatatttaggtagagattaaaccatgccgttgctagaagagctggtgagtgagcttcagctgaccgatcctgtccgttccggggtcactcacctggattatccccccgtattatcgcatcacttcccagctattaaatcccttctgtcacctcaggaactacttccagtagcaatacaatggtagctcccacagatggcaatcctgataataagcccattaaagagaatattgaagagagctatgtgcacctggacatttacagtggactaaacagtcatttgaatcggcaacatcacagactagaatcccgatacagtagcagctctggaggatcttatgaagaagaaaaaagtgattcaatgccactttattctaattggcgactgaaagtgatggagcataaccaaggagagccactgcccttcccaccagctggaggctgctggtcaccactggtggattacgtgcctgaaacgtcatcacctggattacctcttcacaggtgtaacatagcagtgatccttttgactgatctcatcattgatcatagtgtgaaagtggaatggggaagctacctccatcttcttcttcatgcaatttttatagggtttgaccactgccaccctgagtgtatgaacatttgtaaacgcctgcttctgcacttattaatagtaattggga

SEQ ID NO: 249008 - DNA, 933 bp, Homo Sapiens
  misc_feature (278)..(339): n is a, c, g, or t
  misc_feature (426)..(497): n is a, c, g, or t
ccaactttgtacaaaaaagttgggtttgtgtcagtatcatattgtttatgttactgtagcttttaactgtaggttgtattgatatctttgaaaaatgaaatttttgacccctgagcaagaatatattgaagagtgtgtttcatattcacatatttttgaatttgccagtttgacttttgctttttaatttctagttttattcaggttttattagaaaacaacccagtgcataattttagtgtttttaaattgatttgttgttgttttgagacaggatnnnnnnnnnnnnnnnnnnnnnnnnnnnnnnnnnnnnnnnnnnnnnnnnnnnnnnnnnnnnnntgggctcaagtgattgttctttcacctcagttttttgagtaggtgggactgtagacatgcactaccatgtaaggctaattgtttgcnnnnnnnnnnnnnnnnnnnnnnnnnnnnnnnnnnnnnnnnnnnnnnnnnnnnnnnnnnnnnnnnnnnnnnnnaagtgttaggattataggcaagagccatggcacccaatcagtatttttgaatttaataaaacttgttatgtgtcctaacagaatataccaggtgcaaataagaatattttgtattatcttggttttgactggagagttttgtgtgtgtctgtgaagcctagttggtctataatatggtttggatatccatgttctccgaacctcatgctgcagtataaatccttaatgttggatgtaggacctggtgggacatgtttgggtcacaggggcaaatttctcatgaatggctggtacattttcttggtaacctaaaagtttatgctctattgattcaaatgagagtaggttccttaaaagaacctggctccttcacctcacactggctctgtctcttaccatataatacatccagttactctgtattttcaccatgtct

SEQ ID NO: 249009 - DNA, 880 bp, Homo Sapiens
ctgttagacatttagatgattttactctaggcagttatatgtccatttaggtcattggatcacagtgactctggttccgtttccgatggcatacgtgctcagacataaaaatctcaatttcccccccaaacaacttaccattgtactccttcctcactttgttcagaaagtgggcaattctattcatactgacatgtcctctttgtaagacattttttaactcttaaaaatgttaaactatgtagataccttttaccagttgggtttcatttgcatagcagtatttagctaatttagtttctgatcagaaggctatttgggaagttcacatgacaggtgagtggtaagatggtccagaataggaatagataggaagcctttgtaaaggtcacaagaaaattttggatgaaagcataatactgagccgtgatgataaattggcatatgttggggaacacatccctaaatacataatttatagcaatgatcatcttggcatttctgctgaaaatagactactggactgacaagatcatgatgacacctcccggtagtttcttgtgttatcctgaggaggtggggtggaagaactaatgcctaatgccaagctgctatgtatgggcttcagagggaaccaacgccagtgaagaatcagggggtgtcctggggctgaaaatggaataactattaatagaatcacttggggaaagtagagggaaaggtatggagaggaagagtgatttggtggtgtccttatattaaattcaggttgaaagtgaattactcgaggaaatcaagggctgaagatacagggaagccaaaagtgcagcaggcctagagcaccttgctgaacgatggtcattgcagaggaccaacccaa

SEQ ID NO: 249010 - DNA, 1448 bp, Homo Sapiens
  misc_feature (639)..(706): n is a, c, g, or t
  misc_feature (1405)..(1405): n is a, c, g, or t
ttggctcaattaaaggcagctccatcttccatttgttcaaggcagaaatctctcagtcatccttgagtatttttttctcatactccaatccaataatgtcaggagctctaccttcagagtatcgtgtgtgccacatcttagcacctccactgccaccagcccctctgctcatctcttccttgcagtagccttctaactggtctctgctgccagtcttgtctctggagtctgttctcagatccgccaccagggaggctctgtcaaggcatttaagtcaaatacttttctcagaactccacagtggcttctcacgtcaccaggaataaaagccaaagattgtaaaacggccacaggcttcgtaagacatggagcctgtgtgacttgatgttgggcccaaccctgtttcttttctggcttcatttcttgctccttttctttcagacactggtcttttcaccattcctcaggcctgccaggcaccatcactatccttgggtctttacccaaatgttactttatgaccctcatatgtacaattgcatctcaagtttgtattctccacatttctctgctgctttctctctttccataataccatctgacataggtgtatcattgtcagccttccttcctagatgnnnnnnnnnnnnnnnnnnnnnnnnnnnnnnnnnnnnnnnnnnnnnnnnnnnnnnnnnnnnnnnnnnnnaaagtcgtcagtaaacatttacagaattcattttattatgaaagaaattttaattttgctcttaggttcatctctaacaagtatttagtgaaacgacagagcagagactatgatgtggaatggggctatgcttttgatgtgcatctcaatgctttttatccactcctggtcattttgcattttatccagctttttttcatcaaccgtaagtggctgttcttttgatgtattatctcaattctttttatgcattcattggtcattttgccttttgttctgctttttttcatggccgatgttatcctgacagacacatttattggatatttagttggaaataccttatggttggttgcagttggctattatatctatgtaactttcctgggatacagtgcattgccatttttgaaaaatacagtaattcttctgtatccatttgcacctctgattctgctctacgggctttccctggcactgggatggaacttcacccatactctctgttctttctataagtacagagtgaaataaaaagtgagaagaagattcaatcgtaactgtgtcaacagtattgtgaagtgatcatttcttgtaaaacttgtaaataaactatcatctttgtagatatcttaaaggtgtaaagtttgcaaatttgaagaaatatatattaacactgtggtcaggtacattccttanaactaattaaatgtacatttctataataaatattttttaagca

SEQ ID NO: 249011 - DNA, 860 bp, Homo Sapiens
  misc_feature (253)..(293): n is a, c, g, or t
taacagtagtgcagggcgctaagatatgtagttatttgagaattgtgaaacagatagttatatgtatacaagtcaaagaacaacttaactattgctgcaacaggtttttcttaatggttatcctcttaaatacacctgctggtacttggtgtggttaaataggaaaattgttattaaataaagaatttgtatgaacctttgccaatgtttttgacacgttttactaattattgttcctgaattatgtttctgnnnnnnnnnnnnnnnnnnnnnnnnnnnnnnnnnnnnnnnnncaaaacattcatttattgtaatgtttactagcggactagtaaacaataaaacattgattatttagctttataattcaggtttagtgctattgtcattgaacactggtattttctgtatcatataaaacattaaaattcaaataattataagcatttggcaaaaacaagagaaaagaaacttgccatattttacaagctgcaattttagaaaagctttaacttaatgatagttttatcattgttttcttgtcccaaacttatccagggccatagaagtatgaatctaattaaaacagaaatgggaattattgcacagaaatgggaaataactaattttaaatcagtcaaattggcttcttattaaatacaataattcttatgaaaatcatagtaccctattttcagacacagctgccagtttacacatttctcagtatcctgaaaggaaaaaagtatagccccacttatactatgtaaaattaccaataaaatatgtttatgactacagattttgcatttttgtttacaactatttaaagagttttatgttgtatttagaatttcaac

SEQ ID NO: 249012 - DNA, 917 bp, Homo Sapiens
tgatagtcctctgttaaagaagtcagtagctgttgtacttcatgcagatgccacttttctgttatgtacatttgacatacatttccactcccaaagtattcctctttctaaatcattttcgtactggtatgctaaagacattctcatattggcatcttaattgctacctgaatttactagcaactttaagacccaatctgaaagttaaaaacatcataggcccaagtttcagactgtttctgagtgaatctctttagtccttctcagtgttcatggtgttaatgaaagctttagttattttctacttacgttgctagcctttgtttcctcttgtactgacctccatcctcccaatatctgtagactggattgtcttctgatttttagttctgtatgtttctcttgcattaatcaccccatttgagtaattaaagtgtgaggatgctagtgtgtctttagcactgctgattctgcttaacattccatactgtttctattccatattctattctctatagtattacattccactgtctgtatttatgagaacatttgaccatattccagtacattatttttaaaaatgacttctgtttttccccacttttatccacttattcttgtcttcaggtactattattgcttcctccctcattgatattgtctttaaagttcttatagccttcctctttgttactgctactttaagatgggatcttaaatcattttcctgatgttcttgtcgcttgcagctaaagcttctaaccttttgcacatcatagcagtatacagagaaactattaatgtttatacagcacactagatatgtggttgagtgtgttcacactgcaggtggctatctctgggtctcctcgcagcttcagaccctgcctggctgcacaagaccagaacaccaa

SEQ ID NO: 249013 - DNA, 651 bp, Homo Sapiens
cagtggctgtatcctcttggggtctccacagagctcattggcctgtgcatctgtttcttctgtagcagtggctgtatcttcttggggtctccaccgcagaatagcactgctgtcactcctgcagtgctgtgggaggagtcagagattatgcagaaggaattgaagttgctgcagtaccagttgagccagcaccaggagctgctgctgaaacagctggctgagggacgacaggctcaggttggcagttggaaggatctccattcatgttgtccaatctaagctgcctctgcccactaccttcaccatgtctgtttcttcatccagctcttaattcagtcttctggacagtaacagtagctgggaacttttatggaagccagatccccagaggagcaccctttctaacctggagcccagcatctttcagctccatgcccagagtcttaagcaagaggacctattcctttggggccccaaaatgctcctgaatgacctgtaaggactcgttaagaatagtaggatgaaggcttctttgcccaccctcccctccaaggccactgtttctgggctgcccgcccctacacttcttgaagtagctattatctgtcttatctactgaggcttttcactgcctgcccatccttgcccccc

SEQ ID NO: 249014 - DNA, 990 bp, Homo Sapiens
  misc_feature (644)..(748): n is a, c, g, or t
  misc_feature (750)..(788): n is a, c, g, or t
tgtatggttcggacccaccgtacttttgctgagtccccaaggggctgtcgggtacagattccaggagagcggctgctggtcaggcagcagtgatctctaaagccacgcaggtaattttatcagatgctggcagagaaggggttctcatgtggtgggtacctggcaggcggactcggggctcattcctttcttcttggtccttggaggggcagggcagtgagagacacagctctacccccactacccagcagctgttgtctctcccacttccaattcctgggtgtgaggcccacctgatccggggaggtcgaggctgcagaggtgggaggatcacatgagcctgggaggtcgaggctgcagaggtggcaggatcacatgatcctgggaggtcgaggctgcagaggtgggaggatcacatgagccggggaggtcgaggctgcagaggtgggaggatcacatgagccggggaggtcgaggctgctgaggtgtgaggatcacatgagccggggaggtcgaggctgcagaggtgggaggatcacatgagcctgggaggtcgaggctgctgaggtgggaggatcacatgagccggggaggtcgaggctgctgaggtgggaggatcacatgagccggggaggtcgaggctnnnnnnnnnnnnnnnnnnnnnnnnnnnnnnnnnnnnnnnnnnnnnnnnnnnnnnnnnnnnnnnnnnnnnnnnnnnnnnnnnnnnnnnnnnnnnnnnnnnnnnnnngnnnnnnnnnnnnnnnnnnnnnnnnnnnnnnnnnnnnnnntcattagggaaaggaaaagaatgtcacaggctatgggagtaatgaggcactggttgggatgagtaaaaagaactctgcagagtgtagggacagcaggcacaggagcagccgccactcagggccggggcagagctctccagctacagtcactgccacccagggctgaggtctgcaccagctgcaaacggcgtgtggggacacc

SEQ ID NO: 249015 - DNA, 639 bp, Homo Sapiens
  misc_feature (282)..(499): n is a, c, g, or t
  misc_feature (525)..(573): n is a, c, g, or t
tcccccttttatgaatggagtgatgaagccttaggaataatgaatgatttgccccagctcacctggatattaagactgagtcagatgttgggtctggtctgactttaatgtttgctttgttcatgagcaccacgtattgcctctcctatgcagttaagcaggtagaccggtgaccagaaaagcccatgtttgtctctactcacacacttccgactgaatgtgtgtatggagtttctacacccgattcttcagtgctctggatattaactgggtatcccatgnnnnnnnnnnnnnnnnnnnnnnnnnnnnnnnnnnnnnnnnnnnnnnnnnnnnnnnnnnnnnnnnnnnnnnnnnnnnnnnnnnnnnnnnnnnnnnnnnnnnnnnnnnnnnnnnnnnnnnnnnnnnnnnnnnnnnnnnnnnnnnnnnnnnnnnnnnnnnnnnnnnnnnnnnnnnnnnnnnnnnnnnnnnnnnnnnnnnnnnnnnnnnnnnnnnnnnnnnnttttctgagagagagggtcttatttnnnnnnnnnnnnnnnnnnnnnnnnnnnnnnnnnnnnnnnnnnnnnnnnntgattgtctgggttccagtggttctcccacctcagcctccctagtagctgagactacatgcctgca

SEQ ID NO: 249016 - DNA, 806 bp, Homo Sapiens
ttacttacaggaaaatcctctcatatcatccactctctatctaccttcgccctgtgaactgcagcacacacaccatcctacagctagtgggagcttgacggctgtatcacctggaataggaattaagtctcccacagacattgaagtagctttcatggacagaagaaaccctttcccagcctgcacaggaaaaagaacataaaatgtgaaaccaggtcttaagtaacagctggggctaaagtatgtatcatcaaactgattatactagtgcaataagtgaaaacagctaacatcgatccactggttaacaggttcccacattaagtctgacttcgtcagcctatcctagctttccagccaagcgcatcttcagcattttcttgaactactcgagttcctcacgttcctttagggaataaaattcctcatatttttgagatattaataaacttagttaattaccaaacaccaagaataaaccttcacatttaaaaaattaactcataagacacgttaagaattaaggttacacaaattccccattaatgtttgttttccatttccttaacgattttgttttttggtagggtttactaacctacaagcaatagtaagcactaaaagtttaagaaagttttatttgaacaaaaattaatttgtgaaattccacaattaatgacaaaaacttttttggcttagaaaaatggccttattatttactttttcttcagaatctcatttcacctcacagatcactgatgttatatagatacaagagtttggacttatttatgttaataatccaa

SEQ ID NO: 249017 - DNA, 852 bp, Homo Sapiens
ttggcaagaattggcgtgtgactcatctgcttggatacctccagtccccaaactgtgttccaggagttttcttggccgaagctgcccgatgtttgagccttttcttcccagagaagatagatggactgatagctgccagttgggtactttttgtgatcacggcgttgccgcgttttaaaggaggtgatgggtgcttgcgctcggcttgtcttcccacccaagtgtagagttttatgttcacttggttatgtttagacgatgtgcagtttgtgtttatttaaaatatttgggtgggataggggcataggcttgtgaagggcagtccggatccggaggaactcgtctttgtccctggtaggagagacacccccagtctatcctcgatgccgtcagccttggccatcttcacttgccgcccgaactcgcacccgtttcaggagcgtcatgtctacctggacgagcccatcaaaatcggccgctcagtggcccgctgtcgaccagcgcagaataatgccacttttgattgcaaagtgctatcaaggaaccacgctctcgtctggtttgatcacaagacgggcaagttttatcttcaagacactaaaagtagtaatggtacttttataaatagccagagattgagtcgaggctctgaagaaagtccaccatgtgaaattctttccggtgacattatccagtttggagtagacgtgacagagaatacacggaaagttacccatgggtgtattgtttccacaataaaacttattctaccagatggtatggaagcccggctccgctcagatgtcatccatgcaccattaccaaagtcctgttgacaaagttgctgctaac

SEQ ID NO: 249018 - DNA, 805 bp, Homo Sapiens
caaagagggataactcctaacactttctatctcatctcccatctggcttcttgccccaggaactgccccaggtctcaatcaacccaacaccagctaatgcgtactgggtacccatgacactgggagctattggaggtcatcaactcaccaagaaaagaaggggcttatttgctacccagcagcctccttcccttcgggtgaggatatctcagtggatgctgccaccttctgagataggaccccctttgactgtggcatggtggcctcaggcactctctcccagtccatagggtcagtccagccctggagaatggcagggggaagcaggaggatactagtggcctcggcccccgctggacacccatcctcacttcctgcatgaccatgtgaagtccacaaggaagggacataaggcagactctcctctccccgccccctgcccccatctctgagcgccccccttcgggaaccctcctcaggagcttcagctcactctgctgggggctggtgcttgctgaagaccccctccctccctccctctgcttttctctctgtgcatatctctagacagggccatgcacttgaaatacaaggtagctaagatgtcacagcctgacagtactgaaatatacttgggtgagtccacacagcttgcctcagtctaggtaactgctggtaagaaagtcagtccagttgcttttctctactcctggggtctacgaactttcaccaacatcactatcagacacagagggacatcaggtggggaggagggtgaaggcagaaggtctttggtgggtcccaa

SEQ ID NO: 249019 - DNA, 981 bp, Homo Sapiens
ttggcccagaccagcctacaaaggcccattaaatacagaataatttgtggatcttcaaagaggatgaacatacatttccatgacagagtccatacgaaattcacaatttagatgctaaaaaatttaaggaatatctttttttctctatcttatctgctttgaagcatagcgattagcgagaaacttttcagatccagaccactgatggtagccagagtagagaccctggagcatagattcttaaaataaataaggggcccaagtcagagctttgaggtattgaagatggaaaaatagtggacaaacagcctgtaatcaggttggggattacgggtactgagttatgttgccatttaactattctaaaaaataagactgggtctcaagactgcttccctaacagactgtttctcctgaaaatgcaggagctattctttctgttctggttatatagtttccattcatggcttcttgtcctgttgttttttgtgtcgagtacactatataaattatctccttatacatatttctcaggcaagcacagagttatactgaacttttctaaagatgctttgcatcaagaagcaaagggaaatacagaattaaaatgtttctttccattttgctttgtttttctatatcgatctagactttgtaggaaaatgcaaagcgtatatttaagaaaacctaaataagaatagattcatttactcattttcatttattcattcatgaagaatttattgaatgcctactatgtgccaggaatattgctatatttttgaaatttaaggataaaatatggcccaatctatcaagaaaggaaagtgaaagataaatgtaagacataattacaacattctgtgggagcacaaggtaggggactcagttcttagagaagtcttttggtcttagagttcatcaagcagagaaggggaaggacatggtccaggaaaataaatcaacacaccaaggaaggtc

SEQ ID NO: 249020 - DNA, 863 bp, Homo Sapiens
  misc_feature (68)..(98): n is a, c, g, or t
ttgggattttgttgggtaagattgagctttggaaggtcacgaaccattattctatctaaggtgtgtgnnnnnnnnnnnnnnnnnnnnnnnnnnnnnnngcaatccctctccccctgaaccaatttcacattgggaatgcaggacctagactgctgaataaaaagctacttcttctataattgtcaggttctctccaatttctcagcttcctcaaagacatggggtggagttgggtgtgccatcactgagagagctctggaacttttgactcttagtgacatttttagatttaggggttcatggccttccacatgttgccaccaactggtgatctctgccccttcatgctgatcaagaaagtagaaactcctcgtcgccttcaggtttgcagtcgcagaaacattgcctgctgtggactgtcagcacaaaactgggacactggtgtcatttagactgtcagcagtgcacatgattgtacgatagactccaggcaaccatgtgcatctgtgcaagatgacctctgccccaagagaagggttacggtctaattaaatgtttaccaagatggtaccagtgggctctccccgtgtcctttggtgttattggagctggtgtatgacagactcaaggaaattttttaaggaaaatgaagaagaaatcaacctttatggttctctttcattggaagaggagaataacaaagaaatggcacgtagagagggagggggaaaggaatagaaatggcatgtctttgatgctgtggcttgtgtggggacaatgggaagagcacagcagcacaacatatctgtgttagtgccacgtggtatctgttaagtatggccagagcctcacatataagtgaa

SEQ ID NO: 249021 - DNA, 917 bp, Homo Sapiens
  misc_feature (129)..(147): n is a, c, g, or t
aaagggccttaaccgttacttagaagagtaaggataaaaatcctctttttcctctagcttccagtttgacaagaggggaatattaattgaatcctgtccacaaaaacagctaacagtactgtgctttgnnnnnnnnnnnnnnnnnnncaaaccgacttcatataattcttaatacatcctgtgctgctgttggtttttttaagacttctagcagtagctataggttccggtctggcactttaggtatttttaaaaatgaccaaaacgtgctctaaaatgaaagttaaaatgttatcatattttctgagatttcttgaagcagattgtcagatgaaactcttcagcataatacaaatctgtgaaagactgcagatatttctattgttcaaagaattgcactcaaactataaaatggacttggctgacattgtttcttccataagcacaattaatataaaactatatttttaggaaggataagtaattgcaatgatcttttattccattatcctctggccttctagtttattttgtgttgaatgtttggtttaacaaagattttgaaaagtttattaccattttctctttgattaaataccaattacttagttggtccagttttaaaaggtaatctgctttaaattctcaaaatcagtatcaaaaaagcatacagagtattattctaattgttaacatttacatgaattatactggactcaaataaaaaaaactttttttaaatagtgcatacaaggcacaagagcttattatatttactgaagctgaacattctggcatcaacacactttagtttatctcaaactaaatttccaaatagcatgccattttagttcatgttgtatatttaaagtgtttcgtcggggacaacttttttgtacaaagttgccttttaaagt

SEQ ID NO: 249022 - DNA, 949 bp, Homo Sapiens
ttggccaaagagcagctggccggaaaagtgttgcctcatcttattcccctgagtattgaaaacaatcttaatcttaatcagttcaattctttcatttccgtcataaaagaaatgcttaatagattggagtctgaacataagactaaactggagcaacttcatataatgcaagaacagcagaaatctttggatataggaaatcaaatgaatgtttctgaggagatgaaagttacaaatattgggaatcagcaaattgacaaagtttttaacaacattggagcagaccttctgactggcagtgagtccgaaaataaagaggacgggttacagaataaacataaaagagcatcacttacacttgaagaaaaacaaaaattagcaaaagaacaagagcaggcacagaagctgaaaagccagcagcctcttaaaccccaagtgcacacacctgttgctactgttaaacagactaaggacttgacagacacactgatggataatatgtcatccttgaccagcctttctgttagtacccctaaatcttctgcttcaagtactttcacttctgttccttccatgggcattggtatgatgttttctacaccaactgataatacaaagagaaatttgacaaatggcctaaatgccaatatgggctttcagacttcaggattcaacatgcccgttaatacaaaccagaacttctacagtagtccaagcacagttggagtgaccaagatgactctgggaacacctcccactttgccaaacttcaatgctttgagtgttcctcctgctggtgcaaagcagacccaacaaagacccacagatatgtctgcccttaataatctctttggccctcagaaacccaaagttagcatgaaccagttatcacaacagaaaccaaatcagtggcttaatcagtttgtacctcctcaaggttctccaacta

SEQ ID NO: 249023 - DNA, 850 bp, Homo Sapiens
cataaaaagaaaactttgtacaaaaaagttggggcgaggaggcctgcggggaggcccatacacccccagccgtccactccaaccacgccccagtcacccaggcccgcgagggcaacctgccgctcctcattgcgcccgccctggccgcggtgctcctggccgcgctggctgcggtgggggcagcctactgtgtgcggcgggggcgggccatggcagcagcggctcaggacaaagggcaggtggggccaggggctgggcccctggaactggagggagtgaaggtccccttggagccaggcccgaaggcaacagagggcggtggagaggccctgcccagcgggtctgattgtgaggtgccactcatgggcttcccagggcctggcctccagtcacccctccacgcaaagccctacatctaagccagagagagacagggcagctggggccgggctctcagccagtgagatggccagccccctcctgctgccacaccacgtaagttctcagtcccaacctcggggatgtgtgcagacagggctgtgtgaccacagctgggccctgttccctctggacctcggtctcctcttctgtgagatgctgtggcccagctgacgagccctaacgtccccagaaccgagtgcctatgaggacagtgtccgccctgccctccgcaacgtgcagtccctgggcacggcgggccctgccatgtgctggtaacgcatgcctgggccctgctgggctctcccactccaggcggaccctgggggccagtgaaggaagctcccggaaagagcagagggagagcgggtaggcggctgtgtgactctagtcttggccccaggaagcgaag

SEQ ID NO: 249024 - DNA, 962 bp, Homo Sapiens
ttggggctccagaccgccctccggatctgaccctgcgaatggttttggctatatcttcatgtaggacctactccctatcccgtcggccgcggctgggcttcatcaccaggcctcctcacagattcctgtcccttctgtgtcctggactccggatacctcaactctcagtactttgtgctcagcccaggcccagagccatggctatctcctcttcctcctgcgaactgcccctggtggctgtgtgccaggtaacatcgacgccagacaagcaacagaactttaaaacatgtgctgagctggttcgagaggctgccagactgggtgcctgcctggctttcctgcctgaggcatttgacttcattgcacgggaccctgcagagacgctacacctgtctgaaccactgggtgggaaacttttggaagaatacacccagcttgccagggaatgtggactctggctgtccttgggtggtttccatgagcgtggccaagactgggagcagactcagaaaatctacaattgtcacgtgctgctgaacagcaaaggggcagtagtggccacttacaggaagacacatctgtgtgacgtagagattccagggcaggggcctatgtgtgaaagcaactctaccatgcctgggcccagtcttgagtcacctgtcagcacaccagcaggcaagattggtctagctgtctgctatgacatgcggttccctgaactctctctggcattggctcaagctggagcagagatacttacctatccttcagcttttgggatccattacaggcccagcccactgggaggtgttgctgcggggcccgtgctatcgaaacccagtgctatgtagtggcagcagcacagtgtgggacggctctcatgagaagagagcaagttatgggcaccagcatggtggttagacccctgggggaacagtgggtggcccgcctgctctgaaggg

SEQ ID NO: 249025 - DNA, 455 bp, Homo Sapiens
ggcttgcgcaatcttaaaacaaacctcggaggatggactggaccccttcccaggcgagggccgtgtggtgggcaggcagcggatgcacacccgccttggacagggtggaggagcacccaggctccaggatgactgctgagaaatttctgaacaggctccccaagtttgtgatccggcaaggcgaggtgattgtcatccgggggccccatcagggacaccttgcagaactgttgcccattgcttgtccggatccaggagattgtggtggagacgcccacctttgccgctgagcgagagaggagccaggagtcactctactcttctgcacccccgctctccatgctgcgcatcttttctgagaatggggaacaggccttcctactgatgatgcagcttgacaacaccattggcaacgtgcgagctctcctagcgcaggccagggtcatgatgcctct

SEQ ID NO: 249026 - DNA, 1522 bp, Homo Sapiens
ttgggtctttgtgttagatgagtactgtgcccgttatggtgtgagaggctgtcacagacatctctgctaccttgcagaactgatggaacattcagaaaatggtgctgtcattgaccctaccctgctccattacagctttgcattctgtgcctctcatgtgcacggcaacaggcctgatggaattgggactgtttcagtggaagaaaaagaaagatttgaggagataaaagagagactctcttcccttttagaaaatcagataagccatttcagatactgttttccctttggacgacctgaaggtgctctaaaagctacactttcattacttgaaagggttttaatgaaagatattgccactcccataccagcagaagaggtgaagaaagtggtcagaaaatgtctcgagaaagctgccttgatcaattacactagactcacagaatatgccaaaatagaagagaccatgaaccaggcatctcctgctagaaagctggaagagattcttcatctggcagagctctgcatagaagtcttacagcagaatgaagagcatcatgcagaggcatttgcctggtggcctgatttattggctgaacatgcagagaaattttgggctttatttacagtggatatggacactgcactagaggctcaaccgcaagactcctgggatagttttcctcttttccaactgcttaataatttcctccgaaatgacacacttttgtgtaatgggaaaatttcacaaacacttgcaagaaatctttgtacccttggttgtccgctatgtggatctcatggagtcttccatcgcccagtcaattcacagaggttttgagcaggagacatggcagcctgtcaacaatggctcagcaacatcagaagaccttttttggaagcttgatgcactgcaaatgtttgtctttgatctgcactggccagaacaggaatttgcccaccacttagagcaaagacttaaactaatggccagtgatatgctagaggcctgtgtcaaaagaaacaaggactgcatattgaactcaagctacaaaaggcaagcaaaacaagtgacttgcgcattccagcttccgtttgcactatgtttaatgtattagtcgatgccaaaaagcaaagcaccaaactctgtgccctggatggtggacaagagtttggtagtcaatggcaacagtaccattcaaaaatagatgatctgatcgacaactgtgtaaaagaaatcatttcactgttagtttcaaagtttgtttcagtgttggaaggcgtgttgtctaagctgtcaaggtatgatgaaggcactttcttttcatccattctgtcattcactgtgaaagcagctgcaaaatatgttgatgttccaaaaccaggaatggatctggcagacacctatattatgtttgttcggcaaaaccaagatattcttcgagaaaaggtcaatgaggaaatgtatatagaaaagttatttgatcaatggtacagcagttccatgaaagtcatttgcgtg

SEQ ID NO: 249027 - DNA, 499 bp, Homo Sapiens
agacaccagaaacccctccctcccatcagcctgcactaagcacccaggacagcaggactcacttttcctggttttggaagaaatccttcttctccagacactcatacacccagccgggggcaaacaaagccacggagaagccatgctttcggatcagctccaacgattgaagagacagagggagacgctgggcacatcaggaccagagtccagacaggctcctggacgccagtgacgtgggttggggctctcagggcagctcagaaacgggagggggaagctgtccaacccctccctcctagatgcacctggaggctgctgggcatcacccccgtcgttccacaagcccgccagaagagggcgcgggagaggcggtcagcgctgctgcaagggcaggggggctaggggctgggctctccaatctggctgtggctgcgcggtcccattgtcctctggtctatctatcttatattgctattcgattatcagccaacttttt

SEQ ID NO: 249028 - DNA, 1280 bp, Homo Sapiens
ttggctagatgatttggtaaaaccacaaacaggcacaaaacagcccacatggaattctaaagttttaatttcattttggaatttatgcactcagatgaaatgatttatgatgatgttgagaatggggatgaaggtggaaacagctccttggaatacggatggagttcgagtgaatttgaaagttacgaagagcagagtgactcggagtgcaagaatgggattcccaggtccttcctgcgcagcaaccacaaaaagcaaatgcagaagctcgtgaaggccgcgaaggacggcaccaaggacgggctggagaggaccagggcagccgtgaagaggggccgctccttcatcaggaccaagtctctcatcgcacaggatcacagatcttctcttgaggaagaacagaatttgttcattgatgttgactgcaagcacccggaagccatcttgaccccgatgcccgagggtttatctcagcagcaggttgtaagaagatatatactgggctcagttgtcgacagtgaaaagaactacgtagatgctcttaagaggattttggagcaatatgagaagccgctgtctgagatggagccaaaggttctgagtgagaggaagctgaagacggtgttctaccgagtcaaagagatcctgcagtgccactcgctatttcagatcgcgctggccagccgcgtttccgagtgggactccgtggaaatgataggcgatgtcttcgtggcttcgttttctaagtccatggtgctggatgcatacagtgaatatgtgaacaatttcagcacagccgtggcagtcctcaagaaaacatgtgccacaaagcccgcttttcttgaatttttaaagcaggaacaggaggccagccccgatcgaaccacgctctacagcctgatgatgaagcccatccagaggttcccacagttcatcctcctgctccaggacatgctgaagaacacctccaaaggccaccccgacaggctgcctcttcagatggccctaacagagctcgaaacactagcagagaagttaaatgaaagaaagagagatgctgatcaacgctgtgaagtgaagcaaatagccaaagccataaacgaaagatacctgaacaagcttctcagcagtggaagccgatacctcattcgatcagatgatatgatagaaacagtttacaacgacagaggagagattgttaaaaccaaagaacgccgagtcttcatgttaaatgatgtgttaatgtgtgccaccgtcagctcacgcccctctcatgacag

SEQ ID NO: 249029 - DNA, 842 bp, Homo Sapiens
agacggagacgtccagttttctgtggcctcagacgacaactcggagttctggctgagtctggacgagagccctgctgctgcccagcttgtggcctttgtgggcaagactggctccgagtggacagcgcctggagaattcaccaagttcagctcccaggtgtccaagcccaggcggctcatggcctcccggaggtactactttgagttgctgcacaagcagggcgaccgcggctcggaccacgtggaagtgggctggcgagctttcctgcccggcctgaagttcgaggtcatcagctctgctcacatctccctgtacacagatgagtcagccttgaagatggaccacgtggcgcacgtcccccagtctccagccagccacgtgggggggcgtccgccgcaggaggagaccagcgcagacatgctgcggccagatcccagggatacctttttcctcactccacgcatggaatcttcgagcctggagaacgtgctggagccctgcgcctacgcccccacctacgtggtcaaggacttcccgatcgccagataccagggcctgcaatttgtgtacctgtccttcgtttatcccaacgactacactcgcctcacccacatggagacggacaacaagtgcttctaccgcgagtctccgctgtatctggagaggtttgggttctataaatacatgaagatggacaaggaggagggggatgaggatgaagaagacgaggtgcagcgccgagccttcctcttcctcaacccggacgacttcctggacgacgaggacgagggggagctgctcgacagcctggagcccaccgaggcggccccgcccaggagcg

SEQ ID NO: 249030 - DNA, 1176 bp, Homo Sapiens
ttgggttgatgactctaccaaatgcctccctcttacccatgttactagtattgaaaatcagtaggaatgcaataacttacgttttctaaggagcaacttgactcatttcacacactgaagactttggaagctggtggcaataacttcatttggtcctgtgaattcctctccttcactcaggagcagcaagcactggccaaagtcttgattgattggccagcaaattacctgtgtgactctccatcccatgtgcgtggccagcaggttcaggatgtccgcctctcggtgtcggaatgtcacaggacagcactggtgtctggcctgtgctgttctctgttcctgctgatcctgctcacgggggtcctgtgccaccgtttccatggcctgtggtatatgaaaatgatgtgggcctggctccaggccaaaaggaagcccaggaaagctcccagcaggaacatctgctatgatgcatttgtttcttacagtgagcgggatgcctactgggtggagaaccttatggtccaggagctggagaacttcaatccccccttcaagttgtgtcttcataagcgggacttcattcctggcaagtggatcattgacaatatcattgactccattgaaaagagccacaaaactgtctttgtgctttctgaaaactttgtgaagagtgagtggtgcaagtatgaactggacttctcccatttccgtctttttgatgagaacaatgatgctgccattctcattcttctggagcccattgagaaaaaagccatttccccagcgcttctgcaagctgcgggagataatgaacaccaagacctacctggagtggcccatggacgaggctcagcgggaaggattttgggtaaatctgagagctgcgataaagtcctaggttcccatatttaagaccagtctttgtctagttgggatctttatgtcactagttatagttaagttcattcagacataattatataaaaactacttgtatgtaccgtcatttgaggacttgcttactaaaactacacaacttcaaattttgtctggggtgctgttttataaacatatgccggatttaaaaattggtttttggttattcttttttctatgagataaccatgatcataagtctattactgatatctgaatataacccttggtatccaaggg

SEQ ID NO: 249031 - DNA, 1003 bp, Homo Sapiens
  misc_feature (127)..(145): n is a, c, g, or t
ttggcggagtgtggcttgtgcagatgatcagtaatgggcaagtgtaatcacataagtaaaactcttattctgtgggatatgcatgttgttttgagccatgacagttttcacaaactcctgactatgnnnnnnnnnnnnnnnnnnntttttaagtggaattcggtgcgatctgtaagtcgttgtcgaagcaggagtttaagtcccatttgcccccgtagccaaattggtttaaacacgatgtctcgaagtcggagtccttctccaataagatgtggattgccaagattttaaaagcaccagacctgctcctttgacccagtgcgtggaaacagctgctttctccagtgccgccatctgtcttctgtgtctgcctcagacctcacttaagataatgtcaaaaggcaattctgtgtatcaccccacacagagagttaaatgttttggcttggcgcatttgtaactttagatatattgcattctattttattttatagatactaattccattaatttcataaaaatgattgtataggcatttaggatcatattcattcgaagcaaagtccgttacaaaggttcaagatttccatctcaaaacactacgctcttttatgggaactgtgtgaactgaagtggaaagcatctaccatgctgaggctaaaagaaaagatgaatcattttagtttgcagatggatcgtaaatataattgttggtatcagctttagctcaaaaccaatattaatgttttaatttccttttaaagtttggaagacagccctaatctcacgttggggagctcatgttagtagcagtgacttaaggctaagtgtagaagataatttaagatacattttctttatatattagccaacaaattatatttattggttggcttgcttttccgttctgattttgagagtgcccagtttggtttagttgaccaatgaatgtcaaagctacttagttgagagaatttccttgttcataaatgttgagcagaga

SEQ ID NO: 249032 - DNA, 835 bp, Homo Sapiens
ttgggttcagacagcaaatgaaaccaacctggagagttcatggtataataaaaaatggtggtgtaaaacccaatatcattccctcttattctgaattaatctattacttccgtgcaccctcaatgaaagaacttcaagttttgaccaaaaaggcagaagattgcttcagagctgcagctttggcttcagggtgcacagtggaaattaaaggtggagcacatgattattacaatgttcttcccaataagagcctatggaaagcctatatggaaaatggaagaaagctaggaatagagttcatttcagaagatacaatgttgaatggcccttcaggatctacggattttggaaatgttagttttgtggttcctggaattcatccatattttcacattggatctaatgccttgaatcatactgaacagtacactgaagctgctgggtcacaggaagctcagttctacactctgcggacggccaaagctctggcaatgacggcactggatgttatttttaaaccagagttactggaaggaatcagagaggactttaaactgaaacttcaagaagaacagtttgtaaatgcagtagaataaaagacttaggggccacttataaatcaagaagtcgtgatgatttttttcttttgatctcttttaatgaaggcatgcttgttttttaatcttaaaggagtaaaattctttttacctgataagtgaggacagggtgtggagaaaacatattaattacctcatatctaaagtgaaaatttttgcaaatccgtacttgataggattatgatattacaggagctggtatgtgatgccattctttc

SEQ ID NO: 249033 - DNA, 223 bp, Homo Sapiens
agtggatcccagtttgcgaacaaggacctgtggaaatacaagtatcttcctttttatctttattgttttagccatcccaagtgttagactgcaagacataactacatattccccagtggaggttggaagtggaggggactgcttcattaggtctgaagggggccaaggaatgtgttgcagcagttttcgcagatgatactgacgagaggccaggtttgggcat

SEQ ID NO: 249034 - DNA, 1597 bp, Homo Sapiens
  misc_feature (104)..(153): n is a, c, g, or t
  misc_feature (312)..(321): n is a, c, g, or t
ttgggtcccattttgtttctttggatttggggtgggggtcctggccaagaactcagtcatttttctgtgtaccaggttgcctaaatcatgtgcagatggttctnnnnnnnnnnnnnnnnnnnnnnnnnnnnnnnnnnnnnnnnnnnnnnnnnncgtgtgcattttgtataatggccagaactttgtcgtgtgacagtattagcactgcctcagttaaaggtttaatttttgtttaaacctagacgtgcaacaaaagttttaccacagtctgcacttgcagaagaaagaaaaaaattcaaaccacatgtttannnnnnnnnngcctacctcattgttcttaatgcattgagaggtgatttagtttatatgtttttggaaaaaaccattaatgtttaatttaatcttaataccaaaacgaccagattgaagtttgacttttattgtcacaaatcagcaggcacaaaaactgtccatgaagatgggaaatagccttaaggctgatgcagtttacttacaagtttagaaaccagaatgctttgtttttaccagattcaccattagaggttgatggggcaactgcagcccatgacacaagatctcattgttctcgatgtagaggggttggtagcagacaggtggttacattagaatagtcacacaaactgttcagtgttgcaggaaccttttcttgggggtgggggagtttcccttttctaaaaatgcaatgcactaaaactattttaagaatgtagttaattctgcttattcataaagtgggcatcttctgtgttttaggtgtaatatcgaagtcctggcttttctcgttttctcacttgctctcttgttctctgtttttttaaaccaattttactttatgaatatattcatgacatttgtaataaatgtcttgagaaagaatttgtttcatggcttcatggtcatcactcaagctcccgtaaggatattaccgtctcaggaaaggatcaggactccatgtcacagtcctgccatcttactttcctcttgtcgagttctgagtggaaataactgcattatggctgctttaacctcagtcatcaaaagaaacttgctgttttttaggcttgatctttttcctttgtggttaattttcctgtatattgtgaaaatgggggattttccctctgctcccacccacctaaacacagcagccatttgtacctgtttgcttcccatcccacttgggcacccactctgacctcttgtcagtttcctgttcctggtttcatctttttgaaaaaggccctccttttgagctacaaacatctggtaagacaagtacatccactcatgaatgcagacacagcagctggtggttttgtgtatacctgtaaagacaagctgagaagcttactttttggggaagtaaaagaagatggaaatggatgtttcatttgtatgagtttggagcagtgctgaaggccaaagccgcctactggtttgtagttaacctagagaaggttgaaaattatcctacctttaagggattgaggtagctggatccatcgccacagactttagtagaattaatcctgctgtattatatcatgttaggctt

SEQ ID NO: 249035 - DNA, 921 bp, Homo Sapiens
tgggaatggatttctcggcttggctgctggctgccgtagctggctcaggagccgaggtggcaggccctggcccctcagggtgtgtggtgctcaaggtggccctgccctgggtcttcatggacttccctggatgaaggaaaaacgagtatgtataatcacgacacaatgaaaattagtttctaaagaaagaaaacatgtaaggtgttatttgagtcactccacctatttccaccctgatattactcagctggggtgcctgaattagaaccctacacacaccactgacccacgcccacataagctcttgcaagtgatttggtgttcccttcacctgagcactcctctcccgctcttgtccacttggtacactttaactccatcctgactgccggattcagttttcctcctctgtcaccactgcccactgtcccaggcagcactcactgctccagctcctgtccccacagcactcggttcctagctctctcacataaagaaaacgccataccacaatttactcaccctctatagtttgaatgcctgtcttacctctgttttactaatgcctataatggggtctataacaatgaccatgctaaataagtgtttgcatcaataaattaaaaaaatactctgaggacaagggggaaaatttttatcggtcattccattggaattctatgatcattatagagaaactatggtgttgcacatctaaaaaaggtaaaagacttcttaaaagcttgcaggattgagcagggaaagaacgtgtcacttcagcttcccagattactttgaaagtctaagaggaagacataacccaagcaatatggcttagcagtaaagttctcagcccctagagaaaaaggtccttggtttggtttcctgctttgtcacttactagctggataatcttgccaa

SEQ ID NO: 249036 - DNA, 1021 bp, Homo Sapiens
  misc_feature (48)..(59): n is a, c, g, or t
ttgggaagaactgaaaattttaatttcaaatgttaaagcactttgtcnnnnnnnnnnnnccaagtagtttaacatctctttggcaaataaaactagcatattgtgacaattgctgaggttttccttgcttgtaggagacatttattaagtcttatgaaatctgaaaggattatttccaaatatcaaagtaacattcacaaagcaatactgtataacttggaaatgtcccaagctttaggtcagtcaaaatgttctcttaatatgtgaaaacaaggtcattttcggtaaaagaagcaggtgagtaggaaatgtaagatatacttaacaggaatagccaagcgccttcctgaagatgatcccctgaaggccacaggaggacgatggcgggaagcagtctccttttctgatgttctggatgactgccttccatctcatttctccaggagagcccataagtagtgagcacttgcaccgggctgtcagtgtgaatgatgaagatttgctggtccgaatacttcaaggaggccgtgttaaggttgatgttcccaataagtttggctttaccgctctgatggttgctgcccagaaaggatacaccaggcttgtgaaaatcctagtttctaatggcacagacgtgaatctgaagaatggaagtggcaaggacagtctaatgctggcgtgctatgcgggacacctagatgttgtgaaatatctccgaagacatggcgcttcttggcaggctagagacctgggaggctgtacagctctgcactgggctgcagatggaggccactgcagtgtgattgagtggatgataaaggatggctgtgaggtggctcacctgatgcttctgaagcccatgggaaggacttgagagccaatcaccaccttcttcccaaatgtagacgtcgtggacactggttcaggatggaacccactcatgagagtctctgcggtgtcgggaaatcagagggtggcctctcttctaattgatgctggggccaatgtgaatgtgaaggac

SEQ ID NO: 249037 - DNA, 916 bp, Homo Sapiens
tcatcagtgtaaattctggatagaaaaactggttctgacggcgacgcattcatgagctacagacaagttacttacgctctcctcaaagccttcctctagaaatatgtccaagtctttagtaaactataattactaaaatattttacagatgaaatttattgctagcttgggatctcaaaaggttaatcatttcacagcctgattaggatgacatagcaaatgtcatccttgtggaaaacccctcacagcacagctggacactagtcctgattttatgtggaatgcaaggtcatgttatcacactaaatttgtctctcacatgttcccaaacctctaaagtagttttactggagaagtacctgttatgtgtaggaggcagggaggaagtaagacttcacattaagatgagggacacggagactgagaatggacgggaatgcacaatggagtaagaaaatgaagtgtggccaagcagaactcagggccagcactataggacttcagtttagattttggattcaaatttggacaagagtcacgaacaaagaaggtggtcctgaaagataacaaagttcaccttcttaacagggctggacagaaaagtcagacttaccatttcttcccgggtcctcattctcatcatttttgcacacaactgaactctataatcatcataatattttcgagcacgaacgatttgctgtcgattttcttttatctttgattgggtcaacctttgcctacgaatgcagtccttgaagtcttgctaagaaagggaaaggggagggaagagaagggtaaggacaagaggaatgcagattccagcgttctcatctgcctcactccccatcacgatgtcttcaggcagtatgtcacgtgtggggggccagtggccccagaagcccttcagccccaa

SEQ ID NO: 249038 - DNA, 988 bp, Homo Sapiens
  misc_feature (166)..(423): n is a, c, g, or t
  misc_feature (871)..(885): n is a, c, g, or t
gccaactttgtacaaaaaagttggcatcagattagttgaagatgtaagaactaaaatgctccctgcaaatgtgtagcttaagtatgcaaaatactggaaacttttctgagagaaccgagataggcagatacaagagcgtgatttctcatcttgaaaatgttttaannnnnnnnnnnnnnnnnnnnnnnnnnnnnnnnnnnnnnnnnnnnnnnnnnnnnnnnnnnnnnnnnnnnnnnnnnnnnnnnnnnnnnnnnnnnnnnnnnnnnnnnnnnnnnnnnnnnnnnnnnnnnnnnnnnnnnnnnnnnnnnnnnnnnnnnnnnnnnnnnnnnnnnnnnnnnnnnnnnnnnnnnnnnnnnnnnnnnnnnnnnnnnnnnnnnnnnnnnnnnnnnnnnnnnnnnnnnnnnnnnnnnnnnnnnnnnnnnntttaggttgcaaatgtttcaagcatgtgcagttttgtgtgtgtgtatacatatatatggtcagcatatatattgtgcagctagggcgaagccagcagaggtgtgtgtatgtctttatgaaatgtttgaaaagagataaactgactgcttgataatcactctcaggtgtaaagctccaagtgtaaataaaagtggcatttaacaaatctttcagaacaaagtacagctgactatatataccaagagctaagctaaaggaacagctgagagctccgatctccacgagagactaatctaaaagctctgctttgtacttcctcaccctgctttcgtacagggaagggggacgatgggaaatcatggacttgtaagttgtatttaaacataaaaatgaacttggtaacttctgggtttagtagagcctcagtgtcgctttaacttagtttacnnnnnnnnnnnnnnnaaagcagcaatggatggttttaaaggagtattatgattgtaaaattgctaaatatgactgtaacacagctttgtggtagctgtgacacagttcacttgggcaa

SEQ ID NO: 249039 - DNA, 648 bp, Homo Sapiens
ttggaaatgagttcttaaagatcagttgtaattatagcataatatctaaacttggcgcgtgtcttaaaagttaaatattgagtacgattccgttccagttaacatggatagaccttagggagtagcgaaataggatgttagtggttttattcctttaaatcacatctcaaaaggccaccaatggctagtttgggatcttattccgaaaatagattgatcctcatgcagtcttcgtgaggacagagcgatttccttgttgcctaccctgtccatagtgcctggcacataggcactgaaacactgcatgttaatccacaccccaccccacctatgagtgtagtcaaagctggtaagtgacaagggctttcgtggaaacttggcctgacctaatgttgggcatcaggttacccaaagagcttcagggaaatgagaaaggacttgccggtcttgatgagaatggaggggtaactggcaatgagggctttggctttagcgaaagtctgaaagggaagccataggaacttaaacgtaccgactataaagctctgagaaaagctgatgttttagaaagaccatacattctaggtacaaatacctaaaaactaaaaaataagtacgttggccaggcgggcggatcacgaagtcagg

SEQ ID NO: 249040 - DNA, 937 bp, Homo Sapiens
  misc_feature (48)..(79): n is a, c, g, or t
ttggatttcttcaaagtggttacaattcataatgcagcagtttctccnnnnnnnnnnnnnnnnnnnnnnnnnnnnnnnngcgcttttccagtcacacacccctgatgttggaaccaagtttttggaccttctgttccaaaaccttttgcaggtcaatctttgtatttgaaatgatccaatccaacttgaagtcaatttgaatattaaggcgctttacttccgtgtgctttcagtttttccatcatgagattgaatgagcattactctagataaatttcaagacaggatactacaggtggcctgctgaggctgccccatattttagaaaatgtaaaaatggtggtttggccattaatttgtcttccatttgatgataccgcaaaattccgtgagtccattcctttggcatggcactttccctgggcctacagttggtattacctctgtgctcagtgccaggcaaaacactagctcaaaggagagtcaaggaaaccgctggcagacgataaccagtcgaaactcgtgacttcggtttgttgaactttggcagccagttggtgagggccagatgttattccctttcttaaagatactccaagccacatgccactaaccacaagcaagctggctgcaagactaaagagctgacaacatagtttatttttacactgtcttattatagagaagtaatagacctatcagaacctgcactgaccaacaaataaacacatgttgccaagatgaatcggtctctatctctatctgcttattttggtactgaaagcaatagttcctcattcaaatcaccacccactgttctccccctttgggacatgttagacgaggccctattccatgcccctctttaatggtgaacaaatgttaaactgctcatctaaagatcatgttgatattattccagttttagatcaacttt

SEQ ID NO: 249041 - DNA, 1067 bp, Homo Sapiens
  misc_feature (665)..(723): n is a, c, g, or t
ttggctcacgctagcttcccaagctccaccttcatttcttgactctccttagaacaaaaatggggatggcctcccctcagctgttgcccagcgagtccagaggccaccgtctgctgcttctgctgccccctcctcctcaaagcagcccgctgctgacacagaggcatcagagcagcaggccttgcacacagtccagtatggccttctcaagatcctcagcaagacgctggcagccctgcgccacttcaccccagatgtctgccagattctgctggatcaggtactgcccatcatctgttcagcaccacctcccctaaaggctctgctctgctgtgtaccgagagctacctggggccttaattgggtcctggatggctcttgtcttttctcgcagtccctggaccttgctgaatacaacttcctgtttgccctgagctttaccactcccacctttgactccgaagtggccccctccttcgggacccttctggccacagtgaatgtggccctcaacatgcttggagaggtaagttggttctgtcagacactgtcctctccccccggctcctccccctgcctgccacttcccagctgaccttgggcatgttgggcatggtacctagcctcccaagcctgctcctctctgtaaactgaacatgacagcnnnnnnnnnnnnnnnnnnnnnnnnnnnnnnnnnnnnnnnnnnnnnnnnnnnnnnnnnnnacatgcaagtaggaagctctcagtaagtgggagctgttcctgttgtcttagttttttacccttgcttctcttcagctggacaagaaaaaggagcccctcacccaggcagtggggctcagcacacaggcagaagggaccaggacgttaaagtaagtgctctttctgggatttgataaggggctggggcagtcatgggcccactgttctcaagcttggccagcctggccctctgcagcagtaccaaaaacctgtgtctcctcccaggtccctcctgatgtttaccatggaaaactgcttctacctgctcatctctcaggcgatgcggtaccttagggacccagctg

SEQ ID NO: 249042 - DNA, 918 bp, Homo Sapiens
gtaattttttattaaagttaagccatgatcccagcaaacaaagtatccatcactcaaaggaattaagctaattcctttcccctttatttagttcatcctggtaaaaagatttaacataatcccattttaaaaatgctcagaatcttgataaatgggacaaaagcagagaagttcctaatgttgtacagcattcgaaattaaaatagcattgtggtcccattttcagctattaaaaagttaatgaaataagcagcttggaggaaaccagcatcacggagtttaattctttttattttaaagataaaagagccagaatcggaattcatgtaatgccaaaacatttcatgaatccattaagtcctctgagcactttacattttcttctcattcattactcattaatagcttatctgaaacttattatctccttaaaaggttagaaaacaaatgcttagcttaggggattaagtatcttgcccaagtgattcgggtctgtttgtctttgaattccatccttaaccattcaaatcttagaagttagaagggttatttttaatatatcccagagtttacagcactgtgtttattaagaggaattaacctcataaagcattaaagattgctagatgcaatccttagaattgtaggtggttaatatagttatttaataaccataatatatttgtttccaactttaaatatccacatccaaatttctagtgatctaatcttcaaaacacttttagtttggaataccttttattattattaacaaaccttaaatacagatgagcccaaaaaaggatctttatcaatgagcatacacgacaaattcacaactggcctgacatttcagctgaaaacagccacggtgacaaagactttttatttactgttaactaattatacatgtgtaac

SEQ ID NO: 249043 - DNA, 892 bp, Homo Sapiens
  misc_feature (485)..(498): n is a, c, g, or t
ttcatattattagtatctcacttaagattttgtttaaagtagaatctaccacaggaaaatccctgatccacacttgcatctcttctgccagctgatatgggaatgccgcagggaagagacaggatgcagaggcaggccagggatccagccatctgggagaagagaacagctccatatccaaagctcttatccatgccatgccccagggtttctgccataactcctgaaagaccagaagctcccttcggcccttctcaggtgccccagaaatgaagacccaagtaggctgaggacagacacacagatggtgccacggggctccctgccttcctcatggacaggttccagatgagtggagagatgggacgggaaaagaaacaagcctgccgagctgagggggcctctttcagaagaaacggggcggatgccagtgcgtgaacactttccaactgggagtcagtcagcgatgagccttcatggctccnnnnnnnnnnnnnnaaagtaggcatttcagctcacagaaatacggttgcaggagagtcccactgcttggtgatcagaagcagctgccattaccagagaggaccaacccctccctaagaagctcccccagggctctcttctccctcttccaacccatcctctgcagcccaggcttgggactcaccatacctggtggtatttctttaagatgttgtgcatctccgccacgtcctcgctggacacagtcttgatgacaaagcgccggtcgtaggtggtgaggaaacgcgtgccacaccgaccctggctgtcactgttgatgggggcgctgcgcgtcactgaattctgataatcgagacaaaagaaggctgggcttggcaggggaacagaattctgactttcgctgagccaa

SEQ ID NO: 249044 - DNA, 966 bp, Homo Sapiens
gagtttacaagacattttcacacatgataaattttcagcaaattcttagtgaaagaatgaataagtaaattatagaattaaagtgatctcacaagttcaaagaggtcaaataggaagtctaccataataataagcatatattgcatggcctgaattgtcaaccttccatggctgagatcactcacttctcctctttatttgctttccatgtaaccacctctccttggcttatgtaatttttctctccccctgatgaggcagagtgaagtgttaatagctgggatttggagtcaggcaagtcctaggttcgaatcccagttgcttcagtgatcttgaccaaattgcttatgttctgttctttgtgcagcagttctgtgtctatacaatggtggagggagtgggctctcctgggacagctataagggttaagtaggatgtggaggtgatagagccttgcaaagtgttccagggtgggctggtcatatttcataatatgcggcacagcttaacactttctgcccattacttccaatacaaattggttaaaacaggtggtaacatggtgggttgatatgtgggacagtttttaaaaaatcagaatgggctgggattacaggcgtgatccactgcacctggcctcacgtatgtttttctatctacacacaaaaagtttattttccttcctcttatttgatatcagaagaatgacaggaatcagtttttaacagagatagtttttccgtttctccattgtgttaatcagagcgcagacttacattctcagtcatttatcttttgtggtggagaataaaaagtcacttatagttaaagatcagaaaattatcacaccaaatccatacatatgttagaatcaataatgtactcaaaaatcagcttttataggtatgttggcaccttatccaagaacttatccctgttccagtacccctgtgcttcattcagtat

SEQ ID NO: 249045 - DNA, 772 bp, Homo Sapiens
ctattgttctgtttctttgttcccttataaaaggcactgttctgacattgcccagtggaagctcagtctctttatagaatggaggctgcccacttaccaaataatgaataaatgccaattagatctataactaaatttgttgtaattttgtcttttgacaggtgtaagatatattacaaggtcatttagttatacatccattgctaaatgaattagaaagcaaattaagttaaaagcaagacaatgttaattgctgcttatgttgatttttgtcagaagagacctaagtacttcctggtaagcagctttcaatataaacaagagccctgcacctctctatcacttcaaacatagaatactgcaacgctagaaaggcaacacccaggctttagacgcaccttccagaacagacttttctaaatagccagtaacagctcgagaaagggagaagatcagacctgcctttcatgccccccgaccccaggagcaggaggtgaatcttgaataccttttcctacccacaggtagagagctgaccggggagagaggccagccatatcctcagcaggaggatgaagaagccaggccaacccttgatagtacctgacagaatcacatgggcagaagcaaactcgaatggcagcaccaaaggaggtgtgaaatgctgtgatgaaaacacccttcctcctaaacactcattcccaacaacaaaaaacacccactaccatttaatatccaaaagagtaactggtgcatctagctccaaagccaa

SEQ ID NO: 249046 - DNA, 1213 bp, Homo Sapiens
  misc_feature (304)..(317): n is a, c, g, or t
  misc_feature (899)..(944): n is a, c, g, or t
tcacccccactttagttctaacactatctgcaaaatgagacggaagcatggggtaatgacaccagtgaaggctgcacattcaattggtagtgactttgaaaacaaaaactattccaataaataactggtttaagtgtgccatgctttaagaaaaccaagtattacaaaaattaatcaaataaatcagaggcgattgtggcattgctaaaggcttctttgcttcaaaaaactgatatactgtaggatccctttaaagagaggactccttggcactcttcaaatgttactggagttacatcctacnnnnnnnnnnnnnngagacagagtttcgctcttgttgcccaggctcgggtgacttgtctgagaaaagatacttctcattttcaaagtgagctcataaagtcctgcccttcaagagctgaatgacctccagttttgtgtaatattaaaatgtatcttgaaacttcaggggtgacattttagatggcaagtacagttctctgcatagccccaaaacccatgtatcgaggcaaacaattcatatacattaggattatctttatgtagaaatgtacaattctggaacatagttgtactttattgatttataaatgaggaaaccgaagtaccctctgccctaggagtattttttgggtgtgtacgtattttgtgtgtgtataggcaaggaacaggagaaagtgaggtgaagtcagaatttaacttttctggaagctttcatttcctctaaacctattttttgcttgttgttagacaagtcatgctgctaatatatagcacttagttggctagtatctgagtgtcgctctgggcaaccagattgcacaatgcctcaaattccaataagggaagtccttgttccttagccaacagcttatggnnnnnnnnnnnnnnnnnnnnnnnnnnnnnnnnnnnnnnnnnnnnnnaatttgtgatgactcagtgtctaggaaggtacaaacattgtagctaatctatttctgtttcttacattacctttcaggaatgggcctggaagacctggctaaaacctttgaatcatttcctgccaacatttggccgtgacccattttggaaggtagaaaatggtccttacagatgatgtcataggatcttggtaaatctgaatattacttcagttttccaagtgccacctcagagcaatacttaccccagtccagaccatcacacacat

SEQ ID NO: 249047 - DNA, 1159 bp, Homo Sapiens
ctggtacgggagtggctttgttcattgatttctcatcaactatttcagtcctcaaaggcaaagagcagggcaccttgctctcttcttccactagcaagagtatgaatcagaatgcttggaaatatgaaaacttagtttgactaagaaagtcttatttcacaagagtataagacacatgtcatatcagattttcaaaatgggtagtgctcgtctaataataggaacatgatgtaattactgcaagttcccttgaaaacaatggattcttatgactgtagaccctatttatcttagaaattgatgagcatgcaaatgattataatctgcaataacgggacactgcacaacagtctgtgaggtacatgccacctggctgaatgaacagtaacacgggcctcagcagtgtgaggggttccatttatctccgctcccttgttgagtagagctggggtccccaaacagttcatcaggaggcagcagccactacaatgccctccaaccctggcccctaccttgtagtccccactcccacccagggagcttaggcgttcagagaaataaaatgttgctcctcccaatagtagggatgcgaattcctgatagagagatagaggctcccacagactcagagggagcctgatatttgcattaattcatttaacctttaggaagtttcctggtaaaaagatttaaaaatctgtcggcaatatctttaaatgcattcattgccatttgtttttcacgtggaaaaaattccaagacgtgtatactttccaaacaagaaaagaattaacattttcactgctggctaggtgtttcagtagcaggtcattaagcttttctgtgctctctgtacgctgtgttttgttaactaatcactaataggccagcacccaccaaggcaaatgggccaattacattcagttaaataatgtaacactggaagttctcaaaaaatatgagataaggtaagagtcttagggaaggtgacacatagccctggtcataatgaaaaacacttactggaattttaatttctggttagcaacagctcacttgccttaccatctttctcaagacaatgcaggaaatgaaatatatcataatgtgtgcacagaaaaaaatggtgggaatagagcaggaaacttacagaagccaa

SEQ ID NO: 249048 - DNA, 1455 bp, Homo Sapiens
ttggctctcagacagccacattcagtcgccacaagaaacgtttattggtagttcgagagctcaaggagcaagcccagcaggcaggtctggatgatgaggtaccccacgggcaagagtcagacctcttctctgaaactagcagtgtcgtgagtggcagtgagatgagtggcaaatactcccatagtaactccaggatatcagcgagatcatccaagaatcgccgaaaagcggagcggaagaagcacagcctcaaagaaggcagtccgctggaggacctggccctcctggaggcactgagtgaagtggtgcagaacactgaaaacctgaaagatgaagtataccatattttaaaggtactctttctctttgagtttgatgaacaaggaagggaattacagaaggcctttgaagatacgctgcagttgatggaaaggtcacttccagaaatttggactcttacttaccagcagaattcagctaccccggttctaggtcccaattctactgcaaatagtatcatggcatcttatcagcaacagaagacttcggttcctgttcttgatgctgagctttttataccaccaaagatcaacagaagaacccagtggaagctgagcctgctagactgagtgactgcagttaggagggatccgacagagaagaccatttccactcattcctgttgtcctaccaccccttgctctttgagggctggctattgagaactggaaagagtaaaatgataacttaccttagcattgccaagaacttcagcagacaacaagcaattctatttattttatgttgtgtatacatcttgatcattagcaagacattaagctttaaccattatggcaccattttgtgagaatgattgttctttcacttgggctgtttgagagcataattatggtaatcatgagattaatgtttcatgatttctaccttcaaagtgtgaagacaagtaaaacaatgtttctaaattgtcttattttgttggcggagaagattacaatggctattagtgctacatttggtcaaatgtaatcacttaaatagcttcttgtcaccttaaactaaagcagaataaaaagtatcctttgaaattataagccctcctttgctgacagctattattttgtaacatcttaccaggtcatgtgctttcagttataactgggctgagcctcctataattacaatgtctatagggactgttttactgcctgtgtattttctgctagagagttagcaatgttagagctagaacagattagaatttctaaacagtatcatgcacagttggtgtgagtgatcagtgtgcattgtatggcatgcatggttgtgaattattctctgttctccaaatactgtttctttaactcagatatttttgttagtgtctaggccacttcatttatttttcgtcatggtactgtgactgacttctccctt

SEQ ID NO: 249049 - DNA, 1115 bp, Homo Sapiens
  misc_feature (420)..(429): n is a, c, g, or t
acaaaaaagttggcaacagtccaacattatttaggtgttacagagtgtaaatatatttctttgggagttattttctttttaaaatctttttatagcttggcaatgtccaaagtcaagtatcacctaaactggttagattacttctacagctaataatattgcaggcactggcgccctctggtggttatgaagacaaattcttaatggctacttgacctacagcaaaagccatttctgtaccataaaaatttgttgtgcaatattagaattatcatatgtttcctacatctgacagcacctaaaatgtttgataatattaacatgtatctaagaggaaaaaagagttaatatattctggcacccactttcctagtaatgttttccatgattttccagttctgaggcacttattaaagtgcnnnnnnnnnnctgaattaattaggtattggtaaaatatatttttaaatttagttagctttataaacacaattagaattacaattaattaacagaggtataattgtctcactttcagaagtgatcatttatttttatttagcacagttcataagaaaaatatatagaaaaataatcaatttcatatataaaaggattatttctccacctttaattattggcctatcatttgttagtgttatttggtcatattattgaactaatgtattattccattcaaagtctttctagatttaaaaatgtatgcaaaagcttaggattatatcatgtgtaactattatagataacatcctaaaccttcagtttagatatataattgactgggtgtaatctcttttgtaatctgttttgacagatttcttaaattatgttagcataatcaaggaagatttaccttgaagcactttccaaattgatactttcaaacttattttaaagcagtagaaccttttctatgaactaaatcacatgcaaaactccaacctgtagtatacataaaatggacttacttattcctctcaccttctccagtgcctagggaatattcttctctgagccctggattgattctatcacacagagcaacattaatctaaatggtttagctccctcttttttctctaaaaacatcagctaat

SEQ ID NO: 249050 - DNA, 957 bp, Homo Sapiens
tttctctaaaattttctttacaacaattcagtttttttaatttcacaaggcctgcgatttctaatttcatagttggattttactcccatttcaacagagatgtcatgattatcccaagatcattttagcaggacagcaagctggatcaaaattattttcctgctctttcttgaaggaagagggcaggctatctctgctacatctatgttctccattacttgtactaacatagtcacacttcaatttctccaatttaatccgaggtactctttgtattttaatgggtggaattggaaattctggggcctgaaagggtctctgtttataaatccgtacatctgcaccacagaactgtggaaaatgtacataagcattctccaaataatcataaccaagaataacttccctgcattcatggataggctgtccaagtacagcatcttgaacttccttttgtgtttcatacacaaagtcacaaagacccttaagtagccacactttttggtaaaaaggtagttcgtgaaaaggtttttcttccaatggattaacttctccaagaactttaaaaaactgaggacacaaccccagtttttcagcacagttatcaggattttcagtttgccctacagcagtgtaccactgttgtactttctgcctcagcgctgcttcccaggtcctataaggcaaagtaggtcttcgatgtaaggtaggtctgcgatggggaggacttaatagagaagtcattattttcgatagaaaagcattacactgaggcatcagaagacaacgttccagttcgtaaaagactatttctggcaaatttagaatttgctgagctaaacaaaggaaatggccaatagctggaatttcccacatgttctccatacaagtgtgggcgctgtttgagctagaagttttctttcccattctcctgatttccaccttgccagggtaccg

SEQ ID NO: 249051 - DNA, 908 bp, Homo Sapiens
ttgggctcccaaagaggatttggtttggataacagttgtgatcactgggaaaatgctggtcaaatgtggaaaaacaagagtgggattagctagtggctatgagggccaagctgaagttctgtaatgtgtacttgcttgtgtgcccaagtccacatagttttctacagcccagaccccataccaaggtcacagacatatacacagactcacacacatgcgtacatgcacacacatgcacctgcagattcacatcctggaacacttaaacacatcaatctcgacaagggaattatttattgatctacggttttcatacagtgaagtatataggtctcaagtgttcagtttggttttgacaaattccacccttgtaacaaccacccaaaacaaactataaaacattgccattattccagaaagttctctcatgctcctttccattcatctgccaagacagctatttcctgatttctatgatcgtaaagttgctttgcctatttgtcatcggataggaaaatatacaaatacattgacagcctgtcttagtctcttttctgttgctgtcacagaatgcttgagattgggtaatttatatagcaaagaagtttatttagcttactgttctggagtctaggaagttccagattgggtagctgcatctggtcggcttctggtgagggctgcatctgcatcataacatagtggtggagacagggaattaggcgtggaaaagggaaaatgcaagaggaaaccttgctttataacaacctgctctcaagaactagtccattccctgcagaagacattcatccatcttaatagccaaatcacctcttaaaggtaccacctcccaatactaccacattgggggaccaagccttagcatgagttttgctggggacaaacca

SEQ ID NO: 249052 - DNA, 937 bp, Homo Sapiens
  misc_feature (427)..(440): n is a, c, g, or t
ttggcttttctagcactcgtgcctatggtgaagcatgcactttaatatgcttttaacactaggtgaccaaatcacagtgaagccgggcactgcattctccttgggctgtgctccacgcgggtgggtgggagctgtcttctgagtacatccggaagggctgagcaggtgagtgccctgagcatcctggctgggccccacccaggaagatcttccttctcagatccacgtttggctctaaattgcttcaagtagagattcattctttgaggttgaaaaaatagtttatagtaaaacgaaggcctaattcatggaagcatcattagtcatcaataccttctcataaaatagatgggccagatttccaccaccgcctgcctcctctaacttgggtgatgccagtaggtttgaagggggcagagcactgcannnnnnnnnnnnnntctaggctgtgagaggacagggtggagaggaggagaaccctgaaggagagacggaagatgccaggacctttgcttggacagccattgccgttccaggagatcctggagtgtactgagggttgctggactgttccacccagaggagcaaggctgtacaatgagggtctgaatctggcacacctgtcccttatgtaaaaggagtcgtggtcacaagaccctgggctggttagcctctcccgacctcattccactttctatcttcatgaccttgcctctcagtctttaaaataaccctcatggggtgcccctccaccttcctctggaatccaagtattcctgtttcacatttgccccaaatctttgctgtggaattgggaaatcaaaccagagtcctcctcgcctgatttccagctcagaaagggcctgctggcctgccctgttcccagttacactttcagatccctttgtgctcagatctcagagggggtggctttttg

SEQ ID NO: 249053 - DNA, 605 bp, Homo Sapiens
ttctcctttcttttaaagcaatatagcattagtgatgtcttttaaaaaataataccagccattaccatcttaggaagtgtgaatatttcaggagtaaaacgggtctttcagacccagagcactggagatgcagtagtatcaagaggaaatgagcaatggtctggtggcaggtctgggaccgacagcatcccccgtgtctgtggggcctcccctagacccacattcccacttgtccatttagaagtagcacctgctgccctgtggagggagggcaacatagaagccaggagaaccatgatcaggtgacagatgacaaacagccaccagctgagggggtttggcacatctgttgttcatttacgggctcagttccctcatctgtcaagagaaggagtcttgggtccctctgaggtcatgttcagtgactttatgatcacagatgccatgacaaatcacattctcacccaaggtgagggtcctagtccatcgtgagtgggaagagagtgctctgagtgaaggtgtggcctgatggagtgacactaactctctcccacaacactacccagggaaggccagcagtgcccagtcctgatttccagcctgcc

SEQ ID NO: 249054 - DNA, 1100 bp, Homo Sapiens
gggggattttgacgggtgggcatggccctggaggagaagggggtgtttggaggggaacaggtcacactctcaggaaacaaagtggggaggctaagcctcgaagtgtttccaagagcaagtcagagctcagagaagggtcctgacccagacttcactgggcttctaggggatgctatcttattgctttccaattccccatggaagcggccaaggccctctgtgtggtcaggcttggtaaggaggacccaggagatgaagtagcaatgggagaggagggacacaggctggggccctggggctgatgacaagaaagcaaagctggggtgggggtattgacgactcctccttccctcgctgcacacggcccctctccaccagcagcactccccagctggccgaggtccagggtaatagatctttcccctccctagactctgggcaactccagggcagggatgttgtacccatgtgtactgaatgaatgaatgaaggaaggaacaaatgaatgcatgcatgcatgaggctggtattccctgccccctgcccccggcactaaatgtgcaccgtgattgacaagcagctgtcactatcacttcagagacccaggccagctctccaaatccccacaggcccttccactgcctcactagatgaggctggggagccctgactctgcaggcacttccgggagcagccctcaacacaccactgaatgctcagagctatgtggcaactggagatgccctccgggctccagtactgattaaaattcaggtgtttcagacagaatttatgctggaaattttagatacctttaagaaaaataggtcttatctggagccatggtgggattttccaggaaaaacgccactgtgcaattacgggagcatttccccagacatttccccagtcattgagacagtaaacaatgggtgaagtgaaatactgagaaggatgggcaaagatctgggtgcagtttatgcagtgagaagatggcttcatttactgtcctagggctggttttcaaacacaccttcatttactgtcctggggttggttttcaaacacaccttcatttacttcctgggattgggctatca

SEQ ID NO: 249055 - DNA, 863 bp, Homo Sapiens
ggacacaatcagcacttgacttttattgactttttattcagggaaaataaagttttacttgggaacagatattttagcataagaacttagcataagaacaaactaaaatgattagtattccaaaggtacaaaatcatatttggccaaaatccttcaaaagccaacgtaccactactacagacagatctgggtgacgatgcgtgcttattgcaacagtgaacttctggaccttagaatgtgccctgtatgtaacagcagacgctgaagaacttgagccaagccttcaagcttgaaggtcatggagcgtttgctcacatcattgatctattccactacagtaggtcttctaaatcacatctatatttagaagaatgaagccaaaaacctaaccagtttagatttaaattaactttccagtaaaatctaactctcaagtggaagctgcccccaaacattctctaactactatcacaagatttttaaactatgtcatttaatcttacaaacataatttttggaaagtccatgtttagcagtttcctttccttgtactatgtagagatgaaataaaacccactgatcaccaccttcagctttctgttgacctaaggcaaacacagatattttaatatctcctcctattttgagaataatttccatagtctgaatgtttccaccaataaatacctttcaaatgaaggactattatagtgccatgtattaggcaactgtaaccaataatccacttttgcccatcacagaattgatttaaaatctcttactgttgacctaaaaacataagttcttcatagccaagttccacattagcccaacttttttgtacaaagttggcttttttaggt

SEQ ID NO: 249056 - DNA, 905 bp, Homo Sapiens
ttgcaggattatcaaaatccaagggaaaaatgagagatggatactactaaaaatttccaggaggtctagcccagcatctctgatttaaccagcagtaaactgcatgcaggttctgtcagcctgcagccacacacaggttcgtgcgaaccctctgaagcacagggaggggtggatgaaaacgggaatctctgctgtttcctagggccactcctgctccaactctacctcctatctgcatctacagtccctgactttgtcctcccttcggctgaccacgctgcaggctgataaaggctcttaatgcccagacctgtgcctaccaagacctaagatgcctgccttttctctccaccgatactgacatcttagaaaattccacctgttgccttccacatccctcctgtctaatcagactttgggtcttgatcccccacagccagtcctgtgctttcatattccataatgaagagaaaacttgggaggctactcaaagactcagataatggataagggtcagctttcttcagaggggcagaatccaagcccttgtttctattcaccttcattaagaagaaagggcagttctgatcctctgtgtaataccgtgagcattcatctctggtgtactcaacaggaaagcctataaaattcaaaccagagtgaatcctcttcaaaacttgtcacagcagatggtgatacaggtttcttgctatgatgtgtgttttgtacaatgccaaacatgctcctgcttataaataaagatgtaaccatttctgattctgcaaaatacaaaatccataaggaagggagtgagaaatatctagggggatatgaattgatagttacagcacctcaggtcttcctgcaaacaccacaacctgagcaacttgtccaactagagccaa

SEQ ID NO: 249057 - DNA, 793 bp, Homo Sapiens
gtctgttggggtcccggagttcgggcgcggctccgggtacccgagaccaacggcggcaacttctaacacgggagatttcccgccaccccaccccgccgccgcgagtcctcgcggggcgtgttgcgtgcggagaatcgacgggatttctctggctgtcgtttgcgctgcatttatccgaatacatccagctcgcaggcatcctgcaagaaacggctcccggctcgcgtgtacgccgacacctcggcccaacgcaggactcgaggtggtttctagtgcccgggtgtttgcaagtctgccctccgagggaggctggacaagcggcgcccccaggtcgagcggcctctcgctgcctggcagtgcctggcagcccccacctctgccagtgcttcggaaacccgcctggccaggttcgcccgcggtgaaaaatgaaagcaaattccccaacagaggtagccggaactttcctcgacgaaggctccctcctgcgcctgtgtctggagaacccgcagagcgctgcaggttagcaagagagattcgatggcggctctggaaggcgcacgaagggtggggcgggggagcaaagaggccactgggtgacccagcctggtccggggtgaaacgctagagaaggcgcctcgctttccttatttcaatgcaactcctcggccccagacgttaaaaaatagtttccaagctgcccgcggacgcccagggatgtgtttgcagagatcatacctggggaggaggcagctttgtacacgttccgttgaagccgtcggttaccgagctcgaa

SEQ ID NO: 249058 - DNA, 1396 bp, Homo Sapiens
  misc_feature (658)..(688): n is a, c, g, or t
ttggatccgaacaaaattttacatccgaaaagcaaccaacttcttcatggaactcagccctgttgcaatgcttagggcccttaaagaagaaaatctccccagaaggcatccatcatgttgcttaattgtcttctgcagcttcctttccctagagctttccctgtgttgctaagagctgaagatggcatcttcgtgatcaccacagtgagcttggctcgcctcggccggcccgggatgcactcttacaacatgtgtgactcttgaacctggagttcatcacattacgtcacagcttcccatctggttgctttcctgagtcagctacttcacacttgtcaaggctgttttaccccaaaactcagacaggactttctatgcatgttttccctcctccccccaattcccccgccatcaccttatctcccaggacacacttgagaagtagctttttattcctagtggtgtacatttaattttaaaaaggttgcaatgtatcatgcttgttgccgaaactgtttatggccttcttgtttcagttttttcttttcttccaatggtactttagctgttgagtgcaggttacaacctatattgttatgcagatggcttctttaggaataacttttatatttatttaaaaatttttaaattatgggannnnnnnnnnnnnnnnnnnnnnnnnnnnnnngtcatttgtcaatattcagtcaccaattctgctcacttcttgccatggataaaattgggtctttctggctaattaaaaaagacaactttataaaatggcactttaagcaagccatagttagttttatttttgtaatgcacatggcaaagcaaagacgtttgtgatgaaggaactgctcatctaagcaaaagatttgagtatgatatgataaaggctttctacattctaatttactttttccccccacttgaatgtgttttaaaggctaattatcagctcagtagagcagtgagaaactgatctaattgcacttgttctcctacaagcaacctccacgcagacacctcgtactgctacaggtgtgtcatttcctttaataggaccagggaccatgtaactgaggtgagggttgtagtagatgcttccagtgtcagtatgcctgttaattttaagagcttccctttcttgcagagaacaagtctgcccagattccatgctttctataactggaggacctggcaaacctgccgcatgctgcacacatctacctacgtacacatatacaatagtattgatgattctgacaataacagggtaaaacagttggtttgccattgttaaaactgatttacagtaacttacaacaactgtacttttgttggattagcaaatcatgtgtttaaacaatcccatatgttgggcaacagt

SEQ ID NO: 249059 - DNA, 960 bp, Homo Sapiens
gaaagggcaaatcagtaccatttacttcttttgttcacctttaaatgggttgggtcattgccagaaatctgagttctgggagagccatttaacttttcatgtaaattgattcaatatgtaataaattactccaatgattaaaattttaaatccgtttactacacttgagttgatcttaaaaataatatcaatctttgggaaaacagaggtagaagtacatctggattaatagaatttacagttcaatcacggtgaatttaaaaaatacatttttctttcaataattattttatgttctaaatgaggtaaaatttataaaatctgcattaaagtaaggtagagggcactctggtgataacaacgatgaggtttatttttgtcaaaacatccaagggaaacattaattgttgtttgtcaactgtgaacttcacactacattgtctaatgatagaaaattgatggttatcactctgtcagaaaatcctcaccaagaagccaattcaaggaatatgaaattgacaagcctttcaaacaaagatgtgttcggacttcactgatgcgatggtaggtcttttgggttacaatagatagggatgatataaaacacaatcttttcctgtctattcccttttagaaactggtgggtgtgctcacgtttgtctgggcattgcagcactgcacacatacatgaattaagcaaagcatcggaaagtattgacacatgagactaaaataaataagagaaacgagctgctctttatacctagaaatagctggaaattactgaaaaaaattaaagtgcagaggttttcattttagcaccatgaattgtgatgaaatcccatttctctcactatggcaggactgtatgcagtaaggaagctagagtgatgtgtttgaggcaatgtagatttttgcttcaaaaacagaagtcatgttatcatttgggaacaatgccaa

SEQ ID NO: 249060 - DNA, 913 bp, Homo Sapiens
tcaccccctttcctttcaggtccccgtccatcaccatccgacttgctggtgagggtgacgcgtgctcgtgtatgggaactgaggcccacaggaggagccgccctgccagtgctgggctgctctggagttctgttctcccattgcgttaccacctcacgagctgggtcacctctggcaagtccttctggcattgctccctcactttccttgctgctgtataaggctgtgagacaacaggcaaaaggtgggctgcagggcagctgcggtgggttctggtgagcctgggcagcacagccgggagccccaggcagagtctgccgagcatctgcagctggcagtgtggagccaggcctgcactttgatagcgttttgggcactgaatagcagctctaggatttgagtctgaagggtcttgtgaacagtgtgggatggcggcagcagcggttctagccaatgctggacacgcccagcctagcagggttggcagataagtcctggtacatccatgctggggctcagcacagctgtgagagaccacagagctgagtgtctcaagcagaaaggaactggtcataaacgaaatgaatcaatgcaggttactaagcagtgtcaagtagcatgttttatgacaacaactacaactccctgcccgccactaggagaaaagacgctgggggcagaccacatgtcagcagtgggtgtcgcttagtaatatattgtgggtcattgttattttcttctttttgtttacttgtatttcctaaatttttctacaatgaacttgtattaataagaaaaaaaccataaaatttactgtttttaaaaagctgctctaagtaatcagacagtcaaaagagcaggaatcagctctccaggaggctctttggtctggggccgaggggatgagggccaa

SEQ ID NO: 249061 - DNA, 804 bp, Homo Sapiens
ctccagtattattacgttgctctctatctctttcagtacaacttaatggaaaaacaataagatttctcaaataactaaaaatggaactataattccattcagcaattccactactgggtatatacccaaagggaaagaaattcttatatcaaaaagacaccttcactctatattcatcacagcactattcataatagcaaagatacagaatcaacccaagtgtctatcaatggatgattagatcaaaatgtggtatatatggaccatggaatgctactcagctataacgagtatgaaattccatcaattgcaacaacattgatggaatttgaggccattatcctaagtaaaataactcagaaacagaaagtcaaatactgatgttctcacttataagtgggagttaaaccaagggtacacatgtagaatagtctgcctgataagagtgtctttctttatctggggccttgggccattccaaatagtttatgctaacaatgtgagttacggtgcagccttgggccacatagtatcagtttgacttctggagaggctggggactgagtataagtcagccatgtggatgctccatgcctatatgaccaacccccagtaaaaaccccgaacaacacagctcatgtgaacttcttagtgagagactaagctctatctgtaagactccactaggagaagataactgggaggttgtccctgaagtctcctggactaagagaaaccttagaaatttagttcagtaacttagttttatggataacaaagttgagctttagagattaaagccaa

SEQ ID NO: 249062 - DNA, 1071 bp, Homo Sapiens
  misc_feature (291)..(346): n is a, c, g, or t
  misc_feature (987)..(1026): n is a, c, g, or t
gtaactctgtacctagttttactcaagccttacctgctattccagccatttcaggcttccagcgagtaagacaccaaccttaaaatactgcttttagtgcctctggggatggaggaagccaggcaggactggtgggatcctcactctactaataatgctccaaacagagggtctttcctcctgtccttagggcatgaggtttagtgtctacacggcccagagcctggagatggatagtaacaagtagacttggagggacacaaggcaatcagtgatgaaaaaaaagagacnnnnnnnnnnnnnnnnnnnnnnnnnnnnnnnnnnnnnnnnnnnnnnnnnnnnnnnnggttaacactttaccatgattagggagacctcacctccatcactaatccctgggaagagtatgaaaatggggagaagaaagggtaagaaatcaaacctcagcggttgaacaaagggtcaccgagctatactagtcaagaagcagcttctatgtaactgaccctgaggggataaaaacagggaagattccaccatctcccctgtgacctcagcacctaagcaggcactcgactataggctttccttctccatgattccccaactctatacatcttacttccaaaccccattctaaggtggcctggctcccagggaaaggactcagctcagggcagggcagggacagcccccagccagacggtattgcacattctctgttccttacttttaatctcaactgacaaacttgggtatctcgtacctctgagcacctctgagcttggggagagggagacgtaacagaaatggcacttcatcatgagggagggaggaagaggctagacagacatgccacaaggcaagatgacttgtggggaaaacatttttaaaaaaagcttccaattttgtggaagagagaaaagcaaaaccaaacaatttatccagtgctttcaaagcacagagggcaaagaaaagatgtaagannnnnnnnnnnnnnnnnnnnnnnnnnnnnnnnnnnnnnnngcgcagacccagccaacttttttgtacaaagttggcccttttaag

SEQ ID NO: 249063 - DNA, 908 bp, Homo Sapiens
acttccaagaatgatttctctatacaacttggctttgaagctcttcagggtctggtctcaatcagatttccagcttcacctcaatgggtctatccctaaaccttggcaataatacatttctcagcgtctggacaggctgggtctgtttccagcagggtgcccttgcatatgatattttctgtgccagaaagtcctttctccctttttcctttgagttactgttacctcctactccctctgcaggactgagtggctatgtttccctactctgtaaaggttttcccagctcccctaggcatcaatgatgtttcctcctctgagtccctctagcacactgcccacttctctattgcagcccttaccacgttaaggattggaatcatctaatttatccatgcaatgtatttttttctgttcccttgggaatatgcaggagttcttaaaactggtaactttagaatgctatcatttacatacgtatcaggttgaaaattgagaacccacgggggccacgcaagtagcatccatgagtgaagtgttcaggtataagcaaaacaaatgtgtaacattataaatggcagtagaccctcagctccccagccgaggggaaggaaccaaactggagaatcccactaggtcgaatgctgcttctccaggctagcctatctctgtacctggaaacaagagctcattattaccaaatcttttgattttttttcacatgaagccccaaatccttatgtttatatcaaatctcctgattttaaaatgctggtaactaatttgaaaagttttaacaatgaaaagtttcattgtattttagcaatgaaacacatttggtaaagaaaacacacgtgggtaagaagaggcctgtggggcaccattctgagacctctgatctatgccaa

SEQ ID NO: 249064 - DNA, 654 bp, Homo Sapiens
ttggctatcttgctgacatgaaactactttttatgttcaaaatcatttttataggttatgctattaattgctagattggcattacgaatgttacacttttagaagtcacttttttaaaaaaaagtatttgggacagtatagtttgttaggtgggtgtccacgagtgactagctgtctttccataggtctggtttggtctgttgtattcacaaggtccttatgcctcatggacagtgtgaattaaagttctattatctagaaaaggactgactggtgtgctgatggaaagtcatctaaactgatttgatagcatgtatgaagtaccttgatgagacttcctactctggaatcttatgtgtatatttaacaaaaaagaacaatgtagtttctttttgccacttcagtctgggtttatgccttgtaaatgagtttgctgtgacacagagaatgtgaaactgctattttgtcaggcagtgttcctaaataagcatttcagttgcactacatatatgtgggttacattccaataaaccttatcatatgttgagaatatcgtaagtcaaaaatgcatttaagaccctggaaaacccattagaaagtcaaaaaaattgtaagagtcaaaccatcataagttgggtaccatgtgtattaagg

SEQ ID NO: 249065 - DNA, 761 bp, Homo Sapiens
ggcttttaattagaagcttaaaactgccccagtactccttggaaactccatatggatggaaatacacagggtttctacgactggcagctttggttttattaataggactttcctacggccatttcaggatacttcaagtaacatcatatagaaccaaagttcaaactgtaagcaccacaagccagcacccacacctgactccatacagctcttgtgtgactcttacactagactgaatttacaggggtacagagaatgtggggaaaaacatcataaatttagaacagtaaacaacacattcccgaaggcaaacacacctagaagcagaaaaactccaactattccctgaattgtgtatctattgtgtgcaaaagatatccaaggatatggcaaagtgctaactggttaactctagatggagaagtcatgagtgatatttattttattgttattatccataacatccaaattacagtcaatatgtatagtcatatatatgggccccgcagtcagaatggttgattgaattccagctccatccttttcctggtatatgatggtatcttgatttctaggaatagttacttaacctgactgtaccttagtttcctcatcctataaaatgtgactattgatagtatgtatatcatcagggctaccacaaggatcaaaatatttaccatatgaaaaatgcttatagtagaataatagcttcattctgtaatgaagaattggtatgaaaatggtagtaagggctggtt

SEQ ID NO: 249066 - DNA, 957 bp, Homo Sapiens
ttggagcacaccctcatcagcccctacaacgagatccactggcctgcctcctgcagtaatggagtggacttatatcatgaaaataagaagtacttcgggctgtcggagtttattgaatccaccctttcaggacacagcctccccttgctcagatacgatagctcctttgaggccatggtcactgcattaggaaaaaggttcccccgcctgcacagcgcggtgatcaggacctttgttctcgtgcagcactacgcggccgccctgatggccgtaagcggcctcccgcagatgaagaactacacgtcggtggagacgctggagatcacgcagaacctcctcaactccccgaagcagtgcccctgcggccacgggctcatggtcctgctgcgggtgccctgttcgcccctggcggtggtggcctatgagcggctggcccacgtgcgggcccggctggcgctggaggagcactttgagatcatcttgggcagtcccagctcaggcgtcaccgtggggaagcacttcgtaaagcagctcaggatgtggcagaaaatcgaggatgtggagtggagaccccagacttacttggagctggagggtctgccttgcatcctgatcttcagtgggatggacccgcatggggagtccttgccgaggtctttgaggtactgtgacctgcgattgataaactcctcctgcttggtgagaacagccttggagcaggagctgggcctggctgcctactttgtgagcaacgaggttcccttggagaagggggctaggaacgaggccttggagagtgatgctgagaagctgagcagcacagacaacgaggatgaggagctggggacagaaggctctacctcggagaagagaagccccatgaaaagggagaggtcccgctcccacgactcagcatcctcatccctctcctccaaggcttccggttcagcgctcggt

SEQ ID NO: 249067 - DNA, 953 bp, Homo Sapiens
ttggcttttcagtaagtatttgttagatcttcattacattttaggcctccttcctccagtctcgatactgtgcaatggagagagaagctttgacctcttcagttaataagtattggctataatgttgcaaagtatttgccatggaatcgtgtagaatttgttaagtccaaaatgagagcaccctgtttgcttctttaaagtgtttattgaccttattcctgccatgttacaaatccatcatttgtggtggattcccattaataatggttactctctaggttagttcttgctgccacccctttctctcctggtggtgtgttccctgaatacacttaaccactatttctgttttgggccgccgaagtattcagttttctcaacatagctgcaacatttaaaaattatatgatagcacacaaaagtgtacatttctggcaacactgggctggaatatttgcatgggccacagcgtatggagcagggttgtaagtgcccctttgagaggaagaatgccatatcactgtgtgcctcagttctctcccagcctctcacatacatgtatgtcacctgcctggccctaaggacatttgagacctccctgtgttcttctctttgtcttgggatagcctggcttttgggaagtgttctcaaagaggcaagtgacatttgagcccctacagtggctcaggtgtgaagtcttgggcttttcccctgtggacttggagtgaagccttgtcagtgactgtaatgaccaaatgaggagttattttagcttgtgtttgttactatcttctgtcatgttaagggcatcttcgttgctagagtaatttcttctaaaatatggaaggtcaacacttttccctttagacttgtggatagtgatggataaaaataactctcttactctatagtaaacttgctcaagtggcaaagttatatttagcttcagcaat

SEQ ID NO: 249068 - DNA, 886 bp, Homo Sapiens
tggaaataatggaacacatgccagaaacccaacattttgattcctactctattctttccacaaaatctctattctctttgaagttttcatttcctagctggctaatgttacccctcaaaaccaaattatcttagaatcctaaatcaaattctaaactttgttcttgtcaaaaaaatcttgatgagcaactatatattctataaatcaaaaatatattttagaaatggaagatgggaaaagccacaaggttaccagagaaaaacagtagttatagaggaacccagaagagtgggctgctaccaagcacaatttttaaaaaccccaaacccatactctaccacaaatccctgaagccagcctcccactggaaaatttggtggctgttctcaatttgtccaaaatacatcatattggatgaaagcctctctgagacaggcaaaagtctaaagacctggaattttacaaagtggaggtaatactcaaatttcactgtataaacttctcttatatccacccctttccccactgtcctataaagataacagaatacaaatcctaagggctcctacctcccatctcttccaagttaaagcctggcaaggatgagatattaccatctggtttaaatgtcaccaaatgatgagttggtataaccacagaaaattgggaggatcctgccttaaagaccttgtaattatgtgggcttgatagggatttgttctttgtttctggggttatgttattagagtagtattaaaatgtttcagtatctgtagcctgtagtatgtatgccccatcagaatatgtgcttaatgaaaagttccaatcaagtgcttgaaacacactaagtttaggctttagttctctgaacattacaatttgccaa

SEQ ID NO: 249069 - DNA, 1170 bp, Homo Sapiens
  misc_feature (881)..(1031): n is a, c, g, or t
ttggctgtttgattagtttaggaagcagttattaaggattgattctccctgttgcggttaaagctgtctaccaagaaataagccaaaggaacattaggccaagaatctgaagggtgaagccaaaccactgggaagggctttctacttcaactacaatgtgattgaattaaaaaggaacattcgaatcctgtcatgtcacctcaaattcaacaagtctaaaattgaactcatttttcctcacgaagcggctccttaactgaactttcctaataacaggaaaacactgcagtgtaaaatgctttgccacaacatatctatctattatttcatttgattgtcacacacaagaaaatttaactctaaaatttaactttaaatttaactttaaaaggttaatcaaagggctgcaaattagtaagagaccaattctaaaacccaagttttctgaatcctaatctagtcatccattatcaactatatcacattgcccccccatatttgtgaaataaaccagcccattttatagaattactaagtgacattttatttgtattggcttttgaggattgcacatgagcagattttagtaaatatgaagtcagattttctcaagtagcaaagaagaaaccaaccaaccttcggaatcattaatcctgttttttatgaggatacctcagtgaaaaaacattcatagcattcttattattgaagtcaaaagatgacacagatgaaataaagtactgactctaagcctaaaaatgcctaacttacaactctaacatgagcaaaccatcatcagttatattaggttaatatatggtataagtagtatggttctactgttttgttttaatttgcaaattattttggcttggcaatgnnnnnnnnnnnnnnnnnnnnnnnnnnnnnnnnnnnnnnnnnnnnnnnnnnnnnnnnnnnnnnnnnnnnnnnnnnnnnnnnnnnnnnnnnnnnnnnnnnnnnnnnnnnnnnnnnnnnnnnnnnnnnnnnnnnnnnnnnnnnnnnnnnnnnnngttttaaaaagaattattagcatgaaatgtttacatatctgggttcctatttggtagatatgtaagtaacattgtaataaaaacactgtaactctccaatacaaaaggcagattcccgagagttgcatggggtaccgag

SEQ ID NO: 249070 - DNA, 779 bp, Homo Sapiens
  misc_feature (560)..(692): n is a, c, g, or t
agggtcttcactatgttgcccagcatgcacacactacatttcatcaattctgctgtgaacattttttcatgttttggtatcttaaattaggatgtgtcttataagcaatgatactgaagcactctggcttccagagctgaagagcatatatttgcattgttttgaggcactgagtctgtcataatgtgttgcagcagcctaggaagctaggtccacggtaggaggcagccccggggaggaatgatggtccaggctcagaagccatgcatgtcacctcccctcatgttccatgggcgagaacctggccacatggcagctcccaactccaagggaagctgggaaatgtagtagagctggacacccacatgtccacttagtaccgaggagggtgggggcgctgggtggccagctacatctccgtcacacgttttgtattgagtcctacagccctgcgtggtggtgcaaatgccccaggtcccatctgcactctaagtcagggactggtttgctcaggtcctggacataaggctgtctggacatccctctttggctgcatgggnnnnnnnnnnnnnnnnnnnnnnnnnnnnnnnnnnnnnnnnnnnnnnnnnnnnnnnnnnnnnnnnnnnnnnnnnnnnnnnnnnnnnnnnnnnnnnnnnnnnnnnnnnnnnnnnnnnnnnnnnnnnnnnnnnnnncccctggctgcgtgcttcttttacaagcgtgggtgacccaggcccagcagctttgcagttgcaggcccactcagcactttgcaccaa

SEQ ID NO: 249071 - DNA, 429 bp, Homo Sapiens
gttatcccaacacagaaatggttttcctcattttctaaaagcattattacattttttgaacatatagtgtaatttcctttaatgaaagtgactctgcttttattcatcaacttgctttgatggtggaaatattttctgttgggaggttatttattttaaattggaggattaatgacctttgcacaatctgtttcttgattgggtttgttatagttttgagttgggtattttatgttcattggtttttctctgtgaagcaatttttttctcctatattagatctaacttgcagtgtattttctaggctggaaagtggaaaatgaaatatattataatcttaggttacataaagtttctaaagtttcaaagagtcttgatacccaatcagtttatattctgaaaatatttataataaactattctaatttc

SEQ ID NO: 249072 - DNA, 889 bp, Homo Sapiens
ttggctagttttccttagaccctaaagataatgcccaacactatgagaaaaaggaaacgaatctgcttaaatgcgttaatagcaattataatgttttatttgtatatttttacgtaaactaaagaacttttgagaacaatcctttgagataaatggagcagattagatccattttatgaagaaagcaatgttttgtattcatgtcttgcttaggttcatactgatgagtgacagccaggaaaagaatgcactacgacttgaaagttctataatgctctttcattagtaatttcgagtctttcactcccaaatctgtgagtcctaagagaacatagtaccctctcatttatctgcatcagtggagatgtatgtaagaacatatttcaaatcatcacttagaggctgtgttttggtgggtacccctgagatcccctcacctcactccttgaagtttggctagagaaggacagttgatggaaggtaactagaaaaataacaaggcggtctgcatctgacttgctagtattggaagcagaattatagctgaatctatatacttaccccaaatgcccaagtgcttgcctctcccctacaaagtacattctcacaagttccttttggtatttacaatcaagattcaaagggactgttgactcagatctaactcctttcttattaacactgccaacttgtactcaaatgtgtatttgtagcctaccattaaatcaattggcagtttccaaagctagaaaggggactccaagtatgaacttaatttctcatacataaagaagtcctttcaattccattttctgcctttatgattttcgattttatcagtgctatatttgccctcagtttgctttttttagctgttaaatcaggaatt

SEQ ID NO: 249073 - DNA, 505 bp, Homo Sapiens
  misc_feature (226)..(234): n is a, c, g, or t
aaggctactcttaattaaacagtgaatgaatacaggtttataagcattcatgtaaacaggtattttcctatactgttggagagaacttacaaatgatataaccctcctgatgagcaactggtaatgcttaaatttaaaatgtaatttggcagagcaatttctaaaaatacatcccatagatatattcgcataagcgaataggaggatgtgcataggttttcagaannnnnnnnnggtaatcaacaaaacttgaagccaaccaagtaattggaaaatgcaaaattatgatatattcattcactgtgattgacaactacccaatcacagaagaaaaacccagtggggtacagcaagaggtactgatacgagatgtcttaaaacactgaactgctaagtgactaaaatcaagatgcagaactgtatgcagagtatgatacaatttctggaaaaatatgtacatgaaattcttactagtagttacctctagtgaatgcgtccgtcgaag

SEQ ID NO: 249074 - DNA, 1128 bp, Homo Sapiens
  misc_feature (227)..(324): n is a, c, g, or t
taatacatgctggaaagtacatcagatttgtgaaaataaaggcagataaggtggtctattatattaaataatttgcatagcaaaaggaaaaagctaataggtgagaaggcttaggggaaagtgcaataacatagaaagattttcactgtttgtggtcttttatgctgagaaagatttaaatacttttgtactctgtagagaagaaaccagaggatgagatagagtannnnnnnnnnnnnnnnnnnnnnnnnnnnnnnnnnnnnnnnnnnnnnnnnnnnnnnnnnnnnnnnnnnnnnnnnnnnnnnnnnnnnnnnnnnnnnnnnnctgatgctatgtgagagacattaagctaagaattaaactctcagataaggcattgtgggatggcatccagaggcaaatggagatgatcctggaaagaaaagtaaacgagggaaatttcttgttctaaacccagaggaaagaaacataaatattgtagctttattttctctcttgtttgaaagatggtcatctgcagaggtaaaatgacctgcagaccgagtaggagtttgtgaaactgtgaatggcatatgcagtcattgggatgagtgaaagaggagggaccagggacaaatatggcattcccttatcactaattcaggtgatatttagagagtataagttcctttggtattcacccttgggcacagatcaaatggtttgtctttgttggctcagggattagttaccttgaactatgaaatacgtagttgtacaggaaccagactaatctgctgtaaggaaaaggtaacatttttctccctactctattagtaatctaaatgaatccacataatatatagtagtttatctccacatggttttcatgatatccttcgatgtattcatgaagaatttagcatctatcaatttcattttagatgggagattagctctttattttaactcctgaatattttttacctcatctatgtgcactttcccccttcctgatgagccacatcgggcttcttgattttttactttccgtttttaggactgtctcttttatcttcttcactccacattatactcctgtctctgtgccttattaacgttctgtgtattattaaggccagtgctcat

SEQ ID NO: 249075 - DNA, 961 bp, Homo Sapiens
  misc_feature (547)..(601): n is a, c, g, or t
  misc_feature (819)..(849): n is a, c, g, or t
aaagaataagagttttattcagaaaagcaaggatttccatttaagcccatatgtcctagatgttgatgggggtgtaggtttgggtaggtcatagggtgtggctgggtcttagatatgtaaatttctcagggctggcagagtcagtcaggggtagccctttggcaagagtaatatgagtttggattatcgaacttcagagtttaaccctaaggggtaagtatttgctcgtttctaaattttgaagttttaaagccggcgttttgataatctgatatattttactaaccctctgaattcactgagagtaggtagggcactaattcagaggtcctagggaaaccttctggggggagataccaagttatggctacaaaatgacccaactttacatggcacggagctctaaaagtaagcagaattagcaagtgtggatcaacagatacaggatttaagaggcatcataagtttgcaggcggtagctgaaactaacaaatgaggtaaccagaggaaaaaggtgtaactgtgtgtgtgtgtatacatacacacnnnnnnnnnnnnnnnnnnnnnnnnnnnnnnnnnnnnnnnnnnnnnnnnnnnnnnnaagagagtttatgtatatgtgtgtgtgacagaatatctaaggggtaaaggaagaacaaatgaggcttctgaaaggcataatcagaggaagacaaacaggagaaagcaactccaatgggaaaaggaaggccagatcaacactggtaaacctcacaaaagtggtgggcatcaataagaactgaaaagaggtaaatggatttggcgtgctttgtgaactgnnnnnnnnnnnnnnnnnnnnnnnnnnnnnnngaaggatttgtcagttaagatgccattggttacctccaccacagttagtttattggagaaggaggtcacatggttcagaggtaagatttaatccaacttttttgtacaaagt

SEQ ID NO: 249076 - DNA, 760 bp, Homo Sapiens
gaaaggtttaattgtccccaaagtctcaaaaacaactagttgagtggatggtataaaaaaagagtttaaaatactatatagggacttaggcagcaaagcagtgcaacagcccccaaaaggtacacaactttccctctcacattgtttgcttctctcacaaaaactccttccatacttctgcccacacattaccctcatcctgagtgggatggcagtggatgctagtcactgtcactgggactacagcctgcacttctccttcatgagagttaactccctcaagactgagctccacatttactactatggagctgtcaattctgcaaatcttgtttctttcatccgtggctccagctcctctaatgctcctcctgcccagatgctgtactccctcccatccctcatcaccagttgtttttcctttacacactgatattgctaatgctgttggataccagcaattagaattcctgatggggaacaaactaggacatatgtcattgatatactctcaaaaagggtttaggagacaacttagtcctgagccagccctgccctttgtgcttaaatgagacaggtgggtggaaagtccttgaaagaaggaagggaaaactaccatttataagtagcactggagggcataagtcatctcctcctatgctgttggtgttggggtgggtgaacagacatagtacgagagctggagagagccttaagaaatcttagtcaattatccaagtctcccccattcttttcttcc

SEQ ID NO: 249077 - DNA, 838 bp, Homo Sapiens
  misc_feature (263)..(512): n is a, c, g, or t
  misc_feature (522)..(540): n is a, c, g, or t
gaaagtgcccatctcacgtagtcattctgaagattagatgatgtacggcatttaatgaacctgtcatagtgactttcagaaattaaatgctcaagaaaaatattggaaagtgtgcttgggaaatatgattcacaattgtaactaacagaaaagatgagatcatctgtcaatgatttaagtagcatagatttccatcatatgatggagtcaacaactatgaacagtataagaaaacttttaggccgggcgtggtggctcacacnnnnnnnnnnnnnnnnnnnnnnnnnnnnnnnnnnnnnnnnnnnnnnnnnnnnnnnnnnnnnnnnnnnnnnnnnnnnnnnnnnnnnnnnnnnnnnnnnnnnnnnnnnnnnnnnnnnnnnnnnnnnnnnnnnnnnnnnnnnnnnnnnnnnnnnnnnnnnnnnnnnnnnnnnnnnnnnnnnnnnnnnnnnnnnnnnnnnnnnnnnnnnnnnnnnnnnnnnnnnnnnnnnnnnnnnnnnnnnnnnnnnnnnnnnttctggctcnnnnnnnnnnnnnnnnnnngaaaacttctgtaagtcaagttcgacaaatatctatgactttccttaggcagacaagcatcacacattaatatactggaaaagttgtctatatttcaactcatattaaagcaccagctatttatattttgtcttctataataaaattatttggattattaaaatctacttaaaattaactgtttaatcaatttattattttcagatatcaacatgtctaagttgaccagctaagtcactcaaagacaatagtggtagttacccaaatatttttacttaaatttttacaagcatgaatg

SEQ ID NO: 249078 - DNA, 1158 bp, Homo Sapiens
aactttgtacaaaaaagttggcacttctccaagaatggaagcctgaactgaggccttgtgtgtcaggccctctgcctgcactccctggccttgcccgtcgtgtgctgaagacatgtttcaagaaccgcatttcgggaagggcatgcacgggcatgcacacggctggtcactctgccctctgctgctgcccggggtggggtgcactcgccatttcctcacgtgcaggacagctcttgatttgggtggaaaacagggtgctaaagccaaccagcctttgggtcctgggcaggtgggagctgaaaaggatcgaggcatggggcatgtcctttccatctgtccacatccccagagcccagctcttgctctcttgtgacgtgcactgtgaatcctggcaagaaagcttgagtctcaagggtggcaggtcactgtcactgccgacatccctcccccagcagaatggaggcaggggacaagggaggcagtggctagtggggtgaacagctggtgccaaatagccccagactgggcccaggcaggtctgcaagggcccagagtgaaccgtcctttcacacatctgggtgccctgaaagggcccttcccctcccccactcctctaagacaaagtagattcttacaaggccctttcctttggaacaagacagccttcacttttctgagttcttgaagcatttcaaagccctgcctctgtgtagccgccctgagagagaatagagctgccactgggcacctgcgcacaggtgggaggaaagggcctgggcagtcctggtcctggctgcactcttgaactgggcgaatgtcttatttaattaccgtgagtgacatagcctcatgttctgtgggggtcatcagggagggttaggaaaaccacaaacggagccccttaaagcctcacgtatttcacagagcacgcctgcgatcttctccccgaggctgccccagtgccggagccccaaattacgggggcctgtgcactccctgggccggggacccggggtctcctggacctttacagagcagctaacccctaggagccgtgggcaggtggccgcccctaaggtttcaagccgggagaaagccacctttcccagccctttcataccgctccgtggccggtgccttcccaaagggccctgcttt

SEQ ID NO: 249079 - DNA, 1043 bp, Homo Sapiens
  misc_feature (110)..(121): n is a, c, g, or t
aaaagatttacaaaaatcataaaaacatgatttatatttcacacttgagagacaaaaacaagccccaaaacatggattttaatggaggtggtttgcttcatttaaaaggnnnnnnnnnnnnggaagctgtaaccatacattgatgttaacatagcatgaagtttattcttgaagaatttacattgttgagcgatattaggggaagaagccatttggtgttgcatagcattttagtgcaccagatgggttttccagacaccagggaggcatcattgctggaatagtgaggtttggtggcagaaagagggcagtgatgtgtagggggaggcaaagtgaagtaagcctgggcagtggtcactaaagtgacactgctgaggcagctgcttccttcagaaggaaatgttttgtgaccctaaaattcatggtagtgctactgtccagggtttgggggctctttggaaatggagtatgtacggaactggcatgtatagacttatatagccatagaaagaggtggatagaaacaggtccaccatggcaatatttttttctggccagtttactaggcattaaaaaaaatactgcttttatgtgccaagtctcttatggaactagtatgggattaaaggacgttaattggaaaggagggtcagtatataaggaccacagtggcctgttaaggatgacagatgtctctagcagtttgttcactactaaagttaaacaggacaaaatagtctttcctgaccttgctggcataaatattaagaaaattgtttgagaattagattttttttagtatgtatataaaaacagcaccattctttgtataaatcagatagatcttatctgatagatgaagctaagaccctttgagtctacactgggttgactctgagaggtttatatcttattgggtattaagataaagaagggtcacttgagagcaaagcttagctttgaagccatcacctcccaaatggtgaccaaggaggaaacttttaagccatagtatagatgctaaaccccatttagacctgcat

SEQ ID NO: 249080 - DNA, 618 bp, Homo Sapiens
tggtgaaacggttttgaggctttttgagaatggctgttctatatgcccgcgtggggctcatgcggcgagcgccgccactcccgcagtggcccctgtgggggtgatacgtgatgtggcttaaatgtgagaggccacctggacccgtgtgattgccacgtttgcaggagcgcagccacgtgcacagggatcttgtgacattctgtgtgaggctttttgcgctgggtccacccatgattagaggactagtgtgactgtggcggcccctgagaagggaagaagctggttgcgaccaggaaggtctgagatggatgaatgacagatctctggaccagggcgtcctgaaccttagatgtatgcataggagcggtgtgaggtgactgtgtatgtttgtgtgtgagagtccagagccgacttagaggagtggaagctggcacatgttatctgccagaagggacagatccatggtaaggatttttaaccttgctgagagaccagtaactccatcaccaagtgtaatatgaggaaatggtgcttgtttgagaacaagtgattctgcttgtgtctgattctcattcatgtatgtgagatggtttgcacttgaaactgtcagtgagccaa

SEQ ID NO: 249081 - DNA, 778 bp, Homo Sapiens
  misc_feature (43)..(63): n is a, c, g, or t
  misc_feature (112)..(132): n is a, c, g, or t
  misc_feature (148)..(395): n is a, c, g, or t
ttggctcaagcagtcctccaccactcctggccaagaagtgccnnnnnnnnnnnnnnnnnnnnnaaagtagctgctgaacacaggaaaatctgcctttttcttgaatcgtggnnnnnnnnnnnnnnnnnnnnncaaaacggagtgttgnnnnnnnnnnnnnnnnnnnnnnnnnnnnnnnnnnnnnnnnnnnnnnnnnnnnnnnnnnnnnnnnnnnnnnnnnnnnnnnnnnnnnnnnnnnnnnnnnnnnnnnnnnnnnnnnnnnnnnnnnnnnnnnnnnnnnnnnnnnnnnnnnnnnnnnnnnnnnnnnnnnnnnnnnnnnnnnnnnnnnnnnnnnnnnnnnnnnnnnnnnnnnnnnnnnnnnnnnnnnnnnnnnnnnnnnnnnnnnnnnnnnnnnntgaaccactgcacccggcctgaatcatggttttttgaaaccattggcatctgaacctgtagctctctctggtagtgttgtgtggttttaaatgtcatgtgagctgatttactgacctcaacctactgccagatgaaggtgtgatcctgtgataccaatcttgagggtcccttctagttttagcattcagtgacttctcttgtttatttttgtttgaaaaagtaaaaggctctctttttggctatagagttgcatcttgaaatttttgacaaattacatagagctgaagaaggatacaagttttgatatcttaaaatcacagggttgaagcttgaaaggacagtattggcattgcagctaagtggagctgtgagcaatcatgtg

SEQ ID NO: 249082 - DNA, 1039 bp, Homo Sapiens
  misc_feature (192)..(249): n is a, c, g, or t
ttggcccaccttcactgtgtcccacccttcctagctttgtgcccggggtgctgagcccttccccgtcagccgggccgcgggaggagggagccgccaccgaggagctgccgctcgctgccccgggcaggggcacaggttgatgtcatatttttagtcttgagaaacagcatcatgccaaggaaagagcttgannnnnnnnnnnnnnnnnnnnnnnnnnnnnnnnnnnnnnnnnnnnnnnnnnnnnnnnnntctagattgcaaccaaggcaatgtcttactacctcagctcagaaaaccacctggacccagggcccatctacatgcgagaaaatgggcagctgcacatggtcaatctggctctggatggtgtcaggagtagcctgcagaagccaaggcctttcagactgttccccaaaggcttttctgtggagctttgcatgaacagggaagacgacactgcacggaaagagaagactgatcatttcatcttcacatacacccgagaggggaatcttcggtactccgccaaatccctcttcagccttgtcctgggtttcatctccgacaatgtggatcacattgattcccttattggctttcctgagcagattgctgaaaagctgttctctgctgctgaagccagacagaaattcactgagccaggtgcagggctgagggctttacagaaattcactgaggcctatggaagtttggtgctttgctccctgtgtttgcgaaacaggtatctcgtgatttcagaaaagcttgaggagattaagtctttccgggagctgacctgcctggatctttcctgttgcaagcttggagatgagcatgaacttctagaacatctcaccaatgaagccctgtctagtgtaactcagctccacctgaaggataattgtttatctgatgctggggtgcggaagatgacagcaccagttcgagtgatgaaaagaggccttgagaatctaacattattagacttatcatgtaactctgagatcacagatgcaggcattggatacctctttttctt

SEQ ID NO: 249083 - DNA, 1027 bp, Homo Sapiens
  misc_feature (226)..(237): n is a, c, g, or t
  misc_feature (644)..(860): n is a, c, g, or t
aaggccaaatcttagctgtccttgttatacagcctgcagtagcaagatgcaatagtttatacgtaagctgacatggaagcaggagttgtttctgggtaaacaatgtggtaatgcaaaaacccaaacaaatgctcatatttctgagcccataatgacactactaaaattttagagaaatttatccctaaaagataattaaaaaagcaaataacccattattgcaagnnnnnnnnnnnnccttaggagacagagtcttgctctgtggcccagggtctctctagatctctatttcctgttctgttaaaatgaagataataaatggacaggtccacattcctctatcctcatttccaaaacctaaaaagtgctgaaaatgttaagtgtgttttttatgtttgaaacaaactaatatggtagtaaaacctgaaccgatgaagcatcttataatcttcatttaactgttaatgtgattatttgcattctgctgcagaaacactagtggttttaactctgggatgctattagagtcttaaataatgtataatgttcagcatactacactaactttttagtatttaaaaaatactgaattctgaaacacacatggcccttaagggttttggatataggattctggatctatnnnnnnnnnnnnnnnnnnnnnnnnnnnnnnnnnnnnnnnnnnnnnnnnnnnnnnnnnnnnnnnnnnnnnnnnnnnnnnnnnnnnnnnnnnnnnnnnnnnnnnnnnnnnnnnnnnnnnnnnnnnnnnnnnnnnnnnnnnnnnnnnnnnnnnnnnnnnnnnnnnnnnnnnnnnnnnnnnnnnnnnnnnnnnnnnnnnnnnnnnnnnnnnnnnnnnnnnncacaaagaattttccttatctaacaaatttcctattagcaacgttctaaatagctagtatcttgaataggacttattttcacaccgattctcactccttcttaacaatctagaccgactgctttttagcatgtgtctcttcaatacgggatcctctagatcactacc

SEQ ID NO: 249084 - DNA, 1260 bp, Homo Sapiens
tcaaagagagagctaatttgccccatgccaggttactattaagcctcccaactcccaatacagtgccctatctgcttcactacacttctctccattatttagaatttgcttccaatactactgcactaagacagaaaaagatgagggtcttaccaattaaatgctattcaatacaaaccctgaaatgataaggttctccatgaaactgacctcatccaatggcaaggctaccacaaatgatgtcagagttgtcacccaaaatgcctggcctcaaccaatcattgtctctgctaatgacaagtcacagtgttcattactacaggggagtcattgattgctgaggaacaggatggatggaaaacacacttagagaaaaatatcatcatgtcctttctaacctccccctaaaaagtcaatgaataacctaatgaggtaaattatgatacaaaaaaatttccagaagtctttcaaaaaatctttgaaaatcccaagtttccaatcctttggctttctcataagtcctgatcatacaaaaagtttgggataggactctctcaaggaacaaattagactcaaatttcccctaaaactcaagatgaaaaaattgttgtcttatttcttggtggctcatgttatctcaccaagttgtaatgggaacaaaaaaacaattactcattcaacgttgcacatggaccaaaactgagatagtccatccttcagagtatgattaaaacaaactagccaacagaggaagttatcctatgtcctattatgcctttgtataaatcctcagatcaccgcaggaattatctgagaagattacaccagaaaacaatgacagagtttgtcccttctttcaagataagaatctctcatcctgggtggccaactgtcttgaaggactttttgtcttgtgaattttcagatgaataatcacaaacattcattcactcacccttttggctagcaggcatcacatccatccgttcatggctgacagcaaatcaaagaagggatcgaagccctcaccattgccgaaatgttttgttcggaaactggaattgtcaacaaaagcttctgggacacggcctgaggatgggcacattcctcgctcccggtgccttatcgctaggctcgcgccaccccggctggctctttggggacggagaacccctagcgccgcctgggctctccggtgtcctgaccccgcgcccgcgccgcctcgacttaccgcggaggaagacaatgcaatcattacct

SEQ ID NO: 249085 - DNA, 1306 bp, Homo Sapiens
  misc_feature (182)..(236): n is a, c, g, or t
cttaatttaatcccacattttaagacttacaggtaatttaaattcaattcaacttactgagtatttactaagggtaactcactatgggaagtactgtgggaaatacaagggtaaataagacatggtgcctgctctcaaggaaattatgatagactgggaaaagggaagagaaagaagtagannnnnnnnnnnnnnnnnnnnnnnnnnnnnnnnnnnnnnnnnnnnnnnnnnnnnnngcatgtatagctcccaatgactctgtaagttagatattgtaatatctactttatataggaagaagaatgaaggcactgagactttaagtaaccacctccaaagctgggatttaaactcgtatcttggattcagaggcctgtgttcattccactacacatgctgttccctatgattcaaggcagaatgtgataaatccttggggagaagctacagacaaggtagaagaggaagagaagagattgctccttgcttgagggtaaaggtacatgacaaaggtaggtcttagaggtcaggaaggcttacgtttgacagagatggagggtggaaaaaattgcacaagcagagcaaaatgagggaggcaggaaagttcagtacatacttaaggcccagtggaatttgtggaccacaaggctggaaagtggtgcggggaaaaatcacggtcataatgaaatgctagctcaagggctctgaactccaccatcaggcaatggtgagccactgtaggttttctgagatgggccatagtcagagctatgcttcgggaagatcacgatggcaataatgcatcacaaggatggagggggtgagaatagcttaaaggtaggaaaagcagttagaaggtcactggtaatagcagttgaggcttaattagtcagaatggaaaagaggatatggacatgagagatatcttagaggtgagaatgacagaactcggcaatcaccgcatttcataatgcatcaagtaggctgaccatatatcctggtttgcctgggatatgttttcctgatgtaattactaatggcacccttttactctcgaaaaggtttggacaataaactatataatcatattaattaggagcaattagtaaacagaatcaaaggtgactccaagattttaaacctggattagtaaggaaagtggtaacacctttggaaacacagaagggaaatcaggttttggggaaagatgtggagttttgatctggacatgttaactttgctgctcaggcaaggatttatttaagagcgagaagcaccttgcccacggatttcccctgtatcccaa

SEQ ID NO: 249086 - DNA, 949 bp, Homo Sapiens
  misc_feature (459)..(491): n is a, c, g, or t
  misc_feature (493)..(784): n is a, c, g, or t
gaagccagctcagaaaaaagctgaataaaatatgcatttctaacacaacatattacaagcttcttctgtcccttaagattttgctctcttctcatgctttgaaattggttgaaatagattctatttaggaaccaaagaaatggtgttagaaaaataatcatttctcttcaactgtcattagcacctgagacaatgatattaagaaaggtcattttctagaaggctccatatgtgacatagcctcccttagggtgagttaaagggattcaagagtctccaagcctcccagacatatgatattgtgaagttcggggtggaaataggggccaggagacctgaactcaagcttgactctaccatgtattagctgtgtgtcttgcccaaactcctcaacctctctgtctctcagtgtcaaatgtaaaatgagaaagacaactatagtaccagatacataaggannnnnnnnnnnnnnnnnnnnnnnnnnnnnnnnnannnnnnnnnnnnnnnnnnnnnnnnnnnnnnnnnnnnnnnnnnnnnnnnnnnnnnnnnnnnnnnnnnnnnnnnnnnnnnnnnnnnnnnnnnnnnnnnnnnnnnnnnnnnnnnnnnnnnnnnnnnnnnnnnnnnnnnnnnnnnnnnnnnnnnnnnnnnnnnnnnnnnnnnnnnnnnnnnnnnnnnnnnnnnnnnnnnnnnnnnnnnnnnnnnnnnnnnnnnnnnnnnnnnnnnnnnnnnnnnnnnnnnnnnnnnnnnnnnnnnnnnnnnnnnnnnnnnnnnnnnnnnnnnnnnncataagggttttatggggagtaattagttaaggcattgggctggactgtgagtatttgatttctcttagtgcctctggtttaatattggtgacagggtctgcacatcagcgtatgtggcaggctaagtcttttccccagttctcctattcctcttcaccggccat

SEQ ID NO: 249087 - DNA, 834 bp, Homo Sapiens
  misc_feature (526)..(642): n is a, c, g, or t
  misc_feature (681)..(744): n is a, c, g, or t
  misc_feature (771)..(785): n is a, c, g, or t
cgcacagacaaccagacaccccgacaagctgagctgatgtggaatgggcatgttctaaaagaagcagcactgacaaacatcttttactcacaaatagcccggcagccgagggaccatttggagtaaggccatccctccagggcgttctgagaagtcactacagtcataaatgggagggtgacacccagagaccggcaacggcaacgcttaggtcgggatccaggtttgggagaaccattcgcgcggtagtcacacacacactatgtttctcacgcccactgctgcaaacaccttcgtgggaagaggaaaatgaatgatcgtgtgttctgttatcctgtgagaagagtgagcctttaaaaagtgaataaacaccattccagttgtcgcaaaatctttattaataataagcaaaatgccttaaaagcacagtatgctctcgatgacctatgttttggattattcctatttaatggaggtgggggtggggagttaaagagcaacacatgatcgggtgcagtggttaagnnnnnnnnnnnnnnnnnnnnnnnnnnnnnnnnnnnnnnnnnnnnnnnnnnnnnnnnnnnnnnnnnnnnnnnnnnnnnnnnnnnnnnnnnnnnnnnnnnnnnnnnnnnnnnnnnnnnncggggcgtggtggcacacgtctgtagtcccagctatggnnnnnnnnnnnnnnnnnnnnnnnnnnnnnnnnnnnnnnnnnnnnnnnnnnnnnnnnnnnnnnnntgggcgacagaacgagactccgtctcnnnnnnnnnnnnnnngagcaaaacatagcaactctgtgtgttgcgggttacctgtctcacccaa

SEQ ID NO: 249088 - DNA, 872 bp, Homo Sapiens
ttggaacaatgttgaccataagagaattactgccaattattgctgtgataatattgcagcaacttgctcatgaaaaattccattgcaatgatactttagacctaaagaaaattgtgctttatcctttcttcttaactatagatgggcagatattgttactgatctaaacactcaaaatccagaatacctggatatccggcacttagagaggggactgcagtatagaaaaacaaagaaggtaagaagaacaccattgtgtttgaaggcatttcccagctgaccaaaatgtggtgtttttacttagcactctttaggttgcaagtaacagtaacctatatttgatagaggagtgaaaattattttaaggacacagggctgtctttaaaacccaagggcaaggggtataacctggagtcataaaggaatggtagatggtagcaggtattggaatgacagcaagggccaagtagctggtagtctgcttcactcttttgggggctatatattgttcttagctttccttttgtctgattattttcttcgtaagatcatcatctttccatttatgtgtcttttttagatgaacagtctagactgagactgacctgtcttgggttcagttccatagtcttagcccagcttgggccagattaactgtggccttgtggcagagtcatgtgtacaaacaaggctttgggagaggctctcaggaaatgatatcttattgatgcaatcttactcatataactatatgaagaataggagagagaggaaaaggaatgatcttggtgtttgaattaggcagatggggaagttctctagtatgtgttgggagtgagtagtagagaggcatggggaggaaggtgtttggc

SEQ ID NO: 249089 - DNA, 1031 bp, Homo Sapiens
  misc_feature (181)..(189): n is a, c, g, or t
ttggcatgcatacaaaaggaaatgatacaggaaagtaagtttatactaaagcaaaaattgaggggctgtatgctcatgtttgataatgtggtaggtcagattgtgattcctatgcatatgtatttagtttctgttgctgtaaaattgagagataagtatagatgttaactctagaaatacnnnnnnnnntttagtttttctttccccactacttaagtctgaatctagactcttgagttgcctctttcctacagtacgaaatcaaacaaaaaccatggaaggctgagttgactgctgctttcaggttgaataaatgtatcaaaatggtcacaaataattggcttttctggaggtgctaagaaacttaaatgacatttacatggtgattgataatctttaaagtattagcttctttaaggattaatgtctaagtaaagctaaagaaaaaaaaggcatgtttttaaaatcctttgaaaaatttttgcttacatgttgttaacattcctgtaccacatacagaaataatttaatattttcctcacaggaaaaccagtggctgttacaagtaacagaggcacaggaagggcacctttacgtcctggcgctaacccccagctggagtggcagtattaccagaataaaatcctgaaaggcaaagcagcagatataccagattcatcattgtgggagaatccagattctgcgcaagcaaatggaattgattctgttttgtttagggctgaaattgcatcttgtagttatgaggccaggcaacttggcattaagaacggaatgttttttgggcatgctaaacaactatgtcctaatcttcaagctgttccatacgattttcatgcatataaggaagtcgcacaaacattgtatgaaacattggcaagctacactcataacattgaagctgtcagttgtgatgaagcgctggtagacattaccgaaatccttgcagagaccaaacttactcctgatgaatttgcaaatgctgttcgtatggaaatcaaagaccagacgac

SEQ ID NO: 249090 - DNA, 762 bp, Homo Sapiens
ggggcaccaatatactgatagaaaagtcacaaccaccaatgtatcaacaaagcacaaaagtatctttaattactttgtgaacatcatcacccacttatcgtagaaatgagaagcagaaaactgtataaaattattttagtcatgtaccaccacaataatgatagctacagtttatggaatacccaatatgtaccaagtcttaagattatgcttgctcagcaattctcgaagtgtggccttggaccccgggaggtctccgagaccctttcagagggtctatgaagtcaaactattttcatgataatattaagatgttactttactttttgactgtgttgccatttacactgatgacgcaaaaacaataatgggtaaaaatgttagcataattcaaggcagtaacactaaactgtactaattgtattcttcattgccatatacttgtgttttttaagccagttttacttaaagaatgcttgatgaaacagtaacaattattttattaatttacttcatttgcacatctttttgttattctatatgaggaaatgggaaatatgcataaagcacttttgctgtggtaatactaagcatgacacctgtttgaagaaaacttgtatccaccacaagttttgcaacttcccaatacttataaagactttttgctagtatctatggtgatagtaacaaaaatagtttttagaaagatattagtgaaatgtatcaacacttggaagccctgcataactcagcaaaccagta

SEQ ID NO: 249091 - DNA, 557 bp, Homo Sapiens
ttggcagggattgagttcttgatttgattctcagcttggccattgttggtgtatagcagtgctactgatttgtgtacgttgattttgtatcctgagagtttactgaattcgtttgtcagatttgggagctttttggatgagtctttagggttttctatttatatgatcatattgtcagtgaacagtgacagtttgatttcctgtttttctatttggatgccctttatttctttctcttgtctgattttctttggtgaggccttccagtagtatgttgaatagaagtggtgaaagtggcatctttgtcttgttccagttctcagggggaatgctttcaacttttccccattcagtatagtgttggtcatgtgtttgtcatagatgccttttattatgttgaggtatggctctattaccttgaggtacgtcccttctgtgccagttttgctgaaggttttaatcatgaagggatactggattttgtcaaatactttttctgtatctattgagatgatcatgtgatttttgtttttaattctgtttatgtgacgtatcac

SEQ ID NO: 249092 - DNA, 659 bp, Homo Sapiens
ttgggaaaaactcccaagacacgaattgccaaagctagctctttaaaaaatagataacctgatagccctatgtagttaatacccttccttatcacagtgaagactctaggcccagatggcgttgttagagatttcgaccccatgtttaacgaatacatattacactttctccgcaaacctttccagaaaatttaagagaaatcattcttacctccttctgtgaggtcagaattatggtcatctccaaatccgactaaggtattacggtaaaataaaacctacagactaatatgtctcacgaatatagatgcagaatttctctattttagcaaattgaatagtagaccaagtgggatttattcctagaatgcagagctagtataacattacaaagttaatcagtataattcactatattgaaaaagtacatgtcaattgatgaaaaggggaaatacaccagcatctattcctgataaaaaaaataatctcagctaactagaaatagaggaagggaattttctcaagctgataaagggcatctgcaataatcctacagctagcatatacatatggtgaaaggctaagtcatgttatctctgagatcaagaagacgacagggatatctactttcaccacaactattcaacctcgtaccagag

SEQ ID NO: 249093 - DNA, 925 bp, Homo Sapiens
agatttctgcattttggctacaaaagctgatgaaaatcatcctcagtttgtactagttctttgtaattctattggtacacccttggatcccaaatacattgatattgtaccattgtttgttgcaatgaccagaacccatgtgatagcagcctcgaaagaagcattttatacctggcaatatcgtgtggcaaagaagctcacagcattggaaattaatcagatcacacggtctcgaaaagaagggagagaaagaatttatcatgttgatgataccccttctggatcaatggatggtgtgcttgattatagtaaaaccattcaaggcacaagggatccaatttgtgccataactgcatcagataagatattgattgtgggtcgtgaatctggcaccattcagagatacagtctacctaatgttggtttgattcaaaaatattcccttaattgtcgagcctaccagttatccttgaattgcaactctagccgtcttgctatcatagacatctcaggagttctgactttctttgacttggatgctcgagtaacggacagtacgggacagcaagtagttggagagttgttaaaattggaacgaagagatgtctgggatatgaagtgggccaaagataatcctgatttgtttgcaatgatggagaagacaagaatgtatgttttcagaaacttggatcctgaggaacccattcagacctctggatatatttgtaattttgaggatttagaaattaaatctgttcttttggatgagatattaaaggatccagaacatccaaacaaggattacctaattaactttgagattcggtctctgcgagatagccgagcactgattgagaagttggaattaaagatgcatctcagttcatagaggacaatccacacccccgactttggcgcctactgg

SEQ ID NO: 249094 - DNA, 1004 bp, Homo Sapiens
  misc_feature (177)..(242): n is a, c, g, or t
  misc_feature (941)..(961): n is a, c, g, or t
ttggattatcttggcagttggtggtaaacctaggcaaaagagtgtggactgtgccaagggaactgtggaaatgttaggggaaataaagctttacatctaattagagtacattgtgtgcatgagaaagaaggtggaaaaggtggttgcagcagaaagcaagttggaggtgtagctcannnnnnnnnnnnnnnnnnnnnnnnnnnnnnnnnnnnnnnnnnnnnnnnnnnnnnnnnnnnnnnnnnaggagacagtcttgatatgggcctataacatgcctgatgctgggcagccactcagtagttgtcactgtttttattaatgttgttgcttttattaaaagactttctcagctgggttttgcaagccttcagtgagatggtggtatattagtcagctagagctgtgtattaggccatcttgcattgctataaagaaatgggtaatttataagaaaagaggttaatagccaccacaaccagcctcccttttgtcagcttatcaccccacccttatgaccttatttaaccttaattacctcccaaaggccctgtctccaaatacagtccctgttggaggtcagagcttcagcatatgaatttagtcatgggtaggtgacacaattcagtccataacagatggtcaaagtctgacccatagtgttcaacagctgctgttagttactctccttggctagtagtatgccttgaggcattaaagaacaaacacacaaagctagtgtggtgtaggaggcaccctgagaagttctgtgatgggctctgtctcctggtgctgcagaggaaggcatttgtgtgtaagtgactggtggcctcaaccatgggagggtctcagatttcaacatcctcctaaatcccttgggggtgtttttgtggaattcagattctgcctaaccggctggggaggtaccggctaagggcctacannnnnnnnnnnnnnnnnnnnngagacacctctcactttgtcacccaggtgaggcgatcaggctt

SEQ ID NO: 249095 - DNA, 468 bp, Homo Sapiens
caaaagaaggtcaaactgtgggtcgtagagccttgacaatgttgtcctcctgttcatctgtgcaccacttgacagactgtagcttctcttgctctcgaccggccctgcattcttccgcaccctccctagctctgaaatcaactctcttcggtcgtatccaccttgcacccgcaagtcaagccgccccttgtagaaaaatccctccaccttccgttccccgctaggtcaaccccactgtagacaggaaaaccaggccaggagagtccgaatgagaatttattgtgaatcgattcccaagctcccttccgggacaagtggtctgggactgggaggagcaacggccccagcgcgcaacgctctgcgcgttcctccgaatcccgtcggcttctcgacccacgcagagaagccccgggcttggcggctctagccccagcgccaaaggagacccgccccagggccgggcttggt

SEQ ID NO: 249096 - DNA, 1120 bp, Homo Sapiens
actataaaaggaaactttgtacaaaaaagttggaatgatttttgttcgtaaagacttaagacagctaatgaattgtgggtaacctaacatcagtgttagtttagaaagttaagtagatgagatcccacatccacacacaaagagtataaaataagagacaagaattctaaatgaagtacacatccaattcagtgagaaattttatgaactcagcagtaactacttcctttagtattgcctattctcaaaagtttttgagacctttaaagattgagaaccccaaagagctcttgtttatttgggtgatacctgtcaacatttgccctattcaaagttcaaacaaatttgcttaaaaataacaataaattaagcgtattgcattttaagatagcatatttttaggaaaaccgtttttcaaaattaaaaagctgtagtgcagagagcagccttgctttccacttgtgcagctctgccatctggctctgtagatctgccatggcattcacctgcctcacggtcctgcctcatacagcatttggaagactcccaggtgttctcgtgagagagggagagtagggaaggcaactgatgtgtttgtactccagaacggttttaactccatagacacctgcaagggtcatgggagcctcctgccacactgtaaggactgctcatctgtcctgtcctggccaagaagtaatattttcagagagagttccatgtaccctgctttgatatttttacagtagcttgtcctaacagagacatttttacaaaatgattcccaatttattcttagggtgttttcttttgtgttctcatgttcgatatgtatgtggttgagtaatggtctgtacttcacaggctgctctgaggatgtgtagttctctagtggggggaacagtctgttttacccttgggggtagccacaggctgctgacaggtgttcacctgcctgtgtcctgatagatgtctttgttttgtctgtatatagagtttcatgggcaccttaaaggagtagtgttgctgtacttatgcctctgttctaaaagaaataaattaccagttattgtgatagctgaactctagtgatctttacttctgatgttaaaagtacact

SEQ ID NO: 249097 - DNA, 926 bp, Homo Sapiens
cttttttataatgccaactttgtacaaaaaagttggcttacttgtagttaatgttcatttttgccctgaattatataattttccacgttttcgaaattttaattataaaattatgcagttgcattttcttttatgttctatgacatgctgtttctgttattggacataggttattttcagactgtcatagctttcattactaaagatacctgacttgcctaacacaaaagtacttatttgtttacacatatacatatgtatatgtatttaagtatatgtatacttaatcatatagctgataactagtttttaaattttaatgaattttagcatctgggtagtggaaacaactgtaattgacatgtcaatccaggtttttaaaataacttactttatgtttgtgatattacacactaaggcagattttgtgttcttgactactgtatcattaattaactactagcattaatttcagcctcatatactatgagtgatagacatggccttttttattatgtaatgtttcttattgatacagatggcttaagcaaaatcagactaaactatagcgatgaatcacctgaagctggtaaaatgcttgaagatgaactcgtcgacttctcagaagatcaggataaccaggatgatagcagtgacgatggattcctcgctgatgacaactgcagttcagaaataggacagtggcatttaaagcctactatctgtaaacaaccttgtatcctacttatggactcactccgaggcccttctcggtcaaatgttgtcaaaattttaagagagtatttagaagtggatggggaagttaaaaaaggaagccaaagaagtttttccaaagatgttatgaagggctctaatccaaagtaccacagcaaaacaacttcagtgactgtggtgtatatgtattg

SEQ ID NO: 249098 - DNA, 1212 bp, Homo Sapiens
  misc_feature (568)..(578): n is a, c, g, or t
  misc_feature (743)..(759): n is a, c, g, or t
  misc_feature (929)..(942): n is a, c, g, or t
  misc_feature (1142)..(1165): n is a, c, g, or t
ccaaaaatgctgttttgggccaggttcggtggctcacacctataatcccagcactctggctttcaaattgataaccctacaccccctataaatttttacattcttaacagagctaaccataggaacttccaaataatttctcagtggaaatgagtcttcaaaatcacacatggctcataagagttttgcttttttaatgccttctcaaaggacccagactgctagattttcataataactactttaaccagatagacttactataggctggtagttccccactaaaagatacttttctcttgcttagtagtcaccttcctgtgttctagagcttccctatgcttttaaaatatgcattattacaacagttctcctaaaaacaaaaccaccataagagctgctgcactcggggagccctgaatgaattctagagcagcgcctgagtcctgcattctttcttcattgtcctttttgcttaatttgcctgtggtgtaccatcaaccttacaatggagacagagagaaagtactccacctaacctatttaagaaacatttgcaatatactgnnnnnnnnnnnacaagtctttaattaaaaaactcaacaaaaatatataattgagcattttacataatgcatacatttttaatatctgcaggtaagataaacaacagaaggcaaaagcagatatgctgtattgcttctttggcaactcaccaatatcatcccctgcagaaacagagnnnnnnnnnnnnnnnnnaaatccatggtcttaaaataattgtcccttagtataaacaaaatatttagcaataatacagtagacggattcttcaaattcacaacaatttataatactttataccacaagggtaaactagtaagctgctttttaaaattaaggcagcagcagtgtttagagggggagtnnnnnnnnnnnnnngacatcctttttctagttatatcctggctctgccttctttgttgttgtttttaaataacgtcacattcaagctttacgtcttggatgacattcctaaggataataaaatccttttccctgtacataaactgtgtttcacttccagatcagtctgacactctccaacaaaaccaaatacatttcgtatgaggcaacacaannnnnnnnnnnnnnnnnnnnnnnnggaaacaaagggcggaaaaaaggaccgggccccggcctgaaattcga

SEQ ID NO: 249099 - DNA, 989 bp, Homo Sapiens
  misc_feature (736)..(755): n is a, c, g, or t
tggctcagtgtttagctcccacttagaagtgagaacatgcggtagttggttttctgttcctggattagttcacttaggataatgacctctagctccatctggtttttatggctgcatagtattccatggtgtatatgtatcacattttctttatccagtctgccattgatgggcatttaggttgattccttgtctttgttattatgaatagtgctgtgatgaacatctgtgtgcatgtgtctttatggtagaatgatttatattcctctgggtatatatccagtaatgggattgctgggtcgaatggtagttctgcttttagctctttgaggaatcaccatactgctttccataatggttgaactaatttacactcccaccaacagtgtataagtgttcccttttttccacaacctcaccagcatctgttattttttgactttttagtaataggcattctgactggtgtgagatggtatctaattgtggtttatatttgcattctctaatgatcagtgatattgagcattttctcataagtttgttggtctcatatatgtcttctttagaaaagtgactattcatgccctttacctactttttaatgggattctttttttctcttataaacttgtttaagttccttatagaggctggatattaggcctttgtcagatgcgtagtttgcaaaaattttctcccattctggaggttgtctgtttactctgttgacagnnnnnnnnnnnnnnnnnnnngctgtgcagaagctcttaagtgtaattagataccatttgtcaatttttgtttttatcatgattgtttttggtgtctttgtcattcaaaattaatatcattgacatagaaaattctcacattgttgcagcattttaaaaaatctgttactaagtataatatacactaagacccctaatttgggttactaattttttttaaaggaacacaccaattgttgataaggtttatctagg

SEQ ID NO: 249100 - DNA, 920 bp, Homo Sapiens
  misc_feature (367)..(377): n is a, c, g, or t
  misc_feature (505)..(791): n is a, c, g, or t
ggtatttaaacagctgctgttgctcttcattctgtagctctacatcagattcatgctctagtcctgtatatccaaatgatggctagaggctgccggctctgctctttcaaaggcacaatgagtgtagccggtctacaaaactctcccttttccaatccagctttccctcgtgcatcacctatctctctacatctggaaccatcgggcagctgccttcataaggtacctcggtctggcatttggaaaaccaccctgtcttgccagagccgcttggtcttgggtagcaaaagctgtatgcaatctaaatcaagctttcaatcatgagaaatcacattccttcttttccctttgtaatatactcgtgtgnnnnnnnnnnncctttctcaataagcaaattgtaccaccatcttattctgagatgctcctttttaaaagctgtagatcacattaatggaagtgtttactgctgggaatattttccatgtgcaatgatctgtaaccctcnnnnnnnnnnnnnnnnnnnnnnnnnnnnnnnnnnnnnnnnnnnnnnnnnnnnnnnnnnnnnnnnnnnnnnnnnnnnnnnnnnnnnnnnnnnnnnnnnnnnnnnnnnnnnnnnnnnnnnnnnnnnnnnnnnnnnnnnnnnnnnnnnnnnnnnnnnnnnnnnnnnnnnnnnnnnnnnnnnnnnnnnnnnnnnnnnnnnnnnnnnnnnnnnnnnnnnnnnnnnnnnnnnnnnnnnnnnnnnnnnnnnnnnnnnnnnnnnnnnnnnnnnnnnnnnnnnnnnnnnnnnnnnnttaaaatgtcaaatgacaaagcactaagatatgtcttacactccatgaactgcctgagtgtggtatcatgtgcactctatagaaaacccattggaggctctcaacttccagagatgatgtttaagccaa

SEQ ID NO: 249101 - DNA, 1082 bp, Homo Sapiens
  misc_feature (775)..(800): n is a, c, g, or t
  misc_feature (958)..(1012): n is a, c, g, or t
  misc_feature (1059)..(1059): n is a, c, g, or t
ggattgaatattaagatctgctggtttcaggagtcaaaatgtagaaaaagaggagaattgtaatatggtcagaaacagagaagccttttctatgtaaattcagacttatctgaggctaacagttttccgaagtggtggtgggtagcagcatgacagctgcttgccatgactgatgcagactactaggtttccattttagctctctgtaggtactgttttcttccccactgtgtcgaaagtgatttgttttgaagcaagagtagaatataacatctatcaaatatagcttttaaaataagaatacctggtctggatccagttgagcagcacagcagataaaccttagagtttttctgttcttacatgacggtttccatgtggaaagatctaaactttcttggaatcactattagtgaagaaaaatgtagaatctgtataaccagtaattccccaattcttactttcaaagtcatatccaagaaagacaatatgtcagaatagaatgactttggtctaggtgttttcacgttggcaaaaataaggaggaaattatattattttaatatccaaatttaaaggtttggaaaattttgaatagttaatattagaacttatgttggctgttttttatatttccaaggattgagtattctgcattaatccaatactattcccaccaaagagatttctggaagatttttaaaaaaatgatacccctgttttatatttttgaatgtagagagactctgagagagagtatgttctgagttatacnnnnnnnnnnnnnnnnnnnnnnnnnnagaataaaacattgacctgaacattttagcctaaccaagggacttaagtggtaaagacttgcattatgtcttcatgtgaactgatccgttcattatatattatgggaaaaatcaaagaaagttttttatagagatatgaagatattatttagagagannnnnnnnnnnnnnnnnnnnnnnnnnnnnnnnnnnnnnnnnnnnnnnnnnnnnnntaggctatatttttattggtgctgtgcaaatgattttgcagttttcnaaatgataaaactagattgtaaa

SEQ ID NO: 249102 - DNA, 284 bp, Homo Sapiens
  misc_feature (167)..(177): n is a, c, g, or t
ttggcttaaagtttccgggccggaaagacattgttaagattcagcaaacaatggtctgccatttagtgcttctatctcttgatcatcttagtcaagctagtgtttatatgaaacttttgactgtgaaacttttggcttctgaaaatcttttaaatagtagtttgggnnnnnnnnnnnaaggtgaaaacgaatttattattggctctttgagataaagatcaccagctttctgatcgattattttgtattggatagtactgttctataatgatgtaatttggtgt

SEQ ID NO: 249103 - DNA, 294 bp, Homo Sapiens
ccataaaaggcgactttgtacaaaaaagttgggtagttacaagctttaggacagatataaaaagaaattctaacgcagaaattttatccaaagtttcatccattttataatcaatattagtaaaaaagaccgcgcccagcctaatgctcatatattatttatcttttggcccagtaatgcaacttctaggaatttactatgaagatacaacttgacaaatataaaacaatacaaggataagactactcattgtagagttattatacacatagcatgatgagtgacccgccgccc

SEQ ID NO: 249104 - DNA, 809 bp, Homo Sapiens
tgaggcactgcgcccagccaggagagttttaaaacttcataaatgcatttcatttcttctcaactttctggttgttaaaagccaagtacgtatcacctggcctggttggcgaagatgcttttcagatttttattgagccgtggccttgctgtagttgcggtcattccaaatggagactgatctgctcggcatatgtgagaactgttctctctgtgttcgtgggtgagcaattcaagctttctgtgggaccagaaaccttaattattgaactacctttgctggttatctcatcactaaaattgttaatcgtttatctacattgtgggtgtttttcatgatttggcacacagcatagcaggcagcattgccaagatgtttttcatgttgcagaaaaactgtaacagatggaggtggtgattgtgaagcacttatttaaagtgttagtaatgaatcactatagcttgaaactgagtcagttatccatactaagggaagttgaagaacattctaatagcttctaataaaatacgtaatcaggcacctgaagagaactgactttgagtggctctcccattactgttaccctagccagggcccttagaatttattcttaggggctaaaagtcttttacaagcatgcatgcatgtgtgttttctcttttctaggaacttgaaattatgtagtagatgtcactaaattctttgaaatttgtcttcagtcatggcagtattcagtatcgctcctttgggatgcctgagtgatactcaagaattaaactagttttatctgggttctttgaagaaccggg

SEQ ID NO: 249105 - DNA, 868 bp, Homo Sapiens
ttggtaatgttgtccgtggatcagctcattttattttataccaaatatttgaacagtattcagaattacattttaaattcaaactcagtttcttaagatgccaaccttggggatattcgagttaaaactagaagtatatttagtataccttttggctgaaggccaaatggcctagtgttaaaattaatatgaggctgagaatctatatcaccatcatagaataagtttttgggataacaaagaaattgcagttgttacagttctatttagaaatttagtaaccaagctttaaaatgttgatgttacagtgcaagaacaatagttcatcagcatggttatctggtagattgcttttgcagtcaccataatgcacatctataacagtaaatggacttactttggtcaacggaggttgttggaggagcaagatattttccaactatttttgctagtattgaatgtgctgattatgatgtagctgccatgatgtcaagttttccttcctctctaatagtaactgactgaagtgaagctctgtcctctcagtatcctgagcttgtaaatttcattaatttatggcaatgatgccatttccttgaagttatctcacaaactgaagttttgtgcatgtcgacggataatttctgaatactttctcatttatattaccttattttgtgtgcgttttcaaaaatatttcagcatgcacttgttccttcacacagtcacttgagatcttacattttggatctagaaatttggtgatggagtaatggctctcatgacaagtgtgtctctgaacatcagttttcattgcataaacattaaatttttacattttctctagaacagaatgagtggaagatct

SEQ ID NO: 249106 - DNA, 1362 bp, Homo Sapiens
ttggctcaatactgtctttgatttcccaccacctccattagaccaagtgcaggaggaggaatgtgaagtagaaagggtgactgaacatgggacaccaaagccctttcgaaagtttgacagtgtagcctttggagaaagtcaaagtgaggatgaacaatttgaaaatgacttagagacagatccacccaactggcagcagcttgttagtcgagaagtgttactgggactaaaaccttgtgaaatcaaaagacaggaagtgattaatgaattgttctacactgaaagagctcatgttcgaacactgaaggttcttgatcaagtgttctatcagcgagtatccagagaaggaattctgtcaccctcagagctacggaaaattttttcaaacttggaagatattcttcaacttcatattggattgaatgaacaaatgaaggctgttcgaaagagaaatgagacctctgttatcgatcagattggggaagatttgctgacatggttcagcggaccaggagaggagaaattgaaacatgctgctgctaccttttgcagtaaccaacctttcgccctggaaatgatcaaatctcgtcagaaaaaggattctcgatttcagacttttgtgcaagatgctgaaagtaatccactgtgtcgtcgtcttcaactgaaggatattattcccactcaaatgcaaaggcttactaagtacccacttctgttggataatattgccaaatacacagaatgggccaacagaaagggagaaggtgaagaaagctgcagatcactgtcgtcagatcttaaattatgtaaatcaggctgtcaaggaggcagaaaacaagcagcgcctagaagattatcagcgtcgccttgatacctccagcctgaagttgtcagagtacccaaatgttgaagagctcaggaatttggatttaacaaaaaggaagatgattcatgaagggccattggtttggaaggtgaatagagataaaactattgatttatacacgttgctgctggaagacattcttgtattgttacaaaagcaggatgatagactggttttaaggtgtcatagtaagattccggcatctacagctgatagcaaacacacgtttagccctgtcattaagttgagtacagtgttggttcgacaagtggcaacagataacaaagctttattcgtcatttccatgtcagacaatggcgctcagatttatgaactggtggcacagacagtctctgaaaagactgtctggcaggacctaatctgtcggatggctgcatcagtgaaggagctatccactaagcctattccataccacagtcacacctggcgaaggagattatgatgccgacgatcca

SEQ ID NO: 249107 - DNA, 1108 bp, Homo Sapiens
ttggatcaggatggtgttcttcctggaggacgtcatggcctgcaccaagcgcctgctggagtggatcgccggctggctaccacgtcactgcatcggggccatcctggtgtcgcttcccgcactggccgtctactcccatgtcacctccgaatatgagaccaacatacacttcccagtgttcacaggctcggccgcactgattgccgtcgtgcactactgtaacttctgccagctcagctcctggatgaggtcctccctcgccaccgtcgtgggggccgggccgctgctcctgctctacgtctccctgtgcccagacagttctgtattaacttcgccccttgacgcagtacagaatttcagttccgagaggaacccgtgcaatagttcggtgccgcgtgacctccggcggcccgccagcctcatcggccaggaggtggttctcgtcttctttctcctgctcttgttggtctggttcctgaatcgcgaatttgaagtcagctaccgcctccactaccacggagacgtggaagcggatcttcaccgcaccaagatccagagcatgcgggaccaggcagactggctgctgaggaacatcatcccctaccacgtggctgagcagctgaaggtgtcccagacctactccaagaaccacgacagcggaggggtgatcttcgccagcatcgtcaacttcagcgagttctacgaggagaactacgagggcggcaaggagtgctaccgggtcctcaacgagctcatcggggactttgacgagctcctaagcaagccggactacagcagcatcgagaagatcaagaccatcggagccacgtacatggcggcgtcagggctgaacaccgcgcaggcccaggacggcagccacccgcaggagcacctgcagatcctgttcgagttcgccaaggagatgatgcgcgtggtggacgacttcaacagcaacatgctgtggttcaacttcaagctccgcgtcggcttcaaccatgggcccctcacggccggggtcatcggcaccaccaagctgctgtacgacatctggggagacaccgtcaacatcgccagcaggatgacaccaccggcgtggagtccgctatcc

SEQ ID NO: 249108 - DNA, 1228 bp, Homo Sapiens
  misc_feature (374)..(436): n is a, c, g, or t
ttggctataattcttctagggcatttaattttgagttctgtttgctacatgcagattaccattttaccattattatggaatcagtgatttgagattgtgtgtttggtttggtgcttacgtgaaagaactttaataagatcatttaaatgttactggaacagctttcaagttacttgagctcaagttttcattttgctttagaaaaaactatactgttcagttcttaatttgtataataacagcaaattgccgataagtaacaatatatactattgtttagaaagtggttacaaaaattatgtaaaaatgaaatatttattcaaaggaaaattcggatttattgaagtaaagtattatgcacatattaaaaaagnnnnnnnnnnnnnnnnnnnnnnnnnnnnnnnnnnnnnnnnnnnnnnnnnnnnnnnnnnnnnnngctcctaaagaaacataagcttgtgtctaaagaacacatctaacttttgtaatcctctcatgctagtattcctgcagctgcgctagacttatttgattacatgcttgccttggatcctagtaagcgctgcactgctgaacaggctcttcagtgcgagttcctccgagatgtggaaccctcaaaaatgcctccaccagatctccctttatggcaagattgtcatgagttatggagtaaaaagcgtagaagacagtagcagatgggcatgactgatgatgtttccactatttaagccccccaggaaggacttgtctctgggcttgggatgacagcagtaccctacacaccccagggtgtgctgccatcttcacagctgaaatctcagggcagctcaaatgtggcacctggtgaaaaacagacagatccatctacaccacaacaggagtcttcgaaaccgttgggaggaattcagccttcttctctgaccatccagcctaaagtggagactgatgctgcccaggcggctgtgcagagttcatttgcagttctgttgactcaggtaataaaggctcagcagtcaaagcagaaagatgtgctactagaagagagggcaaatggatcgggacatgaagcgtcattacaactcaggccacctccagaacctagcacttccggtgtcggtacaagatgacctcatccagcatcaagatatgaggatcttggaactaacgccagaacccagaccggcctcgaattctgcctcctgaccaacgacctcccgagcctcagaaa

SEQ ID NO: 249109 - DNA, 1150 bp, Homo Sapiens
  misc_feature (173)..(236): n is a, c, g, or t
  misc_feature (251)..(399): n is a, c, g, or t
atatataggaattttatttatagtcagaatctttcgttaatttctttaattattcataaaatgttttaattccgtggacatcttatttttcttttgagaaatttaacaaatattaggacatttccagaatgatattgtaaacatcaagtacattaaacagtgtacattaagcnnnnnnnnnnnnnnnnnnnnnnnnnnnnnnnnnnnnnnnnnnnnnnnnnnnnnnnnnnnnnnnnaaaaatactgtcggnnnnnnnnnnnnnnnnnnnnnnnnnnnnnnnnnnnnnnnnnnnnnnnnnnnnnnnnnnnnnnnnnnnnnnnnnnnnnnnnnnnnnnnnnnnnnnnnnnnnnnnnnnnnnnnnnnnnnnnnnnnnnnnnnnnnnnnnnnnnnnnnnnnnngaaaaagcgacactctagataaagtttgttccccagtctcagtcctattcctcctcttctctctctagaggcaaacactactgtgaatcatgagtctgttttgtgccactgcaccatttttatacctctatggcttatatagatatacttgaatgacatatgatattgtttgtgtggtctttttagagtttccatagtggtgtcatactgtcagtgtcacctgtagcttgcctcttcatataactttacctttggggaagttgtccttgttatgtgtgtaatgctggttcaatcctgccactgtagggtactcctgtagtgtgttccttctctgaaagtgtaaagtatcctatttgtagatatgtgtatgggcctgttgcagtctcactgctacacagtaggcatataccccaattttacttattccctttttgttggacacttaaattgtttctagttttttctatttcaaacaatgctgtagtgaccatccgtctccgtgcctctgtgctccagtaatggcattgcagggtgcaagggattgcaagtttcagttttactggataatgatcagttgttccccacaatgactttacgagttcacaggtctgtcagtagcccacaatagtgcttactaacacttgacagtatcagacttttaagttttggtcagtctcatgggttagaaatggtattttgttatttcaattttgctgatctggtcatggtagtatttcagtaatacttgtgt

SEQ ID NO: 249110 - DNA, 1100 bp, Homo Sapiens
ctttgtacaaaaaagttggcctgactcccagaatggagctactaggctcttctcagtagggattggaaccctggctgggtcacagccagttggtaacaccaccctatctgtctgccctcagtcccttgtaattaatgggtttgtgtgcccatcctgaccccagctgggctttggtacctggctggattgtagtccctgaaagcagtacttctgtaacatcgctgccctccaaaatggcctttgactcatttatgacaagcacagccatggcactatcagtctcatcagcttccagacagctacccccatagacagtgatgagagtggcttgttgtcctcttggtaaaacctgcttcactccatacttcaccttttcccgtatacaaccaaggaggagagttcaccctttttcctgcctcagagcttttgccatcatgtctagtggatcagcccctgcccaggcaccaagtcctgccagcaggtccttcctttcactctcttttttgtctcctgctcttgtggcatgttgagttgagagtctgaaaactaagtttactcccagcgccattctgctgcaccacagtctttaactaccgcaggttttgggttcatctaggcagctacactcaaaagacacccatgggcttggctgatcctagttttttattcagctttttcagtggatataggatatgtagcccagtgtgttggcaggacagcttcgagtgtctctctcagcaggagttctcacagagtccggggctattcccccacttaccacctcccaggatggctcaggttttagggaatgaagccacacaggtgggagcaggagctactggcttagagactgctgtctataatagtaaactgttctgggagccttttcaccagaagccatgaagtctggtcctatgtatttccggggaaacagaacacaaggaaaatacttacctgtgagtaaggagaaagggtgttgcacaccttttctctcagcttgtgatcttagcacatgggggcctttgctgttgacctgtgtagccagttgttaaagatgtggtggtgaataccgtgtctgtccttctcttccctgcagtgcg

SEQ ID NO: 249111 - DNA, 893 bp, Homo Sapiens
  misc_feature (811)..(811): n is a, c, g, or t
  misc_feature (813)..(813): n is a, c, g, or t
  misc_feature (826)..(826): n is a, c, g, or t
attaagtgttctttatattcattatatatctttaacatactatatatcatagattctaagatgctttggtgctggtactgtttgtcacaactatgacttgaagtcaccatcagctgtaagatgcatcctgacttcagagagagaaacatgttcaataatgtgccacttaacaataaaagaaaggaaatacacttaactgtttatttacaattacaattttattgcagtataaaagaaaaagtattatctgaatacagtacatactaaatggaaatatacttagtgattcatttgtttctgtttatattaagtagtttgtattttaaatactctgtattatgcagaaatccttggtgaattatcaagtaggtgttgagtactttagctatatctaggaaattgtttagggtcttaagtgggctggaaattatgatttttcctactcaaaataataaaatatggggcaccactttccaaaaaattgccacacaatacataaaaaaagatgtacctcaatatactgaaaaacatatatgtaataagttataaaaatataaagaatgaaacacaaaattaaaactattgattacttctggggaagagggcagaggaaagaatgggaaacggaaatagctccattaagtacaatgcagaaaaatacacatttgttagagacaaagacaatgaatcacatctacactatatagtcactagtaaagatctgaagaggtacacaccaaactgttaagaagtaaagttgtcaaggcaaactttcacactgtatttatattccgattttcttcaacgtttngnaataggcatctgngatttttaaaggtaattaaaaggaagtagattttaatggttgggaagaaatggcattccatcttttt

SEQ ID NO: 249112 - DNA, 965 bp, Homo Sapiens
  misc_feature (397)..(433): n is a, c, g, or t
ttgggtggagacgccgggcgcatcagcgtcgtccttgttgcttcccgccgcgtcccggcccccgaggaagcgcgaggcgggagaggctggggctgcgacgagcaagcagcgggtcctggacgaggaagagtatatcgagggcctccagacggtcatccaaagggatttctttcctgatgtggagaagctccaggcacagaaggagtacctggaagccgaggagaatggagacttggaacggatgcgccagattgccatcaagtttggctctgccttgggcaagatgtcccgggagcccccgccaccctatgtgactccagccacatttgaaacccctgaggtgcatgcaggcactggagtggtgggcaacaagcccaggccccgcggccgaggcctnnnnnnnnnnnnnnnnnnnnnnnnnnnnnnnnnnnnnccgctgcccagcctagatgtcttcctgagccgctacacgagtgaggacaatgcctccttccaggagatcatggaggtggccaaggagagaagctgggcacgccacgcttggctctaccaggctgaggaagagtttgagaagaggcagaaagataatctcgaactcctcgtcagcagagcatcaggccatcgagagcagccaggccagtgtggagacctggaagtacaaggccaagaattccctcatgtactatccagagggtgtccctgacgaggagcagctgtttaagaagctctggcaggtggtacataagaacacgcgcttccttagggaccccttcagccaagccctgagcaggtgccagctctagcaagcagccgctctcaatgcccagcacatacagggcaaggtgggccccgatggcaaggagctgatcccccagggagtcccctcgagtgggtggatttggatttgttgccactcctttcccctgcccctggtgtgaacgagtccccgatgatgacctgggggg

SEQ ID NO: 249113 - DNA, 426 bp, Homo Sapiens
ttggctgaggttcccaccctgacaatggtcaggctgcccgtgctcccactccaacactaaaagcggctcccttaggggctgagcgtgggtgctcagtgttcacgctatatcccttgggcaatgtggggttggatggggcccccacttccattcccatggaaggaggccaggtccccagccacctcccactcagccatgcacgcacttgctgggctggcctcctgggaaacacaggtgactcgaatgaactctgcattttcaacgtgccttctactgcttcaggacctgggggtccccctgaccctcactggcttgcccccagccctgggcctggccccacctgtcctggagcccagagcccctggcctggagctgcctctctggggtaggtctcaggccccacccctccctcttttgagttcaggg

SEQ ID NO: 249114 - DNA, 903 bp, Homo Sapiens
  misc_feature (556)..(579): n is a, c, g, or t
  misc_feature (642)..(683): n is a, c, g, or t
aaaagaccctcaaatcattagtttccattttgtgttaccaagtaatgtgcaaagcatatttgccccatttgtatggcccaacctggctgcccactagggaaagatcaagggtgtttgttcatacattgctatgaaataaagctgtctctgcctaacaaagtagggggtgccaaagggcctgtttatctttggccatactgaatgtttcagttaaagagccacattctcttagccctttgcacattatcttccttatccttagaatacccttccttgcttactttcttgcgcagctctttatctcttaggactcggcttcaatgctcccttttaaggaaagcctttcttaactccaggcagcaggaaagaatggaaaccatcttggagtcacacaggtttgtgaaacgatctcacctctgtatcaacagccttgacttagtaggatccggcactttggaatccctgaaggctggctccatgctctggtcagggcaggagtactttaaatcaggtatgcagggggatgggcaagcccttactgaagaagtgtagctgnnnnnnnnnnnnnnnnnnnnnnnngagacggaggatcacttaaggccaagagttcaagaacagcctggacaacataaggagattaannnnnnnnnnnnnnnnnnnnnnnnnnnnnnnnnnnnnnnnnntttacatagggacacaagtctgtgtactaaaggcaatgaatgctccgaagagagcaaaaagtgaaggtgggggaggggccagggaagagctgctggagcggctgcgccctgggtagacagtgggtggagtcggtgagtgcacgtgctgtgcggggcgtcttgggaggagtcgagtgcacgtgctgtgcggggcgtcttgggaggagtccagtgcacccaa

SEQ ID NO: 249115 - DNA, 881 bp, Homo Sapiens
gggtgtctcatctcatagccctgctttgtttccctggaatgtgaaggcccatgccagctcagcccagtattgcatagctactcagttcaggcaaggcactgcatccccagagggtaatgtgcctcgtcagctcaggtctaggttgtgtgaccttaggttggcccaggcaccattttcctgggatgcaggaagctgcttcagattaggtactggactgtgtgtctgcttgggatggccaagacactgttacctggaaggcagggtggtaggtagggtgctgcttaaacttaggcactggggaggcatgactgctctcgatggccaaagtactgttttcccaggagacaaggtactgcttcagctcaggtacagaggggtgtgactgctctggatggttaatgcactgttttcccaggatgcctggcattgcttcagctctggcctagaggggcaggatgtagcagcatctgggaggggtaggtggaggagcttcgccaaggcatcctttcctcaggaggcaatgtgcagcttcagctcaggtccctggaagcagggcagttttgggagaagtagactgagaggtagacagtgagaggtggatgttgcacatctgccagagcattgttttcccaggagggagtgcacagcttcagctctagtcgaaggtgacaggacacagcctagcatagggacttgaggggtaggtggtgcagctctcccactgcatggccctacatgggaaggtggaaaagctgcttgtagatgttgggccaccaggtgggggtggatggtgatggcttatcctcaggatgaagaggtgccatggaaccagacagaactccagccgttccaaataacagcacagtagctgtatgggccac

SEQ ID NO: 249116 - DNA, 371 bp, Homo Sapiens
ctttaaaaaggcttctttgtacaaaaaagttggactctgctcacctatgaaaaatcgagatgacctcatctacacccgcatcaggggagggatggtatgccgcatctggagggccatcttggcacagcgagcaggatccacaccagtcacctctggaccctgagagctgaatgagggcatcataggccagacaggcccaaggatggatgaatggagatgactaaggcagcttctgacacaccagccccaggacctggggcgactggaggaagccaggcgagtggggccccggactggttcgagtgagagaaaccaaccacaggcaccctagcactacccagacaagcgtattcaacagcactgacttgctc

SEQ ID NO: 249117 - DNA, 861 bp, Homo Sapiens
cccagcagggcccagaactgaacaatttttgggttccccccaagaggccagggtcatgcgtgaaataagccctccttgctgacctggagcttgcatacagctttccctgctttccgtttcatccccgctcttcactctgtgaatcctagctccctctgcagctctcagctcacacaccacttcttcaggaaagctagagacccagaccaagcaaggcctccccaccctactggacactctcatttctcttgcatgcttccttccaagcacttaccacattattgtcattttatatctatgagcgacatctatttaatgcctgttttcctcatcggactttaagttctgtgaggaagggagcacctaaagtccctggagggcaatgcccctttctgttttgcttatctgtcttcagcgcctagaggcatctggcatgtatgggctacttgttgaacagatgaatgaaatgaccatatgaaacacacggcactaacgacacttaccagggaaggaagaagtttataatgcaaattttatgggcaaaatagaattattcacaacctaatgattttccaagtaaaatgacaaggcttaagtgaatgtaatcacttggaggctaaggcactgtgggaactataaaaattaaaatcagaagaaccatgactttaaatgtaaattcaaagaagggttgagtacaacacacaatgctgaatggattgtggatactgcgatgcagtctgatggtcagcaccaagggcatcctcatttgtatggtctcagggccttccctgaggcttgtggcaaaaatgcttcttacaaaggaaaaaaggtccctgagctctctatggaaatgttggccaa

SEQ ID NO: 249118 - DNA, 850 bp, Homo Sapiens
  misc_feature (213)..(221): n is a, c, g, or t
gaaaaggctgtattaataacacagataggaaaatgaattaattctatccatataaacatgttaatgaccaatacaagtgaaatgttttacccatcctcaaagcacatgcaatttattagaggttaattgttaactgaatggagttattttttcatggtaaaatgttataccttgatgaagacttgaactgggaaggtaaaaaatttgaaaaannnnnnnnnctctttctaaggtttttaaggatttggggattataaaagtttctcaataaagcaaaatgctttggtaaggaaggcagaagacagaacaacttccctgggcacagctagatctttgatctactgcaacagaaagtgattttgttatttggttttgtgtatatgtatatctgtgtgtgtttgcttgtgggtgtttttttctaagtaggttgtttcacagatattctaggaaaataaaaaagaatgagtttctttttcaaaccaccaataatgttttttcattaaataacagcatatataattttcatctgacatattactatgatgagtacaagtaggaaaaattccccttttgactcaaagctagaggacatactaaaaattaataaatgtttaacatttagggaattttaaaaaaatgcctaagagatattcacaatgagtctgctaattttcagaagtaatacttcactttgtttacatgcgaagtttatagcgaacatttaaaagagatttgtttttctttactctttaattgcccttcggctggtatacctgaaaaatctataagaggtcttggtatcactcagccctatcctcaagaagtcccactccaggcaaaataaagccaa

SEQ ID NO: 249119 - DNA, 1443 bp, Homo Sapiens
  misc_feature (968)..(1033): n is a, c, g, or t
gtcttacactactacctttaagtgtcttataacagaatacgacttagtgaattacaggcatagcctcttaatcgctttttatgagtctgacttttgctttcaataccaaatagtatctgaaaaacatgctcacttttgtgcttcttgagaaattctaagaattggcccagattcatgtgatagtcattccttaatccatagtcaccatgagcctcaaggagtaactcttcaaaagaatggaaaaggcgcaggtcctcaccatttccttctgtctccacgctttcagcatgcttacaggaaatgtgcttccaattggggtacctaattgtgtgccagaactcctcacagtgctctttgaaaccctccacacagattataccaggctttcctgtcatgcaaaatccagtcacatctaaccttttcccaacatccaaaatctttttccttaggtcctgctgatatatatggtgactgtagatccacattcggaggaatgtgttcttgactggctttgcttgtgtagatggttcatatacaagctttctgttcaggaaataagatgcactgttgtccttgtagccactggattgctgcacatacacagagctcacctggatcaaaagtccctactgtaagaagtgagacctttgttgagaagtagctgctgatgtctgtcaagttcagatgaccgtccaaacagctgcaatgctacataggggtagctgtgaggcatggtcacttgcaaatcaattttcaccttaaaatgaaaatcaaatagatttaaataccataacatcacataagctagtttatcaatagcaactgcatgattttgagaaatgttattgctactattaaatgtaccaggtactttacatacatgattgcttccttttatgcattatttcaatatttattgaacaactacgtgtgccaggtgcccttgtgctgggataaaaaagtgaatnnnnnnnnnnnnnnnnnnnnnnnnnnnnnnnnnnnnnnnnnnnnnnnnnnnnnnnnnnnnnnnnnnataattacatatagcaagtatttaatttcaattgtgaaaagcattaccatggaaaagtggagggttccattgaagtgtgtaaccagcgggacagaatccagtctggagaaccagaaagtctcctctgagggaataacaactgaaggatgagtaggaaatagctacaacagtggttctcaaatgcccagtccacgtattacctatgctatgctaatgttgctggagataaatggatcagaagatggaggtaaattcatttttagtctttagatttttccatccatatttgctttctgtgttatggtgccatcaaaaaatccactcattcactccttaaaagacagttatgttacaggagatatttagatttatgaaaatcatgatacatgtgaaaggtagtccaactccaa

SEQ ID NO: 249120 - DNA, 1224 bp, Homo Sapiens
  misc_feature (180)..(201): n is a, c, g, or t
  misc_feature (329)..(344): n is a, c, g, or t
  misc_feature (680)..(710): n is a, c, g, or t
ttggatttgaccccttcttatttcaatttctccttttaaatatgtagatgagagaagaacctcatgattctaccaaaatttttatcaacagctgtttaaagtctttgtagcgtttaaaaaatatatatatatacataactgttatgtagttcggatagcttagttttaaaagactgattnnnnnnnnnnnnnnnnnnnnnngcaattttgaagcagccctccagaaggagttggttctgtattatttgtattaaatacgagcttgcgaaccaatcattttacatctggtttttaaaccgtaagggcaccatgaatgcagtgccgttacnnnnnnnnnnnnnnnnctgtgtgaaacaactcttattgtgatgttacttgttattgtttaaatgtacagaaacaaagggtaaaaatgtgttaatataccttgttccatggtgttgttcttttggggggaggggacgctactcaacacttaatagaatcacaacgctgttgggccagtagtatttattgctttagagattgcttgtcgtacctgtatgtcgtccctttttaaatatgttttcctttttcttgaaactgtataaagtttttttcccccttagcataagcatcttatatataacaactcatttgtacaaggtttttaagtttatatataaaatgtgtatatatannnnnnnnnnnnnnnnnnnnnnnnnnnnnnnctgtatgaaacccagatgtcaccaaatggacattaatagttgcattaaggatcagtagcattaacaaaagttgctttaaaagccattatgtaaaacaagacttgaaaatgagtgagggaattttagcgacactgtctgagcagcagtgggaaccatcttcgtttcccctttgaactcccagtgggatgccctaccctgcgcccttaggacccggactgaccgtgtacaaaactttacgtgccaaaattctcagtgaatttagctttctccctctttttgatgctgtaatttttgttcatcatgttttgctgtgatgttacataggtagatttgtatgtagttttaatgtcacctataacaaaatgtgtttggtagcagattgtccagaaagcattttaaatgaagaggtataaacccttaagggccaaaattctgtatattagattactcttaaacgaaaaaccagctgccgcttttatgtacacatattacatacgagtaggcagcagacttt

SEQ ID NO: 249121 - DNA, 779 bp, Homo Sapiens
attataactcttattataagagttttaaatcctcctagcgctgggaaccattttctaaacatggccccaggatcaaatccatgccacacttgcatgggcacgtgtgccacttttgtcatatctctaactatgtcttcaactacttgccgttggttatctatgtgtaggcagcaattagtaaggttaaatttcctgcagacctctccttcagctgctggcaagtagtcgagggctattctattttgatatatagcatttctcatctgagtttcttgccaggccagaatagtcaaggctctgctggttttattagtgattatttttaagacagcttgtaaccatatgattcggttgatcatgtaaatgggggtccggtatccccatgagccatcttgtgcctaagtagcaggcctataatattgtatgattctctcagagggccatttatcattttttcaatttcttatagctatgattctcttttcgcgggaagcgtagacagggaagccaaggagtttgcctgtttttatgggcagtaggaagaaagatggtttaatagtgccaataacacaactacctgcctactggtcagtaatctgtcataagctctatgcctacatatccagtataatccagtgggggctgtccagtcccggtgggactccaggtgggtccagtttgcaactttgagaatttactaaattttctctctgtgtgatttgaactccatcctaaagggattgtttttgccaacttttttgtacaaagtgggccttaag

SEQ ID NO: 249122 - DNA, 1412 bp, Homo Sapiens
  misc_feature (271)..(288): n is a, c, g, or t
  misc_feature (601)..(609): n is a, c, g, or t
ttggtcctaatcctctcccttgtgagctgatgtgtataagcagatttaaatccttccctttctgtactaaagggagaaagaaaaggaagagatcaccctcagtgcttctttgctgctccttttctttagacatttaaccccttttagttcagaaaatgtaaactagcactagcatggtcttttaaggattttgttcatatcagtcatatatctgttattattttgtatttaaagattgtgtttattcccacgatttgaagaagcctagccnnnnnnnnnnnnnnnnnngattgtgtttatattattgctagaagatatgtgttgatgggaccaaaaaaagactggttaataaataaaaattttttctacactaattatatataaaccatattcacatgtacctttattaatatatatataccactatgtaaagaacttcattgctcttttaatttagcttctctttcactgactaatattttggatcaaagtgagctcttcttttttggcacaaacttataatcctattatttaattctttccagctgctgacatatagtacataatttcagatgttttagtatgtttgatgaatatttcnnnnnnnnncaatttaccccatctgaaattacttcatagtctttccagctagtctttccatcgttgatacataattgccaaagtagccaagttgaactccctacttttaggattcttgagtcactactttggattcttcaaaggtccttcgattctatgcaatctgggatgatacagacagcatgtatggtgaatgtcggacctacatcattcattactatcttatggatgatacggtggaaattcgagaggtccacgaacggaatgatgggagagatcctttcccactccttaatgaaccgccagcgtgtgcccaaagttttggtggaaaatgcaaagaacttccctcagtgtgtgctagaaatctctgaccaagaagtgttggaatggtatactgctaaagacttcattgttgggaagtcactcactatccttgggagaactttcttcatttatgattgtgatccatttactcgacggtattacaaagagaagtttggaatcactgatttaccacgtattgatgtgagcaagcgggaaccacctccagtaaaacaggagttgcctccttataacggttttggactagtggaagattctgctcagaattgttttgctctcattccaaaagctccaaaaaaagacgttattaaaatgctggtgaatgataacaaggtgcttcgttatttggctgtactggaatcccccatcccagaagacaaagaccgcagatttgtcttctcttactttctagctaccgacatgatcagtatctttgagcctcctgttcgcaattctggtatcattggggg

SEQ ID NO: 249123 - DNA, 756 bp, Homo Sapiens
  misc_feature (433)..(443): n is a, c, g, or t
  misc_feature (463)..(537): n is a, c, g, or t
  misc_feature (558)..(637): n is a, c, g, or t
agtaagttccaagtaaatttccataaaggtaaaaaagaagcagggtgatatacagaaaagcgtgtgggattcaagtaagttttgaccctattatttgttacctatttggccttggtgaatcactatttagcctcaaaatggggataattatcattgaatattccagttattgtgagtgtagtttatctccttagctctcctaatgattattgttattaagcaaggaataacgacaaacaatttttgctacatctcagttcccctctttttataaatatgagttcagttatgcagccagcttagcctggctgctgaactgtggctggtcagaagttccatttcggtggatgtcagatgatgtaaaaattgtaactgcctaactgtactacatagttcttaacttttaaggagattatatatgcattaatataannnnnnnnnnngagacagagtttcactcttnnnnnnnnnnnnnnnnnnnnnnnnnnnnnnnnnnnnnnnnnnnnnnnnnnnnnnnnnnnnnnnnnnnnnnnnnnngatgtgagttttcagtttctnnnnnnnnnnnnnnnnnnnnnnnnnnnnnnnnnnnnnnnnnnnnnnnnnnnnnnnnnnnnnnnnnnnnnnnnnnnnnnnngcataatatctatcccatagtgattataaggattaaataatatgtatacaacctagtcacaaactctaaagcacaatgtaaaatgttcattttgattaatatccaaattaatcacttgg

SEQ ID NO: 249124 - DNA, 953 bp, Homo Sapiens
  misc_feature (400)..(695): n is a, c, g, or t
ttggcttggactctgatgaatgaggcttcctttgggcctccttggtcagccttccctgttctccagcctaggtggttcacctttccccaatttgttcatatttgtacagtatctgatcctgaaatcatgaaattaactaacaccttagcctttttaaaagtagtaagtaaatgataataaatcacctctcctaatcttcctggggcaatgtcaccctttgatttaaaacaaagcaaccccctttcccctaccactacggaaaagagcaagctcatttttccgtgtcctcctttatttaactccatttattgcttttggtataatttttccctggggaaggaggggaaattatgaaagaactagtaactttatgtcctcttgatgtattaggaaatttccnnnnnnnnnnnnnnnnnnnnnnnnnnnnnnnnnnnnnnnnnnnnnnnnnnnnnnnnnnnnnnnnnnnnnnnnnnnnnnnnnnnnnnnnnnnnnnnnnnnnnnnnnnnnnnnnnnnnnnnnnnnnnnnnnnnnnnnnnnnnnnnnnnnnnnnnnnnnnnnnnnnnnnnnnnnnnnnnnnnnnnnnnnnnnnnnnnnnnnnnnnnnnnnnnnnnnnnnnnnnnnnnnnnnnnnnnnnnnnnnnnnnnnnnnnnnnnnnnnnnnnnnnnnnnnnnnnnnnnnnnnnnnnnnnnnnnnnntttccaagcatggtatcatctcacttttctaatttacaggctggagcagatgagagccctcctgctgggacagagaattgggttctagtggactctgtgctacacttaaacctgtgagacaaaccgcccattattttattatttaattatgcaatgcctagttcctaaatggattgggaggcaaattaccgtaaattttgaaacagcctatatgtcagaaatgataatggttgccacctaatgttttctgtccccccc

SEQ ID NO: 249125 - DNA, 934 bp, Homo Sapiens
ggattatctcgtatctcatattcttgtgagatagattttattactcttatttaaaatggcaaaagaggccaaatcaagtaaccaattcacaaatgttagattttatgacccaaacttgtctttctttaatttttattattccaggagcatagattcaaattgccccgaacatacactcactcaaacctgtaatattcttaatcacactctcttagtagatagataagccatcacagagagtagtagtggtgctagtcctataatgaagaatttggggcaatgtgtcaggacagatgcgtaacctgcttgtcacttaatcccaattggaatgaattattttcatgtgtcagtttgtgggcctgagaaagtcgtttttattttgtgtctatatagttatgttattgttaaatctgcagcaatgtaacacgtccttccctgtcatttttcatgttccaagcccaatggattaaacactcccttaggaaaaaccgtagtaggtggtgatgccagaaggaattgtaatcctttgcatagtgccctagtgggttttaggtcaagttctgctcattgagtgtcttatggtatagcactagccatgcatggagtttgagcacttacaatgtggcatgtgactgagggagtaagtgtttaattatatcttaattagtttacttttaaaaactggtgctggattcaattagatagcattcaagtatacttggaacaccttagggacatgaatcagaatcatcttattctaattacagatcaagaattccccacgaaaatttattttgatataccataaaagtgtaaaatacacaccagattttgaagatttgaaatgaaaaaagaatacaagatatttaatacattctgtattgactatatgctgaaactatatttttgatatattctgtcaaataggatccaa

SEQ ID NO: 249126 - DNA, 905 bp, Homo Sapiens
  misc_feature (194)..(239): n is a, c, g, or t
ttggggaagagaaaccactaaaagtgaaaggaaaggactcttcagagaagaaacggaaacggaagctagaaaaggtagagcaactttttggagaaggaaaacagaagtccaaggagttaaagaaaatggacaaacctagaaagaagaaattaaaattaggtgcagacaaatcaaaggagctgaataaactggcnnnnnnnnnnnnnnnnnnnnnnnnnnnnnnnnnnnnnnnnnnnnnngctgctgcagccaaagttgaacttgtgaaagagagcactgaaaagaaaagagagaaaaaggtgctggacatcccctcaaagtatgactggtcaggagcagaggagtctgatgatgagaatgctgtgtgcgcagcacagaactgccaaaggccctgcagggacaaggtagactgggtacaatgtgatggtggctgtgatgagtggtttcatcaagtttgtgtgggtgtatctccagaaatggctgaaaatgaagattacatctgtataaactgtgcaaagaagcaggggccagttagcccaggtccagcaccacctccttccttcataatgagctacaaactaccaatggaggatcttaaagagaccagttagcagatgcttggttagtttgggacatggggggacatggaccacattgagaccttagtcatcaagtagagtggtttatatccacttggaatgttgcttccaaagatgaatggccttcagagaaagtccccttagtgctggcttcctctttgcatggactctgtgggttacattctctatcaacatatctatgcagagggtgtcttctttggtacaacagccaatatttcatgtctcctttgagtgtggtttactgcattaagggcagatgcttaattgagctctagggtggcaggt

SEQ ID NO: 249127 - DNA, 938 bp, Homo Sapiens
agataagcacggtgacactgctgttttgatcagtgtctacaagctggcagaccagatctttgcttactacaaagccatggctggcagctgtcctgttggataaacgttttcgagctgagtgtaagaattatggcgtcatcattccgtatccaccgtccaatcgctatgaaacactgctgaagcagagacacgtccagctgttgggtagatcaattgacttgaacagactcattacccagcgcatctctgccgccatgtataaatccttggaccaagctatcagccgctttgagagtgaggacctgacctccattgtggtaagagtctgggagcgtgtgggatttctgctctgtgatttctcagactagaagcctagatggggactgtagttagtctagtgctgggccagttaaagaggggcagtgagtctctttcccatctgaatggagctgggaaagaaaaacttacacagaataagagtaatcttacgttcctgattgccttgggaacgatagcatggagggggtctccttgagatttctagagatggccaaccctcagacacagctgcatgtccttaggatcctgcaggctgagcaagtaggtgaggggtcctaagaagctagggaaaattgcacaagagggttggcttcacaggtgtacagtagtataaggcccagaagggctttgcagctggtttaccactctgcttcactatcttgaaattcttaaacaagggggccccacattttcattaaacattgcaccctgcagattatgtaactggttctgatgcacaagcctggaatagcctactcctttctcccagaaaacagcaattaaaacgactctctgctaattctctctcttcaagaattagagtaaacttgactggttgttctttcagtgaatcaaaggaagatttcagtgccttcaaa

SEQ ID NO: 249128 - DNA, 860 bp, Homo Sapiens
  misc_feature (149)..(158): n is a, c, g, or t
gaaggaacaaaggacatacataggaactcatctctgatgaagagtagctttatgtcagaaagagaaggctaatgaatttttaagattcccaaacagtggcaagaaagttcaaaggaaattgcagtaaaattgtacaatgttcaagttgnnnnnnnnnntggctctgaattacagcattcagttctatgctcaaggtatgtattagctaacactgcagttgtcagaggtgggaggcccctgagaaatgctgagaatgccaggcaccccagttctgagagccaccctagctaaactcaaagcagcattcttgagattttagcaaaaggctccgccccaagccacaaaaagatcccaatccaatcttttcagctttatcctctaaaaccttttgtcagatgagatagcatttgtgtttcccaggaggagaaggttggggaagaaaatgaagatagcttacatacagattttggatgacccgctaatctttccccttcctaggtaagtgaaaacagataaaatgtttctgggcagcccaaaggtttaccacctgtttcactagaatggccagtctgtgtaaagaggctataatgacgaaagcattttccctgcagggagaagctagaaacaaatgggtcttcctatacatcagtctgccaaatgcagcctctctcaatctatataagttcacctcgaaatacatattaagtactgctgtcatcattgttttaaacagagcgtctttcattttttctaatagtgactgattctatcggcaagggaacaaaagggtgagaaagggagcttcctgcttgctgagttttctagctattttcattctggttattttcatccgccagatc

SEQ ID NO: 249129 - DNA, 957 bp, Homo Sapiens
ttggcttaaccgtgctttctatagcagttaactgagaaaagaacagcaaacgaaagataattttgataaacttacccctcacatacccagttacctgcatctgttccccagacttctatgtttttttctgatcaatatggataaactgttcttatttctgtctgagaccacccttccacttgtgcagcatttgtcccctcttggtgattcaagaacattgctccagcagttctctactctcctcagtttttccttccctaacgtatctttctgtctgcttacagataggcagttatttcttctaccttaagaacaaccaaaaaaccccactgtacttgaactgaatttcctcttttctaatgattaccccatttctatccttccctttatagcgaaaccccttgaagaagttgtctacaccactggtgttcattcatttttgagccctgtttactaaggtttttattcctacatatgaagttttcttatcaaaattaccaaagatttccatgttaccaaatccagtagttagttcttagtctcattctacttcaccagtcagcattacgtggtacagttagtctgttctctgtgaagcattttcttaacttgatcgtatgccatttttttcctcatatctcactggttacctctcaatctccttggctgattgaacctgtaagccgccaaatgttgggagagctccagggctcagttatgctccccttttctctctgtctgttaacatttatttaatgcatctgcattcttttgatgatctcatccatctagttcctggtttcaaatactacctgtatatcactgactcctatctctagcctgaatttctcctctgaactcctgacttgtatatccattgcctctttaacatctctacttgtagggaagtctgctagaatctcaattcagcatgctccagagaatcctctaatcacc

SEQ ID NO: 249130 - DNA, 1353 bp, Homo Sapiens
  misc_feature (153)..(178): n is a, c, g, or t
  misc_feature (880)..(1281): n is a, c, g, or t
atgagccaccacgctcagcctaaggttctgactttctaataagctcccagctgatatagacactgctggtccttggaataagaagggtagaagtagctacctagatagctactagatagctaggagtatctaaaacgttccaaagtgccatgnnnnnnnnnnnnnnnnnnnnnnnnnncctccactgctgtcacttcttgttgctattaacttgcctattttttaccagcctcttccctcacttctgtcaagggctgaaaccagattaatcaagggtctaagaagcatgtttaaagcgatggtaaagcacctggcctcggtaacttatcgtttcatttgaagaagcagctttgcttatgttctggttctcaatgggctccacagaggagagctatttatatgtataccatttagaggcataaagttttactacatttaaagattggtatataccattttatgttacttagcataaacaattttaagttaaaagcaatatcatataaggaggtagaagcacttcggtgtgttgaaaaacctccattcttttcaataacatattcagacacggacagggtgacttaagtatataaaaagtcaaaagacaaattttaaaaagattaatgatcaggaattcaggaattgttaactggcctatgtatcccttaactgggatacaaaattgtgcccacatgggcatttttctagggaggtcttttgattcctgaaacccatcccttactattcaggttaagtgcctgggtagccactgagcatctgacttgatgaagccccaccaggtgattctggcagtcagccaggcataggaactgctgggatggatatattgccctcaatctaagtgcacagcttttgattnnnnnnnnnnnnnnnnnnnnnnnnnnnnnnnnnnnnnnnnnnnnnnnnnnnnnnnnnnnnnnnnnnnnnnnnnnnnnnnnnnnnnnnnnnnnnnnnnnnnnnnnnnnnnnnnnnnnnnnnnnnnnnnnnnnnnnnnnnnnnnnnnnnnnnnnnnnnnnnnnnnnnnnnnnnnnnnnnnnnnnnnnnnnnnnnnnnnnnnnnnnnnnnnnnnnnnnnnnnnnnnnnnnnnnnnnnnnnnnnnnnnnnnnnnnnnnnnnnnnnnnnnnnnnnnnnnnnnnnnnnnnnnnnnnnnnnnnnnnnnnnnnnnnnnnnnnnnnnnnnnnnnnnnnnnnnnnnnnnnnnnnnnnnnnnnnnnnnnnnnnnnnnnnnnnnnnnnnnnnnnnnnnnnnnnnnnnnnnnnnngttctttctccactgaaactcttgaaatgtaatggcttatcgtgtggctttaccctaggggataaaccgcga

SEQ ID NO: 249131 - DNA, 906 bp, Homo Sapiens
ttggcacattcttttccaggcccgaggccaagtgcccctcttggtgtcttcttacaggccattctgcccttccactgcagtgccatcctggctacagccctggacacagtcactgttccttatcgcctgtgttcctctccagtttccatggttcatctggctgacatgctgagcttctgtgggaaaaaggtggtgacagcaggagcaatcatccctttccccttggctccaggccagtcccttcctgattccctgatgcagtttggaggagccaccccatggaccccactgtctgcatgtggggagccttctggaacacgttgctttgcccagtcagtggtgctgaggggtatagacagagcatgccacacaagccagctcaccccagggacacctccaccctctgcccttcatgcatgtaccactggggaagaaatcttggctcagtatttacaacagcagcagcctggagtcatgagttcttcccatctgctgctgactccctgcagggtggctcctccttacccccacctcttctcaagctgcagtccaccgggtatggttctggatggttcccccaagggagcaggtatgtaggaggtgaagaaaactgagatttcaagtatgggagagtttttactatctccattcctggattaaaagtgctgaaaaagtccacagttaaacattcctttattcaccctatggctcccaagaaaagcattcttcctctggagtactggtgtactaaggggacaatacaccaaatttgttgagtttacaatcaagtctactaaagttggacttccttatcagtttggcgagtcccagggcagaataatcatccatctacaggtctctgtttcctctccctccacagcagtggagagcatccagtgtttgggg

SEQ ID NO: 249132 - DNA, 775 bp, Homo Sapiens
ttctttaatgtaacttaaataaaatataaggttttactttatttgtgctttttggaaatgtctcctgatttttaataacagtttattatgccttgtaccagcttttttattaatatataaggtgcccactatattataccaattatgctgcttatatagttattcatatgcatctcaaaaccttccttaatgtacttataatgaggtaacaccatagcaaaattgcatctttttcattatctgcatttaatatctatagtttaccaacgatgacactgcaagcattgtgtcttctgatcgtgccagtcgtggacgaagggagagtgtggtgagcatgatttgcatgcaaagaaataagatgagttttaaatgacagcaatgcatgatcacatgaagtctgttggaaagtgaagtttgcatttgacaaaaagagcattttcctcaaatttagttatataaatattttgccttataaaacatgttgagaacacatattctctgtgggctgtgcaagctttcattaataatttgcctttttacatctcttaggagtgaatcattatttgaaaagtttttactttttcttctttgttgctgttttatgcacatacatgtgtgtgcagttcaccaaagacaaatttcttcagcaaaattaatgtttccatattgtataaaactcataactatggattacaaatcatgttaccattaattgctttctatattgttgtatttagatttaaccagtgtttatccacctgttaagacctgtaat

SEQ ID NO: 249133 - DNA, 754 bp, Homo Sapiens
ctgaagtacactttttgtttaattccatgcatttgtttgctttgatagtcattcttgttcccattgccgttcaatacagagagggagccggcatcagaaaacaacactgggagctggggactgacagtacaggagaccagaggggagccaggtaaggaggttcatttggagaccttaccacaaaagagaaattcattcgctccaagtcgataggagctcaaattactgtaataaagcgtcaaagagggtcttcccacttccagagtctgggaagtggtcactctgaaggtgaagagccactggggtgatatgggcaagatgggacatcttcctaatagcttgcacatgctggctggggttcccttggcctgcagtcactggaggaccctgtccacctggtcactggacagcagcctagggccgggagccagcgatccctgagtgctgtgaagtggctctggagagcagacctgggatgctgccgggagcttccttacagtggccttgccatctgcttagggctctgctctgtgaagtcctgccatcgtaccctggccacatgacagttaacaaaagccttaacccacctcctgtttctcagagcagtgattttagagctcccctctttagccacctgtccctgagaaatgctccaggttccacaagggtcctctgcttagcctagttcagtccgacttgaataggttaaaggcagtatcagttccaacttttttgtacaaagttgcttttacgg

SEQ ID NO: 249134 - DNA, 933 bp, Homo Sapiens
ttggcttattttgtatggattacatttatatgttataatttctgttttcagattttgtacagcagcaatttcttactctctctgcaagttttcttcccagtcacgagatactttgtgcaggtgcttatctccaggccttattaaaaagtttcagttcctcatgttcagattgttctcagaggcccgacagcctctttctgaggaggacgtagccagcctttcctggagacccttgcaccttccttctgcagactggcagagagctgccctctctctctggacacacagaaccttccgagaggtgttgaaagaggaagatgttcacttaacttaccaagactggttacacctggagctggaaattcaacctgaagctgatgctctttcagatactgaacggcaggacttccaccagtgggcgatccatgagcactttctccctgagtcctcggcttcagggggctgtgacggagacctgcaggctgcgtgtaccattcttgtctacgcactgatggatttccacctaagctcaaggagttatgaccactcagaaaattctgatttggtgtttggtgtccgcacaggaaatgaggatattatttccagattgcaggagatggtagctgacctggagctgcagcaagacctcataggtgcctctcggccacaccccttcccaggagcacttcctctttgagattttccgcagacggctccaggctctgacaagcgggtggagcgtggctgccagccttcagagacagagggagctgctaatgtacaaacggatcctcctccgcctgccttcgtctgtccttctgcggcagcagcttccaggcagaacagcccatcactgccagatgcgagcagttcttccacttggtcaatctctgagatgagaacttctgctcccatcggagtgcctgccacaac

SEQ ID NO: 249135 - DNA, 839 bp, Homo Sapiens
cgcgcagtatgtcgcatatacctttttctttcatgtgtaaaaacaaccatgtgaggtattttacaggtcaaaagaaaacaaaaactacttccttattcagtgtaaaggaggtttataagcattccaaaataaaaacaaacaaaaaccagacaagtacatagtttatttccatttccttttatacatcctctctatatatcacacatttagcaataggagaatagagaattaattcaaatgcaagggaatcttttttgtagattctgttgacagatgctctttaacctaaacattttctactctaaacataacggacttaattgtcttcagtacgtgaaataattttaaggtgatctagtactttgaaaatttcattcacttaagaacacttaagctgaaaaatagcactatttttcagaggcaatttctcaacagaaaaaggcaatggtaacagttcaattgatggaaatggttgaaataaaatacctgaagtagaaaaaaggtgtaggaacaattttgtaaaaacatagcaccattacctcaacgaatgaacaaattttacatactgtatttttttcaaatgacttattttcatatttagtagttcaagttctataagctgttatattaagctttctttctgtttaagagttcaacactaacatcatgttattttacaaaataaaaaacaatttctcaataaacagtgactactaaattgttacaaagaaaaattcttcaatacttattttattccatatgtaggctttttcccaaaagacatattaatattgcattacaaacaggacccaacttttttgtacaaagttgtttattag

SEQ ID NO: 249136 - DNA, 973 bp, Homo Sapiens
ttggcttcttccccaccattggaatgctgagctgcggggagaaagtcaaagtagatctgcaccccttgagtggctagggcctcccctccagacctgctccttctccctgctcaccctctgctgggccaggcacccagttcctgacttcccagaggcttcgtttacccagcaggcccctggaggtgtgtagtcactctgcccccactggctcaggcccctgtcacgcttctctgtgcccacgtttctgacctggtgctgccactgttgtcagtccctgggcctgagtccctggttggacaggaatggacccaaagaatggtgttggtatgtgggtggtcccactcgctttggtcagtgggcttctgggtccccctttccctcaccggccctgtgtgggtggagaggcgtgagcaccctatctcagctgctattcgggcatgatgctttgtagagggtagagtagacagccccctcccctactcaccatggtatttctccttgaattcctctttcttgttttctttcctggttgtgtgaaccagttgctgctgtcatacccctggcagggccaggggacctctctttggtcatctctgtcctttcactggctgctgccccaggaagactcctctaggctctccatctttcccttgagagctggctccccaccccaacctgctcaggcaccacagaggatctaggtctctggctccccatacctggacccacatgggtgggtgcctgttgcatgtttaagagagaggggctgtgaggtgacagggcactagggccttcactcctttctccccttccatcctttctttaccagtgccgcccatgtccctagctcccgggtattggggctgaggctctggggcctgtctccctgccagcgtgagggcaagagtccagagccttagctgagcaagcccagaggggcggcgtggcccctccctcccctcttctgccccac

SEQ ID NO: 249137 - DNA, 526 bp, Homo Sapiens
  misc_feature (431)..(450): n is a, c, g, or t
taaaacccagtttctgccattcctgctaagacagtttggcgagaagccccaacctccaccacccctcatgcgatgtctggtcaccctggcctgccttcagcaagaatcctgctgggtcagttcagccagaatccccctgacccccatgcttcctcttggtaattcccacctctgagcccaccctgctccctggctagaaatccacttgcccgtgctgcattcgagttgggcctgacctctccccacgggtgggtaggtctccgctgcatggtccctgcgcctatcgagacggctctgagtcgagtcggcctcactgtgctctggcaagcacctgtgagcggcgtctcctccggcagggcctgtgcctctgcacccaccctgtctgcactgcttggctgagtctcccagcctgagcctttctcctggggatnnnnnnnnnnnnnnnnnnnngctggcccatctgcttctcagagatgagggtgctaagtctcccaggccagacaagggagtctctgatttgatccaa

SEQ ID NO: 249138 - DNA, 1167 bp, Homo Sapiens
ttgggggaaaggcaggtggggccagaccctattggccatctgaccagccttcccaagcccacgtgagcagatctagggtctcaagattacagaaggcctggggtgagggagcaagagttggaagttctttatagttgtctgaagagcctcattgtccaactgcaggggcctgaggtgcccaaagcttcgtggaaaagtaatgtcagtggaatgctcagaagtggctcttttcagggcacggcttctgaggagcgtggggccaccacagctagccctccctccgtctagccatcctctccttccagtccctttcccatcttttctctcaaaggagcatggtagtgatcttcattaccaaatttctactccacacttattttaaaaagcttttctgaaagcctggctacatagaattctaaacagatttcagtcaacttttaattagagtcaatgaatggggagtaaatacacagataatccaaaattgatgtaagcattggaaggggaaagagggaacgcttctttccctctgggcttggtcatttcctcccaagcaaaccccgcgacgttcagccgtcttcctcctatgccacgtgctctcaccagaactgcagcaaaactgcattttatgtcctgtgtctaaagctaaacacatgttcctgtctacttttgctttgttcctgtttcccttctgtgaggaccttcccctcctcagatgtggggagttgccgcctccacttgcattacatgtatttcagagtaggtcctaggctcctcttacacctctggtcacgttgccattattcctatggtagataaaggggatgagaaagaacagagctccaggcctttttcaaacaaactggttttctcagtatagccctatgctcaaaaggagtgaggacaggtatgtgactgccataaggagctgtttgctttgcacagagaaatctaatctttctcctgctgggcagctcagtacagatgtcccctcactgctggaagaaacacctgcccttgcttgttctcctgatggcccctcacagtcaggtgtgggatggcacatttctaggtgctcctcgccgagctgtcatgggcttcagtctcgggcctctgcagctggctgtgaccaggtggaaactgtagccttggctgacccagagaagg

SEQ ID NO: 249139 - DNA, 959 bp, Homo Sapiens
ttggcaagacctgctcccgggtggattactgcctgctgagtgaccatggttgtgaatactcctgtgtcaacatggacagatcctttgcctgtcagtgtcctgagggacacgtgctccgcagcgatgggaagacgtgtgcaaaattggactcttgtgctctgggggaccacggttgtgaacattcgtgtgtaagcagtgaagattcgtttgtgtgccagtgctttgaaggttatatactccgtgaagatggaaaaacctgcagaaggaaagatgtctgccaagctatagaccatggctgtgaacacatttgtgtgaacagtgacgactcatacacgtgcgagtgcttggagggattccggctcgctgaggatgggaaacgctgccgaaggaaggatgtctgcaaatcaacccaccatggctgcgaacacatttgtgttaataatgggaattcctacatctgcaaatgctcagagggatttgttctagctgaggacggaaagacggtgcaaagaaatgcactgaaggcccaattgacctggtctttgtgatcgatggatccaagagtcttggagaagagaattttggggtcgtgaagcagtttgtcactggaattatagattccttgacaatttcccccaaagccgctcgagtggggctgctccagtattccacacaggtccacacagagttcactctgagaaacttcaactcagccaaagacatgaaaaaagccgtggcccacatgaaatacatgggaaagggctctatgactgggctggccctgaaacacatgtttgagagaagttttacccaaggagaaggggccaggcccctttccacaatggtgcccagagcagccattgtgttcaccgacggacgggctcaggatgacgtctccgagtgggccagtaaagccaaggccaatggtatcactatgtatgctgcgtggggtaggaggt

SEQ ID NO: 249140 - DNA, 941 bp, Homo Sapiens
ttggatcgcaaccatcctctgctaccaaggctgcaagtggaacatcctgttactgagatgatcacaggaactgacttggtggagtggcagcttagaattgcagcaggagagaagattcctttgagccaggaagaaataactctgcagggccatgccttcgaagctagaatatatgcagaagatcctagcaataacttcatgcctgtggcaggcccattagtgcacctctctactcctcgagcagacccttccaccaggattgaaactggagtacggcaaggagacgaagtttccgtgcattatgaccccatgattgcgaagctggtcgtgtgggcagcagatcgccaggcggcattgacaaaactgaggtacagccttcgtcagtacaatattgttggactgcacaccaacattgacttcttactcaacctgtctggccacccagagtttgaagctgggaacgtgcacactgatttcatccctcaacaccacaaacagttgttgctcagtcggaaggctgcagccaaagagtctttatgccaggcagccctgggtctcatcctcaaggagaaagccatgaccgacactttcactcttcaggcacatgatcaattctctccattttcgtctagcagtggaagaagactgaatatctcgtataccagaaacatgactcttaaagatggtaaaaacaatgtagccatagctgtaacgtataaccatgatgggtcttatagcatgcagattgaagataaaactttccaagtccttggtaatctttacagcgagggagactgcacttacctgaaatgttctgttaatggagttgctagtaaagcgaagctgattatcctggaaaacactatttacctattttccaaggaaggaagtattgagattgacattccagtccccaaatacttatcttctgtgagctcaca

SEQ ID NO: 249141 - DNA, 973 bp, Homo Sapiens
  misc_feature (900)..(918): n is a, c, g, or t
ttgggtcatcaagaggcctgcccgtggccagggcggtgcctatgccttcctcaagttccagaacctggacatggcccatagggctaaggtggccatgtcgggccgagtgattggtcgcaaccccattaagataggctatggcaaggccaaccccaccactcgtctctgggtgggtggcctgggacctaacacgtcactggcggctctggcccgagagtttgaccgctttgggagcattcggaccattgatcacgtcaaaggagatagctttgcctatattcagtacgagagcttggacgcagcccaggccgcctgtgctaaaatgaggggttttcccttgggtggaccagaccgcaggctccgcgtggattttgccaaagcagaggagactcggtacccccagcagtaccagccctcgccactccctgtgcattatgagctgctcacagatggatacacccggcaccgcaacctggacgccgacctggtgcgggacaggacgcccccacaccttctgtactcagaccgagaccggacttttttggaaggggactggaccagccccagtaaaagctctgaccgccgaaacagccttgagggctacagtcgctcagtgcgcagccggagtggtgagcgttggggggcagatggagaccgtggtttgctcaagcctctgggaagagaggcggaaacggagaagcctttccagtgaccgtgggaggacaactcattcctcatatgaggaacggagtatgaccaagggcagtgggcagcagtcagagcggggctctcgaccgcacctctgagcgcagccgcaaggagaaccactccagtgaagggaccaaggagtccagcagcaactccctcagcaacagcagacatggggctgaggaacggggnnnnnnnnnnnnnnnnnnngaggctgcagactcttcccacgggaagaaggcaagagacagcgagccagtcacca

SEQ ID NO: 249142 - DNA, 958 bp, Homo Sapiens
agccagtttcttaaaaacaacccaaaacgtacagcagtggctatgccacaggcagcaaccagtgtggggcattccaacagccagctacccaaagtggcacctggaccctatctgtccctttggacaggttctgggcctaaagagtgagggacaggtccccgcccaagggagcaccagagatggaggagtgagagcaggcttctgctccacctgagctgtttagggagctcaggacgaaactctgagcggggcagtgtggtatgtgatgatcccagagtctgaggaagagtgtcctaagttcctcacactctatctccaggaggaactacgatcgcagtccagctgcaaccaaacatgcatgtcttcccgccgtggctggctgctttctgtctgcccctccaggcctcttggtgttgcagaggagggggtaggagagggaaagggaacggttccaggtcacctctaaaccctctagaaatgaaatgggaatgaagcaggtcacaaactcagcatgcagggctggcttcccgggaggtagatgggagtgggacgggatagcaggtgtggagaggacaggaagggaaacaggaagaaactgagcgacacctgccaggaaggtcaagaagcaatgaaaaggacaaagacaatatgaaatctgcatgaaaagacaggtccttttctggcagattagagaatcaacattttcagtacaactcataacgctactttcctaactgcagtacccgagtccccagcgcctgtctctatgatccaacccccatttcactgctcccaagactttgctctccattttatcaaggcctccaatcattttgtgctgagtgtgaaggctccaatgtgaaagcagggtctaccacagggacgtgcagacttgacctttgtgacccaatcattttatagctatcgcagcataggaggggggcacacttttctccaa

SEQ ID NO: 249143 - DNA, 850 bp, Homo Sapiens
ttggcgctgcgaccgttggggctttgttcgcgggggtcacagctctcatggctgcagctagcgtgaccccccctggctccctggagttgctacagcccggcttctccaagaccctcctggggaccaagctggaagccaagtacctgtgctccgcctgcagaaacgtcctccgcaggcccttccaggcgcagtgtggccaccggtactgctccttctgcctggccagcatcctcagctctgggcctcagaactgtgctgcctgtgttcacgagggcatatatgaagaaggcatttctattttagaaagcagttcggccttcccagataatgctgcccgcagggaggtggagagcctgccggccgtctgtcccagtgatggatgcacctggaaggggagcctgaaagaatacgagagctgccacgaaggccgctgcccgctcatgctgaccgaatgtcccgcgtgcaaaggcctggtccgccttggtgaaaaggagcgccacctggagcacgagtgcccggagagaagcctgagctgccggcattgccgggcaccctgctgcggagcagacgtgaaggcgcaccacgaggtctgccccaagttccccttaacttgtgacggctgcggcaagaagaagatcccccgggagaagtttcaggaccacgtcaagacttgtggcaagtgtcgagtcccttgcagattccacgccatcggctgcctcgagacggtagagggtgagaaacagcacgagcacgaggtgcagtggctgcgggagcacctggccatgctactgagctcggtgctggaggcaaagcccctcttgggagaccagagccacgcggggtcagagct

SEQ ID NO: 249144 - DNA, 664 bp, Homo Sapiens
aaaaactttgtacaaaaaagttggattttaagctctacgtgggaaaaatctggccacttttgtgtttttatgaaggccatggaataaaaggatccaaagatttaaatatttttatctaatattttgattgttttcttaactttctccttaaaacattcagtagtgataaagatatagaaactgcactgtaggagaattggaatatttaaggctggttgacattttttattttcattttatatcttttgtatagctctacaaggcagtgttttgtaatttggtttcattatgacgatccagtacttggcagccatagtttagacaatattgttcagtgctgtttgcttgcatgttaacaacaaaaccttttagaggacccacaaatcatgatattgaacacagttccgaggcattcagagcatcagagcaagtaccatggcaatacatgtgtagactgttggagatgtcccgggccaaatttcaagaaagaaaactgtaaatactagttctacttgctctgaaattatagagtttatgcgttttcccagccctccgaatcactgactggggcgtatttgtgccccaagcaataacctggcagcatggcatacctgcagtaccccttacaatattaaagcaaaagtttttattctaaaacagaata

SEQ ID NO: 249145 - DNA, 817 bp, Homo Sapiens
ttggctaacatttgaggggtccctgttttctattagtttacttaatgaaggaaaagacttagttctctccacccaggagagtacagtctagaagcagagaaaagattgtatacataggagagtttgtgcctttattaatgtgggtgtggagccactagggtttgttgattgggagatagcacagagtactttagctttctaaccataaacctggctgagagcgcttcaggagacaattgcctagatccctttgtccccaggcaggcctcctcctgtgtgaccttccctaactccctcttccctcaggcccactccatcacttattcaaatagcattgcaatgactcctgctgagtcttttcctgcaccagctctctattgccttaaggagagccttagtgttttgtccttgaagcctgtcctgggccagttgaactttcctgcctttccatggtgacctctcaactccctcttgtggcaatttccctttattttacatgcaggtctctcttgccagcctgttagctggagcccacagggcagatgcagcacctagggtaatgccagccaggcgctcagaagtagacaacactcagtcaatgtttgctgaacaaactgaacccattcccttccctgagagccagcgggggttgaggggttgcgtaatagagatgagcagtgtgtggctccctttgccttccattagacctttgataacagtggattgaggagttgggaaaccacatgatgtgcaagggacattccttgagcctgatgatttgtatattttagaattcttgtacccccttaattcctcc

SEQ ID NO: 249146 - DNA, 952 bp, Homo Sapiens
  misc_feature (141)..(431): n is a, c, g, or t
  misc_feature (440)..(546): n is a, c, g, or t
  misc_feature (568)..(604): n is a, c, g, or t
  misc_feature (606)..(719): n is a, c, g, or t
ttggggctttaattaaacgctaagaattaaaatgcacataataatagactttacctcacaaactggcttcaaatattcgatgagacttacatgtattacttaaatgaggttaaatttaaccttttaaaaatgatttattgnnnnnnnnnnnnnnnnnnnnnnnnnnnnnnnnnnnnnnnnnnnnnnnnnnnnnnnnnnnnnnnnnnnnnnnnnnnnnnnnnnnnnnnnnnnnnnnnnnnnnnnnnnnnnnnnnnnnnnnnnnnnnnnnnnnnnnnnnnnnnnnnnnnnnnnnnnnnnnnnnnnnnnnnnnnnnnnnnnnnnnnnnnnnnnnnnnnnnnnnnnnnnnnnnnnnnnnnnnnnnnnnnnnnnnnnnnnnnnnnnnnnnnnnnnnnnnnnnnnnnnnnnnnnnnnnnnnnnnnnnnnnnnnnnnngaaaaatgnnnnnnnnnnnnnnnnnnnnnnnnnnnnnnnnnnnnnnnnnnnnnnnnnnnnnnnnnnnnnnnnnnnnnnnnnnnnnnnnnnnnnnnnnnnnnnnnnnnnnnnnnnncatgccaccacgcctggctaannnnnnnnnnnnnnnnnnnnnnnnnnnnnnnnnnnnnannnnnnnnnnnnnnnnnnnnnnnnnnnnnnnnnnnnnnnnnnnnnnnnnnnnnnnnnnnnnnnnnnnnnnnnnnnnnnnnnnnnnnnnnnnnnnnnnnnnnnnnnnnnnnnnnnccctccacctttcagctgaacgcagaaaaagtacaatcttttaacccaaagcgttcctcacacttagggtcaggaagagccctttcatgccctggaggcaactactaaccctctgctaaacactctgactctggggtgtgagaaacacacctactgtgcccggcctcaaagatcttttggccttgtcgaggtggcgagatggacatatggaatagagacagatagccgaccct

SEQ ID NO: 249147 - DNA, 370 bp, Homo Sapiens
gggagtccacggtgtttattgggcaaacccacgcatggccgtggcccagctgggcacaaccctcaccctggtctgtcatgcctgtttttcctacactcagcggcaaagctgcaggagcagggctgagcctggaatagcccttcctagtcccctcttctcggcccactacccatccatcagtcaccagccgtcaccttcccctcccgtgctccaggctgggggagggagagcccagtggtggatccagcctgaagtcctgccctctcttatctgtctggaaaggaggtagcacctttttcgggaaacgggttagggagtaaagtctgcaccctacatggccaacttttttgtacaaagttggcttttttag

SEQ ID NO: 249148 - DNA, 709 bp, Homo Sapiens
ttggctgcagctccggccgccacttgcgcctctccagcctccgcaggcccaaccgccgccagcaccatggccagcaccatttccgcctacaaggagaagatgaaggagctgtcggtgctgtcgctcatctgctcctgcttctacacacagccgcaccccaataccgtctaccagtacggggacatggaggtgaagcagctggacaagcgggcctcaggccagagcttcgaggtcatcctcaagtccccttctgacctgtccccagagagccctatgctctcctccccacccaagaagaaggacacctccctggaggagctgcaaaagcggctggaggcagccgaggagcggaggaagacgcaggaggcgcaggtgctgaagcagctggcggagcggcgcgagcacgagcgcgaggtgctgcacaaggcgctggaggagaataacaacttcagccgccaggcggaggagaagcctcaactacaagattggagctcagcaaggagattcgcgaggcacacctggccgcactgcgcgagcggctgcgcgagaaggagctgcacgcggccgaggtgcgcagggacaaggagcagcgagaagagatgtcgggctaagggcccgggacgggcggcgcccatcctgcgacggaacacgttcgggtttgtatttgtttccgttcaccctgctggaatggaatcctcgaggaacagcc

SEQ ID NO: 249149 - DNA, 1040 bp, Homo Sapiens
  misc_feature (642)..(673): n is a, c, g, or t
ttgggtcagagtcctatagcaacctccaagtagcaccgtcttacttggctcttgtgagcaaagactgcagtaccttaaattaaggcctctctttaaaacatatgtggaagactaggggatccttggccacctggtctcagagaaatcatatgagagtaacaggcatttccttattgtatttgtactacactcttcctacttttccattcctgaacaccctctaattaccactgttttggggatgctttttttctgaaagaacggggagtacaggggccaaaagggaggtgcttctattacagggcaagttagatcagataagaagatctagcagtgatttaaactccaggaatatgaagagtgcattctggtgtccagacagttgtgaagggctcggcaaatataagagcaccattggctacatggagagcaaaggctgtctttgaagaccccagggaggtcttcacttttgcctaaattcagatttgccgtgaaaattccaaagagagcagatatttggatttgccctcctttgggcatctacctgactgttgtgtgtgtgggaaagtcagtgtgtatgtgtagagtgtgcttaggagtgagtgagtggtcaggcctcctggctaggtgtgttgtccatannnnnnnnnnnnnnnnnnnnnnnnnnnnnnnncagagttttgaatcttacgttttctagagctgctcatgttttcccttcctttttgtcgttgtagtatttgacagttgtcttttccatcaaaaacatactggccctaggctggttagagcaaggggttatgcctgttaggcagcatcttacgcccagtgttctcccagatattctgcctaacaggtttaagtaggagattaaatagtcagtttatctaaaccctctatttttccaaactagcttgagaggtcttttcatctatttttactccatgggcctctgatatgctgagatgtggcacggttatgattatggtatcaccgttacagaggcaaagggataaaggtctaccagggccaacgtaacc

SEQ ID NO: 249150 - DNA, 931 bp, Homo Sapiens
ttggatcatttcttaaccttctcagggaaagaaggaatgagaaacattagccttaatgcatcgatggaggtttactaaccaaattagttaaaaatcagcagagagtcaggcctcttgccaaggtaatactcacagcagaagagccaggtgccggggcagacacactaactcattcttcaggaagcctggtcagacctaagttctttccacttgatctggaattttaagtacccataaagaaaggtcatcacttgtaaacattttcacatggtttcaggaaatccccagcccttttattaggcctttttaggtactgaaacctttagctgatgttctctgttatttgcttgctttctgctgtcattccagctctctcagtttttattttccccatagcctcactttgaatattgactcctaaataaaagtggtcaaactctcgatcactagagggtgatgtggcaaatgccatcccatcaacagattgacatgatcttttttccaaagggcatgtcaacttttttatcatgacaagattttgtccaaagctagactttgatgggagcaggcaagaagtaacatttcctgtgtccctactatgtgtcagacatcttctgtaagtccccatactatcctggcaagaaaagcatgattatcccagttctatagaagagaaagtagggtcaaagaggctaaggaactagcctgggatcacagatttttaaccgtagtctgtctccaggatcacccgcaggagtaactcagctcaggaagcagctgctgacgtgcccagcaactcctcaccccagctttctggcttggttactccattagtccccaccagcaccacttcctcccagctcttaaagattctattcccaagtccatttctttcacatctagaaacttagcttctttccttccgttactt

SEQ ID NO: 249151 - DNA, 731 bp, Homo Sapiens
gtgttaagagttttcggattgtgggtttcaggtttatgtatacgtcaacacccatttcaagtcctagatcttcacaatcctattccagagagctttctacaccatcaactcccgcaacacttggtctacacagctaccctggcactaaaaaatccgtgttgtcccagtgtcccctgcgcctcacatgcaggaacagcagcaggaggacaccaagctccctgggaggggccaggccgtgggcctcactctaatactccactggcaggtgccctaaagccaatctctaaacatgagctgaggtgaactcactcctcattcagcagatgtctaccacggataactgagcagagcccactagctgttactcagagaaaaagagcaactctgccttgcaaatcctgaaccaccacaccaggacacgggtgctgcactcttacttctctacagaggctgcccaaatccccagcatgcagagctgccgaggcctcacagtgctcgtaccttttcttccttgagaccctggcactccataaagacaaggaaagcctgcacagattgcccttctcatctccaactcggctttcacttcggaagccctgcagggcacagaggatgggggatggggaccgtggaggacacgtgcacatctcctgtcctattttcctcatagtggcttccagcgatcgagccacaatatgatacattttgagcagcttggagttgacgcttcc

SEQ ID NO: 249152 - DNA, 1345 bp, Homo Sapiens
  misc_feature (274)..(335): n is a, c, g, or t
  misc_feature (345)..(477): n is a, c, g, or t
ttggggggtgctgtgctcgtagagttacatagtgatatgttctgcttttttctaatgtgagaaagagaaataataagaaaagtaggtgatgccatgtgagtacataaaagtgagaccaaatcacagggtgagtccaagggaagatgagtttacctgcattctccactctattgctggataaatacaacgtggaatttatcctgatgttgactctgtggccctgtgatatctggagatgtcttctgaattggcagtgattaaatacttcttaagnnnnnnnnnnnnnnnnnnnnnnnnnnnnnnnnnnnnnnnnnnnnnnnnnnnnnnnnnnnnnngaggcagaannnnnnnnnnnnnnnnnnnnnnnnnnnnnnnnnnnnnnnnnnnnnnnnnnnnnnnnnnnnnnnnnnnnnnnnnnnnnnnnnnnnnnnnnnnnnnnnnnnnnnnnnnnnnnnnnnnnnnnnnnnnnnnnnnnnncagccccaaatccaaaacttcttgaacgctgacatgatgctcagatttggttgatactcaaccagtaaatgtaatgcagatattccaaaaatccagaaaaatccagtatccaacacatttctagttcctatcatttcagatcagaggtgcttcacctgcactgcctttcccagtccacttttgtgaagattcagtcatgtcctggtttctgctcagactctcctccttgtagcctttttgtgtctcgcacagtaagagttcatctgcataaaggccataaatatctgggtggttgattaaacgtgccctgcagctcctgcgctcttctgtgttagtgaagagtacttttccttttcctttagagcagctcttgcttcctaatttttgcttcctggttttgccattttacattcctcttactcgacattacccagtttgggatcacctttctttcggccttctttctactgacagatgaaacatcagtgaatgttaaatgtaattctctgtatatctcaaattcaccataaaatgttctttactttttttcactgatatgtgaagaaacttaatctcttggttattttctctagtattttgccttttattgcctaatttgtaactaataattgatttatccctaaaggagactataattatcagttgtggtacagtttctattttattataagaagctcaaactttagcatgcaccagaatcacctagagagtttgtttaaatgcaagttgcttgttaaagcaagcttgtgatttagaggtttaaggtaggacctaataatttacatttttaacaagttcccagatgatgctctcactgctggtcggggtcacactttgagaaccactg

SEQ ID NO: 249153 - DNA, 1368 bp, Homo Sapiens
  misc_feature (404)..(502): n is a, c, g, or t
  misc_feature (508)..(525): n is a, c, g, or t
  misc_feature (660)..(696): n is a, c, g, or t
cactcagaaatctaaatatacacattcagagcaacttagtaaaaactaacacatgcctcgtacacaaaaaaagacatttccacaaaggagttagccaaacgcaatagcgtaattacagaattacagcaagctgaatacgtacacagtattatttaagcaaacatcagaaagtaaaataaatacacaaccctccttcccctcatcaaattacttttgtaaaacctaacattggtactccaaagaacaaaagtataaaaactactgtatgcctattcatgacagtatacaccctgcttgatttcatttcttcagcatctttccttctaacactcagctcctacagcaactactttgttggatgaaattaagaaaagtctaaaaaataatagcaaggcttgatggtnnnnnnnnnnnnnnnnnnnnnnnnnnnnnnnnnnnnnnnnnnnnnnnnnnnnnnnnnnnnnnnnnnnnnnnnnnnnnnnnnnnnnnnnnnnnnnnnnnntgattnnnnnnnnnnnnnnnnnnttagccaggcatggtggtgttcacctactgtagtcccaacgactcggaaggatcacttgagcccaggaggtcaaggctgcagtgagccaagatcacaccatgccctccagcctgagcaatataatgagactctannnnnnnnnnnnnnnnnnnnnnnnnnnnnnnnnnnnnaataagactttatatgagtggtcattggttatgatgttcttattctttataagagaaaatctgtgtatactgttacagctgaatggcatttggtatatggcatgccagtcttccacatgtactgatgtttaagaaaggcttggatccagtgtgtattctggatgtcgggggaaaaaaaggcttggaaaccaggttatcctattatttaaaatattaaaaattacattattttagaaacagagaaccaaatacaagctgatactaccataaaattaccataaaatagttttgctcttttttcactgtttacacctttcctccctatattaagttgttaagtacttgagaaacgtacttaacactgaacttcccaatatatttgggaaggtatgatatgaatgttaagtataaaataatacgggtagttaatgttaaaagaactcagaggaaatttccccgcagggtaactacaaagatgttttctatgctgcatttgtcccgagatgtttatgtaactcattcctctatctcaatcattacatacccctcattacaaacactcctatgtgctctctgagctcatctgaagagaacagaattgagtcgatgatttgagttatgattttctccattctcctagggactgtacataattagtaccattctagccaa

SEQ ID NO: 249154 - DNA, 937 bp, Homo Sapiens
ttggacctcttccatttgatgattctgtatttcagagtcagtttcttgagtaactccagtgctacaaaaagaattagtaatgtggtgtgggcagcgtgacattttatgtcccacccaaaaattggattccttttggagactgatctgttggtctcaggcatttcattaggaccagattggttctaagagttagtctggactggccctaggaaacttgaattaaataagcctcttccccttaccgatcctttttaacactctcaggtttgtttgtttcccactttttttcctatgctggtctgcctcaaagtctcaagaccaaggtgactcaagataacaccagaccacgcatgatcaccaaaaccttcccatcctgattctcttcttctacctctaccctctccaacttctcctggtcttcacatatactctcaaagctagtctgaaagtgaccttactttcggaagtagggaagtggaattttggtaaatgactgtttgcctcatttaatagtatacaggctcagcccatagactacagttcttcagaggccatatgtctcagcaagtactggttatattctttttttgtaaggaagatcataaatgctaaaaattccactaagccattcagttcttccttttgcctacctagtcctgatttttgtattaattggttccctttagcaagggattcagatctttgtaccttatcttatatccagagcagattccatttggcagatagatggtctctagcctattgtattcttagaccaaaatcataacctgctgtttctcagcaaagccttgctctctggagcttactatgtgctggtacttaaagagtacattctgccttgctatagtgaagagacccactccaaataaaaaaggggccacacgggcttctaagttaaggttgcagtgttgctgcc

SEQ ID NO: 249155 - DNA, 1142 bp, Homo Sapiens
ttggatttatttgttctatctgtgtgaaaggatcttcccagccccaagcaagagtttatttaacatttgatgaacttcgagaaaccaagacctctgaatacttcagcctttcccaccatcctttagactacaggattttattaatggatgaagatcaggaccggatatatgtgggaagcaaagatcacattctttccctgaatattaacaatataagtcaagaagctttgagtgttttctggccagcatctacaatcaaagttgaagaatgcaaaatggctggcaaagatcccacacacggctgtgggaactttgtccgtgtaattcagactttcaatcgcacacatttgtatgtctgtgggagtggcgctttcagtcctgtctgtacttacttgaacagagggaggagatcagaggaccaagttttcatgattgactccaagtgtgaatctggaaaaggacgctgctctttcaaccccaacgtgaacacggtgtctgttatgatcaatgaggagcttttctctggaatgtatatagatttcatggggacagatgctgctatttttcgaagtttaaccaagaggaatgcggtcagaactgatcaacataattccaaatggctaagtgaacctatgtttgtagatgcacatgtcatcccagatggtactgatccaaatgatgctaaggtgtacttcttcttcaaagaaaaactgactgacaataacaggagcacgaaacagattcattccatgattgctcgaatatgtcctaatgacactggtggactgcgtagccttgtcaacaagtggaccactttcttaaaggcgaggctggtgtgctcggtaacagatgaagacggcccagaaacacactttgatgaattagaggatgtgtttctgctggaaactgataacccgaggacaacactagtgtatggcatttttacaacatcaagctcagttttcaaaggatcagccgtgtgtgtgtatcatttatctgatatacagactgtgtttaatgggccttttgcccacaaagaagggcccaatcatcagctgatttcctatcagggcagaattccatatcctcgctctggaacttgtccaggaggagcatttacaccgtctgagcacccgtctgag

SEQ ID NO: 249156 - DNA, 1427 bp, Homo Sapiens
  misc_feature (59)..(79): n is a, c, g, or t
  misc_feature (941)..(1101): n is a, c, g, or t
  misc_feature (1237)..(1282): n is a, c, g, or t
ttggctctgcaccaaaactggcaagcaggacagagcattccattagggaaaaaaagaannnnnnnnnnnnnnnnnnnnncagaaaagtatataaaagaagttgaaaatactgttttaaaacaaatattgactgatctctaatgtccacatccaaggcacttgatgacaggaattatagaatattcagaaaaatagagtttttctttcacttctgctataacgtgtacttggaaactacaccataaagtataaagctcgaaagtggctggaatttctgcatacgatgtattgtaattacagattgcgctccaagatttgttataaactttgtgaagggaaaaaaacacaaactgtgttttgtatattaaacattaaaattgtaggctatatcgtatgcaatggaaggaaaatatgccacatacattgaatttttaaaaactaccataccataattttgcataaaaactaataaacaaattgtattaaatgggaaatagttaataatttggcctctctggtttgctgctgtgtcgccaggtcctggctcccattaagatgacatctagcctataggccattgaatagaaaaaagacattccttcctcaagcacttaacttccattcagccaaagcttatgtgtattgattttgttgcaagacacggtactgccgtctgctagaaaatggtgtagccataaaatccaaatgtaaaatttctacattgtgaatagtacttcccagatgtggtgcacagtctgcacaagcataggcactggccctacatctaaatagatttttctggaatgaaagaatgaatgtattctattgatcctggttatgctttgaagctgtaatctgtcagtaccctctgtggtcactagataggaagttggagaatattcagagtgataaagagaagggtaatgggaaagtctaaatgnnnnnnnnnnnnnnnnnnnnnnnnnnnnnnnnnnnnnnnnnnnnnnnnnnnnnnnnnnnnnnnnnnnnnnnnnnnnnnnnnnnnnnnnnnnnnnnnnnnnnnnnnnnnnnnnnnnnnnnnnnnnnnnnnnnnnnnnnnnnnnnnnnnnnnnnnnnnnnnnntagaaagactctaaaacaacagtcaatcttggcttcttgctaagtaaatgttttttagtaaaaattgtcactcttagttcattgaaattgattcagtattctattaatttctgtgttgaatcttggaatggaaagnnnnnnnnnnnnnnnnnnnnnnnnnnnnnnnnnnnnnnnnnnnnnngtctagtgaaaagtcatgcatccaaagaacctaaatgtagggactacgtgtaaaaggcattcccaaatgaaaaacatcaaataattgtgattttacattttaaaaaaagaattattcttcgtctgaatatatttatcaccacatg

SEQ ID NO: 249157 - DNA, 860 bp, Homo Sapiens
ttggggcatataaattccccatatttgtgttcagttccagcttttgtagatggcactttagtgattgcttttattacattagttaagatgtctgagagaccatctcctatcttttatttcattcatatcctccgccctttttgtcctagagtgagagtttggaaggtgtccaaatttaatgtagacattatcttttggctctgaagaagcaaacatgactagagacgcaccttgctgcagtgtccagaagcggcctgtgcgttcccttcagtactgcagcgccacccagtggaaggacactcttggctcgtttggtctcaaggcaccgcagcctgtcagccaacattgccttgcatttgtaccttattgatctttgcccatggaagtctcaaagatctttcgttggttgtttctctgagctttgttactgaaatgagcctcgtggggagcattagagaaggccaggaagaatggtgtgtttccctagactctgtaaccacctctctgtctttttccttcctgagaaacgtccatctctctcccttactattcccactttcattcaatcaacctgcacttcatatctagatttctagaaaagcttcctagcttatctccctgcttcatatctctcccttctttaccttcatttcatcctgttggctgctgccaccaaatctgtctagaatcctgctttacaggatcatgtaaatgctcaaagatgtaatgtagttctttgttcctgctttctctttcagtattaaactctcctttgatattatgtggcttttatttcagtgccatacatgttatttgttttcaacctagaaacctttatccctgcttatctgaaacttccc

SEQ ID NO: 249158 - DNA, 983 bp, Homo Sapiens
  misc_feature (177)..(465): n is a, c, g, or t
ctgcacttagtagtggaaatacaaattagcaatcatgcattacttagtgaaattaaatatgattatactctgtgacccaacaatgatacttgttggcatttagccagagaaactcttgtacaagttcgtaagaagacatatatgaggatcttcttattaatttatttagttttatcnnnnnnnnnnnnnnnnnnnnnnnnnnnnnnnnnnnnnnnnnnnnnnnnnnnnnnnnnnnnnnnnnnnnnnnnnnnnnnnnnnnnnnnnnnnnnnnnnnnnnnnnnnnnnnnnnnnnnnnnnnnnnnnnnnnnnnnnnnnnnnnnnnnnnnnnnnnnnnnnnnnnnnnnnnnnnnnnnnnnnnnnnnnnnnnnnnnnnnnnnnnnnnnnnnnnnnnnnnnnnnnnnnnnnnnnnnnnnnnnnnnnnnnnnnnnnnnnnnnnnnnnnnnnnnnnnnnnnnnnnnnnnnnnnacagagcattgtttgtggtacagggagaacaaataaggtgtctgtcacttaggggaacaggcaaataaaacgcagtagacagagcaataaaaatacaatgcagtggctaaaagcaccatataaacacaacaccaacagaactgaaaaacatagttttaaatgaagaaaggatcagaatgagaattatcatgtaatactatttatataaatttacagaaaacaccatgtaagaatacatatatatccaaggatacatattaaacacatcagagaagatgctaatgggagtgggatgggaatgggagaagagatacaaagtgacaacagaaaacaataaaaacatcagggacccttgcaatgtcaatataatggtattgtaaaaataacacatttttaattggaagaaaaagtaacaaattcaaaggggcagaaggaagtttccttctgcttcaactctcctttccaaactgtttgacatttggttcatttgacttatccaggtaaggaagtgataggtg

SEQ ID NO: 249159 - DNA, 648 bp, Homo Sapiens
ccccctagcaccttcctacctactagtcttgcaaatttacttcctaacctatatctttatgtagtcatgtcatacttgctcagaacttttcagactcccagtttgtgctttcagatgtttacttcctaatgctttcctgtatatgtgccttccttcagctagactactttttggctaatgtatttttctagctggctcattaattttatctacagtggcctctatcctcctgtgtgcctgctgaaatcctgtgcagacatctgatgtgtctccaacaggaggtggtctttacctcaattcaggcattatctacatgtctgcttgtctgacgtcttggaaggaactgggttgcttagatttgttgaatgactatatatgaagtcatcaaatggatttgttatttgttagtgaacagctagctataatagagtgctaaaagaggtagggaaattaactttcaaaatgggtataggtagttgaggtttcaaatgcagtgagcatttttgcattattttcctttaataatctttatgcaaatgcatgtagtaatcacatctccacattgattgaataattttagagacctggattactgtgacatagtctgtagtgggctataattattagatgtacaggaagtgttacggg

SEQ ID NO: 249160 - DNA, 872 bp, Homo Sapiens
ttggcccagaaggcccagatcgtgcgcctgcttcaggagcgcacgggcaagctcacctgtgcagtaggggacggaggcaatgacgtcagcatgattcaggaatctgactgcggcgtgggagtggaaggaaaggaaggaaaacaggcttcgttggctgcagacttctccatcactcaatttaagcatcttggccggttgcttatggtgcatggccggaacagctacaagcggtcagccgccctcagccagttcgtgattcacaggagcctctgtatcagcaccatgcaggctgtcttttcctccgtgttttactttgcctccgtccctctctatcaaggattcctcatcattgggtactccacaatttacaccatgtttcctgtgttttctctggtcctggacaaagatgtcaaatcggaagttgccatgctgtatcctgagctctacaaggatcttctcaagggacggccgttgtcctacaagacattcttaatatgggttttgattagcatctatcaagggagcaccatcatgtacggggcgctgctgctgtttgagtcggagttcgtgcacatcgtggccatctccttcacctcgctgatcctcaccgagctgctcatggtggcgctgaccatccagacctggcactggctcatgacagtggcggagctgctcagcctggcctgctacatcgcctccctggtgttcttacacgagttcatcgatgtgtacttcatcgccaccttgtcattcttgtggaaagtctccgtcatcactctggtcagctgcctccccctctatgtcctcaagtacctgcgaagacggttctctccccccagctactcaaagctcacatcataggccgtgcgttc

SEQ ID NO: 249161 - DNA, 933 bp, Homo Sapiens
  misc_feature (253)..(287): n is a, c, g, or t
gcatagaccacaagaaagaaactaagacaagtcaaaaatacaccaagtaagaaattcaatacaactggaaaacatactcataggcaccaacattcctcctttggacacgtgttcttactgccctcagatgccccaggacagggtaatggctgagcatggaaaaagtaggtaatgggtcacacaaacttggtggtctgcaccaaactacaaagattagctcaattatagcattgtgctaacagtaaaagtagtnnnnnnnnnnnnnnnnnnnnnnnnnnnnnnnnnnnctaaattcctacacaaagtttctcgagtacagaggtgaatgtcttctcctcggctacagcctccaccccaaatacaacccaccagttaagagggataacactaaacaatgctgtttagtgtcatgtgcacccatctacatgaccagaaaaatactgttcatatgcaaaaaaatttactaattgttaatgcctggccagatgttcttgtgaagagcaaggcaggggaaaaacatgttatcaagtgaatactctatccaaactccaagagaaacatctccagtttttcttcagagtcaatttgatcttcaactgagggtccctccattcttggcagtgagaggaacagtgaataatggaaacaggtgttcagaaacctatgcagtatactccctgggtaaggaaggtgagcagcagtgacctaagacactgacatgacctcatgactagcaagaccaaactttgagaaagctgctccattccagaaatcaatgctaacagatggcaacacaaggcctagataagatctggcttaggctccagaaaagggaattaactttttaaaggatgtttcttgaccttgagaagtagaaagtgcctaaagggccgatctggtggctcacacctgtaatcccagcactttggccaa

SEQ ID NO: 249162 - DNA, 919 bp, Homo Sapiens
  misc_feature (632)..(695): n is a, c, g, or t
ttggggatcaaccgtttaacctgtccacagtgtcgagtgccttcccaatggtcagccacccagtctttggtctacattcagccagctcagggcattcagaatttggtggtttggggacacttggtacacccacagccttagccgcacatccccaactagcatcttttccaggtgcagaatggtggcgaacaactgatgctcatactcgtacaggagcaaccttctttccaccattactgggaattccaccactatttgctcccccagcccagaatcatgattcttcttcattccattcaaggacttcgggagaaagtaatcgaaatggtcccgaaaaaggtgtaaatgggtcaataaatggaagtaatacatcatctgtaattggtatcaacacatctgtactatccactactgcttcaagttccatgggacaaactaaaagtacaagctcaggtggaggaaatcgaaaatgtcatcaggaacaaagcaaaaaccagcctttggatgctagagttgacaaaatcaaagatacgaaaccaaggaagaaagcaatggaaagttctagcaacagtgatagtgattcaggcacatcatcagacacctcaagtgaaggcattagtagcagtgattcnnnnnnnnnnnnnnnnnnnnnnnnnnnnnnnnnnnnnnnnnnnnnnnnnnnnnnnnnnnnnnnntctgattcagagagtgaagcacaacataaaagtaacaaccaggtgctattacatggtatttcagacccaaaagcagatggacagaaagcaactgaaaaagcccaggaaaaaagaatacaccagccattacctcttgcgtctgaatcccagactcactcattccaatcccagcagagcagcctcagttttgtcacagcagcttccatttattttccaaagctctc

SEQ ID NO: 249163 - DNA, 1154 bp, Homo Sapiens
  misc_feature (137)..(167): n is a, c, g, or t
  misc_feature (651)..(691): n is a, c, g, or t
gaattctttgcatctttacagtcatacagctttactaggaaatatctttgagtgtgccttctggtatgaacttctgtggtatagattcagatctcttttcacttccagaaagttttcttggattatagttttaaatnnnnnnnnnnnnnnnnnnnnnnnnnnnnnnnacagtagactttggatccatctcccatttcaacttggtcaattttcaaaacaaaaatctcatctcaattatcctgttttcctgcttttcttcaagactttttattaaatttgaatttgaaatgtgggaactgttaaaacttcattattggttatgattttatcttctatttttctgtttaatctactttgtgttcatttcttaatgctttttgttcttgtgtatttgtttcagaatatttcttaattttatttttcaaatctccaaacattggtttgaggatgtttaatttcacttggagcattgtgtcaattttttcctgctttttttgatgggggtagattttcatcagttgaaatgctgattcacatttcctgtttgttttttcttacagttctgtatggatgtggcctgctcttttctatttctgttcatttcataggcagagctcctacttcaagaacaccctcttctctaagttcagnnnnnnnnnnnnnnnnnnnnnnnnnnnnnnnnnnnnnnnnnttcactgccatgtctccaagtcttcactgacatgtctccaagtcttcatgtttcccttatgaggcaatgcttataatttaaagctaccaattctggtactgcttacctttaagctcttctccatacatagagctgtgaactatcaaactccaaacctatgatcaatgttttggagcttttttcagattttctctttctgagagtggatctttgtaccttgtctaaagctttcacactcccatacctctttcagtaaatttgtcaagccttccctctctcactcttaacacctagaggaatgatcataaggagcagttggaatttggtttatttctctacctataagaatctacaaatctctatttataggcagagaaataaaccaaatttgtgagttgaactcttaaacacatttcgtcctataggagtttatttgtaaattctacaataacctaatattgga

SEQ ID NO: 249164 - DNA, 930 bp, Homo Sapiens
ccaactttgtacaaaaaagttgggcaactgcctggtcaggggacggggggcccgcgcctcacccatccagcctgcgctcgacccaagcagaagtaaatcaagcagcagcaacaatagcagccactctccgaaggtcaaggaagacctgccccacacagccccctcatcctgcatcatggacaagaacgcagcacttcagaatgggatcttctgcaactgatcgtctccatgcgccctgctctgcggctgtgttcttatttattgcatgcgtcgcttccacaggggcccctcaagagctgtgactcgggagagctaccttactttgaccaacagcctgcccagtgtggatgtctcttacagagggggcccaaggaatcaccaccccgcttcagtgtaaacaacgtgccttgtccactttgggctccagagtctttcagatgtactaagctgctgacatcatccactgccttctgctgcatcctagacaccctccctgttgttcacagagagggaaggtcgtgggccacacaatgctgtgtgaccctctccgtgtgcctctgaatggtgttttgatgattttacactacatttcctgtgcttagaatggatgcttgtatattcgtacatggtctatgttacacagaatttgtgttgcaggtgtttgccatgtggtacctacatagaatctccatacaacacacagttaacaggttatacaagtggattcagactgaacccccagtacaaggacattgttttgaactaggtggacatgccatccctggtctccttagactgacatgattctcatgttaaccaagttttaaaagttcaaattccccaaaaaggcttgtccaatgctggcccccagatgtgtgggtctgacccacaccagccctgtgtcttgtcctttcagtcatttgtccctgc

SEQ ID NO: 249165 - DNA, 1098 bp, Homo Sapiens
  misc_feature (257)..(339): n is a, c, g, or t
ttgggttgattatttttaatggcaaaaatgaagtgatgcaggaagacatttaagcgtcataggtgatgtcttgggggtagtttcacaggatttttagcgagctgtttgattgctcttatgtggatggtacaaagaccaaaagaggttttgcaaacagtggagtcataaatgattgtgcatgagataattagttctgatagttccgttagtttgtttgtaagagatgaaaaggaaataaaatggaaaaagagagaagnnnnnnnnnnnnnnnnnnnnnnnnnnnnnnnnnnnnnnnnnnnnnnnnnnnnnnnnnnnnnnnnnnnnnnnnnnnnnnnnnnngtcaaaatccttccttctcgaattgtgatggtcaaatgaaaagctgtctgagaaagctgccccgagctgtctaacagtattcctccagctggactatgcttctgagtcatccgatgctttaaaaatacagcttcccaggaaaacattgtaaacaactcccagggtacataatgatttagatgattaaatttggaggctgccctgacttcactaccctgggcctcaactgctttataaattatgaatagagatacttcctaggactgtagggtggatagcaaatgaagcgaattaactgccaaatccttccttaacatcttcgttatgatcaatattatgaacctaggcaatcttcatccatacattggacacttgaccttgggatggattagacttcctcagtttcctttgtcctctgtgcaaaatctagaatattgccagcctatcgtcagagtgcaacacgtttgaggaattattgcatgattgatattgttgagagttcagattaatgtcacttcagataatccacagatgacatggaaaactggtgggctaccggtgctatttgaagtcaacgagggcttgcacttagctgggaatgggcgagagaataggattaatgcccaggaagatatatcttctgatcctcacctctcttttgtatataggtgattttttaaacaccttccttctcctccaatcaaaactggctttgaggaaagaatgggactggatgcacatttgtgtaacatcgaatag

SEQ ID NO: 249166 - DNA, 982 bp, Homo Sapiens
  misc_feature (836)..(844): n is a, c, g, or t
caatttttaaactaaatctagtaacaacagaggatggaacataaaagacacaatcccaaattttagtcaggttgaaatgttttccactaactgaaagataagataaatgagcagcccattataaagttatgggctggtatgtcaaattcacgtcttaaaattgaaagtcagccacacagctgttaaaacaatgggaaaatttgcaaatgcaaatatataatgcatgcacagctatcacatttattctttatccttaaagccatttttaaagtaaactgggagaggcaacttagtaatatatgtacatcaaggcacattcttttcttgtgctttaggaatgatttacatgtgatctgcttatatcttaattttatactttataacagcttctaatacctaaaagcttaatttttaacaattattctttgagtggtagtttcccagagagaaatgtggcatctctcatggttattttcaaagtcagaaaattggatagcttgaggaggtgggatttaaaaatcaaacatatgaattaatataacttagttttcataacctttaaaaataatttatcttcaacaatttagtggaactgtaatcaatttcttcaagtatgatactatgagggctgcactgaataattttcaacattctgaaattacctgacaattacatggtatccacagagctgctgtgaatgtctatattgctatctgatttctcaactgcagtttttcaaccaaattaaacaattaaacatgatacaaaagctgaaaacataccaaatctagtttgtttgttcattaacttgttcattctttgcaaataatgagaannnnnnnnnccattaattgtcctatgttatcaaggagaattttcctgtcaacagtgtttaataactgtgttcttttctcatggtcaatttacttgccttgaagaaatagtatagtaaggttttaataagcatttcatgcatttccaa

SEQ ID NO: 249167 - DNA, 869 bp, Homo Sapiens
gattctcaaaagggatatggtacccaggaagttaagaacagtcataaaatctctttggcttctttgtcagatatgcaccgggcattttcacagtaggaactagggtttctgtccagtttttttggttctttaaggaattaatgttattctgggtacaactgcttacatacatagcacatatagatgacatttttacaggccgtcttgttagactgacatacatggaggatagtgccacccgcctcacaagaacatcaggtaagctcaggcacagagtgcccaggaatctgtaaggcttcgcccacgcacaagtcagggctgccagtcacctgggttgtcttcactttatttggctgcgtctaatgacaccttccaaccttttgtccccccccctggcttgttgtgtaaacattgtatttctccctctgtaatgaaaaagctaacacatctctatctccagagacattttccagaacatgctgttctcaggcactagtgaggcggtgccattattcctcatttgttatccaaatgttggccatgtgaccacaccaaaagctcatcctgggccactgagactggtaattgaatcagaatatagtgaaatattcattctcatatatacccagccatcttacatctttggctttttttcagcagatccttgtggcactcagaacatccattttgcactgtgtatttttttcccttctgtgtatcctgctttgtaaagagtcacgagtggttttacaaataaagcctgttcttactcagattttaggttctctgggacagcactgttggctttctctgcaccccagttcagtgtacacaggcagcgaccccttgcactgcccacatacacccaa

SEQ ID NO: 249168 - DNA, 693 bp, Homo Sapiens
caccgtcttacatttattcacacagagggataagaatcagtacaaataataaacagtgctttaaatacaaataaatagctctagtttctaaaggaaacaactctatatataattctaagttttttctaagttcctattaaaaatagaagactattttgcactatgtaagttctagtccaccataatcctttgaagacttacggataaaatggtgaattctatactccaagaagtcaccagaaaaatgggagataatgctcctacctctctgaactatcccccaaataggaggagagttacttgcatcatagacagacacagctaatacatacagaaagtatttgatgtctagagatatttaaaaagattaaccttgggaaaagtaaaaagaatttccttaaaccagttttatgaattctaaaacctccctctactgaagttttgattcaaatgtcttaaattcatttatactcatgggaagatgttaagttcctatattgaaagcttcctcttgctaacaacgatagtgataaacattctgtcatcaccaagaatggcacctggagtaacaaagtgatacatacctggtaaaggagcaaaggtgctgcccaattaaacagtatgtcaaacttggcatcaaaatgaccaaaatgtgctgaagaaacacatccctaaatctgttggttgacccaa

SEQ ID NO: 249169 - DNA, 861 bp, Homo Sapiens
ttggaataaatgtttttaaaactgcctttagtgaaaatgaagatgatgaaagtcgaccagcagttgcgttaattcgaaagttaatagctgtactagaatctattgaacgtctacctctccatttgtatgatacaccaggatccacatataacctccagatacttacaaggagattacgatttcggttggaacgtgcacctggtgaaactgcattgattgacaggactggcagaatgttgaagatggaacctttggctacagttgaatctctggaacagtaccttttgaaaatggtagcaaaacagtggtatgattttgaccgatcttcatttgtttttgttcgaaaattaagagaaggacaaaattttatatttcggcaccagcatgattttgatgaaaatggaatcatttactggattggaacaaatgcaaaaactgcttatgaatgggtaaatccagctgcctatggacttgtagtagtaacgtcatcagaaggaagaaatctaccttatggccgcttagaagacatactaagtcgtgataattcagctttaaattgtcatagcaatgatgataagaatgcctggtttgccatagatctgggtctctgggtgataccatcagcatatacacttcgtcatgctcgtagatatagaagagtgcacttttgaaaagtgcactccttagtatgatctagatgctcagaaataatgtcttagccaggctgtctgggcatcccgcagcccactcaagttgaccacaaggttgaatcatcatagtggtctacaggggaaagatgctgagggaaattttttttgcagttctagagaatcaattaccagtagaatactgtagatatag

SEQ ID NO: 249170 - DNA, 954 bp, Homo Sapiens
ttttaaataagcatagcgattaaaagaacaaagcccatcataaaaattttaaacaattcctgtaaaaatatgaacacatcacataaaatgaatatttcagaaccctactacacaaacttgtttaaataatgtgctttagatgttaaatatcaagtctttttctctcttatgatataattatttacataataagacaactaccatgatctagtcttttcaggatagcacagagccttaaagaaacgcttcctcaaagtaagaaactggatacagaatacaggcagctagctgtagtaaaatgggtccaggtggttgtttggatatatgcttgaagtgcttttaatactaaaagcatgctaagtcaacgtaaggaattattctgctatgggctactttaaaggaagctgggttttttgtcttgggggaaaacagaattctggggagtgttttgtaaaaccttatagaaataaattaggtttattatcataaactacatggtttaccaattttactttaataataaagttatttccaataaaaagcacccattttttggaacattcaaactttgtaaatgtgtcttcacacagttcaaaaacacactgccaaacgaaaagatctttgtgtagacagcagtcatctcatgtagtataaaccaccaatgcaatcatgaaggggcacacagagacttaacaaaagtattagtaatcatattacttttcttaatctgtgtggtgagtacgtaagtgttcatttccattccattagtattatatttgaaaactaaaaactcctgcgtaagtctcaatataactgcttatgtccatgttctatttaatacaccttataacccatgtgtagtgtgaaccaatagctgtgttttaatatttttgctaaatatattatacattcactataacctctacagttttaaagaatgttaaaatgaaccaa

SEQ ID NO: 249171 - DNA, 1233 bp, Homo Sapiens
  misc_feature (138)..(192): n is a, c, g, or t
ttggctcggtggcggcggcagcggcggcggccctggactgcggggaatgggaatcctaggtccctgactgagcacctcccccgcctccctgcccccgacatggctcaggagaagatggagctagacctggagctgccnnnnnnnnnnnnnnnnnnnnnnnnnnnnnnnnnnnnnnnnnnnnnnnnnnnnnnnctcaggaggtctaacagcgcccccctgatccacggcctcagtgacacttcgccggtgttccaggccgaggcgccgagcgccaggcggaacagcacaacgttcccgagccgccacggcctgctgctgccggcctcccctgtccgcatgcacagcagccgcttgcaccagatcaaacaagaagagggcatggacttgatcaaccgagagacggtccacgaacgggaggtgcagaccgcaatgcagataagccactcctgggaggaaagtttcagcctgagtgacaacgacgtggagaaatccgcctcccccaagcgcatcgatttcattcctgtgtcaccagcaccgtcacccactcggggaattgggaagcagtgtttttcgccatccttgcaaagttttgtaagtagcaacggattgcctccaagccctattcccagcccaacgacccgatttaccacccggagaagccagagccccatcaattgcattagaccaagtgttcttggaccattgaaaagaaaatgtgaaatggaaactgaatatcagccaaagagatttttccagggcatcaccaacatgctttcttctgacgttgcacagctgtcagatcctggtgtgtgtgtatcttcggatacccttgatggaaacagcagcagtgccggatcattcttgtaactcaccagcgaaagtcagcactaccaccgactctcctgtgtcacctgcccaagcggcttctccatttattccactagatgaactttcgtctaagtgattcactcatcctgagactttctttttgcagtggagagagagaataatctagttggggcaaacactgaactttgtcaattaatttgaggctatttcctatgtgaccccttttcttttttgaaattccctgaaatgatgttattctagagaacttctatgtcaggttcctttggatacccttgaattcagtgtagtaatattttcagacgtttccccaataagtgtgttgaagcatacatctttacgctgctaatatgtctaaatgcatca

SEQ ID NO: 249172 - DNA, 384 bp, Homo Sapiens
acagcataaactattgagatctttcttctttttaatttaagcatctgcagctgtaagcttccctttagcatgggtttgagatctttcttctttttaatttaaggatctgcagctgtaagcttccttttagcatgggtttgaggtctttcttctttttaatttaagcatctgcagctgtaagcttccctttagcactgcctttgttgcctcctcctgagtttgggtatgtcatggttttcttttcgtttgcttaaacattttttgtcctattgtaatataattgcattgtttttaataaaggtaattaatgaaacacatattgaattttgcttctgtttttataatattttaagcattcttaactcaaaaatgtaaattttagaa

SEQ ID NO: 249173 - DNA, 1516 bp, Homo Sapiens
  misc_feature (317)..(366): n is a, c, g, or t
  misc_feature (423)..(480): n is a, c, g, or t
  misc_feature (731)..(744): n is a, c, g, or t
ttggctttcttaaggaaaagtttctgagtgtgatctctcttttgccatagtatcaagtggagggtagttcagaaaagttaataggaaatcttttgtgacagcagactataatagaagtttgagtaatattttaataaatttatataattcaaatgataaaaatgtatcaatgttatccaatgatttttattaaaaaattaccttattattagaactgtgcctattacataaaaagtgctcatgtatttgaattttaaataatttatttaaatcaagaccaccataagtcattaataatttaataattgttttaaatnnnnnnnnnnnnnnnnnnnnnnnnnnnnnnnnnnnnnnnnnnnnnnnnnntatggaatccacctcataacaattaagtctaaatttctggaagatggagccatgctnnnnnnnnnnnnnnnnnnnnnnnnnnnnnnnnnnnnnnnnnnnnnnnnnnnnnnnnnnctctaaattagtgcaggaaaatgcttttatttctcccatgttaacttttaaaactagtaatgtacccagttaagttttgatggtttaaattccactaaagaacatattcttctaataactagcatttattacatgaaatttaagagtttaagttccatcaaactagcccttgtgtaagattattatttcttctctataacttcaaaatagatatttcattcaaactgttcaggtgagaaaacataatggannnnnnnnnnnnnncctctggagctgcctgttcagtgagatggaggaggtgggcacatttaaggtcagttcactaacctatggttcagagttctgatcatatggaagtttggaaaagagagcttatcacaggtttgtatgctggtgaatggatagttttaattctcactgtctcaaaagagaatcagcttctccagcagttctagaaaagctttgacaatccccaaggggcagtgttaccttactccttcactgcttcttagaaggtagaattaagtttctggaattgcacctacatgttttcttattaacattcagaattgggaatattaatttttccagtgagtagttttctgaaattggtaacttggagagtaaaataacgtattttgcttttcaattttgtgtttgtttacttttatgtaaaaatttgatatgtgaattacacagttctaataaaacctcatgccttttcattacatctaatttgaactctcaacttcatgttacagaatgctttaaagatgctttaatgaaaagtattaagaaaatatatagatttgtatgtcagtttatacttcagaaatccatatatttgtcatatttatttttttagaaacctcctaattggataactagatggtatttaaaatgaatgcccaaaaatatcttgtacctttgtccaaaagtttatctgtttggagccgccagccattcatgttgatagtttataaaacaataatttgaaattgtatgcattttatattactatggtatctgtgtacca

SEQ ID NO: 249174 - DNA, 620 bp, Homo Sapiens
  misc_feature (502)..(519): n is a, c, g, or t
gcccacaatttttaaaagagagagaaatgccccaaatgaatcagtagcaaacacaattaactcacagttccatccatattacttctaacaaaagatactaggacaatacttttgtcccttccttggtatttgtttactgtattaacttcgaccatcccaatagaacgtgccaataaatcattgatgatctttaattgctgcctgtacggtgcaataataccaatatcagagggactgcatccagcctaaatagaaaaagacacaatttaaaagaaagaaatcctgattaagttaaacttttctgaatttaataattaaatgtttacattatgtgcccaactgatgtttataacaaactttcctatctcaaagactgaatacaattactgaatttgctctatatctgtccatatttcccaggatgaaataattccttagacattgctcccttaatttttagtttcatgagaacgtaaaggattatatgctactaaaacagtgnnnnnnnnnnnnnnnnnngtacaaagaaatacatttcaccttctgctatttctttcacagaaaaatttccaattcctaatcactacaacgatagtattgtaaatggaattagaatccaa

SEQ ID NO: 249175 - DNA, 836 bp, Homo Sapiens
gtcgaaattcaggcgattttattgtaaacaggataacccctagcactccaccatactggctgtgtcacatgctccctcttttcacatcaactggtcaaaaaagaagactttcttaaagaagcctcaggtaactaataacttagttccacaaatctcatttactaagcactgcgtaaactgcagtatctggggtagtctgttattgctcatggactgcagcttggacccatctaaatgaatccattagtatgcctgagtgatcaacagcagctctagatccaacctggaaattggaaaatgctgacggcataccaaccaattgcaggttcatggaagactacatgagattgctctcagatctcttcatgtgtcattctcataaaaaagacacttaaatttcacccattttttaaaaaagagctaaaagttactcaatagcacataattttccacataaaaggtaggtggatttttatttactagtacagtggtggatcggaacactcaggcctaatttcagatctgtcttgtatatacttgcagtttaatgaaaagctgcatagtctacaaatacataaaaccagaaggaagtgatgatttcacacaccttctgatggataaagacaggcttcatataaggaggttcttgaaggtagggataaaaagatggttacagcaccacattgatctgacagtagaaatggagccccgcttttgaaagcagccccatagttgtgactatatcgttcttgcccaaaattgagatttggaaaatggcaaatgtaaaaacttaagatgtgaaaaggtatgactttacagaagaaagtcctagccaa

SEQ ID NO: 249176 - DNA, 1148 bp, Homo Sapiens
  misc_feature (111)..(123): n is a, c, g, or t
  misc_feature (127)..(202): n is a, c, g, or t
ttggcagacacataccatatctggtttttgtttttccttgttccagtttctgtcactgcctagttgtgtgatcgagatggagacagtactgatagcctttgcagtttgggnnnnnnnnnnnnnggannnnnnnnnnnnnnnnnnnnnnnnnnnnnnnnnnnnnnnnnnnnnnnnnnnnnnnnnnnnnnnnnnnnnnnnnnnnaaaaatcccaggattacaggcatgagccaccatgcctggcctgcaatttgggtttttaatatccttttttactcagcttgggctggaggaagagacaaaaggatatgtataggtgagcagtacaggtccttgatatgtaagataaaatttcttactaaaaatgactttgggataaaacttggaaagataaacatcacttgagccacttatggctatcataccttgtcgctcagctagtcaatgggattgaaggaggggtatgaggagacgggtgttctgactctggttatacattcacagtatcctgataagaaaaggctggagggcctgtcaaagcagctggattggaatgtccgaaaaatccaatgctggtttcgccatcggaggaatcaggacaagcccccaacgcttactaaattctgtgaaagcattcaccttggttctgggacatccgacagtgctggcataactatccatttcagcctctttcaagtgggctttatcactattatatcatggaattggccttctattggtcccttatgttttctcagtttacagacattaaaagaaaggacttcctgatcatgtttgtgcatcacttggtcaccattgggcttatctccttctcctacatcaacaatatggttcgagtgggaactctgatcatgtgtctacatgatgtctcagatttcttgctggaggcagccaaactggccaattatgccaagtatcagcggctctgtgacaccctttttgtgatcttcagtgctgtttttatggttacacgactaggaatctatccattctggattctgaacacgaccctctttgagagttgggagataatcgggccttatgcttcatggtggctcctcaatggcctgctgctgaccctacagcttctgcatgtcatctggtcctacctaattgcacggattgcttt

SEQ ID NO: 249177 - DNA, 1039 bp, Homo Sapiens
  misc_feature (348)..(379): n is a, c, g, or t
  misc_feature (926)..(926): n is a, c, g, or t
  misc_feature (971)..(971): n is a, c, g, or t
ttggcttatacacagagtactatactcctccctggtagtgttaaaccagcagaatatgaccaagaggggtcatacccttatttcataggggtctctcttggcagcattatagtgattgtattttttgtaattttcattaagcatttaattcacagtcaaatacctgccttacaagatatgcatgctgaaatagctcaaccattattacaagcctaatgttactttgaagtggatttgcatattgaagtggagattccataattatgtcagtgtttaaaggtttcaaattctgggaaaccagttccaaacatttgcagaaaccattaagcagttacatatttaggtatnnnnnnnnnnnnnnnnnnnnnnnnnnnnnnnnggaccaaaatacttacacctgcaaaggaataaagatgtgagagtatgtctccattgttcactgtagcatagggatagataagatcctgctttatttggacttggcacagataatgtatatatttagcaactttgcactatgtaaagtaccttatatattgcactttaaatttctctcctgatgggtactttaatttgaaatgcactttatggacagttatgtcttataacttgattgaaaatgacaactttttgcacccatgtcacagaatacttgttacgcattgttcaaactgaaggaaatttctaataatcccgaataatgaacgtagaaatctatctccataaattgagagaagaagaaggtgataagtgttgaaaattaaatgtgataacctttgaaccttgaattttggagatgtattcccaacagcagaatgcaactgtgggcatttcttgtcttatttctttccagagaacgtggttttcatttattttttccctcaaaagagagtcaaatactgacagattcgttctaaatatattgnttctgtcataaaattattgtgatttcctgatgagcatattactgngattttcataataatgaagacaccatgaatatactttttttctatataagtcaacaatggcctgaata

SEQ ID NO: 249178 - DNA, 743 bp, Homo Sapiens
  misc_feature (15)..(15): n is a, c, g, or t
  misc_feature (26)..(26): n is a, c, g, or t
  misc_feature (36)..(36): n is a, c, g, or t
  misc_feature (43)..(43): n is a, c, g, or t
  misc_feature (51)..(51): n is a, c, g, or t
  misc_feature (54)..(54): n is a, c, g, or t
  misc_feature (62)..(62): n is a, c, g, or t
  misc_feature (82)..(82): n is a, c, g, or t
  misc_feature (119)..(119): n is a, c, g, or t
  misc_feature (122)..(122): n is a, c, g, or t
  misc_feature (166)..(166): n is a, c, g, or t
  misc_feature (194)..(194): n is a, c, g, or t
  misc_feature (200)..(200): n is a, c, g, or t
  misc_feature (216)..(216): n is a, c, g, or t
  misc_feature (296)..(296): n is a, c, g, or t
acttaaaagaccccnttttgggcctngttaccgaanagaattntaaatggnttnaaaaagcntttttccttattttaacttnagttcaaagccttggataggcacctggattaaatgangancttggtgctaaaaatggattttccggattatttccaggccctanttcctcggcttaattaaaattggctccngcttgngccattatgaccagtncgtatgaatttggaaaggctttcttccagaaccaaaatgttcgaaggcagcaatactagtgatgctgtttcaccttgaancaacaactatagccaaagaagatggagactcttaggcaagaatgtttttcacccattattctctcacaatgattttatgtttttctttcctataatttaaataaataatttcagctctacctctaaatcataattttaaaataaattttatcttatttttggtgatattgaaaaagatattctagaaatcaccaccattagagcattcttgtaaaaatagattactccttagcatcaaaagcagtctcttgaaagtttaatattatatgtttcagtgtaacataatcttactgggagtgtgttgaatacaccagaactttttgaattgtgtgctgaatgatgtacatagtctagaagaaaaaagcccaagtcttgtgcacatttaaatcgtgtatatagttatttccgtatttcagtaaagtagataccacaggcccaagatgaggg

SEQ ID NO: 249179 - DNA, 1063 bp, Homo Sapiens
ttgggaaatggaaaataaccactcctggtcgtcttttcataaattttcatatttttgaagctgtctttggtacttgttctttgaaatcatatccacctgtctctataggtatcattttcaatactttcaacatttggtggttttctattgggtactccccattttcctatatttgtgtgtatatgtatgtgttcatgtaaatttggtatagtaattttttattcattcaacaaatatttattgttcacctgtttgtaccaggaacttttcttagtctttgggtaaaggtgaacaagacaactacagttcctgcctttgctgagacagcagttacactaacccttaattatcttacttgtctatgaaggagataaacagggtactgtactggagaataacagatgggatgcttcaggtaggacatcaaggaaagcctctaaggaaaggatgcatgagctaacacctgacattaaagaagcaagccaagtgaggagccaggggagataagcattcctggcaaagagaatagcatcaaatgcaaaaaggttcacactaaaggaaactcctgattaggtattaatgctttatacagaaacctctatacaaatccaaacttgaagatcagaatggttctacagttcataacattttgaaggtggccttattttgtgatagtctgcttcatgtgattctcactaacatatctccttcctcaacctttgctgtaaaaatttcatttgcaccacatcagtactacttaatttaacaagcttttgttgtgtaagctctcactgttttagtgccctgctgcttgcttccagactttgtgctgtccagtaattatgtcttccactacccatcttgtgagcagagtaaatgtcctaggtaataccactatcaggcctgtaggagatactcagtggagcctctgcccttctttttcttacttgagaacttgtaatggtgttagggaacagttgtaggggcagaaaacaactctgaaagtggtagaaggtcctgatcttggtggttactcttgcattactgtgttaggtctacctgg

SEQ ID NO: 249180 - DNA, 727 bp, Homo Sapiens
  misc_feature (190)..(291): n is a, c, g, or t
ttggccaccttctctgtctttgttttttagagacagggtcttgctctattgcccaggctgggtggagggcagtggtgcaatcatagctcactacagccttgaactcctgggctcaaccatcctcccacttcagcttcctgagtagctaagactacaagcacaccatcacacctggctaatttataaaaannnnnnnnnnnnnnnnnnnnnnnnnnnnnnnnnnnnnnnnnnnnnnnnnnnnnnnnnnnnnnnnnnnnnnnnnnnnnnnnnnnnnnnnnnnnnnnnnnnnnngtgcggtaccacctcccttttaaggccacctcctgtgactcacataacacatccatttgcatcctatggctacaacttggtcacatgaccacaactgcaaggaaggctgggagatgaagctttttatctgtgttctgtggatataggttatagatatataggtatttggaggcagtgaacaattcctgtgtgttggtttgctaggaccactgtaacaaagtaccgtagactgggtgactcgaacaacagaagtttctgccttctagaagtctgagaccaaggttttggtgtcagcagggttagtttcttctcacgcctctctctttggcttgtagatgccttccttcatatgtccctgtgtgcatctctgtgtcctaatttcctcttctcataaggacaccaatcatactgcattacagcccaccctaatgacctc

SEQ ID NO: 249181 - DNA, 610 bp, Homo Sapiens
ccagcctgggagacagagcaagactctgtctcaaaaaaagtcataaataaaataattttaaaaacccctctgtttctttataaattacctattttggtatgtctttatcagcagtgtgagaacagactaatatagaggcaaatgtggccgggggcagtggctcatgcctgtaatcccagcctaggattctctttttaaacataatattcacttttgataagaatctcccaaatacctgccatccaagtcaactattaatgtaataagtacccaaacagtgagtgttcaagcattccaagtgcaaactaagcaaacgtaaatcaaagtttcctcctatttcattggcctccctgctcagtctcctcagctggtgccccctcacctctgacctctaacccactggagcctcaaggctcagtcctcagaccctgcctctatctccctaactgcccgtgtattgtgaataccatcaatatgctgcagatggtatttgtatatcaagcctgaacttccccagtcttcccctttactaggaaccctatccctgtgagttccctgggaattcaactgctcaggcaacctgtctctctccccacatcctatttgtaca

SEQ ID NO: 249182 - DNA, 731 bp, Homo Sapiens
  misc_feature (275)..(338): n is a, c, g, or t
  misc_feature (370)..(399): n is a, c, g, or t
ctttgtacaaaaaagttggcaaaataccttgggttgatgaaacatcaacccagtgctaggaatactgtgtatctatcattagctatatgggactatattgtagattgtggtttctcattagagaagtgactgtagtgtgattctagataaatcatcattagcaattcattctcatggtcaataacttgaaatttatagctgtgataggaattcagaaattggcacatccctttaaaaataacaacgcaaaatacaactcctgggaaaaaaggtgnnnnnnnnnnnnnnnnnnnnnnnnnnnnnnnnnnnnnnnnnnnnnnnnnnnnnnnnnnnnnnnncagggtttaagttgctactattcaactacacnnnnnnnnnnnnnnnnnnnnnnnnnnnnnncattgttttcactgtatcacattaaagtacttgggcttctgaagtaagagccaaccaactgaaaacctgagatggagatatgttcaaagaatgagatacaattttttagttttcagtttaagtaactctcagcattacaaaagagtaagtatctcacaaatagtgaaataaaactaaaacgtagatttaaaaagaactgcacgggctttagggtaaatgctcatcttaaacctcactagagggaagtcttgctcaagtttcaaagcaagaccatttacttaatgtgaagttcttggaaagttataaaggtgtatgttctagccatatgattt

SEQ ID NO: 249183 - DNA, 1152 bp, Homo Sapiens
  misc_feature (459)..(579): n is a, c, g, or t
acgtcccttcaactgcacagtggtgagcagggaagggttatcaagggggctcagggggactgaatgtgcacaggagcaggagagggtttcgtggggagcagagaggatcacaggaagttttagttcctgggtctcagacaagtgggcagaagcaaaggcaaatccagatgctgaaggtttggctcttgggactgcagtctattaacgaaggagaggtaagaagggaaaggagatgtctgagtattcaaggttatgtctggaatggttcatttcttggccagctctgactttttgcagtgtgacctagagaagtctgtgatcaattattgctgcttgcctcagtgggaaggcgaggtgagtgaaagcatgcttattttctgatcctgctcaatattccagctggcactatttagagctgaaaagggaacccaaaagagaagcaaggtggtaaaatttggnnnnnnnnnnnnnnnnnnnnnnnnnnnnnnnnnnnnnnnnnnnnnnnnnnnnnnnnnnnnnnnnnnnnnnnnnnnnnnnnnnnnnnnnnnnnnnnnnnnnnnnnnnnnnnnnnnnnnnnnntgttgtttttgaaatcagtttaaaaaaaagacttagattagatgtatcaaaacaatattcattgtaactgtgacatatttgaataaatccttgaggggcttgtaccagcctgtacaagtcagactactgcaccccatcacatcttatttagtctcttgccattctcccttcccctcacccacttcatctgcttactttgcttgggggaaggcaggaggaggggcacataaacatgtagcaagttcctgcctctggcattttctggtcatgttgctccttcctgggatgtgcttcacgcagatgtgggcagggtttgcttcctgtggcctttgtcaaatgtcatctcactgataagtcttccctgactgccatacataagaaggcagcctctctcctcccatcatctgggcatcttctatccatttgactttgccttatctttcccgattgctctggttacatatgcatttactgcctgtctcccctccaccaccccacccccagctggaatgtccgctctgggagggcaggccatgcattctgtgcactgccattgacccagcacggagccaa

SEQ ID NO: 249184 - DNA, 854 bp, Homo Sapiens
cccaaccattcaaagctgccttttaataaaaatttattagcattctatgttccaaatgcttaagtcttttttcccctggatttttgtttataatgtaaatgatgggtatgtccccacaccagtcccctctttcccaaaggtagatgaaatatagtcttttttaaatcacataatgttgataaaatacaatacgtacatttttctgaaccctaaattctcttaagtctaacaaaatcagcaatgggagaagagacagagttttagcaaaagagcgtttagagagtaatgagataagatggcaccagctacctgtgtctggacatctgtaagtctaggatacagataaaactaaaactctatattgaccataatttaataaaagctctgcttgattccagaaggacttaagaccttgtgccatcactaatttttgagatagtgatgattcaaaattactgatgaaaagatcctgtggctagcataaagctaaaagaaaatactttagggtcagcagttattcctcctagtccatttgtgattcagaggtacatatgaatgatatgtcagagatacatacaaatcattatacttgcttagataaaaacccatcaatgagctttgtaaagaatgccttttaaaaaactgtcttcccttttcctgctatcattttcagaaaagaaacctataccatctctatgtttgagattctcgagaaaaatctttttgaccaaaaaagaaaagcttacctgaacttgaagtagttcttcttgctcttaaaatgggatagctgcctacttctaaagacttagttaagtcaaggtcatgcaaaattaagagatatccagaggacccaa

SEQ ID NO: 249185 - DNA, 1224 bp, Homo Sapiens
  misc_feature (519)..(529): n is a, c, g, or t
  misc_feature (1094)..(1103): n is a, c, g, or t
ttgggactagtttagaatcaatgtatatattttttccctctgagcccaggcttagtgaattgctgtcaaacatcacctttgttactgtcactgtgtagatcatctagctagtgtgcttggctcctcatagtgtgtggacttcacactcattttgcctcttcagtctcagtctcccaattgtaacatgttgccacactttaaccagcttaacttgggctttcaagatcatgtgaacacagtatgaattactaatcagtagaatgttcgttccattgatgtcactacttatcccttgattataaaacccccttaaacattctattaaaaaacaaaatgcttgcttgtggagttttactttgcatctttgagtattgtgtgcatctgaagataaaacatgatttaaattaagtattcactgtcggttcatttatctgcttgccctattttcctcattacatttgggggattcagaaaataggaaactcgtccctttgatgtgatggaacacagggaaataannnnnnnnnnnaatttaaagaaacatagtcttctttctattggtttgaggcaatagctttttagagttaggtccagttagcatatggctcttttggttttatcatcttctcttctccatttaccgtctcccactcttccaaaatagaagagaattctaaactttaaatcatactgaaaagttttgactaaaaatctctttataatccttaatggtatcaaaattaacattagttttcacaaattaacctttccttgctctaaaatcagagaactaagaaggctttgaaaagaataaagtccttaaaaagaaaccaagaacagtatataaaagattatttatttagaacagaatacttagagggtgagaactaatatcattttggattttttattaggtcatagggaggttctgtccatgcaaagtgatgtagtattttgaattcctgcaataatcacagatcaaaattgaggttaaatattgttgttttctttttcacccaggcctgggactggcaggctgcatggctttgtggctgaggctggaagcagagcctatcaaagtcccctctcttgcnnnnnnnnnngaaattcttttctgtttttgaagaaaggttaaggttgatatctcagcaaagctacttgaaggaagtgattggtcttgacccagcacttgtaatgcagtacttacaaatataccagattcgt

SEQ ID NO: 249186 - DNA, 547 bp, Homo Sapiens
  misc_feature (179)..(492): n is a, c, g, or t
ttggctccttaccacatatatgctttttacatattacctcccagtccataggttgctttttcgctctgttgattgtgtcctttgatgaaattttaagttttgatgtactgttgactctttctgtctgtgggttctgtattcatggatcgaagcaaccatggatcaaaagtatttggagnnnnnnnnnnnnnnnnnnnnnnnnnnnnnnnnnnnnnnnnnnnnnnnnnnnnnnnnnnnnnnnnnnnnnnnnnnnnnnnnnnnnnnnnnnnnnnnnnnnnnnnnnnnnnnnnnnnnnnnnnnnnnnnnnnnnnnnnnnnnnnnnnnnnnnnnnnnnnnnnnnnnnnnnnnnnnnnnnnnnnnnnnnnnnnnnnnnnnnnnnnnnnnnnnnnnnnnnnnnnnnnnnnnnnnnnnnnnnnnnnnnnnnnnnnnnnnnnnnnnnnnnnnnnnnnnnnnnnnnnnnnnnnnnnnnnnnnnnnnnnnnnnnnnnnnnnntagtgcattttatctatttttacttctgttacctgggcttttgatgttatatatt

SEQ ID NO: 249187 - DNA, 642 bp, Homo Sapiens
aatttacttgtattctaatcttctgatattccacacattctgtgcgatcatcgtcatacacaagcccttctgcaccatgcatgagtgtttctcaaggtacgtaccaagaagtgaaattcctggttcatatggcgtgactccgacatttttctccattcagccctgttgccctccagagatgggtgctccagctttgcgtacctaagtatgagagtatctgtagtacagtatgctctacgaggctccagtatttgataacttgagttactgctaggttgccatctttgatctatcatgtttgccgtgacctactattactgtaattggtacagtagattcttgtcatctgtgtgtgaatttagcattcatgggcttaatgctgacaaggcccccatggtcctagacatatattcatgtataattttgtcatggtataattttttaaattgcttttgtcatgtgtctgctggtgatgcccaacccagtgctctgcaccggggtcacactgtggctttgtcctctgcttatgcctgcattgcagcaactgtcctgaagagaccaaaattatgcggatttaggtaagtccatggctaatgttattatattatgtgctattgtaatggatggggctgtggagtgttt

SEQ ID NO: 249188 - DNA, 890 bp, Homo Sapiens
  misc_feature (284)..(299): n is a, c, g, or t
cttccttttctttcatagctttccaggcctcaaatgatgctaatgcttcttctcttttagcagctttttttctgttcattttggatccttaagttttcactttcaattctttttattctgtgcatttcatgtaaatacacatttttcttttctaaccactcctataagaacaagaaaaaggtcatataatatttaaaatttcttaagtgaattagaattctttatattaacattttctctgaaattcacatgtacaattttctaaagtatactattctactctnnnnnnnnnnnnnnnngacttttagaattgtgaataaattaatacaatctttttcctatgtacgcctaacaacatctcaggaaagaaaaaatttaataactttttgttcataataactccttttgttcatataaacttcaagaagaaaaaaatgaaaacatatatagactttacaatgttttggcttgtgctgtatttctataaattgcaatggcatattctttctttaaaaacaactatggtcagttatgcaaagtgtggaagcaaataatttagtaaaatatgattactcatgtattaaaaggaaactctttctcaataaatttaagtattaaaccatcattttctatcaggattactttattctttataaacagtgtaggcttatgaaagtgatcattcttcttctcttaaaaatattttccttttttacctgataaacagctgcccttatgttatctgctctatcaggttctatgctctgtttctgtgaaggtttttggtccaagacttttaaagtccctaaatagtgagaagaggtagttgtcgatggagttctccttttagaactagatttcttcaaaaactcagaggtcattaatcccaa

SEQ ID NO: 249189 - DNA, 977 bp, Homo Sapiens
tttttcactttcagaatttatggttgtatcatcctctttataaacattcagtaatttttcttagccgcagcagaagcatttcgatggggcagttttctgctactcttcctaatccagacatttctggtcgtgagatcgtttcttttagattactcattatctttattttatttgcagcaacagtagcacatctgcggggaactttctcaggtaccatttttgctttcagagtttcactaggcatctgcactgcatccttctgattatgcatacatgttctcacttttgtattgggttctctgtctctaggaacaaattctgaaaaatgagtgaaagttcatgtaaatgcaaaaatcttgtaacacaagattttactactgctaacattcctcaacaacactcattcggaaacaataaatttaaaagtcatattgctaaatgataaattttaaaatgtgatactaagggcttcttcacattgatataaccttagcatttgcttatctacagactatagggatgtcacttaaaacagtagcagagttgtaagaatggggtgaaaagttccttcagcatcggcgtcataaagctgctaatctaaaaacatatatgtgagcattttacataatttgaattactaaatcttaacttcattgttccagtattttctgacctaggtatgtgacacacgagattcagattaaaattctaaaaaataacacagagttgctttaaggaaccaaaaagtgcagagtgctatgagaacacagactggaaacctaacctagcctaagggatcaaggaaggcttcctttaaggaagcttttagacgagaggtgaaaattgtgaagggatttgccagacaaaaagcactttggagagttaactacttcatgcagactaaggcagtttttagagggggcttgaaatcacactggagctctacacagccacatgatgccagagctactacccaa

SEQ ID NO: 249190 - DNA, 961 bp, Homo Sapiens
ttggaaaaaataaaagtttcttcccattcatgtatttttctaaccccattgatggtcatttaagcctgtgttcatgttttgcccttgtgcttatcagctgttatcttctcattctttcctgtctcctggaaagatgctcttctggtaatgtttggtgccccattgctgtaaaaccaacagtgatctgctagtaaaaactcttgacctccaaatgcccacatgatgtcagttagcctcactagtgagaatgcggtagtagaaagggtttttccccatcctgcttatacctgaacatatagataacaaaatttcaggaatccaaggtttcaaaagggcagtaatcttactgttgttttacagttgccagttatagagtctacaaataactatttcctgctcagcttctgctttgttatgcaggcaataacttaaagatgcttaggtttttctcctgaactggctgactcaaacttgtttcactcttacctcttctcatttgttgagtgctaggttttaaataccatccatatgctgaccacccctaaatgtacatctcttgctttaagatctcttcttacaccagacttatttgctcactgctgactttacatttccatttggatgttcgcaagacatttaaaactcaacccggcccaaaatgaactctttattactctcccaaacctgctcttcccacagttttcaccatcttggctaacagccaatgacccagggctaaaacttagaaccatttttaacttccctgtttctttcactttctaccatgcatttcatttcttccttcacaatcaagctaggatttgattgcttctcagtttctttattgctgtcaacctggtctcagccaccatctgtctcatgaaatcctgaagtaacctcctgtggctacctttactgttgacagttaattcttcacattgctgccatagttttactttta

SEQ ID NO: 249191 - DNA, 2169 bp, Homo Sapiens
  misc_feature (168)..(181): n is a, c, g, or t
  misc_feature (631)..(660): n is a, c, g, or t
  misc_feature (1473)..(1512): n is a, c, g, or t
acaaaaaagttgggttctttatcggcaggttctatgcagattgtgccagagcatgtgcgtgttctgttggcaagccacagtgctcccttgactgaagacatttccaggtagatttctcagccagctctaaaacagattgctttttcagtggccttactctttgtgggnnnnnnnnnnnnnnctctgaacttgatataaagattttatttgtcccttgaaaaagtaacaaatgtgcatagatcaatttgtactactttggtcattggatatttctgatccttattgcattgtacctaaaggagagtaactaatggtaacctttttaataaagtatgtgaaaggtagtggctgatgaatccttaacgttcatagggtctttttgctgttacggttgtatatagaggtctgaaggatttttaaaatgatttgcactttttcactgcatgcttacaattcccaaaggcaaaatctgtactgaggtaaatcatttgaaagggctagattataaaattaagccttaaagtatggaaagttcttataacaataatagtacacacttcaaagtaagacaaatgcaaagcatcttaaggagtgaaaatagagtgtaaatcttgcctttggcactacaagnnnnnnnnnnnnnnnnnnnnnnnnnnnnnnctttagtaggaaatgagaagaacactgttttattttttaaagtgtttaatgtttctgtcctttctgtgaattattgaatttaagagccgtgctaaataatgaaaaaacactttactaaaatttatcaaattatactgggttcggattgtgaaaacattggccacctagtagcagtggtgaggagtgggagggcccagcaagcatttatcagaaatagaatcacaataggaggagaatttgactgtctgatattatgatttgattacattactgaatgggaaaagtatctaatattttgtaacaaaaagaccttcatattatctgttttgaccaaaatatgtagctatttccattacacagattggaccgcacttatctcccttgtcctgtatcctttaatttcaggtctcaggatgtttagaaagctaaaaccccctacccctttctggctgaaaacttgccttatttggtatcttacacattaatgttactagcatcaggagcttactgttttattatgattcatcttcagtaatttttagaagcaagaagaaagccattgtgtcctctacaattaacaaaacttatctctgatatacaaagggatataaatatatacacttaaatagagaaaaagaggttgattgaattgtgcctttgagtgaacccagtttttaaataccgctgtgtttgtttcgccatggcttcagggatgctacatggctcttgcaccttttactcctctgctttatgaagtttgagttgtatttgtgcatcttaaagtaggttgaggcttgaggctgggctttcggnnnnnnnnnnnnnnnnnnnnnnnnnnnnnnnnnnnnnnnncttgtacttaaacctgcttgcttcctaccacagattctttattttcccaaacactacaaaaaaacttttaaaactttgccatttcatctgtttacactctttgccactgattagcagtatttaaatcttgcaagaatattttgtgctttctttagaaacacaagagtatagatttttctcactgaaaagtgagagttacgcattgcagccatgaagggatgctaggatcaattatggcagtaccttttttcccctcctgttcttgagccagttgtctcttttgttttgggtcccacttaggattaacggatgtaaggtattttcctgtgcctttattttgtgtcattctattggaaggaggtgtaacggcagaatagcatcgtgttgggggttttccttcaaacactgcaagtgatattgccaccatgtgaacctcaaatatgcaatccagttgtgttggtttctcggtgacttggagtgttcatctcttcatgaattgtgagcactgaccatgttcttcagttcttaattatggtgagttgacaaataccaactactgcttttctttaggtggctataaatttcttactgtcaggaggaaatgacattatattctgttccactgaacgtcagaaatcagcaaggcactgtactggg

SEQ ID NO: 249192 - DNA, 847 bp, Homo Sapiens
  misc_feature (122)..(409): n is a, c, g, or t
tgccatgattggaagcttcgtgaggcctccccaaaggaaaagccactatgcttactgtacagcttgcagaaccgtgagccaaatatacctcttttctttataaattatccagtctcaggcannnnnnnnnnnnnnnnnnnnnnnnnnnnnnnnnnnnnnnnnnnnnnnnnnnnnnnnnnnnnnnnnnnnnnnnnnnnnnnnnnnnnnnnnnnnnnnnnnnnnnnnnnnnnnnnnnnnnnnnnnnnnnnnnnnnnnnnnnnnnnnnnnnnnnnnnnnnnnnnnnnnnnnnnnnnnnnnnnnnnnnnnnnnnnnnnnnnnnnnnnnnnnnnnnnnnnnnnnnnnnnnnnnnnnnnnnnnnnnnnnnnnnnnnnnnnnnnnnnnnnnnnnnnnnnnnnnnnnnnnnnnnnnntcaggcatttctttatagcagtgtgagaacaaatacagtgcctcacagagagatgctgattctcaaaacccaacaataccaccttgcttgcagacccccaagactctgatcccaatacagcccacagaagcatgaggcataccataggaggacagcctatacacaaatcattaaactggacataaacagcattccactgaaactggaaataatatacacaaaactatgcctgaacagattcagaaggcataagtatgtgacccaagtgagtgaccaaacacatgctgccgcctcttctacttcacacccctcagtctacatctgtggtttcacgggacgctccctaggaccagtttgacagaagacgaaaaaatacaggtttgttctaccaacggatccatacggtatggtggcatgaaccataaatagttgctacac

SEQ ID NO: 249193 - DNA, 792 bp, Homo Sapiens
ttgggtcacagatgttttcaaatttctaagaaaaagaaaatgaggctcaagaggctgcttcgtagaattccttttgaatgaattgagtggggatggggacacagtctccaagtgtgtatgtggtcttttctgatctcagctgtgtggctgcaactcttcgctgttcattggttcctctcctggaaagtggcttctaaccagcactggatggtgatcattggtaagctttgctcacctccctctctcttgcttcatttggctttatcaaaaagaacagacctagctctgaatttgtttggcttgggaaattatggattctttcaagccactcccacaaggtgggtcctactagaaagggttagcattttaaggggggttgttctatacacctgtgtccttaccccaggctcaggaactgccagggagggaagatgaggtggggagtctgtagctgagatggaactgtcatgtgctgtgttgtgtgtacttgctgttgtaaaagtttgggcatgactttgcactctggcgggtgctgcctgtcatctctttgtctgtcagcttgctctgggactcagcctcttaggacctacgatgccagcagctctcattaacagtgaattgacagaggccaaagatggccaagtgaagactcaagtctcagaaaacccagacttgggacaactgcctgggaactagggatgctagagcagttctgtaatgctttgagacacagcaattttcacattggcccattctttcccctcccctaccccttttcttttgagggacttt

SEQ ID NO: 249194 - DNA, 1182 bp, Homo Sapiens
aattttgtgtatgaatgatatttttaaaacattgaagagttttcagaaagaaggctagtagagttgattactgatactttatgctaagcagtacttttttggtagtacaatattttgttaggcgtttctgataacactagaaaggacaagttttatcttgtgataaattgattaatgtttacaacatgactgataattatagctgaatagtccttaaatgatgaacaggttatttagtttttaaatgcagtgtaaaaagtgtgctgtggaaattttatggctaactaagtttatggagaaaataccttcagttgatcaagaataatagtggtatacaaagttaggaagaaagtcaacatgatgctgcaggaaatggaaacaaatacaaatgatatttaacaaagatagagtttacagtttttgaactttaagccaaattcatttgacatcaagcactatagcaggcacaggttcaacaaagcttgtgggtattgacttcccccaaaagttgtcagctgaagtaatttagcccacttaagtaaatactatgatgataagctgtgtgaacttagcttttaaatagtgtgaccatatgaaggttttaattacttttgtttattggaataaaatgagattttttgggttgtcatgttaaagtgcttatagggaaagaagcctgcatataattttttaccttgtggcataatcagtaattggtctgttattcaggcttcatagcttgtaaccaaatataaataaaaggcataatttaggtattctatagttgcttagaattttgttaatataaatctctgtgaaaaatcaaggagttttaatattttcagaagtgcatccacctttcagggctttaagttagtattactcaagattatgaacaaatagcacttaggttacctgaaagagttactacaaccccaaagagttgtgttctaagtagtatcttggtaattcagagagatactcatcctacctgaatataaactgagataaatccagtaaagaaagtgtagtaaattctacataagagtctatcattgatttctttttgtggtaaaaatcttagttcatgtgaagaaatttcatgtgaatgttttagctatcaaacagtactgtcacctactcatgcacaaactgcctcccaagacttttcccaggtccctc

SEQ ID NO: 249195 - DNA, 922 bp, Homo Sapiens
ttggcttgaaactgtgtttcaaatgccaaattatctgaaatgattctattgatatagttccttttattagcaaaagtcttgactgactttgtacctgtgccaatagtttgagaaatgattgttttattgaaaataaatgaaaatttatgcttttaaacaagagtaataaaatgattaaaaaccatgaaattccagtttattgtcaaccttcaatgtgatcagaaatcataggtattattataataaaatctgggcctcgatgcaatgtttgagaggatttctttgttgacattgattttctaaatagataactagattattaggatctcattaatatgctgatctgccagttaattatatattttttattttcagaaaatgaacaagtttcagcagtctagcctttggatgacctatttgaaaaccactgaaagtcgtggaggaatgggcaagaaccacctcatgattctgcaggccattgctaacgaacagctcattgctacaaccagtccagaggttttattccctctactccgagcaatgaaatagacctgcagttatgcttcctttcatttaatttctgcagataaatagtttcctgagcaatggatgctatgcctggataccagtctccactttgcacgccggaactgccttgggaccacgagcttaccagacaaacaatgtaaactcagagtgatccttgtgtatattgctatagatttttctttaacaagctattttaaagataatggcatctattatttccaagccatagcttggggctgaaggacaaattgaaatgtctgccaatacccaggatattcttgtatatttgaaaaataacttattatttgaattgttgtggttttgtttgtatttgagagctcttgtagctgatattcatgtttgaggtcataaa

SEQ ID NO: 249196 - DNA, 354 bp, Homo Sapiens
gattccattggctccctaacattcctaaaatttataggggacacatagagtatgagttctttcatgtcttcgaagtgaatggggataactgaaggcctcctcacattctttgtaccaataaaatttctcttcagtgtgaattcaaatgtggtaattatggtatgagaaattcctaaaagatttccacattccttacattcagagtttttcttcagtgtgtttttaaatgtttagtaagtaaataaaatctattgtaggctttcccacattcgttacatatatagggtttctctccagtgtgaattctaacatgtttctgtagatgtgaagaagcacggggaggttttcccccaa

SEQ ID NO: 249197 - DNA, 963 bp, Homo Sapiens
ggttcttaaacttcaaaattgttcccaggcttttaagatgaaattaaaaggtgattagtaaaaatcaaacattcaaagaaatctcagaggcattgttgttccaacatgaaaaacgtctcagcagctattattcagttatcacttgattggctatcactgagggaaacgtgaatatttaaaatatttgagcaaagaggaatccaatatctcttgctgccataaacctgggcatctcaaagcaacattacctatggttgtgctcagctcctaaccctactcatcaatattcatgttagatctcctgactctaaatcacccttgccccctcagcatgcaagcattgggcccacttacaagtaactttcatcctgaagccaagacataagccattgtcctcaaacatcacaacacaacctttgggcctgagaacattcaaaacatggacgttaaaaaggcacatttctgactcatgaccttagagcctaacactgttatcctcaattaaggacacaccatgtatcatcttgcatctctgattagttcatagtgtctcacatataatatcagtaaagtacaaggctgcctgtgttctcctttttttatacttttcaaatgaattcaggcttcccctttgccttagtttcactgacactgtcccacttcgctaaatgacattaatcgataaaaggcaggatttgcaagcacactgcaaaatacaacatactccgttgcaaccagtggtatcctaccttaggaacgatatattagggcaaacatcaagaaacatctagaacttatgcaataccagataatctttattttcctctgaaacctgacaaaccaatttcacaattttctcagtacctgaaagtctatgttgccagccaaagtgttcttcccctatgttcctatttaatgcaacacttttgagaactactgcatccaagtcatttgtaaagccaa

SEQ ID NO: 249198 - DNA, 1295 bp, Homo Sapiens
gcggtccccgtggaaaaggctggcgagagctgagcggtacagctggcagccgacagtgggatcggacaggagggtgccagctttgctgaaagccttgccacagaaaccatgacagcagctgtcacaaatgttgggcatgctgttagcagttcaaaagaaatagaagactttcagtcaaccgagtctgtcagtagccagcagatgaacctcagtattggtgatgacagcactggtagctggtccaatttaagttttgaagatgaacaccaagatgaaagcagcagttttcatcatctaagtgaaagtaatggtaacagcagtagctggagcagtcttggtttagaaggagatttgtatgaggacaatttatcctttccaacatcagacagtgatggaccagatgataaagatgaagagcatgaggacgaagtagaaggtttggggccagatggaaagacactgctaattacgaatattgacatggagccatgcacggtagacccccagctaaggattattcttcagtggctcattgcctctgaggctgaagttgcagaactttattttcatgactctgcaaataaggagtttatgctactttcaaaacaattacaagagaaaggatggaaagtgggagacctcctgcaggctgtgcttcaatactatgaagtgatggaaaaagcttccagtgaggagagatgcaagtcgctgtttgattggctcttggaaaatgcatagagcaaaccccaaaccagtatattttagtatttgtttggggaggggaacaagccaataaagatgtttaggataaaatttgaatagtgaatattaacatcgtaagtcagttgggaggcaagtaaatatagctttctgagcgctttgtgttatcactcggtgtatatagttcatacttttgtaatctgtcaaaatactaccttcatttattcttctatacacatgtgtagtgtgtcaagaccctaagaacatgtatttgaaggaaggtctaaccagggggttttcaggggcattgtctgaccacattctttttgtatccaaatagtgctgctagaaactgcactgaagtggctgaggataggttccagtgatagagttataattttgctcctttgcaaacaaatggtatctaattaataactagtctgacatcagaaaataaaattgaggctgatttttaaaaatttctagtagatttttggcctttctttcctgtttttaaaaatcagtttcattttcatatttcatagatcagctattggtagcttttttgatttccc

SEQ ID NO: 249199 - DNA, 1033 bp, Homo Sapiens
  misc_feature (501)..(545): n is a, c, g, or t
ttggcatctggcattttttgtgcatcttccaacttaagtacacagcagcaagtgctctacatctttgggtagctacacagaaccccactgtggctcactgtggacacaccattgaaaaccttgtatgtaggtcacttagtacaaggaggaacacaactgttgaagaagtacctaaaaattgaattacttgaacaaagtgtgggacatttgctgttttgatggattttaccacactgtcttcccatttatgcttaccagcaatacataggaacacttgggtccctgcagtcagggtgtggaaatggcagatgagttcagccctaaggtgcatttttcttactaggaggagatggagtgtattttatgggatataagcattagctacatttcctgtcctgttcacatcctttgcccatgtgtctatgaggttattgatctttcttactgatttattgtagctctttacttaggaggttaattagccttttgcctgtggagagnnnnnnnnnnnnnnnnnnnnnnnnnnnnnnnnnnnnnnnnnnnnnggccatttgtcttttgactctgatgtggtttttgctgatttcctttgatgtattctagtttatctgacttttctttggcgacttatggactttctctcaccactaaaagccctcactgctctctcagtcttcttgatttaacctcctccaggcttccgccttctccaggccctgattctcagttggagttgctggtgcctcctccttcacccagcgtctgacgctggagtgctcacagtgtggctgggacccacttctctcctctgtagatacccacccctgtgttgatcacttgcaggcccgggttctgtgtgccatgtgtatgccctagagcccttgctcacgtttccccacagccttcatgaagtctgtgttcctcagatgccccacagacatcacaagcaaggcacatccaaaccccagaccactatccaggagcctgcaccctctttctgttggctccacctccagccgcagggtgccactcg

SEQ ID NO: 249200 - DNA, 1089 bp, Homo Sapiens
  misc_feature (1060)..(1060): n is a, c, g, or t
ttaaaacattagcagtaattattgcttaggaagacacttacccttgtatttcactccatccttggctacttccccttgctcgtcagactcttctcccaggccctcatcttgcttacttatacccagccctgaaaataacagtgaaaggttgcttgtagatactcgacgttttctcatacaccatgaaaatcgaacctccccctcgacgcaattacctcatcagtccccattacaacctctgacgactgccgccctagctggatccctaggattctaagtacaagacacccctttcagcactcctcatctttttactttgcatctccagttttgcctcgcacaaggtctctttttcctctgtggatcctctacctacatgtgtctacctgctaattggacaggcacatgcacactagttttccttactctcaaaatgcaatttgcaaataggactgaagagctccctgttcccctcatgacaccgacacgacaaaaagagttattccactaattcccttgtcagtttaagactttctgcctccactattgctctcggtactggaatagcaggcatttcaacctctgtcaggaccttccatagtctctctaatgaattctctgctagcatcacagtcatatcacaaacttcatcagtcctccaggcccaagttgactctagctgcagttgtcctccaaaaccgccgaggccttgacttactgctggaaaaggagaacatctgtatattcttaaatgaagagtgttgtttttacctaaatcaatctgccctggtgtatgacaacataaaaaaactcaaggatagagcccaaaatttcaccaaccaagcaaacaataacgttgaatccacttggacactaattggtcatcctgggtactaccaactcttaggcctttaatacctatttttctcctcttttattcggaccttgtgtctttcatttagtttctcaagtcatacaaaaccacatccaggccatcaccaatcattctatacaacaggtgctccttctaacagccccacaatatcaccccttaccacanaatgttccttcagcctaatctctcccact

SEQ ID NO: 249201 - DNA, 1129 bp, Homo Sapiens
acaaaaaagttgggtaattctgaacggtggatctagtttcgtaactgcaaatgaagattctgtacctgaaaacacttgcaaagaaggcttggttttgggccagaaacagcctacttgggttcctgattcagaagctccaaactgtatgaactgccaagtcaaatttacttttaccaaacggcgacaccattgccgagcatgtgggaaagtattttgtggtgtctgttgtaataggaagtgtaaactgcaatatctagaaaaggaagcaagagtatgtgtagtctgctatgaaactattagtaaagctcaggcatttgaaaggatgatgagtccaactggttctaatcttaagtctaatcattctgatgaatgtactactgtccagcctcctcaggagaaccaaacatccagtataccttcaccagcaactttgccagtctcagcacttaaacaaccaggtgttgaaggactatgttccaaagaacagaagagagtatggtttgcagatggtatattgcccaatggtgaagttgcagatacaacaaaattatcatctggaagtaaaagatgttctgaagactttagtcctctctcacctgatgtgcctatgacagtaaacacagtggatcattcccattctactacagtggaaaagccaaacaatgagacaggagatattacaagaaatgagataattcagagtcctatttctcaggttccatcagtggaaaaattgtctatgaacacaggaaatgaggggttacctacttctggttcatttacactagatgatgatgtttttgcagaaactgaagaaccatctattcctactggtgtcttagttaacagcaatttacctattgctagtatttcagattataggttactgtgtgatattaacaagtatgtctgcaataagattagtcttctacctaatgatgaggacagtttgcccccacttctggttgcatctggagaaaagggatcagtgcctgtagtagaagaacatccatctcatgagcagatcattttgcttcttgaaatgaaggctttcatcctgttacatttgtcctaaatgctaatctactcgtgaatgtcaaattcatattttattcctcagacaaatatt

SEQ ID NO: 249202 - DNA, 1263 bp, Homo Sapiens
ttggctttgacaaatattccacagacacaggctttactgaataaagctaagcttcctttaggattgttgttacatcccttcagagacctaacgcaattaccagtgataacatcaaataccattgtgaggtgccgatcctgtcgaacgtatattaacccctttgtatccttcattgatcaacgtagatggaaatgcaatttgtgctatagagtaaacgatgttcctgaagaatttatgtataacccccttacccgatcttatggagagcctcataaacgaccagaagttcagaattcaactgtggagttcattgcttcttcagattacatgctgcgtcctcctcaacctgcagtttacttgtttgttttagatgtgtctcataatgcagtggaagctggatatttgacaattttgtgccagtcactcctagaaaatctagacaagcttcctggagattcacgaacaagaataggattcatgacctttgatagcactattcatttctacaatttacaagaaggattatcacagcctcaaatgttgattgtgtctgatatagatgatgtttttctacctacaccggatagtttacttgtgaatctatatgaaagtaaagagcttataaaagacttactgaatgcattaccaaacatgttcaccaatacaagagaaacacacagtgcccttggtcctgcacttcaagctgcctttaaattaatgtctccaacaagtggccgtgtgtctgtatttcagacacagttaccttccttgggtgcaggacttctgcaatccagagaagatcctaaatcagagatcaagtacaaaggtggtacaacatcttggccctgcaactgatttttataagaaacttgcattagattgctcgggacagcaaactgcagtgtatttgttccttttaagctcacagtattctgatcttgcttctctagcttgcatgtccaagtattctgcagggtgcatctattattatccatcattccactatactcactatccttcacaagcagaaaagttaccaaaagacctaaaacggtatctcacaagaaaaattgggtttgaagctgttatgagaataaggtgtactaaaggtctttcaatgcacacttttcacggtaacttctttgtccgttctactgatttgttatcccttgccaacatcaatcctgatgctggatttgcggtgcagttgtcaattgaagaaagtttaagcagatacttccttagtatgttttcaaacagcac

SEQ ID NO: 249203 - DNA, 639 bp, Homo Sapiens
  misc_feature (101)..(110): n is a, c, g, or t
  misc_feature (307)..(337): n is a, c, g, or t
ttggctttttgtattcattcatgcaaaccctcctggaagtcgattagaagaggatccaatttgtggaccttttttcctccttttggacacctgagcacaannnnnnnnnncctttcatatttataccactttggaaaattcagtaaacccaattctggcacatcataatggtttcagttagtgaagatgtttattttaataactttaaaatatgactatcctatacataagttatataagagggcataacaatagatgagtagaaatttataaaatttcttggatattttgaatgagaaaaaaacannnnnnnnnnnnnnnnnnnnnnnnnnnnnnnggccaaaccggtacaagttagaaagtgtgctaaggactgaatacttgcctcgtgctttttgccactggatgttgtaagttaagaatggaattgttaatcctaagtatatattttcttgactttcatcagtttctaaagaaatctaatttaagtgttttgcggttttgtttgatctgtatttattgagttctggtcatagaccagcagcttgcacgtcatgctcatgaacagccagaacatagttattggggaacttcatggctcaaaaccttctgaatcatttaacttattttgtatgttgc

SEQ ID NO: 249204 - DNA, 539 bp, Homo Sapiens
  misc_feature (358)..(368): n is a, c, g, or t
aaaaattacgcacacaaatgtatatttattagcaagaaaaggcgttcacaatatattgataaaagggaaaaggtgagggtgtcctgccagtttgtgagaggcagctgttgcttagtgatcaataaataagaacacacaggctgtgtggaggcagacacatggatccactaattcactgtgaccttgggttaattgttctaagcctcagtttagtcatctctaaaatggggataaaatagcatccctcatagctgtggttaagtgagattatttgcacattcaattgacaatatttattgaacatctctgtggcagggaaacaaatggttcctgccctctgagagcttccagtctagcnnnnnnnnnnntcagaaatcccacacccgtattaaacataaaaataaattacagatgatggtacaagtgatcaaggaaaggtaatggatgtgatgaaactaaccaagggccctgacttgtgctgtcaagaagcctctgaagaagtgacatttaagatgaaacctaaaattatgagatacctc

SEQ ID NO: 249205 - DNA, 1226 bp, Homo Sapiens
  misc_feature (261)..(271): n is a, c, g, or t
  misc_feature (753)..(771): n is a, c, g, or t
ttggatcctaaccatcttttgagactgttagaatactttgacgggttgtctttctgtgcaactaatttaaacctcaagtttagtgtaggagatgggtttgtcttctcacctcttcagatctttatcaagggggaataaaagccaacccagaaacctaaactttaaaatttaattatttgaaataataaaacagaagaagggatcaacatttgtcggaattggcactcttggaaaactaagtctaggagatcatatattgcnnnnnnnnnnncattctaaattacttttaattgaaagtcaagatgctgagttacagttgtttatcattataataagcaaactttttaagttggatttcttcttaaagaggtaaactagtgaacaaaaaagataaaaaggaaaattaagaatcaactatgcctttatcaaatttgaagcataagttatattattaaaattatttttgtataatcaaggtgataagacattctggaaaacatttaatgtatttagtacttagaatatttacagtggatgttacttttttgaaacgatatatttttcccaatttttctatcatgtcaaggaaggaaactgttaagaagttaccagtgtccaaaatgtcttcattgtttcttactcatacttacacctcacatgacctgcccagccctctttggttcagttcattcccagaagccaagccttagtcttcacagatgagcgacacacacctctgaatataatgtctcnnnnnnnnnnnnnnnnnnncagccaaggaaacaaggataaatggctcataccccgaaggcagttcctagacacatgggaaattttctctcaccaaagagcaattaagaaaacaaaaacagaaacacatagtatttgcactttgtactttaaatgtaaattcactttgtagaaatgagctatttaaacagactgttttaatctgtgaaaatggagagctggcttcagaaaattaatcacatacaatgtatgtgtcctcttttgaccttggaaatctgtatgtggtggagaagtatttgaatgcatttaggcttaatttcttcgccttccacatgttaacagtagagctctatgcactccggctgcaatcgtatggctttctctaacccctgcagtcacttccagatgcctgtcttacagcatgtggaatcatgtggaagctccacatgtccatggaagttgtatgtacagcttag

SEQ ID NO: 249206 - DNA, 898 bp, Homo Sapiens
  misc_feature (685)..(712): n is a, c, g, or t
ttttctaccatggtccaagatcattacatggatacagccaaggactgggccccaactttcaggaaaaagaccacaaagaagaaaatcaaggtggctatttggtccccccagttgataatctgtgtcctggaactggaaaaacaaaaggtggaaaatacagactgcaacgagttaaaggacttggaaaaagttggtggaaagtggcacggtatacgagtaaggtcactgggcttgggatggcaagggtgctgcattgaaagagcatccacggtgaccaagtacttataatgtctgatggtgtcattccctcaacgacttagaatatctgtatgcgataataaatagatcagttatgtaataaggcagtgtgttgaatatgcattcgtcctgtggaatgaaccaccacagagagatacatgataccatacacattctttgagttttcttgtgttgtgtttgatttgtttgttttcaaggctatccaggctaactcttcccggggatttccttggagagaagagtggtccgctgaggctggtttgctttaacctttcctttatcaagagatgatgactggctttaaagaaaaataaagctgaaggttgtttgatttttattttttcccttttggttgcatcattttgagtgttttcatataaacaacaagaacaaaaaatcacaaccnnnnnnnnnnnnnnnnnnnnnnnnnnnncacaatagttcttgatgcatccagttgttatatcctcaggatgttccagatgtttccaggtaactctgtagtttacggactgtggttttgtccagcgagcaaagatcaaaatcaaatgttgtgtttgtgatatgaaagtgtccagtttcttctataaggttcacgatctgctgcagaatgtgccaa

SEQ ID NO: 249207 - DNA, 923 bp, Homo Sapiens
ttggtgcctcttcagaccagagctgctatagtagacagcgcagttactctgatgacagctacagtgactacagtgacagatcacgaaggcactccaagcgctcccatgactcagatgactcagactatgccagctccaaacaccgatcaaaacggcacaaatattcatcttctgatgatgactatagcctcagttgcagccagtcccgaagccgatctcggagtcataccagagagcgctcaagatcccggggccgcagccgcagcagcagttgtagtcgtagtcgaagcaagcggagaagccgtagcaccacagcccacagctggcaacggagccggagctatagccgggaccgcagccgcagcaccaggagcccttcccagagatcaggctccaggaagagatcatggggtcacgagagccctgaggagaggcattctgggcgtcgggacttcattcgttctaagatctaccgctcccagtccccccactatttccgatcaggccggggagaaggtcctgggaagaaagatgatggcagaggagatgacagtaaagcaacaggtccaccttcccagaacagcaacattggcacaggaagagtgtcagaaggtgactgcagtcctgaagacaagaactctgtcactgccaaactgctactggagaagatccagtcaaggaaagtggagaggaaacctagtgtgagtgaggaggtgcaggctatctctaataaagctgggctcaagctcaaggactcttcacaaggttactttgggctcaagctctccccatctcttggcaataagcctgtccttccactgatagggaagctcccagctacgcgaaagcccaataagaagtgtgaagagtctggcttggaaaggggggaagagcatgaacagtcagagacagaagaggggccc

SEQ ID NO: 249208 - DNA, 945 bp, Homo Sapiens
  misc_feature (433)..(715): n is a, c, g, or t
  misc_feature (717)..(728): n is a, c, g, or t
tacaaaaaagttggccttcccctccgctctcagccggaggccagctgcgtccagccgggctcggtcttctgaacaccgatttcaaatcaggtccccggggcccagcgtcacttagggaagtggtggcattttgtggttgctgctaaatcacggagagcagccttggcgctgccggtcccaacttgatccaaggagccttgagaaggagatgagattcagtaccaggggccggccgtggctcccatcctccggaatctgcaaaatggctacttcttcagaaataatggggagagggatggcaagaggccagagatcaaggccctcgagtattaacttgagcatttgggcacaaaatagacacttttggattttcccgtcttttccaacaccaaggatgagattatcaaaagatgtgttaaattaatttgtaccnnnnnnnnnnnnnnnnnnnnnnnnnnnnnnnnnnnnnnnnnnnnnnnnnnnnnnnnnnnnnnnnnnnnnnnnnnnnnnnnnnnnnnnnnnnnnnnnnnnnnnnnnnnnnnnnnnnnnnnnnnnnnnnnnnnnnnnnnnnnnnnnnnnnnnnnnnnnnnnnnnnnnnnnnnnnnnnnnnnnnnnnnnnnnnnnnnnnnnnnnnnnnnnnnnnnnnnnnnnnnnnnnnnnnnnnnnnnnnnnnnnnnnnnnnnnnnnnnnnnnnnnnnnnnnnnnnnnnnnnnnngnnnnnnnnnnnntcaatttgtaccattccttgccccaccctgccgaacttattgaaagagcatcgctttcctcacttttctcctctaacagaaaagcacttagatgaagctacagggagccagaattcttttgacttggtgggtaccggaggattggaggaatctagattgagtattccttggcctttggggagaatgctctatgcaaagtcacccaggaaatgatact

SEQ ID NO: 249209 - DNA, 1107 bp, Homo Sapiens
  misc_feature (1065)..(1065): n is a, c, g, or t
  misc_feature (1081)..(1081): n is a, c, g, or t
  misc_feature (1095)..(1095): n is a, c, g, or t
ttggggtttgttgctaggacacggctgtctttgttttggtccctgctcagcagtgtttttaaggccctgtatacatttctctgtattgttaatgtaatttgttcaggcagtgaacagccaagttcagccgaaggaatccgatactcataacagaaacaccagaggccaggtttttgtggtcaaattagggttttgaggcctctgaagagaatgaaatgttggcgctgggcgggggacaatctccctttctcctcttgtggtgatgctggcctgggttcagcttccttgaggagcttggctttggggcaccaagtccactgcattcagggctgtgttaggtggggagcccggctgcccttctccgagaaagggaatgcagattttattcaaaagggaagaaaaggcactaacaaagtatgagcaagtttgggccctgcctgcccagcctttccttccccgtggctccgggcagcttttttccccccatcccccaccctgcattacttgactggtgaggaaataatagttgggctctgctgagaaggtatgtgactgtgcaaaatgcaatttgcccgtttccgctgcccatgaagacccgacagcccacttgccatctgggaacctcgcgccctgttgtgcttggagttttcggaaacgatggattccaaacaacttccagtgagcaattggtgatattaagttaactgagttcatcttaccctttttattttgcctcagagagtaaaataagatagaagcaaacataccagcccacaaacatgtccatgcttccttttgcttctagaaggcgtatgttgggaaattaatcagaccaacgttagccccttcctcccggccctggaagaatgcctggtgtgcgtgcatccccctctccagttagcaattaccgaacaacttctgtggctaccaaggagagcatgatagggtcccagccctccagagcttacaatgtaagagaacaaacaggaacatgagtccttacaatacctgcagtgagcgccaacaaagtggaataaaatgtcacctgaaatacctgagaaaggngcttctcaagcttggnagaagcagaggctntggagagatgtt

SEQ ID NO: 249210 - DNA, 352 bp, Homo Sapiens
caaaatgacagggacagggagatgcagcaaagagagacaaagacaccaggtgcaagggggaaagagagaacagagatgcagcccagaattaaggaaagagcagatgttagattgagagaagcaagagacgaaaaaggacccatcacaagcggggagagctaaggtgagccatgctgactggcattcccaccctctgcctgttggcccccagctccaggccccacccacctgcaagctacatttcccagaacacttgccaaagggtttggccaataggaagccctggcaagagcttggggagcaaaggatggaagaaactaggtattcctccctcctttcttctctctctctc

SEQ ID NO: 249211 - DNA, 550 bp, Homo Sapiens
  misc_feature (182)..(313): n is a, c, g, or t
cagaacttcttactatcacttaaaattataaaaataatttggagcaaatttgcatactgtaatacattcaactttatgactaaatgatacatggtgatcacgcattccacaagagaatggccctcagacagtaaacatatttttgtcttaaaattagtgccactgggcaaggcggctcatannnnnnnnnnnnnnnnnnnnnnnnnnnnnnnnnnnnnnnnnnnnnnnnnnnnnnnnnnnnnnnnnnnnnnnnnnnnnnnnnnnnnnnnnnnnnnnnnnnnnnnnnnnnnnnnnnnnnnnnnnnnnnnnnnnnctagtagctacattttcaatgtcttcactacgtaaacatttaatgagaagagaaaaaaggtaaattctggccaggagtgagggctcactccagtaattccagctttttgggaggccaaggtgggcagattgcttgagcccaagagttctgaggccagcctgggcaacgtggaaagatcctgtctctacaaaaaattcaaaaaattagctgggtgtggtgacatgtgcctgtggccaa

SEQ ID NO: 249212 - DNA, 1096 bp, Homo Sapiens
  misc_feature (300)..(339): n is a, c, g, or t
  misc_feature (352)..(404): n is a, c, g, or t
  misc_feature (924)..(984): n is a, c, g, or t
ttggggtcgggaagtatgacagcattggctgatggggtctccccctcacttcagcaactgccacggcccccgccccgccctgtctcctgtcctgctgtcctcagagagtgggacacctccaggcagcaggccagagccacttggccccttggggcagcagacagactgcttcccacttgttggtgttgggtcattgtcatccctgatcaccaggaccctgtgtggctgtggcgtcctcctaaagcgacgagtgaatccagacaagaaaagcaaagatctcggtcgtttgacagaaaaagnnnnnnnnnnnnnnnnnnnnnnnnnnnnnnnnnnnnnnnnaatcaaccatctnnnnnnnnnnnnnnnnnnnnnnnnnnnnnnnnnnnnnnnnnnnnnnnnnnnnntgaaaagagccagaactgggaactacacccgctcatcgacggagctcggagcaaacccacctccacccccaccatacccagcccatacatgagcccctgggctgagctgcgcggccccggccaggcagacaggccagggcactgctgtgcacaatgcagcggtttagctgaatgtgattgctcaggcagctagccagtcaggccccactgcggagtcccgcgtgggcatctcggccgggcgcccagccaggagccagccggtggcccaccagccagcatgggccctgggcgccgctagttaaatcttgagctctgtttgaccaagcggccaaggtaaagatcctggaggtgatgcctgcggctttcctttcctcttctgccccactcgtggttctgttctgtcttcgctgtcccctctctcgaattgctctgtgtctttgtcctaatctctcagcaccttcattcttctctgtttctgttcttgctcccctgcctaacaccaccttcttccctgttggtnnnnnnnnnnnnnnnnnnnnnnnnnnnnnnnnnnnnnnnnnnnnnnnnnnnnnnnnnnnnntcacactctcccctttcctccctttccccttttcctcatactcctcatttcttctgttttccctctgaggtcctatttgaaatgttttatttttcttctctctaaccttcca

SEQ ID NO: 249213 - DNA, 801 bp, Homo Sapiens
tgtactcagagcagattatttactggctgggggtctgagctaaggattcaaaacaatacaaaatgaggttgcgatgaaagggaactaagacatcatctaacctactgggtttcaaacttttatgaccttaacccacattaaacggtacattgcttcttatttagcactcacagtgttaggaatgggatcctggtgcttccacatgactctgggatatgaactgcagctattggatgaactcccaatgatatacagctgttgcatatttgtgtactgcatgtttgaatgtttcaagatcaagaactcagtaaactaccatctgctttttaccttagttctattcagtttaatagtaaccacagtttaccttaaggtataagagccaatattccatcaggtcatgtatggaatgttggtctttacattagtacttcgatctatttatattgttacatgggtttatccatggcttagaggactgggttatacatcattgggtatatttttattgggatttttattttggaatatagataacatattttgtgagtcactgaggaactttcgcaagaaggtaccacctatcataggtattaccacacaatttcatgcatggtggcatattttaactggccttggttcctatcttcacatccttttcagtttgtatacaagaacactttacctgagatataggccaaaagtgaagtttctcctttggaatctggccagtgatcctgtttgagcctctcaggaagcattgatgaatcattccacacgtatacggggatcctctacgag

SEQ ID NO: 249214 - DNA, 946 bp, Homo Sapiens
aaaaaactgtcaaaaggtatgattccaggtgaagtcatggtgaacgagacaaaggaagattttgttaaaaagggtcccaaactctttatagtgagtttatagtgagtgtggaggcattttaggtatactgttttcaaagatctcagatagaaatgtaaaaattgtgggatatttagcttagattttcaatacatattgttcctctctctctaagttattatctgtatcactcatgtcatctaatcaaggttagaggtttttgccttcataataattcaaattgttactctattcatgacatagtaaggcaatttattctttcttaattctacttaaagaaatatatactgatagttttaggctaagaaaagctgtcagttagatgggaaatcacttttctaaagctgagctttgtagatgaaatatgaacatattagaggaagtaatggacatatataaatatgtttctaggaataatattttctaatgttcaataaatgatatgattcgcacagtttcttcataacttcagaaagcctatatctttgtcagctataaagagcatttagattattgtgtttttactgcaactgtttaataacatcaattctgtattttaagcatgttaatctggcagcaaattgagattaattgaatgttggagaaaaaggctatgagacaaaatgcaatctttcatacatgcatataggcacaaaatgatggcttggaatccagaatgccttccacattttatttctgataacttcctttttttccatactatttcatccattacatatatttttcccatttccattatcacactgtgttcccacttctgtgaactctgtattctctgctccatttgagcactgttcagaaatcattgaaatatttcagttgtcagaactatgtgttttctgggggcttcatttctaatccccaa

SEQ ID NO: 249215 - DNA, 945 bp, Homo Sapiens
  misc_feature (776)..(879): n is a, c, g, or t
ttcaaaataaatcgaataaactaactcacagcaagtgtcaaaggcccagatgcctaaatgaaagaagctggcagcttgaggcatctgcatttgaaaagagactcaacgagaactgaagataaaagccagccctagaccaaaagaaagggaagagagggcagggagggctcttagcagccctgcaaatcacacctttctagaagccagggccacaagcagcgttccctatgaactgcctcattcagcctcatagctctaatgggccataacccccacggagtagatgtggcaactaaggtctgtcaagtacaatggtgaggaaaccaaaatcacaaaagtgagcttcagaggggtcggcgctgtaacccaggatttgctctgactcggtattcacttcctcacagagacacagacctttcggtctaggtggggctgtgggaaggggacctgcggacagacgtgccagtggcacagggcctgggagtgtggaaggaggcagcactgggaccgtgagggtccccagccttaggacaacagaggtgtggggtctagacaaccaacctagggcgcaggtgacacagtaagccactgagatgcctgtgagcctgggacaggagctggaaaggcatttccaagaaagagagctcacagtcagccagcacattcctagaagttggaaggaaagatggtaggagctgtcagagcagagagatgagcaggggaaggtggccaaggaaaaagaaaacagggaagggctgggcatggtggctcacgcnnnnnnnnnnnnnnnnnnnnnnnnnnnnnnnnnnnnnnnnnnnnnnnnnnnnnnnnnnnnnnnnnnnnnnnnnnnnnnnnnnnnnnnnnnnnnnnnnnnnnnnnaaaagagcgaaactccatctcaaaaaaataaaataattccacacgtatacggggagcctgctagag

SEQ ID NO: 249216 - DNA, 1060 bp, Homo Sapiens
actttgtacaaaaaagttgggggatatgcacgcaagcacccttcacaagttatttctgaatgatttttagggtaaataatacagatgccttgtttgttaactaacttgtggaaagcaggaatcagtgtctctaaggctgcatcctattaccacaatggggtgtgctataactgctggtattagagagggaactttggccctttcacgtttttcttaatgtttgtaacactacttcagaggtttataacctcaaagcagaagaagagcctcaacaacccgggacttataagttatttttatgttactagacttgcataaagattcttgttttccaactcttcattttgttgcaatgtgttattacaggatatatgaaccaattaaggtttttcactacagttcttgaataaaatttaaaaatcattttttattttaattaaaaatatttcccatttatagaatgcatatatttgcaatggacttccactttcatcaactttccatctcatcgctttaaacaggaacttgaacaagcactgttagtttagacctaaaggataggaaagcattaaataatactttggatctcctgaggaaaagataagtttgcttgcaatttacacattccatggggaaagaagagccatatttccttaaaaaaaacattaataaagcttgttattgagaaaaattgtagtgaaaagccttaagtaccaaattttaaagcagcagtaacttaatttttatatcagtgtttttgttttgcacaaactaaatgcagtggtaggtgggtttatgagtatattaattgcctttatccatttgtgaagttaagttgatgagggcaaggtttttgtttgtttaatttgtatatgtctaaaggtatttggaactttttacaggaattaaacatatatgcaaatttgtatataaaaatagcatggccatcatttgaatgcttgtaaatgaaaggattatcttttttgaagatctatatataaatagaaatagaaaatccagctggactgattaggattcttttttaattcatttgtgtata

SEQ ID NO: 249217 - DNA, 931 bp, Homo Sapiens
  misc_feature (518)..(734): n is a, c, g, or t
caccccactttcttgtatctgtgtctgctatatgcaaactgagatggaaaatataaaacagcacagacagaagaaagaaagtagctttaaggcaaactagattccatacattctttgccgttcttccttttgtacatcatcaaagagctgcttggtgaggttgtccattttttctgtaaaaagagaatgctttttgagatatgtctgccaaatcaatgccttgattgtttcatgttatgtttaagaaagtgagaatgtcaggacaatcatgtgatgtttattattaacaggacttacaatgagagtatagctcattttttataaacaagaaataaagatgagggggtttcaaaataataattctcacaaatttgtcagattggaattatcaataaatagtttcatttatagtacttttgttggtctgttatttattaaagtagatattggctttgagacaatgaatattattaaaaataaatagaaaccctttgggaagaaaatgatccatttgtgannnnnnnnnnnnnnnnnnnnnnnnnnnnnnnnnnnnnnnnnnnnnnnnnnnnnnnnnnnnnnnnnnnnnnnnnnnnnnnnnnnnnnnnnnnnnnnnnnnnnnnnnnnnnnnnnnnnnnnnnnnnnnnnnnnnnnnnnnnnnnnnnnnnnnnnnnnnnnnnnnnnnnnnnnnnnnnnnnnnnnnnnnnnnnnnnnnnnnnnnnnnnnnnnnnnnnnnncatctgtgataaccaagaaaataatcaagtgtctgtctctatctgggaaagaggaagtacaaaaaaggcagctgttaacactgaaatacaagagtcgcatacacaaagtctgcaggccgaagggcaggacgttccatggctatgacaaccccacattcccaacacacccatatgccacaggggccatcaaaatccaa

SEQ ID NO: 249218 - DNA, 1172 bp, Homo Sapiens
  misc_feature (648)..(658): n is a, c, g, or t
  misc_feature (848)..(879): n is a, c, g, or t
ttgggtgggattgtcagaactgaacacatatcatttgattagtgcatattttttatagtacctgaaaaccaagattttgaaaaaattttcaagacagagaattttgataaatcctgacattgacctaattgacataggtaaatatgtttgtatatgtgctaataattttctaatttcggaacacgatgatgttatgactattgatttaaaaatttcaaataataatttttgaaattatagatgaatgctttcatttgagtttcattctgtaattcagcagttctgggtgaaatacagatagcaaaacaaatcatgatgctgttacaaatgtattagttatccaataagtgttttaagtcaatttttttaaaatgatatgagtcttacaggtttcttccatctttaaaatgctcaaacatggattcagggactaaaaggatgaactgattagacattttctattaggagtttggtaaaatattgtaaaaatatcttcacctgtgttaggagtattatcagaaagaatggattctttaataaatatgtaaaacacagtagttttggaattgccttccttagtattgtggttttcacctagcttatattccaagatttacagaatagcttttaggataagatgttaggacnnnnnnnnnnnccccatgagaattcctttatttttggaggaaattattatctaattattgatctacttataagtaatcctagaatttttgccaaaagatcctgtcgttgcataatcaaacagttggtattctcgtgccgttgttcaaagtcatgtgtttctttcatttggtgtctgaaaattttctgttcaatgccattgnnnnnnnnnnnnnnnnnnnnnnnnnnnnnnnnatgtaaaactatgtctaggtgctggatatgttgatgaatgaaacagactctatccttgatacaatttggagtcttgtgtggctctagaagtaaattgctgtgaaacgcgggacggatagtgcgaattgagtgctcttagttttgccaatatttaacatgttgttcttatcaattttttaaaataaatgttaatgtacaaagttaatctaggttttgatgtatatccagagaatcaatttttcttaagatgctgcgtagacattcatagcaaagatatgccggaccgagcgtga

SEQ ID NO: 249219 - DNA, 924 bp, Homo Sapiens
  misc_feature (211)..(220): n is a, c, g, or t
cattttagcctccaatttactctccttgcttacttagatttgcccattaaaaattccactaaaatgaagcaagtatgtctgaaatcaaggttgaggacccaacagaaactgttaaagcaaaacatgcagtaaaacttaatcaattcagattttagtcagaatttgtaacaatttactggaggagaaaatgaacttttaaaaatgtctgtgnnnnnnnnnntcagacaaagcaaatttacattagaagcctgatattggaggtactaaaaattgggcaagttaaaaacaatatacattcttcttaaaaatgattcagagcacatgttatttgtttttatgggtttacatgcaaaagggaatgttaaccaaaaactaaaacttagctaacattaatgtagataaagctagttggaaatattgtatatctctaaaaatagtaaaatgaaaagatattatcattccaattcccaacaataatagacctggctggctgttctccaattcatgatattttacttttgaggctcagaatgaattaatttttttgtgaagctttaaactttaaaaccaaacccatacatagcatacatattaaagttctgttcctaatgtggattttatacaatctgacttaaaatattcgatggaaaagaagcctgttgccaaagtccacatatttcccctattaaacagaggtaagccatatccccagaaaccatatttcaagcccaaaggatactcatgaactaaaataatgaatgataatgcctcgttctctgcattaataataaagaaagagaaaatagaaaacttgatagccactatcagctttctggaccataaatctcaagttttgagaattgcttcccaaaagggtagggagcaaggatgagttgtgagagcttcggagcctagaatacattt

SEQ ID NO: 249220 - DNA, 664 bp, Homo Sapiens
ggggggactttgtacaaaaaagttggcttaagttgtacctctttcctttttgtacttcatggcaaaattaattttctaaaggattcagagaggcgtttatattttataacatttattagaaataatttgttccaccactagattactgtattttatggaatctaagctgtatatgtgtacatttgtatacatgtatgtgtaaatgtaagcctgacgtgggttcagattccagttttgtcatcagcaagaggcctcggacccatgacttactgcctctgagccttggctttctgtgtatctctgccactggtgataatggtacacataacagtggagtggggaccaatttctaaaactcatggcacttagtggttggtccataaatggtgtttgttattttagacactgagaaaaatcttattcacagaagttggagattatttctgctagtcacttttttatttcttgagagctgccactcatttaatatttctcatttatgagaagagacttgactgatttagataaaagacgaattaaggaaaacctttgaacgtgagtagacaagcttcatatatctgtaaagtgaatattgaatggtagcttgagtcattcgtacttatcacagaaaagaattgaactcccaggtcatacacctgtaact

SEQ ID NO: 249221 - DNA, 922 bp, Homo Sapiens
  misc_feature (53)..(124): n is a, c, g, or t
ttggccagtttgcaagtttatccaagtaaaatgaacgaactcctacttcctcnnnnnnnnnnnnnnnnnnnnnnnnnnnnnnnnnnnnnnnnnnnnnnnnnnnnnnnnnnnnnnnnnnnnnnnnaattttttaaaaccaacaaccttatctcgggttaataccaattcagttcttggaattaaaaaatttagatttgggttctcaagcaccaattatattaaaatgaatgttcaaagtagggaggctatatatacagtttgaggggatatcggaaagaaagtaattatccatttattgtatagttttatattcatataagtttgataccataaaaattttcttttgttaagtatgaaaaatgtatcaggaatctctaaatgttggaaatagtcatttaatggattgaggcttttaaaacctgactgtatgtctacttccttaaaaagcaaatacaacaccaaatatgacatatctgaaacagtgaggataaaattgcttaagcagagtagttattatatgacctggggagcctggggaattttgtaattgttggctttttattagtgactacttcttattttttccaatccagtcataggaagacagtgattataattttagatgccagttgagaggtttttaagtgttatatattagggcaaatggaggtaacaagggttttttatttgagaagtaagtaagactgtcttgttagtggagctgacctcaacaatccaaaaattgtatttttcttatataacaacatagtcaaaaaattattaaagtatcgaggctttctggtagaaatagagagcgtctcagttcttcactaggtaaacttaaatcagtctcttgtttgggagcttgctccccacaaaggacatattatttgctatcaagctaccaataaaagatgcctgc

SEQ ID NO: 249222 - DNA, 896 bp, Homo Sapiens
ttggatttgctgcattattttctttttatttagatgatattaaaactcagaagaattaattttgacattttgtatttacagtttatcagttaattttctctgttcaagtagtacagtaggcacagattaacatttaaatttttcacatatggtatatttcagaaatttgaagttaagcaaaaaattttaatgagtagagaaagtaagtagccttcaggaaatcttcatagaggaccaggcccttttggaattgtgaataggtttattgccttacatcctggtacacatgtccaaggtcaggtcctgggtggtaaaggtaaatacaaattggaagggcactgtgtgagccaaaatgagtcagattagtcatgattcatttccagtttgggttttgggtggtcttggagaatgttgtaagcactgcttcattgataggttgattgagccagactttactcagcagcctggaaaaggagagatgggctctgggttctacctttgctcactggtaagttgctaagatttcagctttgccctcaaaccctgaagtagtccttcattcacacagtgggatcactcgaaaatgtcagatggggaagtccataggttgttactttaaagaaaatagaaaaaatgctggaaaaggtttcttcaattttaatacccatgaaggcccatgttttagctttcctccgatgggcaaaccatacactaacttgggccttgtaatcaacaagcaacgctaaaagctctctaagtgcttgctgtttaaactattttgtgttggaagaagagttggaaaagaggcagtgtggaggtgagggagaagttccctccctccaatcatttccaataaatggaaatttaagagaaatttgtgtttatccttatatcta

SEQ ID NO: 249223 - DNA, 870 bp, Homo Sapiens
cggtaataagtagccaagcagacatttcaaccaaagactgaagccaggacccaaatacttggtcaccagactatatggcctcagctgcagaaattcagggcatctttatgtccgtgttagagcatgtgcggcccctagaaggcttttagcgaacgtccctctgcagcgcttgtcctcactccttggatcagcttcatcggctccttctgttgggcccaacaagagcgggatccctgggggccactctggtttgctacgggcaatcacactgctcaagtcagcaagatgttttcttgagggagagggtgagaaaaagaaggttcaggttgggagtacgctggtcagtggcttgtttctgcttcactgtgaattctttctcttctatgaggtgatcctaagccagatacatatttaaagaatacaagaaaaagccacatgggtgttgaaacccacacgtagaaagcaaaggtcaagacgtgttcaggtcatgtatccaggctgctacaatgcccctggctctagactactcgccggccgccgctcccatctggaggtcccttggttctactcttttctctttcccttccgggctgcttcttcacccaaagggcccttggtctagagatgggttccactgatgagatgcacaaggagtggtgggcaggctaataatttggatctgcttcatacagactttctttgatgtctcggcagttgtttgttggggaggccgcagcttatgagggaaggcagtctcagtggcttctccgcggagggaacacgtgcctgtctcacaatcagcacaccccaactgcactatgctgagcccagcagcacacaagacccatatcaccagcaggcatcagccaa

SEQ ID NO: 249224 - DNA, 519 bp, Homo Sapiens
gggtctccagggacacagctgtgctgttcccactgcccccgattatagaggcacctcctgatgtctctgtctttcttcccagtttctgcttgtccacaaaaatgggcagggacttttctccttctttagaggagggtcatcagagggagcctcaggccaggggcctcgctgcctgaaaggccctcttccaaagctcagtccccctgccctcagcttatctgtttaacatcttctattgaactctgtctcaagcaatccatcttcataggggagacacaattctctctctcaagttgtttacgaggagtcttcgtggctttttctgctcccttcaggaggggcaaaagcctttgaggggcatctccctcctccccatcaaacactcaacacctgccgcgtgccgacagctggcccgagccctgggagagcttgttttagtcgattggacagtgagctaaatgttataataaatccggcttccttcttcccaacttttttgtacaaagttggcttttatgt

SEQ ID NO: 249225 - DNA, 911 bp, Homo Sapiens
ggcagctagcagcgagttttcataaatgccaattgcggccaaatgtagcgcacccatttgatgacatcatggtcgctgtagttcagcttcggttcaaaacaccttcaagtagcgcaccttgaggccagagggcgcgaatggcacctgggcaaggagagctagttagaaatgtggccttcctcttacagccgctctcctctgggaagtcccgttgccctgcccctacttcatcgctactacaggtgtttgtatggctggggtcctgaaagaagctggggcggcgtgggaccttctaagaggtgactaaagaagaaagccctacctgtgacaccttgaatcagttcctttaatcagcaggagacagcaaccaaagaactgctttagaacatacttatcctgctcaatattatgaacttaaaaataaggtggagaaaattatgtctaacatgcgcaaagcaaagtcagcccattatcctgtctgtaagtaaactttgtgtcttacctggcatttaaacaatctaagttttttgaaagaactgtgttaggacaagccgagagaagtaaaagatttgcctcattaccaatagtaatttcttctaagaggcttgaaaggggaagaatggatctatgaattaaagccagttcttctttctaggcctcagtttcctcacctctaaggtgcagcggtttatcggaatgatctctaagaggtcttccagcataccctggcatgagtctaggcccctcctctgccatacctcaaagttcatggaaatggggggtcgagcccatttcttcttgtcgttggtaggcagaagctcaatctctgcgctgatctgcgattccttcatgcctgccatgcgctggatcttccacacccaacttttttgtacaaagttgtcttttatgat

SEQ ID NO: 249226 - DNA, 938 bp, Homo Sapiens
ttgggctcatcctaacctagtcctgtcagaggatcgtaagagcgtcaagttcgtggagacaagactccgggatctccctgacacaccaaggcgtttcaccttctacccttgcgtcctggctactgagggtttcacctcaggtcgacactactgggaggtggaggtgggcgacaagacccactgggcagtgggtgtatgccgggactccgtgagccgaaagggcgagttgactccactccctgagactggctactggcgggtgcggctatggaatggggacaaatatgcagccaccaccacaccttttacccctttgcacatcaaggtgaaacccaagcgggtaggcatattcctagactatgaggccggcacactgtctttctacaatgtcacagaccgctctcatatctacaccttcgctgatacttttactgagaaactttggcccctcttctacccaggcatccgggctggacggaagaatgctgcaccacttaccatcaggcccccaacagattgggagtgacaggttgggatgtgggaatgactggggtgaggcagggtcaagtgctacgggcctccttcccgtgtcctgctggaacgtcttcgtgtccacctgggtccagtcctgaatcatcttggagaaacaccttggtttctaggatggttttgtgtggagggggaggtaggactgggctggatgagagagcacagctgtgacttcctcctaactgtcagggtggggagctggttcccagaggattgtctacccctgaagtccatcaggttttctgttgcacaaggacgggtcaggaaggaaggagaggctttccagaaacaaaaaatctgtgagggtctgacttgctcaaccagaggaggaaacagaacccctgccatcttttagggggtctttgacccggaatgctgctcttggggaa

SEQ ID NO: 249227 - DNA, 1260 bp, Homo Sapiens
  misc_feature (1237)..(1237): n is a, c, g, or t
aagttaccactacaacgacctggtgtctccacagtacctgaacctcatcgcaaacctgtcgggctgtaccgcccaccggcgcgtgaacaactgctcggacatgtgcttccaccagaagtaccggacgcacgacggcacctgtaacaacctgcagcaccccatgtggggcgcctcgctgaccgccttcgagcgcctgctgaaatccgtgtacgagaatggcttcaacacccctcggggcatcaacccccaccgactgtacaacgggcacgcccttcccatgccgcgcctggtgtccaccaccctgatcgggacggagaccgtcacacccgacgagcagttcacccacatgctgatgcagtggggccagttcctggaccacgacctcgactccacggtggtggccctgagccaggcacgcttctccgacggacagcactgcagcaacgtgtgcagcaacgaccccccctgcttctctgtcatgatcccccccaatgactcccgggccaggagcggggcccgctgcatgttcttcgtgcgctccagccctgtgtgcggcagcggcatgacttcgctgctcatgaactccgtgtacccgcgggagcagatcaaccagctcaccttctacatcgacgcattcaacgtgtacgggagcacggagcatgaggcccgcagcatccgcgacctggccagccaccgcggcctgctgcggcagggcatcgtgcagcggtccgggaagccgctgctccccttcgccaccgggccgtccactgagtgcatgccggtacgagtacgagagccccatcccctgcttcctggccggggaccaccgcgccaacgagcagctgggcctgaccagcatgcacacgctgtggttccgcgagcacaaccgcatttgccacggagctgctcaagctgaacccgcactgggacggcgacaccatctactatgagaccaggaagatcgtgggtgcggagatccagcacatcacctaccaacactggctcccgaagatcctgggggaggtgggcatgaggacgctgggagagtaccacggctacgaccccggcatcaatgctggcatcttcaacgccttcgccaccgcggccttcaggtttggccacacgctttttccccgccaccccgaacagccccctgagaagcggatcgatgccgccctcattcacaatccggaagggagagaagaaagctttgtgaagggggaggtgatcttgtgcnatgggctgaagttctcgtccagc

SEQ ID NO: 249228 - DNA, 1064 bp, Homo Sapiens
ttggctcattgctgttctttagtgaaatctagccttgctgatagcgatcatttacaagattggctaaagaaattgactctccttattcctgagactgcagttcgtcatgaatcatgcagtggtctctataagttatccctgtcagggctggatggaggagactcaatcaatcgttcttttctgctattggctgcctcaacattattgaaatttcttcctgatgctcaagcactcaaacctattaggatagatgattatgaggaagaaccaatattaaaaccaggatgtaaagagtatttttggttgttatgcaaattagttgacaacatacatataaaggacgctagtcagacaacgctcctcgacttagatgccttggcaagacatttggctgactgtattcgaagtagggagatccttgatcatcaggatggtaatgtagaagatgatgggcttacaggactcctaaggcttgcaacaaggtgttgttaaacacaaaccaccctttaaattttcaagggaaggacaggaatttttgagagatatcttcaatctcctgtttttgttgccaagtctaaaggaccgacaacagccaaagtgcaaatcacattcttcaagagctgccgcttacgatttgttagtagagatggtaaaggggtctgttgagaactacaggctaatacacaactgggttatggcacaacacatgcagtcccatgcaccttataaatgggattactggcctcatgaagatgtccgtgctgaatgtagatttgttggccttactaaccttggagctacttgttacttagcttctactattcagcaaactttatatgatacctgaggcaagacaggctgtcttcactgcccaagtattcagaggatatgaagcacaagaccactcttctggagcttcagaaaatgtttacatatttaatggagagtgaatgcaaagcatataaatcctagacctttctgttaaacatacaccatggataagcagcctctgaatactggggaacagaaagatatgacagagtcttttactgatctaattacaa

SEQ ID NO: 249229 - DNA, 1116 bp, Homo Sapiens
  misc_feature (69)..(112): n is a, c, g, or t
ttggcaccagacaacagccagggctggagtccaggccactttcagctgctcctttctccgtgcatcgtnnnnnnnnnnnnnnnnnnnnnnnnnnnnnnnnnnnnnnnnnnnngacccctcccctccggtgcgtttcgtatcaaagctcctcaaaccccgtcccccgtgtgtcctgctgtgtgcagctcgctctttccttccttcctaagctatccaaggggatggacccaggctcgtggggaggttccacccttggatccaggaagaaccctccaccctgcctcgtgggtgggccaaaggctacagggtgcttcttcctcttcccccacccccactgtccctcatgtgccatgggcctgcctccccagtgacctgcgaaagtggagcatcgaggtaggagggaaacggcaaccagggagtcctcgagcctggggctgccctacctctacccattccccgaccagagctttgcccttgcttggctgcccgcctgcctctttggggaactgagctcagaggcaggtgcttcagagaaggaaacaaaatgaggggtggcagggataaaaagtcacctccattctctacctcccatgcagcatgaacacaatttctctccacctggctcccaaatttaaagatgtggaccaaggcctgtgggtactccaggggcaaggagagccctggggtcagtgacactgtcaggccaaccatgcactccacaaaggggagcatttggaaatgaaggactagctcctatgtatcatgttaagagcaagggagagctggccagggacagcagtttgcacagcagaggggaatgtagcaacagcagggcctcctaaggccccatcttccatttcttaggtaagaagagcatttcctcagactcccaggcggaggactgagcctagccttcagcaaccaaggttctcctgggacccaaagtttatgggagaagggcaaagacttcatgggaagagagaaggaaggccctgggtagaaacgcttggtgctgttctctttggcctttaagacaagcgctcatcttgccctctacctcctgataggcttgagggtttgccaaccacactgtgctacaggtggtagggaagagga

SEQ ID NO: 249230 - DNA, 1299 bp, Homo Sapiens
  misc_feature (1249)..(1249): n is a, c, g, or t
ttggcattgggttggggtacaggttatgctggagaaattccagttgcgcaggttttgcgaaatgtaatggaagcagatggaattaaactagatcgatggaaagttcaagtaacaaataaaggatactacaacttaagaaaacccaaggaattcacaatgaacaactatttttctgttggacctgatgctctcatggctctcaattttcatgctcatcgtgagaaggcaccatctctgttttctagcagaattcttaataaggcggtttacttattctatggaaccaaagattgtttagtgcaagaatgtaaagatttgaataaaaaagttgagctagaactggatggtgagcgagtagcactgcccagcttggaaggtattatagttctgaacatcggatactggggcggtggctgcagactatgggaagggatgggggacgagacttaccctctagccaggcatgacgatggtctgctggaagtcgttggagtatatgggtctttccactgtgctcagattcaagtaaaactggctaatccttttcgaataggacaggcacatacagtgaggctgattttgaagtgctccatgatgccaatgcaggtggatggggagccttgggcccaagggccctgcactgtcaccataactcacaagacacatgcaatgatgttatatttctctggagaacaaacagatgatgacatctctagtacttcggatcaagaagatataaaggcgactgaatagatggatgagggagtgaaaactttgcatagaatcctcacgcaagtagatacatgttcatccaaaagtattaatagaaattctctatcagctattcagtcttaatttcactagtagtataatgggtatacatttttgtaaatagcatccccaaaccagccagccttcagttatttacaaatgtttgttcttttttcagcaaaatacttcaaatgaatagtattaacttacaaaaagtcacgaaaacttacatgagagtgaaaatttgttatgactgttttgagagtgggactcactctgaagtatgtgctgtctcatgtcttatttttgaaccatgcatatgatggacacacaatggatggacacattatatctccaacaaggtgtgggtggaaagatcaaattaacctgcttttttgaaaggaaatgattactgtcaaaccagcatggttaattgtgagcatcctcctgcagcatgccccttaagattttctacaanccaaaccaagtgtatgtattgatttctaggaacccccatttccctttcgt

SEQ ID NO: 249231 - DNA, 1001 bp, Homo Sapiens
  misc_feature (570)..(659): n is a, c, g, or t
ttctagaggataccagagaaatgggagaagccatgatcagcactctttctcaaagtctcattactacctttttaaaggtggatttttgggaaaagagaatacttttccttttatgttcccctctgaatctctaccactttcttgtctctccagccctttatgtaaatgaaaacgtttgcaaaatgaaaaaaataaacaaatggttgatgacattctaatataaaaacttagctctaacacattttgagtagtatgaggaaacagaccagatatgaccaaaatactgtggattaatggactgtagtgcagggctcctagcagagcacagtccttgatagtaggtcacatcttttacttcctggtactctccatcttggacagaccaaggcttaggattttgtagattttttagtatgataagtgagaatagcaacagatgaaaagtctcacgacccatttttatatcttcgatgataaccttagaaaaattctgctcgtggaagcagattgaactgtcatttatcccctccttcttgtaataatgttaccttcagacgcttaaccatatgnnnnnnnnnnnnnnnnnnnnnnnnnnnnnnnnnnnnnnnnnnnnnnnnnnnnnnnnnnnnnnnnnnnnnnnnnnnnnnnnnnnnnnnnnntatatgcctgtgttactgcaaatctccaattcaaatggaggtgtatatgcctttacttagccaatttaaaaacaggactcaaaatgggagatgtgctgctgaatatgtgtttctttttcttcagtgccatactttgatagcttccaatttgttcactgatataaatgcaaattgggaaaataattaaacctgtatgctgttgatgctgtcagatgtttctgtagcttgctgcttagcataactgagggatgagtaatggaataaggatatgatgtgtaattccactgttgctgtagatggtgacaatctcagttctgatatgttgatgtttgaaagctattt

SEQ ID NO: 249232 - DNA, 1206 bp, Homo Sapiens
ttggcaagtttgtggagggcctcattgtcaccctgtcaccccgcatggctgactcagagataccccgacgccaggagcatgatatcagcctggaccgcatccctcgtgaccacccctacatccagtacaacgtgctatgggaagagggcaaggcagccttggagcagctgcttaagttcatggtgcaccctgccatctcctccatcaacctgaccacagcgctgggctcccttgccaatatcgcccgccagagacccatgttcatgtctgaggtgatccaggcctatgaaactctgcatgccaacctgcccccgacgctggccaaatcgcaggtgagcagtgtgcgtaagaatctgaagctgcacctgttgagtgtgctgaagcacccggcttccttggagttccaggcccagatcaccaccctgctggtggacctgggcacacctcaggccgagatcgcccgcaacatgccgagcagcaaggacacccgcaagcggccccgcgatgactcggactccacactcaagaagatgaagctggagcccaacctgggggaggacgatgaggacaaagacttggagctaggcccgtcggggacctcgaaggcctcagcgcagatctccggccagtcagacacggacatcacagctgagttcctgcaggctctgctgatgcctgataatgtggctaatctggtcctcatcagcatggtgtacctacccgaggccatgccagcctccttccaggccatctacacccccgtggagtcagcaggcacggaagcccagatcaagcacctggctcggctcatgggcacacagatgacagctgccggactgggaccaggtgtagagcagaccaaacagtgcaaggaggagccccaaggaggagaagtgtggtgaagacagagagcgtcctgatcaagcggcgcctgtcagcccagtggccaagccatctcggtggtgggttccctgagctccaatgtcccccctggaggaagaggcaccgcaggccaagaggaggccagagcccattatccctgtcactcagccccggtgagtcctcttctgggtgctagggcaggacgggagccctaccctgaaggtctggttctcagctcgtgtgcgtgtgcgtgtacgtgtgcgtttgtgtgattaactgatatgcagacagaaggaagtctggaataagttctctccgactccc

SEQ ID NO: 249233 - DNA, 988 bp, Homo Sapiens
gccaactttgtacaaaaaagttggtactcttggcaacgtctgggctgggccaggcgatgggaaccttgggtaccagctggggccaccagcaacaccaaggtgcccctctcctgagccgcctgtcacccagcggggctgctgttcatcctacccacccactaaaggtgggggtcttggcccttgtgggaagtgccaggagggcctggaggggggtgccagtggagccagcgaacccagcgaggaagtgaacaaggcctctggccccagggcctgtccccccagccaccacaccaagctgaagaagacatggctcacacggcactcggagcagtttgaatgtccacgcggctgccctgaggtcgaggagaggccggttgctcggctccgggccctcaaaagggcaggcagccccgaggtccagggagcaatgggcagtccagcccccaagcggccaccggacccttttccaggcactgcagaacagggggctgggggttggcaggaggtgcgggacacatcgatagggaccaaggatgtggactcgggacagcatgatgagcagaaaggaccccaagatggccaggccagtctccaggacccgggacttcaggacataccatgcctggctctccctgcaaaactggctcaatgccaaaagttgtgcccaggcagctggagagggaggagggcacgcctgccactctcagcaagtgcggagatcgcctctgggaggggagctgcatcaggaggaagacacagccaccaactccagctctgaggaaggcccagggtccggccctgacagcccggctcagcacaggcctcgccaagcacctgctcatggtttgggggaccgactgtcccctgctgcggagggacgggagcctggcttggccacgggaacagccaaggccagccgtgacagaggacagcccagcattcacgctgctgcaccgttgccaccatgatcttcaacacccatccaccc

SEQ ID NO: 249234 - DNA, 1242 bp, Homo Sapiens
  misc_feature (25)..(25): n is a, c, g, or t
cgagctcggtaccccttccggtgtntgggttggacatcaaaccctgaggaattggacccgatcaggctggctctcctggcaaagtcaggtctgagctttcaggtgggttcagccacatcacagcctgtgtcctgccaggagcctatagatgaagatcaaagaataagtcctaaagataagtcaactgctggccgtgagttcagtggccaggtttctcatcagaccacctctgaaaaccagtgtactcctattcccagcagcacagttcacagctctgtggctgacatgcagaacatgcctgctgctgtgcacgcactcttgacacaaccctctctcagcgctgctccttttgctcagcggtatttgggaacactcccttcaactggaagcaccaccttgcctcagtgccatgctggcaatgccacagtctgtggcttctcaggaggccttccctatccagctgttgcaggagagcctgtgcagaactctgtggctgtgggaatttgtctaggatcaaatatcggctctggatggatgggtacctcttccctctgtaacccatattctaataccttaaatcagaacctgctaagcacaacaaaaccttttcctgtgccgtctgttggtacaaactgtggaattgaaccatgggattcaggaatgacatcaggattggggagtgtccgagtgcccgaggagttgaagcttcctcatgcttgctgtgtcgggatcgcttcccagaccctcctcagtgtgcttaatccaactgaccgctggctgcaagtcagcattggggtcctcagcattagtgttaatggtgaaaaggtggatctttcaacatatcgttgtttagttttcaagaataaagccatcataagacctcatgccacagaagagataaaagtgctttttataccatccagtcctggggttttcagatgcacattcagtgttgcttcttggccatgttcgacagatgctgagaccatcgtacaggcagaagctttggccagcaccgtcactctcactgccattgccgagagtcctgttattgaggtagaaacagaaaagaaagacgttcttgattttggtgacttgacttatggaggctggaaagccctcccactaaaattgataaaccgaacgcatgccactgtgccaattagactgattattaatgctaacgctgtagcctggcactgtttcacgttttccaaggaacccgtccgagctcctgtggaa

SEQ ID NO: 249235 - DNA, 794 bp, Homo Sapiens
ttggccccggcccatggtgcgaggctgggagccgccgcccgggctggactgcgctatctctgaagggcacaaatcagaaggcaccatgcctcctaataaagaggccagcggtctcagtagttcaccagcggggctcatctgcctccctccaatctctgaggagctacagcttgtgtggacgcaagcagcccagaccagtgagctagacagcaatgaacacctgctcaaaaccttcagctactttccctatcccagcctagcagacattgcccttctctgcctacgttatgggttgcagatggagaaagtcaagacttggtttattggcccagcgcctccgctgtggtattagctggtcatctgaagaaatagaagagactcgagcccgagtagtctaccgtcgggaccaactccatttcaattcccttctctcttttactcatcatgcgggacgtcccccagaggaggtgcctcctcctccagtgccagctccagagcaagttggtattggaataggtcctccaactcttagcaagcctacccagacgaaaggattgaaggtagagcctgaggagccctctcagatgccaccactgccacagagtcaccagaaattaaaggagtccctgatgacacctggcagtggagcattcccctaccaatcagatttttggcaacatcttcaaagcagtggcctctcaaaggagcaggcaggcaggggtcccaaccagtcacatggcataggtactgcttcctggaaccactccacaaccgtcccccagccacagctacgg

SEQ ID NO: 249236 - DNA, 776 bp, Homo Sapiens
  misc_feature (63)..(80): n is a, c, g, or t
  misc_feature (588)..(596): n is a, c, g, or t
  misc_feature (603)..(614): n is a, c, g, or t
ctttctgacacagagttttgctcttattgcgcaggctgcagtgcaatggcacaatctcagggnnnnnnnnnnnnnnnnnngcaaattaattattttatactttaagacattttcaaagatggaatcagactaatttgtagcatataaatggtaatgtttatccataatattttggaattcaggggtctgtgaatcatgtaaccgaatactaaagctatatacacgatataatttaaaagaatgtacactgtgtacaagtacacaaaatagatgtagaaaaaataaacagcaatttattgctatatattttagtattaactaagaataagtggggttctttttctcctttgtacagagatttttctttcactaggagcaacagcaaaactatctttaaaaggacaaatttcaaatataaaaatggcctacatgattttataaattgatttttcctttaaagttttgatgaaggcataattttgtgacattcaagtaacctttaaaacatacttttattccatcgatacatctgtcaaggttttggggaatcaacccaacaatgaagaactacacattttgaactggggnnnnnnnnngtgattnnnnnnnnnnnngagcttctttttgctgcataaaataaatctaaaggactgaattatggtctacctgtacagccattatacatacatacattaaagtactggacaataacctgtcacctaagaagtataaccgaccgcatttatgaacaaacggggaaaacacattctctccaa

SEQ ID NO: 249237 - DNA, 867 bp, Homo Sapiens
ttggggcactcttatttaccgaccaagaaagctcctcccccgtcctccgttagctaattaaaacatttttcagggacgtagccatccagagacattccattattgttccattgacctttccctcatcactgagtcctttggagctgagttatgtcaacagctgccttaattactttggtcagaagtggtgggaaccaggtgagaaggagagtgctgctaagctcccgcctgctgcaggacgacaggcgggtgacacccacgtgccacagctccacttcagagcctaggtgttctcggtttgacccagatgttagtgggagtccagctacctgggacaattttgggatctgggataaccgcattgatgagccaattctgctgccacccagcattaagtatggcaagccaattcccaaaatcagcttggaaaatgtggggtgcgcctcacagattggcaaacggatagagaatgaagatcggtttgacttcgctcagctgacagatgaggtcctgtactttgcagtgtatgatggacacggtggacctgcagcagctgatttctgtcatacccacatggagaaatgtattatgtatgtacaatgactttcactcctgactttgcagttcctatacttcctacttaaactttcaccctttggctgaggcttccagcgtaaacatagttacttgagtggttgcatgctgctgcttcacgaatgagcagtagtttaagtgtgccatttattacttatggttatcacaatttcagaaatgcatgttttaacaactcccctggggaaagcattaaccaaaatctatagcacttaatttgtgatcattttaagtgaagtggcataatgtacatga

SEQ ID NO: 249238 - DNA, 946 bp, Homo Sapiens
  misc_feature (485)..(521): n is a, c, g, or t
ttggcagcattatccagtacttcagtgttactctgctgtattctatcttaagtaacctaggagacttccagtttctcttcattgatctggcaatcattttggtagtggtatttacaatgagtttaaatcctgcctggaaagaacttgtggcacaaagaccaccttcgggtcttatatctggggcccttctcttctccgttttgtctcagattatcatctgcattggatttcaatctttgggttttttttgggtcaaacagcaaccttggtatgaagtgtggcatccaaaatcagatgcttgtaatacaacaggaagcgggttttggaattcttcacacgtagacaatgaaaccgaacttgatgaacataatatacaaaattatgaaaataccacagtgttttttatttccagttttcagtacctcatagtggcaattgccttttcaaaaggaaaacccttcaggcaaccttgctacaaaaattannnnnnnnnnnnnnnnnnnnnnnnnnnnnnnnnnnnnatattattcatcatgttgtatccagttgcctctgttgaccaggttcttcagatagtgtgtgtaccatatcagtggcgtgtaactatgctcatcattgttcttgtcaatgccttgaatttaaacacacagaaggaagttattaaagcagcacggccttccctgataaggtttggcacacaggaaatactaggagtcttagaggtaaagggagatgccactgaagcttcgagctccgataaggaaatgcctccgtgtgccctcttcaaagcaccacaatcatttgcgccatcaccacacatcccaaccaaataatcacattttgcatgcttctatcaactgtgtcttctgatcaggtgccatacgggcaacacggtgccatgcaacatcaacttagacagtatctttagagctccggggatcctcta

SEQ ID NO: 249239 - DNA, 894 bp, Homo Sapiens
ttggctggtgtcaaccctgacagcccagtcccggcttcacctgcagcgaacccggagcgttgctatcctccaccggactgtcaggctctgcgcgccccgcggaggtcggcggcgaccagcagcgactgcggagcgacggcgggcggccccgggcatgtacgcccccggaggcgcagggctgcccggcgggcgccggcggaggagcccgggaggcagcgctctgcccaagcagccggagcgtagcctggcctcggccctgcctggcgccctgtctatcacggcgctgtgcactgccctcgccgagcccgcctggttgcacatccacggaggcacctgttcgcgccaggagctgggggtctccgacgtgttgggctatgtgcacccggacctgctgaaagatttctgcatgaatccccagacagtgctgctcctgcgggtcatcgccgccttctgtttcctgggcatcctgtgtagtctctccgctttccttctggatgtctttgggccgaagcatcctgctctgaagatcactcgtcgctatgccttcgcccatatcctaacggttctgcagtgtgccaccgtcattggcttttcttattgggcttctgaactcatcttggcccagcagcagcagcataagaagtaccatggatcccaggtctatgtcaccttcgccgttagcttctacctggtggcaggagctggtggagcctcaatcctggccacggcagccaacctcctgcgccaactaccccacagaggaagaggagcgggcgctggagctgctctcagagatggaaagagaacgagcccttcccggcggaatatgaggtcatcaaacagttccagccaccctctcattacacactctaatgccagccctggtttgcgaat

SEQ ID NO: 249240 - DNA, 739 bp, Homo Sapiens
ttgggtaagatggcggccccgcggcgagggagaggatcctccacagtgctctcttcagttccccttcaaatgctgttttatctcagcggaacgtactacgccctgtatttcctcgccacgctcctgatgatcacgtataaaagtcaggtgttcagcatatcctcaccgctacactggtcctcgatcttgctctgctgtttctgatggggattctagaagcagttcggttatacctgggcaccaggggcaacctgacagaggctgagaggccgctggccgccagcctggccctcacggctggcaccgccctcctctctgcccacttcctgctttggcaggccctagtgttgtgggcggactgggccctcagcgccacgctcctggcccttcacggcctggaggccgtcctgcaggtggttgccatcgcggccttcaccaggtagctacggacacccgggataccccacactggggccctcctcctgggcctgaccagtcccccagctgtcacctccccattcctggacaggaagggcacttttcctagtgactggccatagatggttttggatggttccatctgttctggcaggagtgggagcaggagccagggcagaaaaaaactgctggaggccctggtgttgggaacagctgcggggagggtagggaccagacagaactgccttcaagatgagtcccaggagcgcacactcagccctgtcagtggggtctggcttta

SEQ ID NO: 249241 - DNA, 706 bp, Homo Sapiens
  misc_feature (42)..(43): n is a, c, g, or t
  misc_feature (51)..(51): n is a, c, g, or t
taggtagtggagggacagggcggtcgctctgcactgtcaggnnacagccgncaagcccacccgcaaaggtgtctaaaaacttcagcttttcacccacctgcccctttctttcaatcccacgctgtttcctttcaaagttctgggaggacgaactcaccgaggcgagaagtgtaacattctctccacccagcttataaaaggattctttactgtgccagcacggggattggatccgaagaaactggctactggggtttggcccccgagtggccgtccctgtgggagatgcaccccattcttgggcccccctcattccctttccgaaaaaggaaaacttgcgtttgagccgttgagctaattctgcaattttctaccaaacagagcgctggtggccccgggagcagggctgtgacattggctggtggagcccccttcctgtgttctccctttgttccagcgccgcgatggtgagatcactgttccaagcagggggacggctcgcgataggacaaagagagcaggacctccagactctggggagccctgcagaccttgacaatttgcctgactcattcctgacctcttgtcattttggcctgaaggctacaaattcagggtcagctgtatgcactaagtcaaataatgaatttcttcctccctctcgcaaccgaccaaaattttgacaacgatgatgttcaccagaagg

SEQ ID NO: 249242 - DNA, 1219 bp, Homo Sapiens
  misc_feature (999)..(999): n is a, c, g, or t
  misc_feature (1087)..(1087): n is a, c, g, or t
  misc_feature (1132)..(1132): n is a, c, g, or t
ttgggttcgagcgggtcattgaccagcacggctgcgaggccatcgcgcgcctcatgcccaaggtcgtgcgcgtcctggagatcctggaggtgctggtcagccgccaccacgtcgcgcccgagctggacgagctgcgcctggagctggaccgcctgcgcctggagaggatggaccgcatcgagaaggagcgcaagcaccagaaggagctggagctggtggaggatgtgtggcgaggggaggcgcaggacctcctctcccagatcgcccagctgcaggaggagaacaagcagctcatgaccaacctctcccacaaggatgtcaacttctcagaggaggagttccagaagcatgaaggcatgtcagagcgggagcgacaggtgatgaagaagctgaaggaggtggtggacaaacaacgcgacgagatccgcgccaaggacagggagctgggcctgaaaaatgaggacgttgaggctttacagcagcagcagacacggctgatgaagatcaaccatgaccttcggcaccgggtcacggtggtggaggcccaggggaaagccctgatcgaacagaaggtggagctggaggcagacctgcagaccaaggagcaggagatgggcagcctgcgagcagagctggggaagttgcgagagaggctgcagggggagcacagccagaatggggaggaggagtctgagacggagccggtgggagaggagagcatctccgacgcagagaaggtggccatggatctcaaggaccccaaccgcccccggttcaccctgcaggagctgcgggacgtgctgcacgagaggaacgagctcaagtccaaggtgttcttgctgcaggaggagctggcttactataagaggtttccacatgagaccacaagcaacatgagaccagaagtcttatttatcttgtccatggctaagttcccagcacttagaatggagcttggcacacatgaagaaatggaagaggaaaaccgaataccccaanccccaaccatcggccacccgaggacgtccccccagccggagtcgggcatcaagcgactgtttagcttcttctcccgagataagaagcngcctggcaacacacagagaaacgtgcacatccaggagtcctttgnacagtgggcaaacacccaccgcgatgacggttacacagagcaaggacaggaagccctgagcatctgtgaccttggccaacattacgg

SEQ ID NO: 249243 - DNA, 911 bp, Homo Sapiens
ttgggacagaggcaaaaatctgctaactcagggggcagactcaaccaagactgtgagcaggcctggggaatgaccccccgatctccaaccagtgccttccgcagctgcacggctgtctccagctgtctctgcccctcttcctggccctggctccatctctctgtcacctcacccttccctgtgccacatgggccctctctctcctgccaggacgctgcggctctggggacctcggagcctgggggtggctctgggagtcttcatgaccattggctttgcactccagctcttgggagggcccttccagaggaggctacctgggctacagctccgacagccctcggccccatccctacgaccagcccttccgtcctgcccaccccggcagcgactggtgttcctgaagacacataaatccgggagcagctctgtgctgagcctgcttcaccgctatggggaccagcacgggctgcgcttcgccctccctgcccgctaccagtttggctacccaaagctcttccaggcctctagggtaaaaggctaccgcccacagggtggaggcacccagctccccttccacatcctctgtcaccacatgaggttcaacctgaaagaggtacttcaggtcatgccttctgacagcttctttttttccattgtccgagacccagcggctctggctcgctctgccttctcctactataaatccacctcatcagccttccgcaagtcaccatctttggctgccttcctggccaatcctcgaggcttctacaggcctggggcccgtggggaccactacgctcgcaacttactatggtttgactttggcctgccctttcccccagagaagagggccaagagagggaatattcatccccccagagaccccaaccccccacaagcttgca

SEQ ID NO: 249244 - DNA, 1045 bp, Homo Sapiens
  misc_feature (67)..(67): n is a, c, g, or t
  misc_feature (299)..(353): n is a, c, g, or t
ttcctttttttcccaaaggccaaggtttgcaccggggccacggaagggaccttggcctggcttcttnccttcccgcagcgcgagcttaggcagaagtgtcattgggctcaggaaccctcagatggcccaagaatgacccaggaaccctgagaaggcccaagagtgacccaggagccctcagatggcccaagagcaccccgagtggggagggatccagggtgattcccagccccgagaaaggaagccccattccgggagggtgactgtccccgagcggggggatgactgtccccgagcannnnnnnnnnnnnnnnnnnnnnnnnnnnnnnnnnnnnnnnnnnnnnnnnnnnnnngtccccgagcaggggggtgactgtccccggttggaaggtgactgcccactacagcaacaaacgttctcctgagcagcctggggaacgctttcctccctccgtgccggaggctggtggggctgagtctccgccgctccctgggtgctaaatcctggaacatcttcaaagagtttcagtcccttctcttctgcacacaccattgttctcagggtggcagggcacccccttcctccacccagggcagggggagcacggggtctcacctctcacgcccagacctcccttggcttgtggtggccttgactggagagggcgaggggacatagagccctgtgtaggggtttctcattcccccaagacatagctcgcatgccttatgtaacgcgtgagctcacgcagagggcctgccagaaatgacggcaggggcgggaggggcctgctcgggaagccaagtgtggctcaggcttacgaggagcctgggccctgccttgaggagagaggggccccgggcctttgcaacctggggctcccacactggcaggggatgggcagggcctgggagggagcgaaggccgtggtggtgcagtgtatggcaaggcctggggtggctgtgctggtcacttggcctgtgggtgcctggccaagcaggatgtggggtcaggcccaccccactcccccactagcaggcacca

SEQ ID NO: 249245 - DNA, 835 bp, Homo Sapiens
  misc_feature (756)..(756): n is a, c, g, or t
  misc_feature (812)..(812): n is a, c, g, or t
  misc_feature (821)..(821): n is a, c, g, or t
ttggggctcgggcggctgggatggagcagaagggcgcggagcaccggagggcacgcagctgacggagctgcgctgcgttcgcctcgtttgcctcgcgccctccactggagctgttcgcgcctcccggctcccaccgcagcccacccggcagaggagtcgctaccagcgcccagtgcgctctgtcagtccgcaaactccttgccgcccgccccgggctgggcaccaaataccaggctaccatggtctacaagactctcttcgctctttgcatcttaactgcaggatggagggtacagagtctgcctacatcagctcctttgtctgtttctcttccgaccaacattgtaccaccgaccaccatctggactagctctccacaaaacactgatgcagacactgcctccccatccaacggcactcacaacaactcggtgctcccagttacagcatcagccccaacatctctgcttcctaagaacatttccatagagtccagagaagaggagatcaccagccctggttcgaattgggaaggcacaaacacagacccctcaccttctgggttctcgtcaacaagcggtggagtccacttaacaaccacgttggaggaacacagcttgggcactcctgaaatcaggcgtggcagctacactgtcgcagtccgctgctgagccttccacactcatcttccctcaagcttcagcctcataccctcatcctatcaaccttaccacctgaggtcttttctggcttcgntactaccaaccatagcttcactgtgacagacccaacccactgggagcttcaactgnaccagagtncccgacagaggagt

SEQ ID NO: 249246 - DNA, 1028 bp, Homo Sapiens
aaatctccataagccttcattgtttctggctttgttgatgagcgtccccacacatacgtgaatgcggtcgccctgaacgtttccccacaaatccagaatttgacagcagggatcccaggggcacttggctgtcctgtgccgccctttgcaatccgggctgaggggttttctgggccaagttaacagcggatggtgcctcacagcagaggcctgaaagcacctgctgcgtgggccataaacacagtgtgctcagacacgcagagacactggttcttacccactcccaagggtgggataacgctgcaccttgcacttgtgggatgaggaatgaggctcttctgctgggcagggcctgggcaagggggaagcttttatagaggaacccgcatggccccggagtcctcccctcttagcccctggcctgagtccccagccagcaacccagggtagctgttctgaagcagaggggctttgttccattgtgtttggaagcccagaagtcaccttgtggcttagggtgacatagggacctacacacagaggagtgaacttagggttctagggactatggccgggtcaccggtggccaggggcagagatgagcacctgtccatgtaagccatatgccacccccacagggcctggcaaggtgcagagggtgcaggtctcggccatgtacccctttgcccctttctgagaggggcagatgcccagcccagtgacccagagcctcaccccaggaagcgggtccatgcagcaaatcagccaggcactggcatggtggcccccaggcctccaccgcctcaccagtccctgttcaatctgctgataacgcctttcctcccttgcaggtctgtgcagacttttgcagacaaatcaaaacaagaagctctgaaaaatgacctggtggaggctttgaggagaaaccagccatgctaaacctctgtttcatgctaaccagacacgccgtgcactcgttagaattcctttccttagaaaactcgttttctgctcccttccctcgtccc

SEQ ID NO: 249247 - DNA, 1563 bp, Homo Sapiens
  misc_feature (1532)..(1532): n is a, c, g, or t
ttgggacctttccagtgcagccagtgtagtatgggtttcattcagaaatacctactacagagacatgagaaaattcatagtagagagaagccatttggatgtgatcagtgcagcatgaagtttattcagaagtaccatatggagagacacaagaggacacatagtggagaaaagccatataagtgtgacacttgccaacagtatttttcaaggactgatagattgttgaagcacaggcgcacatgtggtgaagtcatagttaaaggagccactagtgcagaacctgggtcatcaaaccataccaatatgggtaatctggctgtgttgtctcagggaaatacaagttcttcaaggagaaaaacaaagtcaaaaagcatagctattgaaaataaggaacagaagaccggtaaaacaaatgaatcgcaaatttcaaataatataaacatgcagagttactcagtagaaatgcctaccgtgtcttccagtggaggcataattggcactggaatagatgaactgcagaagagggtgccaaaattgatctttaagaaaggaagcagaaagaatacagataaaaactaccttaactttgtgtcaccattaccagacatagtaggacagaaatccttgtctggaaaaccaagtggctcacttggcatagtatcaaataatagtgtggagaccattggtcttctccaaagtacaagtggcaaacaaggtcagataagtagtaattatgatgatgccatgcagttttcaaagaaaagaagatatttaccaactgccagcagcaacagtgccttttctataaacgtaggacacatggtctcccaacagtctgtcattcagtctgcaggtgtcagtgttttggacaatgaggcaccattgtcacttattgactcctcagctctaaatgctgaaattaaatcttgtcatgacaagtctggaattcctgatgaggttttacaaagtattttggatcaatactccaacaaatcagaaagccagaaagaggatcctttcaatattgcagaaccacgagtggatttacacacctcaggagaacactcagaattggttcaagaagaaaatttgagcccaggcacccaaacaccttcaaatgataaagcaagtatgttgcaagaatactccaaatacctccaacaggcttttgaaaaatccactaatgcaagttttactcttggacacggtttccaatttgtcagtttgtcttcacctctccacaaccacactttgtttccagaaaaacaaatatacactacgtctcctttggagtgtggtttcggccaatctgttacctcagtgttgccatcttcattgccaaagcctccttttgggatgttgtttggatctcagccaggtctttatttgtctgctttggatgctacacatcagcagttgacaccttcccaggagctggatgatctgatagattctcagaagacttagagacttcatcagcctttcagtcctcatctcagaaattgactagccagaaggaccagaaaacntagagtcttcaacaggctttcagattccatc

SEQ ID NO: 249248 - DNA, 820 bp, Homo Sapiens
  misc_feature (13)..(13): n is a, c, g, or t
ggcgatgaaggcntacgggaagactataaagatcctgcaattaagtaaaagtgcagttttaaagtgtctcctggatattcacaaaatttttcaggaaaatgacccagcgtacatactgaatgatctctacatctcatactactgtgtgtggattcagaaagtcaaatccaaaacgttggcagctcttgcagaagccttaaaggaagtctcccttacaaaggcccagttggggttagaactggaagaactagaagcagcagcacttcttgtccaggaggaagaatctgcattacaagcagcccattcagtttctgggcagcagacactttgctgcagctctgaggcaggtgattcggaggactcagacagcagtgtgtcatctggaaacgaagactcaggctcagattcagaacaagatgaactcaaagatagtccatctgagacagtcagttctttgcaaggtccctttcttgaagaaagcagtgcctttcttattgttgatggtggagtatgcagaaacacagccatccaggagtctgatgccagtcagggaaagccacttgcctcttcctggcctcttggagtgtctgggcctctgatagaggagcttgggggaacaactgaagactaccgttcaggtttttgaacccgagggcaccactgctgtaaaccgcagcaatattcaggagagagacggctgtcagacaccaaataattgactcttaggtggttttattcattgttgagaaatatggtagattgggtttcatttaccgaatgagaattcttcattttcactttgtaatttttcttagtatat

SEQ ID NO: 249249 - DNA, 853 bp, Homo Sapiens
ttggcccgattccctgccccggccggccccgcctcggctccgcaccctcgccccgctctcagccgccgctctgccccgcagcagccagccccgtgtccggcagtatgttcagctgggtcagcaaggatgcccgccgcaagaaggagccggagctcttccagacggtggccgaggggctgcggcagctgtacgcgcagaagctgctacccctggaggagcactaccgcttccacgagttccactcgcccgcgctggaggacgctgacttcgacaacaagcctatggtgctcctcgtggggcagtacagcacgggcaagaccaccttcatccgacacctgatcgagcaggacttcccggggatgcgcatcgggcccgagcccaccaccgactccttcatcgccgtcatgcacggccccactgagggcgtggtgccgggcaacgcgctcgtggtggacccgcggcgccccttccgcaagctcaacgcgtttggcaacgctttcctcaacaggttcatgtgtgcccagctgcccaaccccgtcctggacagcatcagcatcatcgacacccccgggatcctgtctggagagaagcagcggatcagcagaggctatgactttgcagccgtcctggagtggttcgcggagcgtgtggaccgcatcatcctgctcttcgacgcccacaagctggacatctccgatgagttctcggaagtgatcaaggcttttgaagaaccatgaggacaagatccgcgtggtgctgaacagggcagaccagatcgagacgcagcagctgattcgggtgtatggggccctcatgtggtttttgggcaagatcattaacacccccgaggggg

SEQ ID NO: 249250 - DNA, 1353 bp, Homo Sapiens
  misc_feature (1320)..(1320): n is a, c, g, or t
  misc_feature (1331)..(1331): n is a, c, g, or t
  misc_feature (1343)..(1343): n is a, c, g, or t
ttggctcaggcagtgatctctctcatcgccccaagcgccgtcgcttccatgaaagctacaacttcaatatgaagtgtcctacaccaggctgtaactctctaggtgagagcacagagccgggataagcagatagaagaaaggatgctgtctcacaggcaagatgacaacaacaggcatgcaaccaggcaccaggcaccaacggagaggcagcttcgatataaggaaaaagtggctgaactcaggaagaaaagaaattctggactgagcaaagaacagaaagagaaatatatggaacacagacagacctatgggaacacacgggaacctcttttagaaaacctgacaagcgagtatgacttggatcttttccgaagagcacaagcccgggcttcagaggatttggagaagttaaggctgcaaggccaaatcacagagggaagcaacatgattaaaacaattgcttttggccgctatgagcttgatacctggtatcattctccatatcctgaagaatatgcacggctgggacgtctctatatgtgtgaattctgtttaaaatatatgaagagccaaacgatactccgccggcacatggccaaatgtgtgtggaaacacccacctggtgatgagatatatcgcaaaggttcaatctctgtgtttgaagtggatggcaagaaaaacaagatctactgccaaaacctgtgcctgttggccaaacttttttctggaccacaagacattatattatgatgtggagcccttcctgttctatgttatgacagaggcggacaacactgggctgtcacctgattggatatttttctaaggaaaagaattcattcctcaactacaacgtctcctgtatccttactatgcctcagtacatgagacagggctatggcaagatgcttattgatttcagttatttgctttccaaagttgaagaaaaagttggctccccagaacgtccactctcagatctggggcttataagctatcgcagttactggaaagaagtacttctccgctacctgcataattttcaaggcaaagagatttctatcaaagaaatcagtcaggagacggctgtgaatcctgtggacattgtcagcactctgcaagcccttcagatgctcaaatactggaagggaaaacacctagttttaaagagacaggacctgattgatgagtggatagccaaagaggccaaaaggtccaacttcaataaaaccatggatcccagctgcttaaaatggacccctccaagggcacttaaagtgacctgtcattccgagccagcgaaccccacagtagggaatnccgacccctanggatctggctgncattctctgg

SEQ ID NO: 249251 - DNA, 1084 bp, Homo Sapiens
  misc_feature (831)..(831): n is a, c, g, or t
  misc_feature (990)..(990): n is a, c, g, or t
  misc_feature (1034)..(1034): n is a, c, g, or t
  misc_feature (1048)..(1048): n is a, c, g, or t
ttggctctcctcttcactgcatcttaagaaagtgtgatttaataagcatcctgtattgctgtaaggcctctcatttcaaaacaaagccttggctagcagagagatagacatagagcttactgtaatagtgtatggcaagtgtgtatctaagaagagaaactaattccttctcagtgggagagtgtgtctgttatggaaggcttcatagaggagggatgcagtggagtctgcaaggctaagtgtgcagtgggcaccctaactcatcatgccctcccctctctggcagtgactcgccataatcacctcaaggacttcatgctggtggtgtctatcgttattggtgtgggcggctgctggtttgcctatatccagaaccgttactccaaggagcacatgaagaagatgatgaaggacttggaggggttacaccgagctgagcagagtctgcatgaccttcaggaaaggctgcacaaggcccaggaggagcaccgcacagtggaggtggagaaggtccatctggaaaagaagctgcgcgatgagatcaaccttgctaagcaggaagcccagcggctgaaggagctgcgggagggtactgagaatgagcggagccgccaaaaatatgctgaggaggagttggagcaggttcgggaggccttgaggaaagcagagaaggagctagaatctcacagctcatggtatgctccagaggcccttcagaagtggctgcagctgacacatgaggtggaggtgcagtattacaacatcaagaagcaaaatgctgagaagcagctgctggtggccaaggagggggctgagaagataaaaaagaanagaaacacactctttggcaccttccacgtggcccacagctcttccctggatgatgtagatcataaaattctaacagctaagcaagcactgagcgaggtgacagcagcattgcgggagcgcctgcaccgctggcaacagatcgagatcctctgtggcttncagattgtcaacaaccctggcattcacttactggtggctgcctnaacatagaccccanctggatggcagtcacgccccaaccctgttactttat

SEQ ID NO: 249252 - DNA, 1526 bp, Homo Sapiens
  misc_feature (1433)..(1433): n is a, c, g, or t
  misc_feature (1441)..(1441): n is a, c, g, or t
  misc_feature (1447)..(1447): n is a, c, g, or t
acaaaaaagttggcctttttggagcccatggaggacgcaagtcagtgattcatgttctgccagatgaggtcgagcactgccagtctattctgttctccatgctgccaagagcgtcgacatctaaagaaattgatgctggacttctttccattatttccttcccggcctttgcagtggaagatgtaaaccttgtaaatgtgaccaaaaatgaaattatttctaagctccaggggcgttatggatgctgtcgcttccttcgagatggttataaaactccaagagaggaccctaatcgactgcattatgaccctgctgaactcaagctcttcgaaaacattgaatgtgagtggcctgtgttttggacatattttataatagatggagtcttcagtggtgatgctgttcaggtccaagaataccgagaggccctggagggaatactcatcagaggcaagaatgggatccgcctggtgcctgaactctacgctgtcccgcctaacaaggtagatgaagagtacaagaatcctcacacagtagaccgagttcctatggggaaggtgcctcatctgtggggccaatccttgtacatcctcagctcgctgttggcagagggattccttgccgctggtgaaatcgatcccttaaatagaagattttccacttcagtcaaacctgatgttgtagtacaagttactgttttggcagaaaacaatcacattaaggacttattgaggaaacacggggtgaacgtccagagtatcgcggacattcatccaattcaagtccagccgggccggattcttagtcacatatatgccaagcttggacgggaataagaatatgaatttgagtgggcgaccgtatcgacatattggtgtccttggaacctctaaactatatgtgattagggaccaaatctttacttttacaccccagttcaccgaccagcatcacttctacctggccctcgacaatgagatgatcgtggagatgctaaggatcgagctggcctacctgtgcacctgctggaggatgacgggcagacccacactcaccttccccatcagtcgcaccatgctcacaaatgatggctcagacattcattctgctgtgctctccacaattagaaaactagaggatggatattttggaggagccagagtaaaattagggaacctttcggaatttctcaccacatcgttctacacatatctgacttttctggatccagactgtgatgagaagttgtttgacaatgccagcgaagggactttcagtcctgatagtgattcagatttggtaggatatctggaagacacctgtaatcaagaaagccaagacgaacttgaccattatatcaaccaccttctgcaaagcacatcgttgaggtcctatctgccttctctttgtaagaacacagaagaccggcatgncttcaagngctatncacttcacgcgggacatactttctgggatggcaaaagccaaagggtttggaagttccatttggtcccatgactttgccg

SEQ ID NO: 249253 - DNA, 946 bp, Homo Sapiens
  misc_feature (374)..(409): n is a, c, g, or t
ttttccccattcctacccaagaacacaggggtgggggagagagaaggctctctttgtcaaaaagcagttatctacatttcagaagaaaaagcagagacaatcacggttatatatcaattgcttggcagacagagtgacgaagactcacttggagcacatgtgctttctcctccccttttgtccttctcttatttcaaacagccacatgtcaaagtccagccactcttaagacacatggccaacttccaggcttcacgaaactcactgcctttttgcacaaagtaaaaaccaccacagcttctgtctgtggcccctctgctacaactaaactctcagacagtgagagggagaaacaccataacgtgcaaacacgnnnnnnnnnnnnnnnnnnnnnnnnnnnnnnnnnnnntactcgcactcccttcgctggtgccaccatgcacagaaacactaaggtcacaactagtattaacacttcacattatgagtattgtttcaaaagagaagcgattcatggaattaaaacatccacaagagtgattcctctggtgaagatgaagaagctgaagatggagaggtcgcggggtcacgattgtgcgtgcgggatccactgactgtccattggccggcccaggagctcctccacacgccgcgctacgtccattgtgtcctccagatcgaagtccccatcggtgtcaaggactgagtcagggcttgggagggaaagaagagggatgaagggaaggggaaagcctgccagagaccaccccaagccccacaggccaccaggggagcagtctgagccagcctatgccctcagcctggggcttcatgggaaaagaacaaccattcaaacagctggctgtacagcaactcagactgaaataccctcccctgttacctctcacaccggctgtccagacacatcacaagtccactcagccaa

SEQ ID NO: 249254 - DNA, 1017 bp, Homo Sapiens
  misc_feature (91)..(91): n is a, c, g, or t
tccttattctttcatgaggaaatgtcgaagattatgaaagaagcaaaataggtcccttcccttatatttaaatggtgaccatttgcaaaanccatgacttaatagaccaagtggaaaatagatgccctgagcgatataaatgcatataaaaataggcactgaaacatcaatcagtatgtctaaacctatatatttatgttaagctatttcacatgtaaggtttttaaagaatctgggagttccccaggcaagcaagttcttggaacccagtatttttgctggattcccatagaaagatatctcttcaataccagttctacttcatttcttccctgggaccagtcagatatgctccttcccccaggaaacatattcccccaggaacaatgacaacaaaaaaggatctttgaattatccctcagatttgtaattttggacactctttactttgtcacactaaaaataacccagaaattgaaatctaggtaattgtagctattcctacttttaatcttagatattctttacttcgctgttccttacttgatcccttttttcttctttttaaatctagaaattaagatctaggtaagttttagtcatgggttaggtacaggtacacttgacgaaaaatttcccacaagcaacaaacaagaaatagacaatgcctattttgagagatgctttagaaaacacatatcaaattctaaaccccttacgccatcatctgcttactgacagcagtaagagctgctaaatgatttcggtgtttgggtgtctgaatgctgatagcagagcatatgtttgcaggtacacaatattttctttttatgagaggcgaaggaggaggaatggaatgatggctaggcacaactgctctcttaaaataataaaccttaaaatgtctctagtcaaccacagcatacctattttgctacaaacatatctactttcaccatacttccacctctcatgctggcttccatttacctcccaggacagtggtgctaaggccaa

SEQ ID NO: 249255 - DNA, 1104 bp, Homo Sapiens
ttttttctacctgcagagcacggttcccataagggcggcgagatcagcctcctgtctcatctggaagaccaccactctggggtctcagaggaatgatggaagccttggggtttctaaaattggaagtgaacggccccatggtgacggtggccctgtcagtggctctcttggccctcctgaaatggtactccacatcagcattctcaagactggagaagttaggcctcagacatcccaagccttctcctttcattggaaacttgacatttttccgccagggtttttgggaaagccaaatggagctcagaaagctgtatggacctctgtgtgggtactatcttggtcgtcggatgtttattgttatttctgagccagacatgatcaagcaggtgttggttgagaacttcagtaactttaccaacagaatggcgtcgggtttggagttcaagtcggtagccgacagcgttctgtttttacgtgacaaaagatgggaagaggtcagaggtgccctgatgtctgctttcagtcctgaaaagctgaacgagatggttcccctcatcagccaagcctgcgaccttgtcctggctcatttaaaacgctatgcggaatctggggacgcatttgacatccagaggtgctactgcaattacaccacagatgtggttgccagcgtcgcctttggcaccccggtggactcctggcaggcccctgaggatccctttgtgaaacactgcaagcgtttcttcgaattctgcatccccagacctatcctggttttactcttatcatttccatccataatggtcccactggcccggattttgcccaataagaaccgagacgaactgaatggcttttttaacaaactcattagaatgtgattgccctgcgggaccagcaagctgccgaagagaggcggagagacttcctccaaatggtcctgggatgcccgacattctgcaagtcccatgggcgtgcaagactttgacatcggtcagagacggtttctcctctactgggggcaagccaacccttcccggcaacacagcccacccctatggccagggcctttgactggtggatgaaattgtggggcaggccttc

SEQ ID NO: 249256 - DNA, 552 bp, Homo Sapiens
  misc_feature (475)..(475): n is a, c, g, or t
  misc_feature (481)..(481): n is a, c, g, or t
  misc_feature (486)..(486): n is a, c, g, or t
  misc_feature (508)..(508): n is a, c, g, or t
  misc_feature (519)..(519): n is a, c, g, or t
taacagaccaaagcgttatgagtccccaaaggagggaagccaccctgcaatggaatggcagaaccaggatgggtgaacctgaagtctcaggtgtcaagacatcggcacacagacagcttggtctctcctaccgacaagcacatctgtggccctgctgcacatatgggcagagggtggttggcacgtcctgcctcggcatgttccagcatccccacaggaccctatacctggcagcccctacatcatttactgcttctgtgacagatggagacccaatagagtttcctaagagggagaaagagtccacagcaacccccaccctcaattccagggcctcttggtacgggtcctaacttgtgtcatgcccaggccaggtgctgtcaccctttcttccaccagagtccctgcacacaagccaaaacccgcttttcaggttcatcggaattatcctgtggtaggagcaaacctgactttnttaaanccttnctgcttgacacaaggggacccntaaactttganaaggggctgccaacaggaggatgccaggaagcc

SEQ ID NO: 249257 - DNA, 1147 bp, Homo Sapiens
  misc_feature (71)..(102): n is a, c, g, or t
  misc_feature (184)..(184): n is a, c, g, or t
atattatagcctcttttagctctttaagtcttctatgggtttaatgggaggctttagtggtgtatagaggnnnnnnnnnnnnnnnnnnnnnnnnnnnnnnnngcgtgtgaaatggatttattttattctacaaatgaaatgaataaaatcacctgaaatggaacggaatggctacagcgagtgnccaaagaccacaaaactgtttcctgacatgtgcttagcatatttaaattgttctcacagtatcatcctgagagcagagagagcagtccaactgctccacaggactgcagagagggaaccaatccatctattttctcaataattgtgatgacagagatgggaatgctgattgccaaatcccaaacacatacggggcctctcacccaaaggccatgatgcctttgtcttaataacagaataaacccaatcctgtccaaacagcttcttcagggtgcatgtttttgaatggggcaaagattagctttttgtgggaggcttttccaggataccggacaaaagcatgccctagagactcactaggtagattcaaatattctttctaccatttactaactgcttgatcttagtcaagttacataaaaggggctgtgtggggaggaggggctctgttcccacatctgtcaaagtaggaataacaataacacctaactcagaaggtggctgtgaggactgaatgagttactacctgtgaagtacatggtatactgtaggtgcttaatgtcacctattaatggtggtggtgatgatgatgtaatttgctcaggaacaacaaaggaggtataaaaaatccccccattttacagttcctgtgatgtaacatattttctgaatagggctttatatttattccatttttgtgccaggcctatagcagtgttgggagcgaaactctagcaggatccttcttacatgcagaaaaggttcattttacacttgccaataggaatgaaactatttcgctgccacaatagctaactgtttttctaaatggcctatttcgtcaacaacaatcaggaaagtgtaggaaggtacaatctctaatgattgtagcccgtgcttaaggtgaggaaaaaagtcaaaaaattacacatgagaaacctgaatccaggcagatcttacccaa

SEQ ID NO: 249258 - DNA, 943 bp, Homo Sapiens
  misc_feature (153)..(185): n is a, c, g, or t
  misc_feature (324)..(333): n is a, c, g, or t
  misc_feature (368)..(422): n is a, c, g, or t
cccatttttgctacaaccacaacaaacactttgttgttcttcaaatgcaccaagctctcttcagcagtgttttgtagtgcgtataggacatctttgaaatattctggatatttaacctttgtcttcttggcatgttaaaaatatcttctggcnnnnnnnnnnnnnnnnnnnnnnnnnnnnnnnnnaagtggtgagattacatgtgtgaaccatccacccaccctgattcaactgactcttaactttaaaaatcacattggtcttaccatacatagttcatcaattgtgggagagaaacttgggtgtcatgctttatttatttannnnnnnnnngagacagagtgagacactatcttaagaaaaaaaannnnnnnnnnnnnnnnnnnnnnnnnnnnnnnnnnnnnnnnnnnnnnnnnnnnnnnaatggctgtaccctatattcttcttgatttctagccttttattggctctcagattgccagagttgggactcaatagtaagtaaccattttgttgaggtggtagtgattctaccagggtgagttatcatgacagcagaatcactgcgtttttctctctactctgtggcatagactctatgccatagagtgacgtgtgaaaggcttgaggctccctacctacgagacaccctggtccattctagcagtatggcacgtgctgactgggttttgagtctcttgctgtaaaatcacattactgcacttccctgcattttctcatccaaaaatggggattacctgctttgtggatcggtttgcagatgaaataacacacgcagggtatctagcatggtccctcacatggcacattcagtgttagccacacttccatactaactgccctgcggggatatttaatgagctcttaaatggcagaaatgttgtgtcttttcctgttcccttagtattcctatttttgttgg

SEQ ID NO: 249259 - DNA, 962 bp, Homo Sapiens
  misc_feature (566)..(665): n is a, c, g, or t
ttggcgccattcttgccagtacacctgccagcctacagaggaagccagatcggggaagccaggaagttttagtgaagcccccagcatgaccctattgtctcccctttcacccagagcaccagcaactggtgaagtcttagaaacgtccctgatacaccaaaaaccatcccaggaagccagcatcgtccaagctgagaagtccaagctgagaagcctgaggctgtgacgtcagcctgctcggcaagaagctggggctgccgcagggttgccaggagatagatgcctttgcatactattaaaatatttttgcctgtctctaccaaagaaaaggaggaataagatcgccccaacatagttgcatggctgaagacaaaaatcaagtcgttgtggtggtcaagccacaattcctgcattttacatttcttctgtctttattgtattgcttcaattggcaaatcatgcttgtattcattcatggggtacaatgtggaatgaggaaatcccactacttagcatctccactacctcagagagaccaattccacgtgaggtcccagaagtgttgnnnnnnnnnnnnnnnnnnnnnnnnnnnnnnnnnnnnnnnnnnnnnnnnnnnnnnnnnnnnnnnnnnnnnnnnnnnnnnnnnnnnnnnnnnnnnnnnnnnnaggaccaaagtctcagggaggaggaagaggttttgacatgtagtgcacagcagagtgaccagagtcaatgagaatgtgttgcattttgcaaaacacctgagagagtccatgtcaaatgtctctctgcatttagattgcgaggacgaaggccctgaaggtccaagaacatttgaaacctgacagtggatgccaatggctgtggggaggagctgggtcgaggcgcccaggttgtcgtctgctcggcaacgtagggagcctgcagcactttcctggcaaagctctattttaatctttttt

SEQ ID NO: 249260 - DNA, 1234 bp, Homo Sapiens
  misc_feature (971)..(1099): n is a, c, g, or t
ttggtcatgcttctagcccccttgtattcttctaacaaaatttccagaagctggaccaccatttcaggatacttgggcttttcctagagtgacagacaaggagggggaatttcacatctttatattttctgtgaattcatctgcctccaattttataacactgactttgtgttacaaagaatttaatattgtaatgagcaaataagaaaaattagaaagagttctttgactcctggaagtacctgtatctttagctaagtagccctaggatgtacattaatattataccatctgaagcatatctttgtaaattaaataaacaagagacagaaaaattggcatatgatgtggttttaggttgcagcttcagtgtctgaaggtaattggcttttcagctttgttttatatccagtttgatttgtgaaagaatccttaggccttgactaggactcctctgttactatttgggagccagttggtgcagaaaagggacagtttctttttgctcctttggcgagaaggaatatactaagcaggtggtggaagtaaacctcagattgattgaatctgaggagcttcttacagtagctccccccggagtgctcttgacattttgggtatgccactttttcattgttcagtactttcccacatactacaggacatttataggtccttcacccacaaaatgccatttgagcctgcaaatcctcgtaacagccaaaaaatgcacagcatattttcagatgccccttagactgctaatactacctctggttgaaaaccactatcagggaaaatatttctaatccctgcctctgtaataccatattctgtacttttcttcctattttactctgccatgccctcatgttttcattgttatctctttttcatctttcatctttactaggcaataagaatcttagggatcacagattgactcttggctgggtgcggtagctcacacnnnnnnnnnnnnnnnnnnnnnnnnnnnnnnnnnnnnnnnnnnnnnnnnnnnnnnnnnnnnnnnnnnnnnnnnnnnnnnnnnnnnnnnnnnnnnnnnnnnnnnnnnnnnnnnnnnnnnnnnnnnnnnnnnatgccccgaagtcccagctacttggcaggctgaagtgggaggatcacttgagcccgggaggcagaggctgcagtgagctgagatcatgccactgtactgcagcctgagtgacagagtgagaccctgtctcagttt

SEQ ID NO: 249261 - DNA, 627 bp, Homo Sapiens
ggacagattttcatatgctacagagatctcatgtgttgctctccttattgtaacctgaatagagtcaagcttgggtttgcttggggtttcagacaaagacaggaactcaggatgagactcccaaaatgcccttgggtcatcttgtagaccattctgtgctttcactggcctggtcagcctcccctgtctttcttttgtcgtggatgcggatggcctgtggctgaacaagaatctggatttttaggaaccagtgacctttgaagatgtaacactgggttttaccccggaagagtggggactgttggacctcaaccagaagtccctgtacagggaagtgatgctggagaactacaggaacctggtctcagtgggtaaggctggcctccaggtcaagaaggatctgtgctttgtagcacaaatgtagcacctctgaagtatgtgtctgcttgggctcagactgcaggggcaccagtaggaaaagggcagcttttcagtatgacttctgaatcattgcctagtccatccctccctgaataccagggagatgggtctgtcagggatgttttcagctgcagtagtggatgcttattgttcttgcaacaagagttccggccaggcatggtggct

SEQ ID NO: 249262 - DNA, 907 bp, Homo Sapiens
  misc_feature (218)..(233): n is a, c, g, or t
ttgggaatagtttacgaccacaagagatttggcctccttggaacatgtaggaaggcctcaaggatgtaattctagcccagggaagaaaatccttttcagcagacgcttcccttcccttcccctagggaatgtgtccctactatagtaaactcttccttaagagagttttatgttttctctgtcagatcaatttgtttttcttaatgttgttcctatcnnnnnnnnnnnnnnnnggaagaaatacagtcctcagacctgacagtttcatttttccccccaagtagaagcaatagaaaccttagcagttccaagactcctggcactcacttttcctctccatctttaggtctaacccagctcagcccagagtaaagccttaaaagcctcacatgtgatttcctcttgcatttttttctgctagaagggtccacagtacttacctttatgcctcatctcaattgaagctggatgatgaggatagtgggcagtgattgcaattggggaatgcatgtactggatcacataaggtcatgaaagtccttgaaacagagccttgccaagcagaacccttgccactcatggtattcgatacagtctacccatctgacatgaaatgatattcttaatgagccattcctatggaagatagctattgccaggcacattcagtctcctggtctccctctcatagctatgtagggcctatgacctagaataaatgggaaaatgttatcaggaggaagagactgctggactcccctgagaggtagggtttgtgctaggagagctgggtgccatttatttcattttgatatatcaggtgctcctagtaacaattcctagtttctcttacctctgtaatcatcctgaatagtcactgcttcttgagctttggtgagtgttctct

SEQ ID NO: 249263 - DNA, 936 bp, Homo Sapiens
  misc_feature (69)..(171): n is a, c, g, or t
  misc_feature (245)..(399): n is a, c, g, or t
  misc_feature (475)..(529): n is a, c, g, or t
ttgggttcaatttctctccaacgattatttcatctcggtgcgacctcaggcatctttgctttcccagannnnnnnnnnnnnnnnnnnnnnnnnnnnnnnnnnnnnnnnnnnnnnnnnnnnnnnnnnnnnnnnnnnnnnnnnnnnnnnnnnnnnnnnnnnnnnnnnnnnnnngtacttgcaatgaagaaaatggtgaatggtacatacatggtaagtggtcaatacattttagtcattctattaannnnnnnnnnnnnnnnnnnnnnnnnnnnnnnnnnnnnnnnnnnnnnnnnnnnnnnnnnnnnnnnnnnnnnnnnnnnnnnnnnnnnnnnnnnnnnnnnnnnnnnnnnnnnnnnnnnnnnnnnnnnnnnnnnnnnnnnnnnnnnnnnnnnnnnnnnntcttaaaatcatcaccacgattctgaccttatggactttgaagggcagatgttgtgtctcattgctttcgtgtccnnnnnnnnnnnnnnnnnnnnnnnnnnnnnnnnnnnnnnnnnnnnnnnnnnnnnnntggtgacatggttcttaggagttaaaatgagaaaacccaaggagccgaaagcatgtctctacggggaaaggttagagagcactgactcaaaccatcgtctccaattatgcagttttaatgaggaagcaagcccaaccttgaacattatttaagccagagttatcccaataagcattttcctaccatgagtggtagattaagtagcattgagtcatgtagtgaaagtaatgtcccttcttcataccatttcaatgcctctggtaagtcaagagaaagtctttgataatagcctatttttaacacctctcacccttgtttgtcagaaagagcagacctcagattcagagactttagcaagcaaagatatccagtaaagaaatgaaataatggccgggcacagtggctca

SEQ ID NO: 249264 - DNA, 804 bp, Homo Sapiens
  misc_feature (48)..(358): n is a, c, g, or t
  misc_feature (495)..(511): n is a, c, g, or t
tacaggttgagccgctgcgcacggtcagtatttcctttatttatttannnnnnnnnnnnnnnnnnnnnnnnnnnnnnnnnnnnnnnnnnnnnnnnnnnnnnnnnnnnnnnnnnnnnnnnnnnnnnnnnnnnnnnnnnnnnnnnnnnnnnnnnnnnnnnnnnnnnnnnnnnnnnnnnnnnnnnnnnnnnnnnnnnnnnnnnnnnnnnnnnnnnnnnnnnnnnnnnnnnnnnnnnnnnnnnnnnnnnnnnnnnnnnnnnnnnnnnnnnnnnnnnnnnnnnnnnnnnnnnnnnnnnnnnnnnnnnnnnnnnnnnnnnnnnnnnnnnnnnnnnnnnnnnnnnnnnnnnnnnnnnnnnnnnnntacagagccttttaacatgaggtcaaaatactctcttctacctgttattacagcaatccaaaaaaagttatctattttcaaattaacaatctgagactctacttttagtagctaattagttgtatcacagggaaacnnnnnnnnnnnnnnnnnaaatatttaagagctcaaaggtatacaggcagaaagtggaaaatctcactactactttttattctaagctcacggtgtttcagatatctatttcacaaccaagaccatgaaacccatcatagtatttgtgactactatgaaaactatgacatgtcagtcagccttgctgcctgctgtgtgctgtatataagtccattacatattccttatagctggattgaaaacctgaaaatgaaatgaagtccctagagaaacttggccatgctggtgctttttaccaagtttgacaattt

SEQ ID NO: 249265 - DNA, 880 bp, Homo Sapiens
gggggcggcgagtcagaggttctcccgtgtctcagtctagggccctggtaggactggggtcctggagtccacgtggtagcccaagttgccgcaggaccaggtactctggaaccacagtccagggcgctgaggggcaggagtagttcagggcgagccggggcccaggtcctcgggagccagagtccagggtgtggaggggtgggggttctgcagtggcacagtccaggacaccgcggggcgggacagggcggggatcctcccgtgccttagtccagggctgagccgcgggagaggtccttcagtagcacagtctagcgcacggcgttgcaggtgtcctccagtgcctgaggccacggcaggtcgcgggtcccactgtgctctagttcagggcggagtgggtctgaggtcttctcctgcctcagtctagggcgctggagagcggggatccctctggtaccggagtcaatggatccacgggtccgggtcctcccatgttttagccccgggaggggagaggcgggggtcttcctttgccctagtccaaggcattgtgaggccccgctcctgcattcttaactgtctgtgcctctgccgccgcggggtaaaactgcaccatctcaggcaagcctaacagagcagctgtccttaaaagattcccagttgagtgtggttcggagcaggcctgagaagtgtgcccttagttggcttcaagggctctgggcagtgtttaaggaatccagctgacctcagttactccaagcccttttccacttgttttcttcaggcctcctttctttgtgccagcatcaatgggtttttggttaaagttttcagcagctgcctgcagttccatttttcttaccaggtaagagacatagct

SEQ ID NO: 249266 - DNA, 897 bp, Homo Sapiens
ttggctcacttatgttggaattaattaatagcaggtgttaaaggacccaggcttcattacacaggcttttcatgtatgcaggatgactcaatgttaaagcatttaaatggaaaccaggggagttttaaagcccgagaaaccacacataatcttttgttgagatgagtttgctgtactgacgctgcactttgtaaacagattaccagttttttacttgtgggtgtgattttttaaaatagttctttatatataattaaaattaggtttaaattttcaaaatatgagactatgctataggcagtgcttgcttgaaaagtctcatttttaaatctccctggcatgaggtgcccacttcccctttccaaagcaaccattaaacatactttgtttctactattggtggagtttttctatatttaaaaatacatatatatttcagaggatttttattttgctttttggcatttcagactttgatcagtgttaagtgcacttgtattgctttttaatctgttaattttttaaagacccaagcagtcattttgagttatatctataaaaattataaaaggatttttgaaagtataaacaaattgtcagtgaaaataaatgagattttggaataaagtgagaatgggagaagggatatgttgtgagcatataccttcacagttcttaatacctgttttgtaatcatgatattcagtcaaggcattatgggtttttaatcttgaaacttagagacccctttgaatatttgcttttactggtgtacagtatgagttggaatatagactgtacacataattatcatgttgatataaatcataatttcaactagatcaagacatgttaaccttttataaatttaaagtcaataaagcacctttttaaagg

SEQ ID NO: 249267 - DNA, 411 bp, Homo Sapiens
tgggagaatttctcccgtataaagaaagtactctacagttattcaaatgagagtcacgcttttaaatttacagcttatcacagaaatcatcagctatacattagtaaaaataaggacatgaggttttctttcttggtttttgtccaagatctttgcaccttaatattaatgggctgtttcaggtaaaagagaatgaatgtatgattgtgaactgtgaagagaatgatgcaggatcctatttagttactgaataatacagagtattcaatgcatgttgtatgtgccaccaagttactattaactgtttttggaattgaagactctgtatagtcaatagttgtgaaattcttctcaggctccttaaaccctcgctttgttgtaaaagctaaaataaacagcatgctatattgt

SEQ ID NO: 249268 - DNA, 284 bp, Homo Sapiens
ggtgctggttaggttttattttaacaggatgttttctcttatttttcaaaatatcagttatatcaatattagaagtgtaaacaggtacaaaatatacagtacatagaaacaattttcttaactagtctatggcctaataaaagtatgcatgagggggctgaatgaatgggcactgccaggtccctccgtctgcaggggaaacaagaggaccagtggctgcttcaacaaaacaggaatggatatttgtgtggtaggaacagcactgtggtggaatcaagaaccaa

SEQ ID NO: 249269 - DNA, 453 bp, Homo Sapiens
acaaaaaagttgggttactcacagccttaattctgggtgggctctgcgggagaagacactaagggccccacaggcttgtttcatggtgttgcaagccaagctggcccctgcctgttcctgtagctctggggccaggtcagccgtggccccacctaccagaattgtgctctgctggcagctgtgcttttgccaaacccatggcctcagcgaccatgacttcttctaaaaagcaatcatgagtgcgtggctggggacagacctctgtgaagtgtctcctgttgtgaggggctcactttggagccactgaagagccgactgtgccacccacttgcgagcctcagtcccttccaagctgcactggtcattgggaattgtgtaaacacctctggggataagctgaggtgactaaatgatatatttatattgtaagattaaactgactttcttggcctt

SEQ ID NO: 249270 - DNA, 933 bp, Homo Sapiens
  misc_feature (146)..(167): n is a, c, g, or t
  misc_feature (190)..(338): n is a, c, g, or t
ttggggtttttctgtttgtttgttttttaacacacacatatgtgaacaaagagtatgcgtttgtactggcagaagaagcgtctggtaagacaaccagcaagttaacaatggtcacctccagaaatgggctgggtaaaccaaagaannnnnnnnnnnnnnnnnnnnnngagtcagggtctagctctgtcannnnnnnnnnnnnnnnnnnnnnnnnnnnnnnnnnnnnnnnnnnnnnnnnnnnnnnnnnnnnnnnnnnnnnnnnnnnnnnnnnnnnnnnnnnnnnnnnnnnnnnnnnnnnnnnnnnnnnnnnnnnnnnnnnnnnnnnnnnnnnnnnnnnnagtgtttcaccatgttgcccaggcaggtctcaaactcctgggctcaagtggtcctccagcttcagcctcccaaagtgctaggattataggtgtgagccacagtgcccagccccgtagtggagaatttctgttgaatgaaccaaaagcaactgccaacctctccatgcaccatgtgtttcagaggagaaagcacagtgaagaatgcagtgtgttctgaggtcctgtcacccctgaggctgtgtgtgtcctttgccaaattaaagagtcttactgaatgcggtgcatccaggagacaggcccaggtttggactggtcctctagcctcagaagcatctttttctccgactgattccgtgttcaggtaatgtctgcctgcctgcctagggcatctccacaccttatgccagccacgtccgcctcgcccgctggaaacctacctgcccatcagagtcgtatccccagttagtggaagcctgctagagccacgggcccgggcatctgcgtctcggcgggctgcactcaggacaagtgtccagccctgctgttccgggggcgtctggccttggtgaaagaatctaaaataaaaccccggctc

SEQ ID NO: 249271 - DNA, 487 bp, Homo Sapiens
  misc_feature (296)..(305): n is a, c, g, or t
tactgatccagtgctttttattgaaaagaccaccatttcccaaccacatggccgaggaaactttatcacaaattagacaaccacatatatatagagagagagatctacttcagggctctttattttgttccattggtctatttgttcattcttgttcatcgaacattctggttcattctaacatacctgccttaatgactacagtacaacttgtcacattaacaaactcaaggagaaaaacatcatatcaatgagccaaaaaggcatctgactatatttagcagatatttctaatnnnnnnnnnngttaaacaagaactgagacaactgagctacaaaatctatttatctcagacctagagtaaacattacaccaagtaattttcattaaattggagaaaatgaccagatgcctggtatcaccatgaatactaaaccttgttttggagactctattacaataacaataatttaaaaaataatcccaa

SEQ ID NO: 249272 - DNA, 947 bp, Homo Sapiens
  misc_feature (256)..(276): n is a, c, g, or t
  misc_feature (299)..(350): n is a, c, g, or t
  misc_feature (427)..(540): n is a, c, g, or t
ttggaaacaggtgccacatccatacaggctgactccctgctcccagcccattttttcctgaatctttggcttgccaatcaagaatgtcctcaaaatttgctcagaggtgtgggcctttgggtaaaggtgtcttcagaagctccacattaaagatccatcagtggttaagggcaaattgaagagaaataaagactaagatatttttttaaaagactgaaagaatagaacaatgaaaaagccccatctgtaatacagnnnnnnnnnnnnnnnnnnnnngagacaaggtctctctctgtcannnnnnnnnnnnnnnnnnnnnnnnnnnnnnnnnnnnnnnnnnnnnnnnnnnntggtttcaagtgattctggtgtctcagccacctgagtagtcaggattacaggtgcacaccaccacgcatggctaaannnnnnnnnnnnnnnnnnnnnnnnnnnnnnnnnnnnnnnnnnnnnnnnnnnnnnnnnnnnnnnnnnnnnnnnnnnnnnnnnnnnnnnnnnnnnnnnnnnnnnnnnnnnnnnnnntgatccactgtgcctggcctggtgtttctttaggtataatgtctttaccagagagctaatgcagactgtcatgggtgagattgttctctgatgttcaattcccctactttgtatattgagtcagtatgagatgcgatttgtttggcaagcacctttgttcctgctgttactgaccccttatcttgtaggcctcacagctactatgcttttgtccagtccaactagataggagcttcttcctctgctgcagtgactggtctcacccagggctttcaggaaggtgagaataagcaccttcctcctcccaggaagttttgagtttcctgtgtttcatttctgaatgtaatgtctccatttattttcaattatgtttgattatatttgattaaaaacaataatttttttgg

SEQ ID NO: 249273 - DNA, 811 bp, Homo Sapiens
  misc_feature (121)..(240): n is a, c, g, or t
  misc_feature (637)..(662): n is a, c, g, or t
tattatccccttctcttcctggtttttgccccctcactccattctttttacccaaacaccacagaattttaacccgaacggccaggtaggatggcccacgcccgtaatcatagcaccccgnnnnnnnnnnnnnnnnnnnnnnnnnnnnnnnnnnnnnnnnnnnnnnnnnnnnnnnnnnnnnnnnnnnnnnnnnnnnnnnnnnnnnnnnnnnnnnnnnnnnnnnnnnnnnnnnnnnnnnnncgttttaattagaattttagaattagaggagggcttagaactctgccctcatttttcagtgaggaaactgcccaagacaggacaaatacttaccctaatgcttagcctggctccagtgaaattagctccccagccaaagctgagctggatggaactaacaaggacacacctgctgtccccagccctttcgggaggtggggagggataggaaggagaaaggttttggtgcctattgctgctgatggtgggcatcaggccaggccaggggccttcttggaggctctgggaaaggggaagggaaggccaccgggtgtgagagagagggcacttgtctccttcaaggctgatggaaggtaggatatgtgagtccttcctcttaagtggcaggaaacagtannnnnnnnnnnnnnnnnnnnnnnnnncccctggatcctagaactgaggaaacactattttctcatcttactggtttttgggcccctactctattccttttatgcaaacctcacagaattttaaccagaaaggccaggcaggatggctcacgcctgtaatcacagcactttgccaa

SEQ ID NO: 249274 - DNA, 926 bp, Homo Sapiens
ttggctttaaaaaatatttttaaatacagttgcctagtttatttccaccaattttaaaattgatgttgcagtaatttttttaatggtgaaacttgttatttcttgcttagatttctgtttccacctagtagatttcctttaaagtacaatatactgctattgaaaagtttactacatagtttaaattttttttctagctgatttcatgccaatattgggaaccaacctaaatccagaattcatttcagtctgcaacaatgccacatgggcaattggagaaatctccattcaaatgggtaagatgtttttccctatttaaaagcataaggcctggcgtgagccaccatgcctggccatcagaacttgtaatcaagacagtatgttgagaaattctaacattataaattacaaagctttgactattaaagtttttgtgatctaatgatacagttttgattctatagtaatttgtggcttattttatagtttataatgaatacttatttctagactcatacactggaaggggacccggaaaggtaatgtaactcagtgattttaaaacttgatttttttaactgagaactttttttgccccctgcctgtaggttaagtcttacgtgaaatgccaagataattgctgagcagctttggttacccagggcggggtctgggtctgtctgtactttgcctttactctagatggctcctgagacacaggcaggactcccaagcaccgggttgggatctgccctggtcccggcattccagtataagattgcctcagaccctgtgtttttcagactgggtttttgctcttcacatgaaatcaagtttagatgacattgactggtgttgaaaaaaatgaaaaggaaagatttggtaaagaacagaaaatatatttgagtaagtattgtttgggtaaa

SEQ ID NO: 249275 - DNA, 900 bp, Homo Sapiens
tccctatatggatttcttttatttctttgtcttgtgtaattgatctggctaggcaattacacataatgttttcagcatttgtaattttacatcaaatccatccattgtaacacattgattgctacttttcaaacttgtaaacctggacatttgtcacctactcttcctcccagtacaggagtccatggcgcggtgtgggccctgctgtgccacagtcccaggggcacggctgggcgcaggttctctcctgcaagagtccgcggctctgcagagcaagagttctccagtgccttagtccagggtgaggcaggggtgaggctccttcagtagctcagtccaggacgcagccctgcgagggtcctcctgtgcaggagtacacgatgctgcggggtcctactgtgccttagtccaggacgccagggggctgggtcctctgctgccatagtccagggcgcgaggggctgggtcctctggtgccatagtccatgacgcagggaggctgggtcctctggtgccatagtccaggatgcgaggggctgggtcctctgctgccatagtccagggcccgagggggctgggtcctctggtgccttagtccatgacgcagggaggctgggtcctctgctgccatagtccaggatgcgaggggctgggtcctctgctgccatagtccagggcgcgaggggctgggtcctctggtgccatagtccatgacgcagggaggctgggtcctctggtgccatagtccaggatgcgaggggctgggtcctctggcgccatagtccaagacgccagggggctgggtcctctggtgccttagtcccggtcgcggggagctgggtcctctggtgccatagtccagggtgcggtggaacaggagtcctggggagcagtagccaa

SEQ ID NO: 249276 - DNA, 752 bp, Homo Sapiens
  misc_feature (574)..(600): n is a, c, g, or t
cacctcatgttttattgtaaaaatgttaaaataaattacatttgacatcgttgccagtatgtacatacagtgtgcgcgatgccaggacaaccagcaacaacatggttcattaaaacatttcacagaaaaatacgaggctgctccttttcaggcccctgctgggtggcggcctctgcaaacggctagagaagtgggggtgtgggcacgtgcccatcactgtcttcacatgttggggaggtgggctctggccccactgccccacagtagtggggcagaaggcagagagtgaacggagctgagcggctctgatgacttgcttcctgcccggcctccagtcacccgcagtggatgccccttcctgcttttgctcacctcagtgtccccttctccacctctgcttggggacatggcccttgacatcatggccttggatgaggtcaccgaaaaaggcccaattgagttgcagggcaggagggcagacactagatctcccaatccttgggaccctgctctttaaccactggctctgaagccaacaacagattccaggtatataaaaacagcagtttgtttnnnnnnnnnnnnnnnnnnnnnnnnnnncattcaggacacagtgggccagccccagggtgaacatcatggagaacccaagaactctagtagcagcaagttctgcccacccctcaccagagagtccaccaacagtttcacattatcttttgctccccagcccaaatcctttcctttcttaa

SEQ ID NO: 249277 - DNA, 1596 bp, Homo Sapiens
  misc_feature (703)..(704): n is a, c, g, or t
  misc_feature (772)..(815): n is a, c, g, or t
ttggcctgtgatctttttgaccctgatttttctcatcagtaagacaagtgtgacaatatctgctctgcttatctcacaaggttcttctttgtatcaaataagatgagaggcagtacaggcagagagtaccggggtttagaacagagttccacactaactggttacttggctttggatgagttattaatcccctctgatcctatctcctcatctatgaaatggagaaaatagggttattatgaagattagaaatagttcatgcaaagcactttgcatagtcatggcatttagtaggtgctcacaaagataatagaatataatggtcacaaaattatgtaattgtactaagtaaagataattcagaaattaggtactacataaatgtaatgtgtcagcctgcattagagttacttaacttttttaaaaaattgtcattcttatatactttgtaaagccttttttaatcctgttctttgtttccatatctattctctttcttttaaccaatcatcttaattttcttcctttaatttctcatgtttactttcataatcagttgtgcctcttgcttctctgccagccccttctatcagcacgtatgaaaacaccttgtatttttttctctcaaaccatcacagttgtttacactgtgttctagaaaagaaaatgttcaccattagaatatatttctcctacagattgnnaaaaaaattagaagttgattactgttttgaaaattgggctaattccagatgttttaaataacatggcnnnnnnnnnnnnnnnnnnnnnnnnnnnnnnnnnnnnnnnnnnnncataaatggagtcctaaacaaataggagaacaccttctactgaaatccctaacttacgtggtggcaatgcctttttattcagcaagtctgattgaaacagtgcagagtgagataattcgagataatactggcattttggagtgtgttaaagaaggaattggaagagtgataggcatgggagtgcctcatagcaaacgacttcttccgcttctttccttgatcttccctacggtgcttcatggagttcttcattacatcatcagctcagttattcagaagtttgtcctactaattctaaagagaaagacttacaatagccacctagctgagagcactagccctgtgcagagtatgttggatgcttattttccagaacttattgctaactttgctgccagtctttgttctgacgttatactttacccattggaaacagttttgcaccgccttcacattcaaggaacacgcacaataattgacaatacagaccttggctatgaagtgcttccaattaatacacaatatgagggaatgagagactgtatcaataccataaggcaggaggaaggagtgtttggtttttataaagggtttggtgctgttataatacagtacacactgcatgcagctgttttacagattacccaaaattatttactctacacttcttcaaaataacatttgagatttaggttccttcactgagtagtctggaagatataatctggataatttgctatgaagttatgagggatacagtgaaatactggggaagaaaatg

SEQ ID NO: 249278 - DNA, 927 bp, Homo Sapiens
ttggctcagagttgaggccacacagtgaggtctggtgggtgaaaggacccaggaacgaggcgttcaggaaagcaagttgtctgagctatgtggagtctgtgggtggcaggggcagccgctccagccttgtgaagactttgaaagccagagattcctggcgcaggcttggacttcctgggagctcctccgagtacccgaggggcatcagagctgcctgggtgttacatggcccagggaacccaggttcagggtaggacaggcaagaccagatacccaatgtgcaaagtgaaaacactgggctccctgttagacgatgaagaattcaagacagtgacagcattacgtcacccctggggacagaggtcagcctaaggtgacacacggggactactgtgcttccggaggctccctgtgtcctggaggagaaaagcattacagggggcagctggacaagctcccaactgcagagtcccagccctggctggggcagggccccggcctgggactcagcatttctgatatgccttaagaattcattctgttttgtacaactattttttaaaagtaaccgtgtggcgaacgcacccacgccatccgctcccggcaccctcagccgcatctgcgggcggcccctgcctccgaaagaattgctcaaccctcttttcgtggcgcgccgccccaatgcgagccggaaaagcccctaccgtgttctccccgaagaccatggggcataagcaccgggttgggatattccccaaacgaaaaaacaccccgcgtggcgaaccagccctcccgtgaaacccacccccaagcgcgttcccccggggtatctcctgggggttcccttacccgcggatgcttccgacgggcgctcgctgcacgatttaaaatcatcctcgcccccgcccctgttacccccttctatcc

SEQ ID NO: 249279 - DNA, 1087 bp, Homo Sapiens
ttggctgaaagtgactaaaaagctggctttatgccattaacactctgtactttgcagccaatcagaactgacgcagtctgggtgctagctgcttcaaaagcaacccacaccacacttttaccatttccatacatcaactgctgagaatatgaaaatgcacagtgacaggttttaggatcctgcttcaggatttccttttcctggtttggtcactagagttggctatttatctgtttctaaacaatagctattttatcgaatagtttagagaccactattaaatattgtgactgatgaaggatctgtgaatttttttatatatgttctaagagttaccattttgataccttttaaaaaccagcagctttctactatattcatgtaaaacagcatgaataaaaccattttttgatacagggttttatttggctttaaactcaggaaccaagttaattatgccagattgaactttgatttttactaccttttcaaagatattttaaaaagtggattactacatatgatttctttggagcttacatttctttacttcacgaattctatgtcactgttacaagtttccattctgatggcttctgggcctttgtacctttgtttttggtgccttattcctagtatgtttctatcaccttaatgaggccgcagatggagtcagaatgtgaaattacaaataatcactggatccatctactgttttccatcaccttccccactgatgctctgggcgagagagtgatgtgtcacttcaactgtgtgtaatatgtcagacacgtcctacaataacaggcgtcatatttgtattatttttagtttactgtagaaaataatgtcaccgccaaaggtgatgagagtcacgttttgtaggatctgttttcttatacttaaagacagacttctgctacggtaattgccagtattcatggcttcctttctgtgtcagaagagaagggatctgctttctcttggctgatttcacatagcattggtaatagacatgcatttctctttctaaaggggagtaactttttaaaacccttcctgattttagcctggcaatgtaagtgtc

SEQ ID NO: 249280 - DNA, 1239 bp, Homo Sapiens
  misc_feature (300)..(300): n is a, c, g, or t
  misc_feature (1080)..(1100): n is a, c, g, or t
ccttccaaatggggcccacttttacccagtttccttaaagaaaggaatttccaaaaggcccttcggcccattttttaagggttggcccaagggccatttttcagaagggctttccgaaccaataggggaaccccacccaaaggtgagcggtgtaatttcccttaagggccaccaaccagtgatgtccttgctccatcagggaggtgcaagctcccaaaatgtctgtttaaaaaccagacatgctgtcttaatactcatccatcagggaaggcacaggaataaaacagagctgcccagaanccatgtggatgggtggggcaggagggcatccctcacatcccaacacaggtcggggggtctgatctaagtgcgatggtcacagccctgccaatatgcagggcttgcttcttcgcctctgcgccctcagtgcctgggagagatggaatccacggaccctgtgccacagtcacccaggttactttgtgatctccttcaaggacactctcacaattctagtgtgtgtagaaatcatcaagtgaatatggcctttaactcaaagaatgaatgtcttaccctgcaggctgggcccttcctgcctgcctcaaaactgtcatattcctctgtgcccatgccttggtgaacctggcagaccccgttaggaggtactgatttctgtcaggctttccccagtgtaggcctaggaggtgcaggctgggtcctattgcatggatgtagggagcaacatggtcactctcccttgacaaagcctcccttgatccccaaccctacccctaaggtcacagcagcagcctccccaccccagaccaaggctagcacagcttctgcataaaggcttctcccctctgcttctcctggccacagggccagcagctagctctggaaggaggtcacagcagaggcaggccaggggcagaggtggaggaggctgcagaggctgagctcttccccctaaggcctcagacaagaaagcacaggaagagggacccaagacctgactgtgccaagaaaatccccgccctgggttctcaaatccaaatgcagaaactgcaaaccaagggnnnnnnnnnnnnnnnnnnnnnccaagttttttttctttcctaatagctagttccaatgatgttaattacccgccctgagctgaaataacagtagacaaagatagaagctagcctctggttttacaaagcctttgtacaagtcctctctgtcttttcccaa

SEQ ID NO: 249281 - DNA, 180 bp, Homo Sapiens
ggggcttcctcagagcatgtaacaggaaattaaatgggatgagtgtttggtgtggtttgtgtctgatgagttttttaacattcatgtgtagattgtttccgcttctcttgtttcattttcctgaagatttatgtttttgtctaccttgtgagcaggcttttggaagaacctgtttgatgc

SEQ ID NO: 249282 - DNA, 1410 bp, Homo Sapiens
  misc_feature (297)..(306): n is a, c, g, or t
  misc_feature (1294)..(1304): n is a, c, g, or t
  misc_feature (1372)..(1372): n is a, c, g, or t
ttggcatttatttcagataaaggacaataagtttactttgtatctgaactcaaaacaaagtagttgtatattttaacattcaaaattgggatttcccaatgtgacacatcatgaatgcaaacccctccagcccatcagacgccaggctgcctactggtaatctgtgtatagtatataaacatgtaaaaataggttgtattttactctatgtatgatgctaatcaatgaacactttatttattttacagagaaaacttatctgtgaactttactatatatctgtttattttactttannnnnnnnnnaaataaaaagggttttaaatgctatgcagtcattagtagaaaattttttaggactctgcctgctctgtaactatcttaatatgatctggcagaaactcgcatgtatccaagtaaagtagtttagctaaagaaaggttcttcattgcttttctgttcacagttgtggctctgttttttaagaatgtaacttgtttttagattatacttgcatctgtgacttttctaccagccacgttgacacaaaacaggttctggttcaggtaaagttgcgtcagtcacctgcagcagaaatccctcttcattcctcttctctgtgttcattcctcttctgtgctgttctgaagcttctaccaatactctttccatattgtctttttcagtgaagagaaatgccttcaagattaggtccctcctgtctatccaggcccaggactttatgctgctctatacaccgccattccagtatacacaccggcatttattgtcgaaatgttttcttagccaggccctcagctctcactatacaataaactgtttctacctatccccccctccctactgatcccaatcatgcctgacgagtcggacccccatatgtctgacagtggacgccggcggatcacccccccctcccgctaagacccatctccccgcccatgactcccccagtagtaatcgcccccgccaggaaataagttgccgcacctatccgagtgcgcgcgtggggtagcatacactccctgcgtatcttctcggcgataccgagagagtcgtaccccacgagtacccccacgacacccccaacttcgcccgccgacatagaggcacccgggagcccagagcgccggcattgccccatttgatccctgataccccccccactcttgacccccctgtccgtattatggcccactctattttctcccgccgtttaatattagcaccgctcttccccccactctgtcccccctagccagtctctatacannnnnnnnnnngtagcatttcgtattcgcaccgctaggtcaaccccgccgtatcccccccgctttatatgcccctcttnattttcgccacgcctgccttgtgttttgtcccaccccc

SEQ ID NO: 249283 - DNA, 1025 bp, Homo Sapiens
  misc_feature (302)..(328): n is a, c, g, or t
cacttcagttatgtggtatgttgcattttccagtttgttcaatgctttaaagctcaaggatgcctctgctttcaattgtacatgggcctgaagcatcctagcttttggcaagcaggcaggagactcaaccaaaaatcaaaataggaacaaggcagactaaatgcagggcacatctgtaaacatattatacatttgaaaattacaatatcagtcaaagtgatacagtttacaggtgaaatgaaactatctggaactggcctaccacaagtttctgaacctggactgatacaataagttatttnnnnnnnnnnnnnnnnnnnnnnnnnnnaaaaaaagttttgtttacatcaagtggaattggcaatccatgcttatacttttaaaatctaagcagggcagaaatccagactaaaaagatagttactctactctatgttgagtccaacagcttctttcatgaactacttgttttaaaagcctcaaataatcaacaaaacaagaaaacccatccatactacagtcactcaaaactggacatttctaggggtagagccaaagtagttactttctccccaaataccccaggggatccagtctacttttatcagaagactacaactctttatataaatgccctgatattttaacctgtatttgacatacatggatatactaatttctgtgtgtgtgatgtgatgctgtgtcaggccagacaacttgttattatgttactaacatcacccaatctcaattggacccttaatttctgcacacacacacaaaaatttattttagcatgctatacacaagctgcagtgcaacaggatggcaatgtaatgataagacagggctaatgctcttctctgccccaaagaaaatttccagaatttcacattattttccttaaaaacccatcttgctctagtaataaaatatatttattaagatataattagaagctaacaagctcagaagtatagtttgcatgaaaacacaccttctacagtcagggtttattatcccaa

SEQ ID NO: 249284 - DNA, 859 bp, Homo Sapiens
  misc_feature (430)..(445): n is a, c, g, or t
gcaagatttgaaaagtttattatatgtaagatatatgttacggaaaagcctgtaaaaacataagaccaatggagctttaaaaaaaggttaggttttacatctttaaaactcattaataagataccaaattcaagagattatagttacattgtaaaacgtaatcttcttttaataaaagctaataatgactgatgaattacaaatgcacttatttattggtgattacaaacaatacttaagaacttaagcagcttgagtagtagtttaagctagacagagcaaagaaaattcttgtttaatatatatatatttttaattccagtaatattttcttaaattcctgttaaaaatataatcaatattaaagtcagcaaaatgcctttgactgacgcctggattattttaccacttaacctggttacacagtgannnnnnnnnnnnnnnnctgtcagatgtaactgacaaccagtttagtctttctttaagataaatgaagtgataactcacattgcagcatcttgtggaaaatattcaaactacatttaaaatgcttctgtaaaatggagaactctattgctccacaagaaaatgtatatgtaaaactacaggttggctatggtaatagtaactaaactacatccaaccctgaaggtagaaaaatccctgaaaagaaatacacagcctagtcatagtatatcatataaaggttattttcttattttgaaaattctcccagatttggagaaatccaaacctttccatagttcccttactaggcagtgccacataaagttatttagttaacattatgatcatggcttacgattaaattccatatgacaaacacttatatatccaa

SEQ ID NO: 249285 - DNA, 1365 bp, Homo Sapiens
  misc_feature (558)..(574): n is a, c, g, or t
  misc_feature (1293)..(1293): n is a, c, g, or t
  misc_feature (1341)..(1341): n is a, c, g, or t
tgtacaagaaagttgtgcgttacttttaatgcgtatctttatatgggatctgttatagtatactagggcatgatatggtatccttttgagtgaggtatatactcatctcacaagtgaagtgcctactgatattactaaagtacattatgtttactcaagtaaataattttctccccatggtacactctagtgtaggctattcataccacactgaaatgaacaactgaagaataaggctaagaaccaataaaatatttctctaattgctagttgtaaaactgtatccaaattttcagaaaagacagcttcagcttgcaaattctatcctctaaacttatctggtgcattctccccaccccacccccattatataagggctattttagatgcttttaacctccccaacaaataatttgccaagtgtccaatgagaacttatcatgttggtgtgttaggtaaatcgggcaaatatgatagtgtcttacattgggccttgattttaagttgttatatttgtacaatcgagtattttagaaattacatgaaacatgaaacagnnnnnnnnnnnnnnnnnaaactgggcatctggtttctaaaaatttatttgaaacaatctagaattttcttggtgcaaagtgtatcatgtggaatatcctcatatttttaccatattttaagaactttaagacgattaattgtaaataatttatttgattggtgcagttctaatccctaaatcataatcttaaaatcaggaatgtgtgggagaacagagccatgtcatatcactttgctcttaccattccttttgatcagcctcaattcagcctcattgtgtagtatgttttttctttctatgaaaaacaacagaaagcatttcattttatttgcctatgttcaaatatgtttaataatgaccaaagtgcattctgagttttttcaaggaatgtaatactggagctttaagaacatacttagtttctcatgtgaaaacttaggctttgtctgatgtttttccttcctctattgtctaatgttgaggttgtttttaggaattatgttttataaactttttcaatataaggtacatgcctatacagaacttaacattttgcacagaatatatcaaatatattttgagaaaaaaagtacggcatgagttctgttaggaataaaagatgaaactattgtatctcacaaaaaatcttatttcagaatggaaatatttttgagaaaagtagctgagtatactggtttaagaaaatgcttgtttttagattgaggttaacttanaagttgggagttggatttatttaagtacagtataccctctcaaccagntttataaataaatatggtttgaat

SEQ ID NO: 249286 - DNA, 1687 bp, Homo Sapiens
  misc_feature (182)..(243): n is a, c, g, or t
  misc_feature (1222)..(1222): n is a, c, g, or t
  misc_feature (1260)..(1260): n is a, c, g, or t
  misc_feature (1325)..(1360): n is a, c, g, or t
ccataaaggcaactttgtacaaaaaagttggagcgctggtcctttttcttctggggtttactgatcagtgtggtgattttaacttcatttagtaattactctaggagattttaccttgacttatatttttcatgacgtttcatgatttgctgttggtttcaaatgaaactacaaatctggcnnnnnnnnnnnnnnnnnnnnnnnnnnnnnnnnnnnnnnnnnnnnnnnnnnnnnnnnnnnnnnttagttgtcttctgaaaaaagagttgttccctctgtttctgtcctcagatgatgtccctccccctacctgtaacctttctttgacataattgttcatatcaatgaaggtgctgaccagctcaatacaaagttaagcacaagatctaaagctcttgaaaatgcccgtgaagagaagactgaatgtgttaatgaatttaatgagtctggcaaaagttgcaaattatatgcaagtttgtcctatcgcttataaatgtagtgtttcattggatttattttatgctaggttatattaagttgaaatagtctgtgattaaatgtcctcatccatgcacagaatatgaatggcagcaaatctttgtgcaagaaatttgaaacttattgggaaaagcctcccagtagattaattgttcatatcaggagatttagggtaagtcatgggttgaggtgtcagatagtaatatctatttgtttttgtacatgtatatatctaggaactttgtaacaacacatctttaataatgttaaagggttttttcatttttaatattttaaactaaaaaactgtacttcaatctcagtttctaaaattaaaaataatttatactgatctattataattttttctttttgaaagatttcattaaaaactgatggggaacttttcaaatgaggggccatggaaccaatatttggggatgcattgagaacccccagggatccttgtggtatttggaaccttaattgggttggaaaaggggaatttttcttgaacgcggacccggaacccaaattttgccctccccacggggaagggaaaacccccttctcccctttttcctcccgtggcccctttccccggagacaacacccccgggcccctcttttaagatttatttctgccatatatatattcttttttacaaggcggtgcctcttttgcgacacacaaaaaaaattattccggggccaaggtcgcccncaacaacatttgggggcggacaacaagacaaatcctcncccctctttgcggagccccggcggggggcagagttgaagaaaacaaaaaatagaagacgaccgcnnnnnnnnnnnnnnnnnnnnnnnnnnnnnnnnnnnncaagatcctagttccaggctggataacacacgttagcgcagcgcgcgagcagcgaactcacatatttgtaccggtaccgattgtggttgagtgcgcgcgagctatatacctcgcccacctcagctcctgtagcgtcgcgccactctccacacctaacgatcacccctgctatcccacactcgaatcgccctctcacccctcgtatcgcaaccctcctgttcggcagtactattcactgcacacaactccactgcattgtgttctcccgcgcttgcgttgccccgctccccatcagcctagcaccaccgctgtaatcgctatttttat

SEQ ID NO: 249287 - DNA, 987 bp, Homo Sapiens
tttgtagtaatgaacctttttattttaaaaggtaattcttccttggggacttacttagtgcaattctaagttttttccatatattaaagatgatttaaagttgacatagggcagattacagtacacataaagagtcataaaatgaaatggagaaaatattccaagtcttgatttatgattgaacccttcataagaataattaatttacaacattttctaccagaatttcctgagactatagttgaaagaactagactacaatagatagtattgcttagttgagtaccaaattttattaatgcagataatccagctagtttaattttgatttaaaacctttttcctgtcatcccaacagctgtatttttacctatgtgtacagacatgtttcatctctagggttaatggaagttttactattttaacggtttcttccctccttaaaattctctatcctagttatcaggcaaaaaatgttttggggcatgctatttatccagtctaataaagctaactggtaatattcatcacctaaagagtgatgaatttaacacaaacaaattaaacgaattattggggaggcagtcttttcttttgttcagaattcataaggtttgtgttgttagcatggtgtatttttaaaagaatgataaaaataatcatgtttaaagaaataaatttactttaatggtactttcaaaaagactaatccataacaaattaagttatactgtatttcctttgctacccagaaccacagggctggttgtcaacacatattgaagaaatgtaagcaaaatacagaaagtgatgattttcaaaaggaagagaagaaactccttttcaacaaacactttatatcatttattaatgcagtatacattagatctaaaatctgcagtttctaagcacaccatgtttagatctttcagatccttctgcagttttaggttactctttcttatctaggaggtacctttaagccaa

SEQ ID NO: 249288 - DNA, 1276 bp, Homo Sapiens
  misc_feature (212)..(268): n is a, c, g, or t
  misc_feature (271)..(561): n is a, c, g, or t
  misc_feature (759)..(768): n is a, c, g, or t
ccatgctgtatcattttgacctctggagcagctggtgattaagtaactaaagtcggtcatgtgattgcccctatgtgactgacatgcaataaaaacctagaccccaaggctagggtgagctttctggctggtaatatttagtacgtgttgtcacatatcattgctgggaaaattaagtgtgtctgtaagactctaccaggagatgacaactnnnnnnnnnnnnnnnnnnnnnnnnnnnnnnnnnnnnnnnnnnnnnnnnnnnnnnnnnatnnnnnnnnnnnnnnnnnnnnnnnnnnnnnnnnnnnnnnnnnnnnnnnnnnnnnnnnnnnnnnnnnnnnnnnnnnnnnnnnnnnnnnnnnnnnnnnnnnnnnnnnnnnnnnnnnnnnnnnnnnnnnnnnnnnnnnnnnnnnnnnnnnnnnnnnnnnnnnnnnnnnnnnnnnnnnnnnnnnnnnnnnnnnnnnnnnnnnnnnnnnnnnnnnnnnnnnnnnnnnnnnnnnnnnnnnnnnnnnnnnnnnnnnnnnnnnnnnnnnnnnnnnnnnnnnnnnnnnnnnnnnnnnnnnngtttatccttttgctgtaataaaccataaccataaggataatagcttttttgaattctgagttcttctagccaatcatcgatcctgggggtggccctggggaccctgacacaggaattcagctgtgccttacatgcacctatattctccagctttttgctcatcacaaatctacctgacaaaatccagtatggaaagnnnnnnnnnnccctattcattcagtaaagtgaggcacaaacaaatgagcctctgttcactttattcaaagagtatttttttcctctgtgaaactaggtagaactgaggaggaatcaaagaaagcctcatatattaaactcttaaatagattctttgaattcaaagtaagggtcaataggagaggcacaggttgtgggccttgtcccagcaaacaaagccaccaaggcagtcctgcaaattaaggaggatggcaaatctgtctcttaaaaaaaagttcttgaggggaaaaatataaaatacctaagtttcaaaagccggactacttccatacccttcattctctaccctggagtgtccagagatagagagtttcaaggtacgttttcaatgattcagcttttgcaaacatatgcaaatacattcctcatcagcagtcctgttttggcgattaatagcaagcaatatgcttggattagaggtccgatttccacttaaatgcattttcttctcttcttgcc

SEQ ID NO: 249289 - DNA, 1570 bp, Homo Sapiens
  misc_feature (135)..(149): n is a, c, g, or t
  misc_feature (1018)..(1027): n is a, c, g, or t
  misc_feature (1135)..(1178): n is a, c, g, or t
ttgggagaagtcttacgtacaacatagctgtggtggctgcgtggtttaatggctgcattagataggatcctcacatcccattcagaaccaaaactgatacagtgaaacaattaaggtgagcaaatagttttaacnnnnnnnnnnnnnnnaagtttcattcttcctagaatatttttctaacaatttttatttcagctttaaagatgggtcatatggccaaacgggccatataatccaacattgttgagatgtcttaggacatctaaggcaaaactggcacatttgttctgcagactattgcaggaatgttttttcctagcatttctatattatctgtccattctgaggaaccagtgaatgtcctataaatgcacctcctgtcaaaaccatgcctgagaggtcccggctgggagtgacagggtgcttcttagattctattggtccttctctcattctccgaacttactcctttttatgggtaagtcaactaggtttacagtcccttatttttaatgcctaagttttgacagcaggaagaaaacaattttttaaaaattctcattacatagacgcacaagaatatgtcacataaagaaaatgtgtttagaatactggttttctatttacgcatgatattttcctaagtaaaattgcccagtggacttggaagtccagaaaggaaaataatttaaattaatgctggtgatcttaacaatattttgtaaaatgatgcttcccccttctccatggtctagtcaattttgtacaattaggtatctgactttacaagtttgttatcctttctaatttttactgaactgaaagcacaaagaagactacacagaaaatctggaaacagttgcaggtgttgggaggaagatgaaatcgagctgtcttttaacttttgtatgtgttttatcagaatttgctggactatgctggcaaggactttgtttacgatcaaattgtactagtgtctgcagggtttgtcagtactcgtcaaagccaagtccaattnnnnnnnnnngtctttgccctccaaaaaaaataacacccttcacctactcctaacccccggggcccaacctccaaacgcacgctcggcccgccgccggggagccatatataccagcannnnnnnnnnnnnnnnnnnnnnnnnnnnnnnnnnnnnnnnnnnnaccgccactcatgtcgactttcccccgccgccgcgccacacgcaacgacctacccccccgcccaccagagccgttccccgcccttgtggggggtggcggtcacctattctcgtgggccccccactcacaagaaaaaccgccttcttcttatatataacgacactattctccccccctgttgggggggtatacgcatgcgcaacctcccacacctctttgatacacatgacatagatagagagcccaaaaaccagtcggggggctcatcaacacagagcggcgccgttcaaactctcgagaagcagagaagaacacgtgcggggcgcgtcaccactcttatccgccaccagccgcgtgcttgtgtggcactatcctctcatcgcaccccacac

SEQ ID NO: 249290 - DNA, 1012 bp, Homo Sapiens
gtttccctttttaggaactttccactatttttccctcaactttctcatgttctgacaaaagatacttaaatttgcaatattttaaacttattttcagcatgcacaatcctgattttagaagtttatccatttaatgataatgtgtacaatactcaatcatttttctatcctcatcatgctcccaaaggttatccaattaaaaaaaattccccactataataactgagaaatttacattaggaaaataagcagtgagaaaaaaaattacatatctgagaataaagatcgcaagatataaaagtttctctgaaattaaaaaaaatatatttaggccacagatttaaggaaccatatgggaatgacttgcaattcattttatgtaaacagagaagacaacatttattggcacaatttaatatgtagattagtttctgcataaatagtttagagttgcgtgattggtatatcaaagagagataaatataattttagtagatgccttgaagtttggaaaggtcttctgtaagtggcatatttgcttatttgctgtttaatagcaaattcaaggtctgatgatgtgacatgtgataacagcctttagatgcctcaccccaggcagcctcctgtacccctctggtctgccttccccactggtctgtgctatcagctgcattattcagttgcccattaagtgggaatcaaatctgtgtcattaaggagccccaggtcacaataagccttcattactttgcttatagcagtgtggctttattttgaattggaccactgattaatactgtccagctcctgttatactgatgagatcattatttaaccttacaccttctgaggctatcagttacacatcagagaagccttgccttgcattccccttgccagaaaaatattttctttgggagttccagaagccaactttgtcccagttcttacaacaaaatttcctcctctctgccccacctgcaaggctggcctcacgtaaacagccagcccc

SEQ ID NO: 249291 - DNA, 798 bp, Homo Sapiens
  misc_feature (638)..(646): n is a, c, g, or t
gataatttattgttaaatggaagacttcacaaagcaaaatggagtggggcaggtgtcaaaggtaaactgaaaaatgtcgtgtctgccaaacgctattctggtttcttaaggttagaaacaggaaaagtgtcaaatgaaaaggtactcgctcaaattaagtttttttaaaaggtctgtaatttgaaaggaaaacaatttttcactaaaaatatccttattacatgaaagccataatttaaaagacagagaaaaaagctttttaattaacaaataaacagcatctctcagagacacttgggaatgtttgtttttaatcagtgggtcctaaaaatcactgcttccacctgcaaacgaacacgaatccactgtggatggcgtcctctgacccaccctgaagggttctgtttctctccacacacttccttttctgcaactttcagcaaagcaggtttggaagaaagaggattacaaagaactacgactggctccctagtgaataacttaacacggtaaaacccggttttccatttacattacacattcacaatcgctcactgctacttacttcactgacgtatttcacactctctacacacccagcatgatttgtctgaacttaacacagtccccctaagacnnnnnnnnntatctcctaaggacctctgagaacacagcggtgttcaaaggccacgtcctcgcacacaacacccagacctgccacgcagccggtactgtttcctgagctcatccgagcaagcgtctccacggggcaaagcaaggccttgaggatcccgccaa

SEQ ID NO: 249292 - DNA, 1636 bp, Homo Sapiens
  misc_feature (1344)..(1344): n is a, c, g, or t
ggaaaagaaactaaagctcagaagcgataagtgatttgcctgaagtcacacacaatgaagggtggcagagctcatttgcaaacctaggctcccaaactcttactctttgcactatattatattgcctttgtgagaaaagaaacagttgcctagaagtgatatttgggtcctgaaggcctggggtgagcaacatgcggagagtgatagtgacttcattgccagcagcggtcacagagatctcagcatcatcaaggaccaactgaacgtgtccaacattgaccaggtggccagacacctgaggggccttctggaggaggagtgtcacaccttggagagggagatcctcatcctgcagcgctgcctggaagaggagtatttgaggccttgccacccctctgaggcagccctggagcccaccctggcagagctaaaggaacagaagaaggccatggagcaggagctgcaggcatctgtggggccttcttgtgtctctcccaaccacaggcagcggcccttggggtcctccacacagagcctcagacccccgcttcccctctgcggggttgcacctctccagtgctgcctgcctgcacctcctctggagccctaccttcgacctcgaggccagtcggctacacaccgctggggacggcagcttcagtgcagccccagggaagggccagcttccacacccatgtccagtgcagcaccccaagccccagcctgaagggctggtcaccgagtaggctctggcttctgccacagcgcacctgtctgccgctgccgcctcagctgctttggcccagccagcttcagatctggtcttggcgagctctcgccaggaccccaaggctgttggtctgtctggcccttgccccacccccttgccagatccctggtgtctggagctgagtggccgggcatccgtcccaagcatcaaagcctttggcctttctcctcccacgccatccaccagggcctggcacacagaggtctcattcccgcctgactccttgtccccctgggggcacccctaccaagacataacccccccctcagagacgcggaatagaaatttcagtccaacatctatggactctccaggtgcgcgcccgctgcaccccacgacactaacccggccaccccgtgtcccctatacctattgtgcgtcaatcctgagcagcaagcgtcgacccagacgttgtgtcaccgtaattgttgctatcatcccctctagccactcggaaatttttttccctaccaccgctccctatgagaccgaggatccccccaccaccccactgctaaatatgcagagaaatactgagccctcgaaggcgaaanactggtatccacggcaacacaggacgctgggtactctttatcgaacgttataagctcccccacctttgttcaccacccctgcccgctcaacttgaccccttcgcggcgccgatgacatcctcgatgagagacgcaggatgtaccacgttcgagagcgccgatacctgtacatctgtccggtggatacatgctttgcgagtcagcccagaccgtgaaataagagcagcacgcacgcacactcaaacaaactacactcgctcccatatcttataatgaacacccgccctacaag

SEQ ID NO: 249293 - DNA, 898 bp, Homo Sapiens
  misc_feature (254)..(266): n is a, c, g, or t
  misc_feature (314)..(347): n is a, c, g, or t
ggaaatattagcttctcacaaactgcttcctttattggtaaatactgggatatttcattaggttccgtgaagagggaaggtggaacatgcatcacactagaaattttgctttctcgtgacgtatattctcgtaacatgtaggtcttgtcagccctcatggtaaagtctcgtgtcattcattctgataagcaccccatcaattctcaagaaaaaccgcaacagcaggaaaaagctagaaggcattactctctggnnnnnnnnnnnnnggtacattaatattttaataaaaattaaacattttattactttgctgnnnnnnnnnnnnnnnnnnnnnnnnnnnnnnnnnncctggaataaggctgaattcacagtttataaaaatctctcaactagaagctctttgtcctagctccaactagcctcaaaaccttgtgcaaactatttaacatcatagtttcggtttcctaaaatattttttctaggtgaggagatattgaggtttaaaagacttaaaaacatacccaagtaatgtaaaaattataatgtttatttcaaaaaatggcaggtactgatagtaaatgtcaacaccaataaaaccaaaatgaaagaacaacctagttctttgtcactactcacctattcactttacataaaacaaagcaacagaccttacacagaatgctctaattcagtgcaacctgtaggcactattacatattgctaaagacctggtttatcagaacactataacacattcttaacatctttcatctgtggcacatctacaaattcctctgctttccaagtataactactaatgataggcagaatcagtggagaaagtatgaaggtgggtcctggtggcggggagagagcggttgaatggaatgtgagccaa

SEQ ID NO: 249294 - DNA, 820 bp, Homo Sapiens
  misc_feature (420)..(708): n is a, c, g, or t
  misc_feature (710)..(727): n is a, c, g, or t
ttggcatctttttaagcttattgtgtttaagaaagtagctatgtgttaaacagaggtgatggcagcccttccctagcacactggtggaagagaccccttaagaacctgaccccagtgaatgaagctgatgcacagggagcaccaaaggaccttcgttaagtgataattgtcctggcctctcagccatgaccgttatgcggaaatatcccccattcgaacttaacagatgcctcctctccaaagagaattaaaatcgtagcttgtacagatcaagagaatatactgggcagaatgaagtatgtttgtttatttttctttaaaaataaaggattttggaactctggagagtaagaatatagtatagagtttgcctcaacacatgtgagggccaaataacctgctagctaggcagtaataaannnnnnnnnnnnnnnnnnnnnnnnnnnnnnnnnnnnnnnnnnnnnnnnnnnnnnnnnnnnnnnnnnnnnnnnnnnnnnnnnnnnnnnnnnnnnnnnnnnnnnnnnnnnnnnnnnnnnnnnnnnnnnnnnnnnnnnnnnnnnnnnnnnnnnnnnnnnnnnnnnnnnnnnnnnnnnnnnnnnnnnnnnnnnnnnnnnnnnnnnnnnnnnnnnnnnnnnnnnnnnnnnnnnnnnnnnnnnnnnnnnnnnnnnnnnnnnnnnnnnnnnnnnnnnnnnnnnnnnnnnnnnnnnntnnnnnnnnnnnnnnnnnntaccaggagtgaaaaaggaaagtagaagcagctgctggcctaaatgttggtttgggaatattaggtgatcctgttgagattctggatccagag

SEQ ID NO: 249295 - DNA, 998 bp, Homo Sapiens
ttggctttactttacatcgaaaccccattgctcagagcactgatggtgcaaggaccaagattggtttcagtgagggccgccatgcatgggaagtgtggtgggagggccctctgggcactgtggcagtgattggaattgccacaaaacgggcccccatgcagtgccaaggttatgtggcattgctgggcagtgatgaccagagctggggctggaatctggtggacaataatctactacataatggagaagtcaatggcagttttccacagtgcaacaacgcaccaaaatatcagataggagaaagaattcgagtcatcttggacatggaagataagactttagcttttgaacgtggatatgagttcctgggggttgcttttagaggacttccaaaggtctgcttatacccagcagtttctgctgtatatggcaacacagaagtgactttggtttaccttggaaaacctttggacggatgacagtggctttcttgtgatgacagacagaatggaggagagatctgcttatgggaagtagaaccatgaagtgactgtcacacatgcatgtccaagaaacatcctgaaaacacatgaagtcgtaaactggagaagcagctctacagcagagattatcttcgtgtttcctctttctactgggccagaaaaatcctcagggttgcagttggttgagtgggcagttgacatatgcatgttgcacccgatgttgtctctaagttagcaatgtgttatttccagctttaaaggtgagattgtagagatgctgtcaaagggataaggaaatagcaagatttttaagtagtgtgtttgtgaagactgatccccattttacaactgcctgttctttctccagttcccttttttttccagccagcttgactattagaaaagtatgaaactggttgggttttatttaatatttttaatatattgagaagcatggtctgcctgggactgcacttctctaaaagtgagatataa

SEQ ID NO: 249296 - DNA, 1146 bp, Homo Sapiens
ttgggcatttattgaaacttctaatgttgacaaaaagcaaggcataaatgaagatcaagaggagagccagaagccaagattaggtgaagggtgtgaaccaatatctaaacgacaaatgaaaaaactaataaaacagaaacaatgggaagagcaacgggaactccgcaaacaaaagcgaaaagaaaaacgcaagaggaaaaaattagagcgacaatgtcaaatggaaccaaactcagatggacatgacagaaaacgtgttcgaagagatgttgttcatagcacccttcgccttattattgactgtagttttgatcacttgatggtattaaaggacattaagaaacttcataagcagattcaacgatgttacgcagaaaaccgacgggcactgcatcctgtgcagttttacttgacaagccacggaggccagctgaaaaagaacatggatgaaaatgacaaaggatgggtcaactggaaggatatccatatcaaaccagagcactatagtgaactcataaagaaagaagacctgatttaccttacgtcagattcacctaatatactgaaggaattagatgaatcaaaggcctatgtgattggaggattagtagatcacaaccatcacaagggactcacatataaacaagcgtcagattatggaatcaatcatgcacagctcccacttggaaattttgtgaagatgaatagtcgaaaagttttggcagttaatcatgtgtttgaaattattctggaatacctggaaacaagagactggcaagaagcatttttttactatcttgccccaacggaaaggagctgttcccacagacaaagcctgtgaaagtgcttctcatgacaatcagtctgtcaggatggaggaaggtggatcggacagtgattccagtgaggaggaatatagcagaaatgaactagattcaccacatgaagaaaagcaggataaggaaaatcacactgaatctacagtgaactctctgccacactaatgttacctggtttccttttagtttaaggaaaaattaggagaaagtgaggtgctatatagaatattgaaattggaagaacattttattttctcttatttctgttgtgatttttaaaaacttttttttggacctaaataataat

SEQ ID NO: 249297 - DNA, 312 bp, Homo Sapiens
ctggacaggcagttttggggggatgggaatacacgggggggttggtcaaatatttggaaaggtccaccaaataggccacatgttcgcaaagtatcatctggggaaattaagtacctttttagccctctcagtcataaatttggacaaattttaatacacttccctcatgcccttttatataaaacttaataccattagttccccattcttgacattttatttcaggttttattatatatttattggaaatagttattaaattatttgacctacagaaaaatatatattatatatagagaaagaaaaaaaccc

SEQ ID NO: 249298 - DNA, 1594 bp, Homo Sapiens
  misc_feature (1119)..(1119): n is a, c, g, or t
  misc_feature (1121)..(1121): n is a, c, g, or t
  misc_feature (1123)..(1125): n is a, c, g, or t
agttgggacctcccttctctgctatatggtgtaaaagtcagggcacagtcctatgacacttgggtcagtcgtgttacagaagcattgtctgctaacttcaaccacaaaaaagatttgattgaattgcgagtaatgctggaagatgctgaggataggaaatacccagagaatgatctctttcgaaaactcagggatgctgtaaaagaagctgagacctgtgcttctgtggctcagctgcttctgagcaaaaagcagaaacacagacagagcccagatagtgggaggactcggaccaaactgacagtggaagaattgaaggcctttgtccaacaactttttagtcttccgtgtgtcatcagccaagctcggcaagtaaagaatctgctagatgatgtggaagagtttcatgaacgtgctcaggaggccatgatggatgaaaccccagattcttccaaactccagatgttgatagatatgggctctagtctctatgtggaactccctgaattaccacgactgaagcaagagctacaacaggctcggtggttggacgaagtaagactgaccttatcagatccgcaacaagtcactttggatgtcatgaagaagctgatagactctggggtagggttggcaccccaccatgctgtggagaaagcaatggctgaactacaggagctccttacagtctctgaacgatgggaagaaaaggctaaggtctgcctacaggcaagaccgacgcacagtgtggcaagtttagaaagcattgtgaatgaagccaagaacattccagcctttctacccaatgtgttgtccttgaaagaagccttacaaaaggctcgagaatggaccgctaaagtggaagctattcagagtggcagcaattacgcttatttggagcagcttgagagcttgtctgcgaaaggacgccctattcctgtgcgtcttgaagcactgccgcaagtggaatcacaggtagcagcagcacgggcatggagagaacggactgggcggacgtttcttaagaagaattctagccatacattgttacaggtgctgagcccccggaccgacattggtgtatatgggagtggcaaaaataggaggaaaaaaaacccncnannnaaaacaaacaccctggcggccccctcggccccccgaaaagctttcttaaaccattcgcttggcgcgcgggccccccagggaagtgaccacggccctacccgcttcctaggcaaatcctggtcctggactaaggcttggactctccccaactaaaaacccccggagggcaacgagccgttccggacgactcccgaagcgccttttctcacggtccctcctcgccaccccccccatcgacaccaccgcagccccctgaaatcacgcctacccgccgtaccgcgttccgctacatgttcgcaccgtgactaacaacgccctttcaccacgtcccccgaacttccaccctctccttactcttgcgcccctgtagtccccttgacatatcccctggcgcgcccaagaccaccgacaacagagtggcgcacccaaccgactattctcggagccatccgcccggcgagaatgaatc

SEQ ID NO: 249299 - DNA, 710 bp, Homo Sapiens
aaggctcctttgtacaaaaaagttggggcgagcttgacggtggcaaacccctgagcgggctgctgaatgcgctggcccaggacactttccacgggtaccccggcatcacagaggagctgctacggagccagctatatccagaggtgccacccgaggagttccgcccctttctggcaaagatgagggggattcttaagtctattgcgtctgcagacatggatttcaaccagctggaggcattcttgactgctcaaaccaaaaagcaaggtgggatcacatctgaccaagctgctgtcatttccaaattctggaagagccacaagacaaaaatccttttatatcctcatgaaccagagccgctggaatagcgggcttcggggcctgagctggagagttgatggcaagtctcagtcaaggcactcagctcaaatacacacacctgttgccattatagagctggcattaggcaaatatggacaggaatctgaatttctgtgtttggaatttgatgaggtcaaagtcaaccaaattctgaagacgctgtcagaggtagaagaaagtatcagcacactgatcagccagcctaactgaagatgatgtatgaaggagttggagttgttgaaaccaaggtgtccatgatccctccccactgaccttttctaagaaaattcttgtgcccgcattggtattaaatcctcgcattcaggaaa

SEQ ID NO: 249300 - DNA, 1552 bp, Homo Sapiens
  misc_feature (464)..(472): n is a, c, g, or t
ttggctatctgtgtcctcatacatactgccgcctgaggtgccatggcccccaagccgggggccgagtggagcacagccctgtcccatctggtgctgggagtggtgtctctgcacgcagccgtgagcacagccgaggcaagtcgaggggctgctgctggcttcctgctccaggtcttggctgccaccaccacgctggccccagggctgagcacacatgaagactgccttgctggagcctgggtggccaccgtcatcggccttccccttctggccttcgatttccactgggtgaatggggaccgctcctctgccaacctgctcctgggaggaggcatggtgctggcagtggctggcggccacctcggccctgagggccgctctgtggctggtcaggcaatgctgttggtggtcgcagtgaccatcctcattgtagctgtcttcacggccaacacttatgggatgtnnnnnnnnncgatgctgggtgtggcaggcctcctgagccggctggaggaggacaggctgctgctgctaccgaaggaggatgtctgtcgctgggccttggctgtaggcagctgggcttactgccgggccctgcatacacagcgcctccagtgggagtgacagttggatacagccaggcagggtttctgccctgccgaacactttccctcccacctgcctgctcctggcgccttctccctaggggtagactcttctgcctactgaagtgggtttgctgcacattgactggtcaggggcagagtctgggtgctgtcctttggccacgtgtggggacttgtctagaccagaatgaaagggacagggtcccagacacgtttgggggtcctgattctgggctggacacggttgcggctccccagaaaaggtctagcctccagtcagccttatgaattttgccccgagtaaggaaaaatcccacacgcttcgatttttgatgaacgccgcattgcgccccgcaacccgcttccacatcccctcaatgcccggctcgtccccgatcaaccctactcggcaccggcgcctaccacccccttcccactcctatcctctctctgcagttgcggtatagtgcgagtgcgcgagcgcaccgcaagagagagaaggacgctgatcagctccaccccccgccaatcgaggtgccgcccgccacgccccccctgcctccggaagtaggccgcgcaggcaagccggagaaagcgccaccctctaaccaccatacccgcggtcacgctgaatatgtcagcccacaatgcgcaggccccctaggccactgctgctccccgacttttagctcacctcgacgtgccaaggccaccggattcctggtctgcatacaggagcgaccggtaggagcgccgcgatgcccgtagatagattcggtcagattcccgtgaccgtccataccttacactcccgtcgcttcaccccataaccagacgagtaagccaattcctaatcttactctgctcttgccaatagtacaataccttccgctctgcccaccccagttgggttttaccagcctcccttc

SEQ ID NO: 249301 - DNA, 1884 bp, Homo Sapiens
  misc_feature (146)..(170): n is a, c, g, or t
  misc_feature (391)..(429): n is a, c, g, or t
  misc_feature (1256)..(1267): n is a, c, g, or t
  misc_feature (1800)..(1800): n is a, c, g, or t
ttggcttatgagaacctttttatttttgtacagagccatggtataaattaacaggttaatgtcagtcatcagatcttccttctcttcctaaggatgcttgtgttgcctcaatctatcaatctatctttcttgttttgggttgtttnnnnnnnnnnnnnnnnnnnnnnnnntcttagagacatggtctaaccatgttgtctaggatatagggcagtggctattcacagatgtgatgatagcacactggagcctcaaactcttaggctcaggcgatccttcaagcctcccggggagctgggaccacaggcacgtgccaccacacccagctctctttcttggtttttcatcatttcatgtatctatcaaagcccagttcacctcctcccccaannnnnnnnnnnnnnnnnnnnnnnnnnnnnnnnnnnnnnnattaagttgctgcaaattcaaaagcttagagagaataagcttcttggtggtgaaactacaactctcacgtgtgctccagttctaaaattaacctgtgcctggtctctgaagccctttcttgctctgtgcctttcagccacatccttaggtgctaacggccatgagctccgactctccaaagtgagctccactttgggtctgaggagcccctggcagagtccacgctgcctcaggtatcatgggcgtaatgatcacccaggctccgggagatctcatggatgattactgtatgagacagagggggacttcagtctttccagggccttggtggaatttttggctctggtgttttcgccagacaataaaactttacactgggaaagctttgattcactctccacagtactccagaaaggactgtcctataagttgtacactttaaaaggtcatgtagaggttgtagtagaatggcttttcaccctggtgactttggaagaaactcttgaatactgcctgcatccgggcaccatggccaggttgcctaggagtggggtccactgatgaaaagaggtgttttgtacttacataagaaaaataaatttctgattgattttaccgcacgagaagaacccccacaccagaaccaaccatcactcaaaacgacctcccatctgtgcgcggcgccctccgccacccgaagagcttcttagaacatttcttttcggcccgcccggtcccacaaatgtacctggatatagctgtcagagcctggtttcggaagacaaacccatgaaacataccaatgaggccatggaaattcttccccnnnnnnnnnnnncaccaccccgccacgacaaacagaattcggggcgcttggcgcccactatcccaaacataaggacaactctccgtctggtctacaccgcgactctcggagatcctggacaacacaaacactccaagctcacttggaagacataaacgcctccagaacacgacctctacaatctccatacagtcgcatctcggcagccacagcaggcactatcgctacctctgcccattccgcccgaccacctccgccacacattatcccatcccacacaccgccacattcttatatcacctcacctcgccccaacaccgagcatcgccagaataactccggcgtggactatagactacaccgtgctcccaattagcgcgactatagatcgcctctctaccactcgacgtaggttcgcgtgcatgaagaagacgtgcaaacaggtctctctgccccactgtcgttagaaactactcgcgtttctccgtgccactaaccaactgaccagaccacgagtctcgtgagcccgggacagatatgtgtancttggtcgctctggacaccgaccaccaccgtaattagtaccctacttacacacacgcaccgaagactctaataacatctagtcc

SEQ ID NO: 249302 - DNA, 1467 bp, Homo Sapiens
  misc_feature (1174)..(1174): n is a, c, g, or t
tgtacaataagatggcggcgcccaggtggagcgcgtcgggcccctggatccggggaaacggccaaggttgcgggagtctcttcactctcgtctcaaagccattttgtgccgctgccgctgcctctacggccataaatgcccagagattagcggagaagctccgagcccagaaacgggaacaagacacaaagaaggagccggtgtccacaaacgctgttcagcggagagtgcaagaaatagtgcggttcacacggcagctgcagcgagtccaccccaacgtgcttgctaaggcactgacccgaggaattctccaccaggacaagaaccttgtggtcatcaataagccctacggtctccctgtgcatggtggccctggggtccagctctgcatcactgatgtactacctatcctggcaaagatgcttcatggccacaaggcagagcccttgcatctgtgccaccggctggacaaggaaaccacaggtgtaatggtgttggcttgggacaaggacatggcacatcaagtccaagagttgtttagaacccgtcaggtggtgaagaagtactgggccatcactgtgcatgtccccatgccctcagcaggagtcgtggacatccccattgtggagaaggaggcgcaaggccagcagcaacaccacaagatgacattgtccccgagctaccgcatggacgatgggaaaatggtgaaagtgcggcgcagccggaatgcgcaagttgctgtaactcagtaccaggtgctcagcagcactctctcctccgccctcgtggagctccagcccatcactggaataaaacatcagcttcgagttcacttgtcttttgggattgggattgtccaatccttggtgatcacaagtactcagactggaatagtttggccccccagaagctgtctgtgggcaccctgaagaagctggggctagaacagtcgaaggcccgctacatcccccttcacctgcacgcccggcagctgatcctgcctgccctggggtccgggaaggaggaactcaacttggtctgcaaacttcctcgcttctttgtgcattccctgcaccgcctgcgtttagagatgccaaatgaggatcaaaatgagaacaatgaagccaagtgtctgggagcacagtgaagaccatgggagcaccctggcacctgngagcacagtgaagaccctgagagcatcctggcacctgggagcgcaggttggcccctgaactgttctttgtttacaggactctgctaacttctcacttggaacagactgcgtaagagccaggtgggataaaggtaaagcaactcagctgctacaggggcttttaatggagaacaaagtctatttactggatagttggctgcactatggaaaaagcctggctgggaagtctccctggccgtggggatctcatttgccaatatgggaacagagccccaggggcccaggcagaactg

SEQ ID NO: 249303 - DNA, 1937 bp, Homo Sapiens
  misc_feature (526)..(539): n is a, c, g, or t
  misc_feature (1019)..(1036): n is a, c, g, or t
  misc_feature (1487)..(1487): n is a, c, g, or t
  misc_feature (1704)..(1704): n is a, c, g, or t
  misc_feature (1908)..(1908): n is a, c, g, or t
ttggatttgtctttggtctaatagaatttgagtctagtagaatttgagtctccagggaaagagctacttgaccaaattaaactagtagcaggtagagcatgaatgacagcatattataccatcaagatgttcttagagcagtgtatggatggatcgattgtactgccatcagttgtgactgacgttgtattcaaggagaaagagaaacttgtttagaaagcactttgaaagttttttgagtacgggggtgccctgtatcaccccgttatggttgaactttctccttcaaaattaccagacttggcagcagtggcaaattattgggctaaaagacttaatcagacatattctgggttcaaggctcctaatataatacctggtgcaaacattatacttccactcattcagatggttgcatcctgccaggcatccagtgggactgggaatatggacacttgaacattaaacatcctgaagaattttggaatgacaggttacaagtgaacataatcagttctctatattnnnnnnnnnnnnnngatttgggcatagattgggctcacataatctttagagagattttttcatttttgtgaaagtacagaaattcttaactgcttatgaaatgctgattgttaaacagcatccacagctattttgtgttgtttccctgaccccaccctgaagaaaagaaaaattatggcatattgaaaacagcagtatgatgtaagagaaaagatcacaaattccttgagggtgggtcttttccatactcataagcctatttataatattcagagtaatttattgacacatattaaatattccctccctatcccattaattgccaaatcatccaaacattttattgagcatctactctgtgtagggtgtaaagcagtactggggagacttacagtgataaaagacatagttttagcccttaagtgatgtactgtttcactgaagagatgggaattataagaagccaagtaaatttatggaattctcttctttgnnnnnnnnnnnnnnnnnnggcagtggagtcttgctctttaaatagagcaaggctagtctggaactcctgggctcatgtggtcctcccgccttagctttcagtgtagctgggactacaggtgtgaacacagcttggaaatctcttaaccatgggagttaagtctcaaaattctggtgatacaagtggttgaaacttaaaactgtatttaaaaaataggattcgtgaatttgagatagttcataagtctgcaaaaggctgtataaatacatattttacatttactattattaattttgtagtaaatttgagtacagcactctctttatctgtggaaacttcagactctcccctattactttaatttcagtgagacattattaaatataagtgggcttacacatttgttttgctttactgacaaataatacacaacttggaggcttttttttcctttctattcttcctctanatgttcaacacttttctgattttgtgatttgaggttgtttaatagcttcctgaggctccattgagaccgtatatacgtgacacttaacagtctagccttcctcggtacatatagatatatgatggtggctttgcctgtagtaaattcatgccaaaacataggctttcagtgcctattacatatgggctttcagcctctctctacttgagggatgtanggagtttattttctggagggcctgaaccctctttttcctttaacttcccttttactcctttcctaaagcccttcctttaataaaaaactaatgccatggtccctatttgggttttcccttttttggaattcccccttttctcttttaattaatccccccagtaaggagaagtggacattggggaaaatttcctccatggcgggnttaaaaaaagaggcaacgggtcctttccc

SEQ ID NO: 249304 - DNA, 1094 bp, Homo Sapiens
  misc_feature (484)..(492): n is a, c, g, or t
  misc_feature (763)..(777): n is a, c, g, or t
  misc_feature (873)..(888): n is a, c, g, or t
ttggtgctttttagtcgtcagggaaagcttcgactgcaaaaatgatatgctagtctgtatttttgctgtgctattgaggatcaggacaatgaactaattaccctggaaataattcatcgttatgtggaattacttgacaagtatttcggcagtgtctgtgaactagatatcatctttaattttgagaaggcttattttattttggatgagtttcttttgggaggggaagttcaggaaacatccaagaaaaatgtccttaaagcaattgagcaggctgatctactgcaggaggaagctgaaaccccacgtagtgttcttgaagaaattggactgacataactctcctcccttgttgatgacttcttgtggcatttcacacactgtagatggtcactcccttcatgtccatgttagctcatggtgtaagatgatgtcttgtcagtattactgttttgctaagccgcttcattcatgcctacacaannnnnnnnnaaaagggaactttagttaattaagtgataagggacttaaatatgaattagaatggtgcagaaagagataccttttctggatattttaaagtttaaaggtcagtttctcttaatctgattatgtgcacatatgaaaatggcacatcatatacatgtaaaatcaggcagtatacatttattaattactgtatttgacaaaggaaactcttaaattataatgtgaaacctggttttatgaaaccaaagactagtgcagcatttcagcatatgtnnnnnnnnnnnnnnngggaattgacatgtcacatatcaaatgaatggaaactttgttgaaactttaaaaagcaaatttactccaaagacttgtattggaaattacataccnnnnnnnnnnnnnnnnaaaggactacagattatttttaatgactaaattggagtgatacttcttacactaaaaattatttcttggcattctgaatctgggatgagaaaacaggattgtttcacaatagtaagcacataatttttaaggcccaaggcacatttgactcctgagatgaattttttgtggtcataatcaaatacttaagttgtttttgatgcccc

SEQ ID NO: 249305 - DNA, 1232 bp, Homo Sapiens
  misc_feature (146)..(199): n is a, c, g, or t
  misc_feature (330)..(339): n is a, c, g, or t
  misc_feature (506)..(506): n is a, c, g, or t
  misc_feature (616)..(616): n is a, c, g, or t
  misc_feature (797)..(812): n is a, c, g, or t
gtacaaaaaagttggcacaagaatcccccgaaaaagattaaaagtcttgagaggtcaggcaatttttgtaaggctagaaggaaaagtgaggttttagacttcatttcttttaaagttggcaaacaaacattttctgtaatggacannnnnnnnnnnnnnnnnnnnnnnnnnnnnnnnnnnnnnnnnnnnnnnnnnnnnntgatagtaaattatttcaggctttgcaggctataaagtgctgcagctccttagctttgctgttgttatagtgtagctggagccatagacagttagttagttagttatgagtgagcacagctgggtgccagnnnnnnnnnnaatgatcaagactcgtggcaggcagacccccccctcatttgttgatcctctgcttgaaagcacgaataagtgagaacagagcagtcatatggtttcagaaagtggttattctgggatttccaggattaaattttgtaaaactactaacaaaacaccccccaggaaanctattttggtataagaaacgacatatccctaaatagtgcttatttaacttcattataaatacatctacttaacaaaaaaatatattttgtgatcttgaggtcacttcgtntaggtcattatctcaacccaacctccccaaactctggtttgagccaatatgtgttctattgttctcagagcaccagccgactgtacaacaattgttgttataaaaatgtttattgtttaccaaaaccagtggacctcttatcaaatgctgcttggtaacaaaatctatcacagttttaatnnnnnnnnnnnnnnnngaagctaactatttgtctcattgtcattagttagactttctgcaaggtcacttaatccagacttattcagtgcattaatcagattctcaggtgttgcatgaactccctcttgatcttgccaggcaaccaggagctgcttagctctcatcttcatgtcttcactgtcacactcaatctgcctaatttctgagtctttcatttccaagtagggagccagaatcttccattgttcacccagcttgttggcaaatacctctatttgttctcctgttacaggtttgtctcgccgaacatcaggactttcattttccttcagtagagcatcattatcttcctcatcttcatcctcacctgtttttatttcttcagaaggaggcggtaattccttggctagctttattaccatattttcaagatacc

SEQ ID NO: 249306 - DNA, 1324 bp, Homo Sapiens
  misc_feature (1047)..(1055): n is a, c, g, or t
ttaattctttccaggaaaactaaagtgccatatttttgataatgtcacctgtattggagttataaacccggtgtgcccttttagaggtattgagggatgggcaagttaccttcctggttgggatggcgtttacccttccctgttggataaaattatcccaggctgagtgttcccccatctgtggaattcacccaatgtggatccaaaaatgttcgaggggaaaaaaaagatgacggcatctgtactgaatatgtatacttttttcctttctcattattccctaatcagcataacaactatttacatagctattttacattgtattcactatttacatagctacttacattgtattcacaattgtgaaagctattttacattgtattcacaattgtgaatactatttacattcacaactataacatatattattcacaatagttatgttcacaactatttacatactattcacaattgtaaatattattttatagctatttacatagctacatatttacataactttaaaatttacatatttacataactaaatacattgtattcacaattgtgaatactattttacattctattcagtataagtaatctaaagatgatttaaagtatatgggaggatgtgcatacataatatgcaaatactacatcattttataaaaggggcttgggcatctgtggactttggtatccaagtaggtgtcctggaaccaatccccaaggaatcaactctaatgtctaagctccagagctccaggcactctgacacctgaagttcttgaatgaagtgcctgtggatgatatttgtagggcatgtctatactgttaactaattttcttcatgaagattccagaatttatattcccaactgaattttgccctcttcaaaggagtaaccctgggaaagagaataaatgcaacttattttgttaaaaacccttctatcacttttctttaggaattgtcagcagtcagaacaatataagacattccttctgtctcattactctccagccatatctaaagcttgnnnnnnnnntcccaaatttaacacctttgtcattcagaaccatctgataacctgctatttaagtaatttccacaaattgagtgcattaaagcacaaagacttgccactctagtgaatactcagcaccactttttaaaagttatagagaaaaaggtttaaaataagcatcatctcctctgaagagaatatgcaattagacatagaatctggcacatctcttatgaggaagagtcacagcactcaatatttggcatatattctaattttttcaaaattcc

SEQ ID NO: 249307 - DNA, 1597 bp, Homo Sapiens
  misc_feature (96)..(105): n is a, c, g, or t
  misc_feature (419)..(682): n is a, c, g, or t
  misc_feature (701)..(709): n is a, c, g, or t
  misc_feature (838)..(864): n is a, c, g, or t
  misc_feature (1003)..(1013): n is a, c, g, or t
  misc_feature (1380)..(1409): n is a, c, g, or t
actttgtacaaaaaagttggcaggcgtgagtggtggccctatttttaaaccattcgttacgctgtgtagacagagctttattgccctggaaaagannnnnnnnnnaactctcatgcagttcagtctttccatcatttcactttgtgagtcactcacataattgtcaatcattcctctgaccttcttaagaatttacaccttaccgtctctgtgattgaagcagacttctcgctttatttcccttaggctcatttttctgtgggctctcccttaaagacacatggccacagacacctccttcacatatgtaatctgccttcccctgcggccttccgtggtcacagcaacagggactgctcaccccctccagctggggcttttctaacaagcacagtcagaaatgcgcaggcctggggttnnnnnnnnnnnnnnnnnnnnnnnnnnnnnnnnnnnnnnnnnnnnnnnnnnnnnnnnnnnnnnnnnnnnnnnnnnnnnnnnnnnnnnnnnnnnnnnnnnnnnnnnnnnnnnnnnnnnnnnnnnnnnnnnnnnnnnnnnnnnnnnnnnnnnnnnnnnnnnnnnnnnnnnnnnnnnnnnnnnnnnnnnnnnnnnnnnnnnnnnnnnnnnnnnnnnnnnnnnnnnnnnnnnnnnnnnnnnnnnnnnnnnnnnnnnnnnnnnnnnnnnnatttaacatttttgaaagnnnnnnnnnccggccagagcattaaaacaaataaaataagaaacacagaggccagtgttaggtgaagaactccgctgcttcagaaagagaatagcagcgctcgcttaccgtgggaacacggccagttaacaaaatggnnnnnnnnnnnnnnnnnnnnnnnnnnnaccattggtaataagatagttaacataagtggtcagaacttcgctgaatttgtaataaagcatttgttaagcgtgtaaaagtccaaattaaaagtcttggaagaaaaacagctatggcaatgagcctagacatttttcnnnnnnnnnnngctaagccgtcctaccagcaatctctctttctcctaagaatgtcatgccttctcaagacctgatgaaaggaataagatatttgtgcctttttataatagcatctattacgaaagtaaaattcagttgcttacagttttggctgttttgtagcactattataaacagcccaaatttatggccttggacttactgcatgacacatggcctggttacctgtcatggaatgctgcattggtggtttgccaagcttctgtggatgtttgaagactttatttttgcagtcttaaccttgggctggacctaagtgtatgtaaaccatatgatgtctgtattgtttatagatgctgaccaaagaaaactagaccnnnnnnnnnnnnnnnnnnnnnnnnnnnnnncatgcctatgctcatagtagatagtttgcaaatgaaagttgatttgccatacttttaaataatattgttttagcttgaatattctataatacacttttatagagtataacatgctaaatcactgttttgttgtaagaaaggtggaaacattttgttaataaaatgctatggttacgaatgtccccccc

SEQ ID NO: 249308 - DNA, 901 bp, Homo Sapiens
ttgggccgaagctctggtcagtgccatgatccggcaggagcgctccacatcctaccaggagctgagtgaggagttggtccaggtggttgagaactcagagctggcagacgagcaggacaaggagacggtcagagtccaaggtccgggtatcttaccaggcctggacagcgagtccgcctccagcagcatccgcttcagcaaggcctgcctgaagaacgtcttctcggtcctactcatcttcatctacctgctgctcatggctgtggccgtcttcctggtctaccggaccatcacagactttcgtgagaaactcaagcaccctgtcatgtctgtgtcttacaaggaagtggatcgctatgatgccccaggtattgccttgtaccccggtcaggcccagttgctcagctgtaagcaccattacgaggtcattcctcctctgacaagccctggccagccgggtgacatgaattgcaccacccagaggatcaactacacggaccccttctccaatcagactgtgaaatctgccctgattgtccaggggccccgggaagtgaaaaagcgggagctggtcttcctccagttccgcctgaacaagagtagtgaggacttcagcgccattgattacctcctcttctcttctttccaggagttcctgcaaagcccaaacagggtaggcttcatgcaggcctgtgagagtgcctattccagctggaagttctctgggggcttccgcacctgggtcaagatgtcactggtaaagaccaaggaggatgatgggcgggaagcagtggagttcccggcaggagacaagtgtggttaactacattgaccagaggccagctgccaaaaaagtgctcaattgttttttgtggtctttgaatgggaaagatcctttcat

SEQ ID NO: 249309 - DNA, 1245 bp, Homo Sapiens
  misc_feature (168)..(168): n is a, c, g, or t
  misc_feature (236)..(236): n is a, c, g, or t
  misc_feature (286)..(286): n is a, c, g, or t
tttaaattccccaaattttttcccttttggggccccccaaaatttttaagggccaggaaggggaggcccccaaaattttttggggaacttgcaaagggggaacccccttagttccagggaataagatggaaggaaattgtttttggaggtttaatttaaaccttaaanccaatctttttaacagcacggagtgtcaaacaaatgctttttgttgtgcaaaaaacagtctcaaaaangagtggtgacaaggagactgacaaggagaaatgagctattttttcatctnccaaaatgcactttctggtccacggtttcttagcactgcagatgttgcagaactgtgcagcagagttcatgctgggcatgggcaggcacttcttgtggaacatgtgccggcaatggaagaccaccacgctgaagggcttagctgcatctggcgaggagggcagagaaaggaggagaacttaatgcaacaagcaagatcattttaaaccaatcccgactgaaagtcgagttgcagtttaattttcagcaataaggtgcctttagagaatggcttatttacaaaagcattcctgaggggtggtatgatcagacacaaaacaggtcttataatcatgttgctatgcgattcacaggttacttgcttagcctctgtgtcacttacccagactacattgaggacaactgtaggaaaaccagcaagtgtatgtgccaatgcgcccctaacccctataatcattatacaccacagctgaagttgagtctgtggcttcataaaaatgctttgccagtccacctgctacctttgccaagaccacacactgactcagaggcggacctgggttacaagcccaggctgtggtgaccttgcattttactgcacttgtgcttgggcagatcccctcatctgttcctgctctgtgtggccagcttatttttggtaagatttagtgtcatcagcagagtaaatttggagttaaatctaactgtagagtgggaatgtatgtggttcctttttgctgcaacactgtctgaaatgctatggaagctcacttcttcacctgagcccatgcagttttcaacagaagcacttaaacatccaaatctaattcctctagaaaagaacctaagtagaacaacttctcatggactgccccatgaaataatcctttaatcctaagtaaacatgaggtcaactaggtcttttagtactttgttatgctgaacttatatttgaaccaa

SEQ ID NO: 249310 - DNA, 871 bp, Homo Sapiens
  misc_feature (316)..(324): n is a, c, g, or t
  misc_feature (698)..(698): n is a, c, g, or t
ttggccaaaatatagtttgcactttttaatctaaagtcatcccttctgagtgaaatttgctcataaagcatttggatactaagccattatttgccattttgggtactttatacaaagaaaattcagccctaccctgcataatttgaagacacagcagaaagggggcttagggatgaggtcctggtttttcttgtataaataggagtcatgggcgttagttctgtagtaataacttcccagcacctggacatctcttccagagttatcccactggcttggtgtgtatacattaggggaggataatctgatgctaacnnnnnnnnnctctttggttcttgaatagcttagtttctttaataacaagtcaaactttattacaacaataactgaagttattcttttaggttctcgtgaaattctcactgaaagccacattcttagcctaaggcatttcatcttttatgatataaaatgatggctatcaaatgattttccatacattgtactgatcaagttatacacccaggggtatatacactttcttcatgtttcttctttgtatatttggtgactgtatcgtcatagatgtacatattgtgtcggtagggctatgaggcatgttacaggaatgtaattttctcagaatttacactcactcgcagtcatttatttaaaaagataaaacaagataatgggtntctttgtattgtcactttgcaccagaaacatatcattatttattgatgtgattacttatttgttatccacctggtactagtaagttttagcactgaaattcctccttccctggttgtttggtatttatgaaattcctgaaattatgggggaaatcaccgttaatgaattaagt

SEQ ID NO: 249311 - DNA, 531 bp, Homo Sapiens
  misc_feature (104)..(112): n is a, c, g, or t
gactttattataaaatgccaccaaaccaaaataaagacagtgtacaatatattatttagggaagaaagtgatacctgttattgctttgttagaatttgggtttnnnnnnnnntaaagttgataaaaggatgggtcaattcagtggtgatttgcctcaaggataactcctcccacttcctatacaaaataagcaattacattaaaaaaatacagtcagaattttatggaatcacatcagtttttaatgtatgaatcagagaacataacaatcactataaatgtagcatggttatgtattttaagtctctagtcctattttccttagtgtaggcataaaagttcttaaaggcttagaatttactcttaaaatactataaaatattactatttttatgacaaaagcaatttatgaatttatggaaaaggaaatatttataaaatatgttagtaaaagcactgtttatgtttgtatagcaacatttaaagggtattcaaaggtcccaacttttttgtacaaagtttttctattag

SEQ ID NO: 249312 - DNA, 848 bp, Homo Sapiens
gttctatgtattcaaactatttattcaaaatataaatcatcaacataattgccactaatatccagtcccttcacaggacacgtgattcactgggagttataaattagcagctggcaggcagtgacacacagcaaaaatgaaaaccaagaggtgaaatagttctgaaataaaggttttaaagctaacagaaatcactgaattactaagtcattagcactaattttgagccaactaactaatttatatggagatgatacaacgtcttattctttggtatatacagactatgtttaaacaatgtttgaatgtctgtaacgtgactttcaaaatgctcctggcttttacaaagatgtgattaagatgtagtaatacatgctaaaccatttccccctgcagagcatgtggtaactttcatcagtcacattgagagtccagaagataaaggaaaaggtcgtggatttcgctgagaacttgccagagttgaactccctcattttccgttccccagcattagcgggttctgggactggtggctgtggtggctcgttggtctttgtgtcctagaaggtggggaataatcatcatcttgaaaaagaaaaaatggtcattactgaaggaaccatcttagtttacagccacctctgggtcaattcccaacattcaaaagctgagcagggctttaaagctatcttaataattatttctgtattgcaaacttcagcaatcttttttctagttacatttgaaatgttattcttttgggatgtgctcaagtgaatactgctttttcctctgtcttgcttcattactttttagtttgcttcaattgaagcatcattgtaagccaa

SEQ ID NO: 249313 - DNA, 1023 bp, Homo Sapiens
  misc_feature (229)..(252): n is a, c, g, or t
  misc_feature (270)..(402): n is a, c, g, or t
  misc_feature (744)..(768): n is a, c, g, or t
ggaagcatgtccccacccccatgctagatcccagctgcattaaaagtaaaaattaatggcaaactataaattttaagatcatttgcttcacacataaacacagactagctgcatggtggtctcaagagatctcaagtcttgctgacatgcatatagggtacaacttattacaggttcataacatttgcttctcaattcacataaaagagcaaattgctgtggctttgcnnnnnnnnnnnnnnnnnnnnnnnnaagagagagaggagccannnnnnnnnnnnnnnnnnnnnnnnnnnnnnnnnnnnnnnnnnnnnnnnnnnnnnnnnnnnnnnnnnnnnnnnnnnnnnnnnnnnnnnnnnnnnnnnnnnnnnnnnnnnnnnnnnnnnnnnnnnnnnnnnnnnnctacatatataccaaagggataagttaggaacaccagaaactcagtagtaactcactttaaccttgcttctggggctccaattcaagtgatgctcaatttcaaggtacaaggaaaaccatgagaatataaagtcataatgccatttccactcagatgaaaagatttatctatctttagatactcaaaattattcttggcattttagcacttttggtacacatttcctgatgtaggaaatagtaaaatttcagagcctatggcattggctttcaccacctatgcaattttctacacatctgaaaattaccagtttatctaactccttaaatgttcctctcttnnnnnnnnnnnnnnnnnnnnnnnnnttgctggaagaaacaggaagcatccaggtccaaatgacagcataacagactatgaagaaacagggcttaagtgcccatctagaacaagatggtctagattacaataaggaccccatgggacagaacatcaaaacattcaactttcaagtaaatgtcttggaagtaaacatttaaaatttataggacttcctctggcatgtaagtatgatattagaagagtttcctttgacaaacgacaatgacccaagaagtacg

SEQ ID NO: 249314 - DNA, 303 bp, Homo Sapiens
  misc_feature (215)..(261): n is a, c, g, or t
gggatgatagactcatggacttcaggagcccttacttggttttgatcagtgtagcaaattagggatgaagagttcaaaccttttggccctttctttcttttctaggcttctccctcgcagggtgttccgtagtttcttctcgagccaatgcatgtattatagcagcaggtgtctttgtgctttctcatcatagtaacgtactacttgtaaatacnnnnnnnnnnnnnnnnnnnnnnnnnnnnnnnnnnnnnnnnnnnnnnncattggtgtgctgaatattttccatgccctcactcctttaag

SEQ ID NO: 249315 - DNA, 1217 bp, Homo Sapiens
  misc_feature (391)..(391): n is a, c, g, or t
  misc_feature (406)..(418): n is a, c, g, or t
  misc_feature (991)..(1035): n is a, c, g, or t
  misc_feature (1039)..(1046): n is a, c, g, or t
  misc_feature (1048)..(1063): n is a, c, g, or t
ttggcaaatattttaaaactgcatttatcattttttaggtcttcattaaattttaaaatgtaatatctgtttcccaccccctacattaggaggataatttcttaaaccacattgttttaattgatttttcttatcttgatttctttcattagaaactatccctaaatgtaaagatcttttgccttcaaatttggcttattttttctgatttatgagggtttgaaagaaagaattcacctaaaagattccatttccagttttataatgtatttcaggttctgaataacaatatttttccaaattgaaagtaaatattcgagaagttgatagcctggttaaaagttagatcctctattaccattctaagcacattcacttctatattgaagtntttggtaaaaattcnnnnnnnnnnnnnaataaaaaattaggttattactttttttataaccagatttttaaagctctaggttttaaatcagtgggtatcataaaagccatatataaaagatcctttcttatagtaagacttgtgcttgttagcaggtttttctgttagtttttcccccataacatttaattattactaaaattgtatttacaatagtggtgccaaatcaaatggtaatttaaataaaatctattctgtgtttatgtagggtggtataaaaaagaggtcttcatttagacatgtgatttctaaaattccagaaagcaaaattgataagatgttataaatttggaccgttatttataatcagggtagcattaaaatggagaaaagaaagttttctgaaaaaatgcagtaatataagccacatttctaaagtttatttttatgaaagcttcttttaagattttgaaatctattctgcattcccaagagtttatgtttattgtattttatatgatctacaacatataaaattgtgtatttttctttggttgtccctattaacaaaaaagtattttaataaaaaattgaaatgannnnnnnnnnnnnnnnnnnnnnnnnnnnnnnnnnnnnnnnnnnnncccnnnnnnnnannnnnnnnnnnnnnnngaaaattgggggccccctccgcccctcaaaaacttttttaaccttttctttggccgccgggcccccaaagggaaagggaaacgggggccatacttgttttcccaaggaaaaccccgggcccagagaataagggctttgggattccccaccccat

SEQ ID NO: 249316 - DNA, 1110 bp, Homo Sapiens
  misc_feature (586)..(982): n is a, c, g, or t
  misc_feature (1038)..(1068): n is a, c, g, or t
gggcactgggttccctcttgggtcttgtccttttgtcttggggccctttcactccctgcacggtgagtggtgggcacaggacaggggctgatgttgatggagtgatgggagagaactgacaggggctgggaaaagcaaggagggaggaagaaaaaagtgggggcctcatcttctctcagagaaagggtgaatctgattttggggcaactgaagagagaaaagtccttagggaataaacacaacactgcacccagtggagcatttacccgtttccctcttctccagagcttgtgagcctgcaggtcctggatcaacacccagttgggacaggagaccacagggatgcagcacagctgggatttcagcctctgatgtcagctactgggtccactggttccactgagggcgcctagactctacagccaggcggccaggattcaactccctgcctggatctcaccagcactttccctctgtttcctgacctatgaaacagaaaataacatcacttatttattgttgttggatgctgcaaagtgttagtaggtatgaggtgtttgctgctctgccacgtagagagccagcnnnnnnnnnnnnnnnnnnnnnnnnnnnnnnnnnnnnnnnnnnnnnnnnnnnnnnnnnnnnnnnnnnnnnnnnnnnnnnnnnnnnnnnnnnnnnnnnnnnnnnnnnnnnnnnnnnnnnnnnnnnnnnnnnnnnnnnnnnnnnnnnnnnnnnnnnnnnnnnnnnnnnnnnnnnnnnnnnnnnnnnnnnnnnnnnnnnnnnnnnnnnnnnnnnnnnnnnnnnnnnnnnnnnnnnnnnnnnnnnnnnnnnnnnnnnnnnnnnnnnnnnnnnnnnnnnnnnnnnnnnnnnnnnnnnnnnnnnnnnnnnnnnnnnnnnnnnnnnnnnnnnnnnnnnnnnnnnnnnnnnnnnnnnnnnnnnnnnnnnnnnnnnnnnnnnnnnnnnnnnnnnnnnnnnnnnnnnnagggttgtgggggcccttaacagtgccatattaattggtatcattatttcctgttnnnnnnnnnnnnnnnnnnnnnnnnnnnnnnngaggacagagtctcactcctgccacccaggcctgcagtttcc

SEQ ID NO: 249317 - DNA, 1944 bp, Homo Sapiens
  misc_feature (670)..(687): n is a, c, g, or t
  misc_feature (1028)..(1028): n is a, c, g, or t
  misc_feature (1032)..(1032): n is a, c, g, or t
  misc_feature (1036)..(1056): n is a, c, g, or t
  misc_feature (1058)..(1060): n is a, c, g, or t
  misc_feature (1063)..(1064): n is a, c, g, or t
  misc_feature (1066)..(1130): n is a, c, g, or t
  misc_feature (1137)..(1138): n is a, c, g, or t
  misc_feature (1161)..(1162): n is a, c, g, or t
  misc_feature (1165)..(1165): n is a, c, g, or t
  misc_feature (1266)..(1276): n is a, c, g, or t
  misc_feature (1306)..(1366): n is a, c, g, or t
  misc_feature (1395)..(1395): n is a, c, g, or t
  misc_feature (1455)..(1455): n is a, c, g, or t
  misc_feature (1693)..(1694): n is a, c, g, or t
  misc_feature (1696)..(1699): n is a, c, g, or t
  misc_feature (1706)..(1707): n is a, c, g, or t
  misc_feature (1712)..(1712): n is a, c, g, or t
  misc_feature (1718)..(1719): n is a, c, g, or t
  misc_feature (1722)..(1723): n is a, c, g, or t
  misc_feature (1729)..(1730): n is a, c, g, or t
  misc_feature (1739)..(1739): n is a, c, g, or t
  misc_feature (1741)..(1741): n is a, c, g, or t
  misc_feature (1743)..(1744): n is a, c, g, or t
  misc_feature (1781)..(1781): n is a, c, g, or t
  misc_feature (1803)..(1803): n is a, c, g, or t
  misc_feature (1834)..(1834): n is a, c, g, or t
  misc_feature (1857)..(1857): n is a, c, g, or t
  misc_feature (1867)..(1867): n is a, c, g, or t
ttggcgttacttaactttattttgctgctaatttgcgcattagccggtaacttgcaagtctggagaccacttactgttgagggtagctggaattttagacccttggcagtatttaagatttagacatttagccttgtgaaagttaccacagtgctccatgtgattcattgactgtgagcctgttgtccattgcactcagccctgtactcacttcttcactcgctgtcctggttttactgttcagattttggtgggttctcaaagcagtaccactctcatctgctcagtacatctgcggcaactggctgccttcgatgctgtcattgcgttcagcccagcacatcacagccccatcagtgtgtagccaccgctctcgtttttctgtatcgcttttatctcctgaaaaagatgcaccaaataagagatcatctatatcaggaattgaatgtctaactcaaacctctcatttttgtttaataggtagatctcatttgaagtctcctatctgaatctctgaaacaattatagtttgattagacaaaggtttttaataacacttcttttttgctgtagtcaagcattaatagaaactagtttaattttcacagtggtaaatatttttattcttgagttatctaggaatggattttccacgatgtctagtgacttnnnnnnnnnnnnnnnnnncgtttctacaaatccctttggttttccatgggatctggaataaaatgtcagtgtctataaactgtatgtcatggagtttagtcccttgtttcaggtttaatagaaaaaatcaggaagtatcatggcattgtctagacatcatgaagctattttatttccatagttggtaaacagtgaaaatttcattatctccaactactaggtacaactttaggccacaggaaaggttatttggcccgaaagtttggaggtgctccttgaggtgggaagtatcttgtgggaaagtagttacttgattcaatttagttcattggtagggttggggacttggtgttgggttntttntttnnnnnnnnnnnnnnnnnnnnntnnnttnntnnnnnnnnnnnnnnnnnnnnnnnnnnnnnnnnnnnnnnnnnnnnnnnnnnnnnnnnnnnnnnnnncttggtnngggctttggtttgggctctgttnnttngggccggcgcctcgcccgcccgtttcgcggcgcgccgcctccgtctggccgttccttctcgtcttgccccgcctcttccccccctcctgttcccttttgtnnnnnnnnnnntggccgccttcttttgccccgcgtgttccnnnnnnnnnnnnnnnnnnnnnnnnnnnnnnnnnnnnnnnnnnnnnnnnnnnnnnnnnnnnngctgtcgccgtttcgcgcccttgttggcnccactcggcctccgcgcctccgttgttcccgtcggtcgcgccatccgctgcgcggctccntcgccgtccttcctttcgccgcgcttttccgtttcggccctggtccgcgcctcgcccattgtgaattccattcccccctttttcgacctactgttccaaccgccctcgccccgctctccgtgcccgactcactcatgcgcctccgtctttcttctcccccctcttccgcgaagcgctcacgctgtgttcctcccgtgccctgccgctccgtatcctagtcgccgtaggccgtccgctnncnnnnccgcggnngtggnagtgcnnggnntggcgnntcgagcggntngnnggcgagcgcggcggcggtagcgttcgcgcggcccgancgcctttttgtggtcgcccgtntatgcgcctgatcctctcgtttatcctactncacactgcccacgccgccgtagntcacgtcacnccgtgtacatccgccgacactaccctccgtccagcaatttatctcatttctctccgcttgccccgcgctgtatcatc

SEQ ID NO: 249318 - DNA, 1499 bp, Homo Sapiens
ttggggagaagcgccaagtgcgcatggggacgctatagcaattcgtttgctgtccttcctctccttcgaagatgacaaggcctaccatcgtttcttcctgcctttgggccgtcaggcagttggttgggacccgctccaaccctcggttcttcctgcaatacagtggatacaatttgtcatggctactctgagtgttataggttcaagttcacttattgcctatgctgtattccataatatacagaaatctccagagataagaccacttttttatctgagcttctgtgacctgctcctgggactttgctggctcacggagacacttctctatggagcttcagtagcaaataaggacatcatctgctataacctacaagcagttggacagatattctacatttcctcatttctctacaccgtcaattacatctggtatttgtacacagagctgaggatgaaacacacccagagtggacagagcacatctccactggtgatagattatacttgtcgagtttgtcaaatggcctttgttttctcaagcctgatacctctgctattgatgacacctgtattctgtctgggaaatactagtgaatgtttccaaaacttcagtcagagccacaagtgtatcttgatgcactcaccaccatcagccatggctgaacttccaccttctgccaacacatctgtctgtagcacactttatttttatggtatcgccattttcctgggcagctttgtactcagcctccttaccattatggtcttacttatccgagcccagacattgtataagaagtttgtgaagtcaactggctttctggggagtgaacagtgggcagtgattcacattgtggaccaacgggtgcgcttctacccagtggccttcttttgctgctggggcccagacgtgtgtggaggaacctgatacttcagacagtcagggctgacaagaaggtttacactttgtgtattcacagctgtcattctaatgatcataaagctgactaagccacaggacaccaagcttcacatggccctttatgttctccaggctctaacggcaacatctcagggtctactcaactgtggagtatatggctggacgcagccacaattccaccaactaaagcaggaggctcggccgtgatgcagataccccggacaccctttattatggctcacagaaagagaattctataggcagggggcttaaaattcactgggaattccacccctggaacttttccctgcccggtaactttcttacccattttttttggaaaacttacaataactgggaaaccattcccaggaaaactgggaaggttaatttccttaccgccttaaaaggggaattgtggaaaaagaaattggtttggggggaaaaaggggaaccatcccttttaaagaacccttttttttctctaaaacgtttatgtggcccccccctataaaaacttgtggcaaagaaaaaaattcccccacaaaagggc

SEQ ID NO: 249319 - DNA, 1377 bp, Homo Sapiens
ttggcttaagagttcatcctttccgcctccaccccgcaaaaagcaggagaactaatgttttagcagaggctggaccttgcttgtccttgcaagacatatgctcacagcttcccatagaggttttgattctgtgcagaattatccagatagcagcccctgagcccatggggatatttcgccatggttctggcattgttcctgaagcagatggcaggcagcctgtagtccacagttcactctgagtgggaaggtgacttcccaggacagccggacatagcactgctgagcccagctggccttggagctgtggacacctgttccctgttctcagccagagctctcctggctcgggctcacagctgcttgttgcctgtggtgggccaagatcctatgtcacagggtacacatctgcctgaggtcacttattaacccccagtttttttcctttcctggtctctagggcacccctaggcttggaaggaagacgtctcctggccccacccaccgaggttcatttgattgattgtatgcaaatagccctttatttacatgccactattaagctgctaattgttcctgttggggtgacagatactgaatgtatacgtattgtgcctgagctcaccagcaaacagaagcatcaagcccaggggtaaaggctgaagctttcacagtgcagagactgctagcctgggcacacgcacctcctttctggccgtcttctgtgtagggcacactttaacccagtctctgttgctgttgagtctctgctccgtttttgtacagtcacaggggaatttctgatctgaaggggcacctttctgttcactcccacaaagtggtgtctggttctcactgagacgttttaagatttttccacaaaatatttatatgtactaaatgtggaaccattagaaagttcttcccaaatctcattccagcatatttttggatttttcttttgtcttattttaaaataaggaagtcgagatgactttgatcattggtaacttgggcctgggccagacaaagtataaaacttacaaaagaatattctcatttggtcttaactaggtagatgtaatatatgactttttataaaaagggtatctatatgaacttgacacagtattttcagcttttgtattccatactaaagccatgaagaactacacgtaacatcatcatttgtattaattgcacaacctcaatgctaaaagttggattgtgttagaggaatcggctctgtatttgcctctagagaaacacagggttctctttggatttatggattcctttttaccgggtcccattttactttggccctctatggaattaaatgtttggaagtgccttagactcctggccatatttttc

SEQ ID NO: 249320 - DNA, 1168 bp, Homo Sapiens
gggccagtggatggttttagttctttcagatgaactgccatttgtgtttcagctcacagttctttgctgggtaaaagaaatactttctgacagtcacctgagccttaaatgtaagtattacatgacatgcattctgtttcttccagagttctgtctgccacacgaaagagaatatttgcttacttgatagaactttggcattttcatcattcttttacttaaccaggcttatggcatgatctctggaacaaatttgtaggaaaaaaattactccaattgaatgactgatgtatgtaatcaacttcattgggctgcagtaaactagtggaaattagagagttgttttattggtgttttctactgtgagttaattaaaaattgtttttatttggggtcattatgtcacagtcttgagttaacaagatcttacgtgattggccttttctttgttttctcttaggagttgtgtctcgtgaatgacagtactaaagctattaacaaccaagagtttgacagagaactataagcctgttgtatctcctaaaagttgtcaactccccacccttggactttaaatgaaaattttattcagtccagctattcttacagtcccctagggattttcatatatctatgtataggagataaaatttgctagttacgatttttaaaaactgggctagtgaaaggaaagtacctctgaaagaaaccattttagcaaattatggttatatgttttaatgtaatctacagaatgttttatagtaaaattctagcaccactagaataatcacatagcatgtacaatatatttatgctggctgaaaagacagaatctgggaataataaaattgcaaccagtttggtaatgcaaacagcagaatagaatgaaatctcagtaatgaattaaagcaacaaaaagatattgattggcaaaaagcaagatataagagatgcatttgcttaacatctctacataatatttatggtctggtcagtattggtctggtcagtattgcctggctgacgtgaaatgtaaactagtaacatgttattgatctgctaaaactaaccctctttttaagaggagatttaagaagacgtcaatcaaaatgtcaaatatgtgtgtcagatataaataatttttcacattgtattgttgctatat

SEQ ID NO: 249321 - DNA, 1145 bp, Homo Sapiens
ggttgctggaaacactcaagtttggtgttttggagttgcaagaacacctggatacatacaatgtgaaaagagaagccgctgagcagtggctagatgattgtaagaggacatttggtgccaaagaagacatgtataggataaacacagatgcacaacaaatggaaatactagcagaattggagctctgccgaagattatacaaattgcattttcaattgctgcttctgttccaggcctactgtaaacttatcaaccaagtaaatacgataaaaaatgaagcagaggtcatcaacatgtcagaggaacttgcccaactggaaagtatcctcaaagaagctgagtccgcttccgaaaacgaagaaattgacatttccaaagctgcacaaactactatagaaactgccattcattctttaattgaaactttgaaaaataaagaatttatatcagctgtagcacaagtcaaagctttcagatctctctggcccagtgatatctttggcagttgtgaagatgaccctgtacagacactgttacatatatatttccatcatcagacgctgggccagacaggaagctttgcagttataggctctaacctggacatgtcagaagccaactacaaactgatggaacttaatctggaaataagagagtctctacgcatggtgcaatcataccaacttctagcacaggccaaaccaatgggaaatatggtgagcactggattctgagacacttcaggcctttaggaaagaaactaaactgaagatgatgaagaatattaaccaagcaccttttatggacccttgcattcactgataactttctggcagcatctactttttagtgtaactaatgtcaaactgtatcatcaaaaacaaagatctgaaagaaaaaaacatctgatattttaacagctgccaatatctcccacaataactgcgtgaagaaggaattttttaattacttaacctacgtgaaaagaaaagggctaaaagtgatgcctacaaatacattactttctggggaaagaaaagaattccaagaatgtttgcaataatggcctccaatactgaaacaaccaaaagcagtgaatgagctgaaatcaagctgtttcattttagctgagactgcaaagctgc

SEQ ID NO: 249322 - DNA, 1124 bp, Homo Sapiens
ccttcctaggttttatgacttgtttctgggaagaagtgcaggaggaaagtgagtgagacttccctgcttctgctgttttctcaaacatcaagatgccatattttggagtagcatgtcttaaatctcatcacccgtctcaggtgcagtttcatggccatgaagaagacagaaagaccactcatacctgcataagtattatcacaaactttcttatcttctgtttgttctcctgaaaacccatttgtctttcctaaacgaaccaatttgtccttcccatagatgtctttctcccccattcctttcccctactaagttaggtatataagccccaaattctaaccacacttttcagttactcatcacggaacactcccacatgtgcgaacattgtccgcataaataagctcttttctcttactaatgtctttttttcagtttaatttgcaggctcctattgaaataacaaaagttggtagaggaaaaagttttttctcccctacaaaggccaagaacattttggctttatatttatatttatattataatgtgaattgattataattataatgtgaattgatagaaatatatatattttttttctgcccctgcttggcacatgacagaacatgggcatagacagactggctattggtaatccagtcctgggagatgatcaggaggcagtactcaatcctactttcttctctacagcttcccatgggctaaagaatttacatgtctgcccacagcaaatgtactcaggcttctacactaacataagcccacggaaatgaaacagaaagggacagttcatatgtttctgaatagatccagttgaatagtctcattcaatttgagactgttgaacaactgttgttgttctacatacatttaaagtcagggcacatgcgtcactgcttatttttcttacttgacatattccctgcatttccatgtctgcctgtcctttagataaacagtaaaagtttccccatgtggccagtatttctcaaatgggttaacatccaaaatcaccctggaaggaccttttaagctaagattggtttgggtcccattccccaagggattcctgaaatccaacaaggttttgccaatggggtcct

SEQ ID NO: 249323 - DNA, 1136 bp, Homo Sapiens
  misc_feature (402)..(431): n is a, c, g, or t
  misc_feature (775)..(805): n is a, c, g, or t
ttggaaaagagctggtggtttgatcatttctgccatgatgtttacaagatggcgaccaccaaagtcaaacgactaacctatctatgaacaacagtagtttctcagggtcactgtccttgaacccaacagtcccttatgagcgtcactgcccaccaaaggtcaatgtcaagagaggaagagagggaggaggggtaggactgcaggggccactccaaactcgcttaggtagaaactattggtgcttgactctcactaggctaaactcaagatttgaccaaatcgagtgatagggatcctggtgggaggagagagggcacatctccagaaaaatgaaaagcaatacaactttaccataaagcctttaaaaccagtaacgtgctgctcaaggaccaagagcaattnnnnnnnnnnnnnnnnnnnnnnnnnnnnnncaaacattgctgcctttgtccccacacagcctctaagcgtgctgacatcagattgttaagggcatttttatactcagaactgtcccatccccaggtccccaaacttatggacactgccttagcctcttggaaatcaggtagaccatattctaagttagactcttcccctccctcccacacttcccacccccaggcaaggctgacttctctgaatcagaaaagctattaaagtttgtgtgttgtgtccattttgcaaacccaactaagccaggaccccaatgcgacaagtagttcatgagtattcctagcaaatttctctctttcttcagttcagtagatttccnnnnnnnnnnnnnnnnnnnnnnnnnnnnnnnggctgtgacctcttcaaaccgtggtacccccccttttctccccacgatgatatctatatatgtatctacaatacatatatctacacatacagaaagaagcagttctcacaatgttgctagttttttgcttctctttcccccaccctactccctccaattcccccttaaacttccaaagcttcgtcttgtgtttgctgcagagtgattcgggggctgacctagaccagtttgcatgattcttctcttgtgatttgggttgcactttagacatttttgtgccattatatttgcattatgtattttataatttaaatgatatttaagtttttgg

SEQ ID NO: 249324 - DNA, 1371 bp, Homo Sapiens
  misc_feature (1063)..(1063): n is a, c, g, or t
  misc_feature (1263)..(1264): n is a, c, g, or t
ttggcatcatcgagcccattatgaaactgaaggtagccgaggggcagtaaaagcatctactgggggacatcctgttgtgaagctcctgggctataacgaaaagccaataaatctacaaatgtttattgggacagcagatgatcgatatttacgacctcatgcattttaccaggtgcatcgaatcactgggaagacagtcgctactgcaagccaagagataataattgccagtacaaaagttctggaaattccacttcttcctgaaaataatatgtcagccagtattgattgtgcaggtattttgaaactccgcaattcagatatagaacttcgaaaaggagaaactgatattggcagaaagaatactagagtacgacttgtgtttcgtgtacacatcccacagcccagtggaaaagtcctttctctgcagatagcctctatacccgttgagtgctcccagcggtctgctcaagaacttcctcatattgagaagtacagtatcaacagttgttctgtaaatggaggtcatgaaatggttgtgactggatctaattttcttccagaatccaaaatcatttttcttgaaaaaggacaagatggacgacctcagtgggaggtagaagggaagataatcagggaaaaatgtcaaggggctcacattgtccttgaagttcctccatatcataacccagcagttacagctgcagtgcaggtgcacttttatctttgcaatggcaagaggaaaaaaagccagtctcaacgttttacttatacaccagttttgatgaagcaagaacacagagaagagattgatttgtcttcagttccatctttgcctgtgcctcatcctgctcagacccagaggccttcctctgattcagggtgttcacatgacagtgtactgtcaggacagagaagtttgatttgctccatcccacaaacatatgcatccatggtgacctcatcccatctgccacagttgcagtgtagagatgagagtgtcagtaaagaacagcatatgattccttctccaattgtacaccagccttttcaagtcacaccnaacacctcctgtggggtcttcctatcagcctatgcaaactaatgttgtgtacaatggaccaacttgtcttcctattaatgctgcctctagtcaagaatttgattcagttttgtttcagcaggatgcaactcttttctggtttagtgaaatcttggctgtcaaccactggtcatccatacccatttcatttcttcaaattnncaggctcaacagggacatcttctttagcccatacaccctcaattctggtgcatacccctgggccctcatctggcaatcaatgggggataatcatttgttccaaatta

SEQ ID NO: 249325 - DNA, 1163 bp, Homo Sapiens
  misc_feature (333)..(345): n is a, c, g, or t
  misc_feature (350)..(416): n is a, c, g, or t
ttggccctctctcagacatgtgctagcatgggtattatcattgagaaagcacagctacagcaaagccacctgaatagcaatttgtgattggaagcattcttgagggatccctaatctagagtaatttatttgtgtaaggatcccaaatgtgttgcacctttcatgatacatttcttctctgaagagggtacgtggggtgtgtgtatttaaatccatcctatgtattactgattgtcctgtgtagaaagatggcaattattctgtctctttctccaagtttgagccacatctcagccacattgttagacagtgtacagagaacctatctttccnnnnnnnnnnnnnaaagnnnnnnnnnnnnnnnnnnnnnnnnnnnnnnnnnnnnnnnnnnnnnnnnnnnnnnnnnnnnnnnnnnngagtagctgagactacagcccatcttatttctttaaatcattcatctcaggcagagaacttttccctcaaacattctttttagaattagttcagtcattcctaaaacatccaaatgctagtcttccaccatgaaaaatagattgtcactggaaagaacagtagcaatttccataaggatgtgccttcactcacacgggacaggcggtggttatagagtcgggcaaaaccagcagtagagtatgaccagccaagccaatctgcttaataaaaagatggaagacagtaaggaaggaaagtagccactaagagtctgagtctgactgggctacagaataaagggtatttatggacagaatgtcattacatgcctatgggaataccaatcatatttggaagatttgcagattttttttcagagaggaaagactcaccttcctgtttttggttctcagtaggttcgtgtgtgttcctagaatcacagctctgactccaaatgactcaatttctcaattagaaaaagtagaagctttctaagcaacttggaagaaaacagtcataaggtaagcaatttgttgattttactacagaagcaccaactgaagagggagtgtttttactttcagactccgggattcccattctggagtctctctgcttttaaaaaccctccctttgcaatagatggccaaaacagaatgatggtttattaaacttgggaaatttacgggggccctccagaacaagtg

SEQ ID NO: 249326 - DNA, 1265 bp, Homo Sapiens
  misc_feature (255)..(347): n is a, c, g, or t
  misc_feature (437)..(497): n is a, c, g, or t
  misc_feature (834)..(876): n is a, c, g, or t
  misc_feature (1026)..(1073): n is a, c, g, or t
ctccagttgctgggtggctgcagagaggggtgagagctggctgcacatgtcctttcctttaagccttcattctcacttccttacagccctttacttctccattgtctttatccctttcctgcccttggcctctgtgtttagttggcattgtatagcagtcactccacatcagagaaaggactggtcaaaggatcttgtaggcagaaaatgctgaaagcactcctttcagagcaaagagagggaaatggcatgtgnnnnnnnnnnnnnnnnnnnnnnnnnnnnnnnnnnnnnnnnnnnnnnnnnnnnnnnnnnnnnnnnnnnnnnnnnnnnnnnnnnnnnnnnnnnnntcagagaacttccattcagatgggggcagatgcataaaaatccatagcatagtgattcagtcacacaatatgttagaaggtggtatgtgnnnnnnnnnnnnnnnnnnnnnnnnnnnnnnnnnnnnnnnnnnnnnnnnnnnnnnnnnnnnntgcttgagaccaggagttcaagctataatacgatcttggatgggaacaggtgggagtcagggtttgtttacacgtaagtgagaactttaatgagttatcttcagaagcagtgaatgccccatccctggagatagttaatcagggagcagctgactactaccagaaggctgcgtaaggaataagatatgagtaaaggcccttctgggtctgggtgctagggacttgaagcaacatgaactggagggagctgtgatgtggacacgctgaaatcggtggggaggaagcggaagattcaagggacctcaagagacagaagagtcaggactggatgactccnnnnnnnnnnnnnnnnnnnnnnnnnnnnnnnnnnnnnnnnnnnttcctgtgctgtacgagggagaaggttcccaggctgcggatgatgtattcaggatgctgagggcttacctgtgggggtatcactgggtgctagggacttgaagcaacatgaactcccagtgaagaccatggttaaaagggacattattcnnnnnnnnnnnnnnnnnnnnnnnnnnnnnnnnnnnnnnnnnnnnnnnnctgcaagcaatttgccatatcaataaagaaatgtctacagattcaagtctgaaagagaagaaggtaagtgatcagtaacccttacagacatggaaaccaaggaagcctcattcctgtgctgagaatattctagtagctcctgctgctgccacatggcagctgggaataccagtagtctcagcactcggtccc

SEQ ID NO: 249327 - DNA, 1077 bp, Homo Sapiens
  misc_feature (266)..(369): n is a, c, g, or t
  misc_feature (481)..(510): n is a, c, g, or t
  misc_feature (958)..(959): n is a, c, g, or t
ttgggacaaaagcattttcacagccctgccacataagatctagtttttatttctagagtgctgctatgaataattactatagctgctgtccatcttgcccatccattaaggtaccttctcacaaacatttctaatctactggctggagtgcagtggtgcagtctgtagctcactgcagcctcagactcctaggctcaggcgatcctcttgccctggcctcccatgtagctgcaactataggtgtgtgccactacacctggctaatnnnnnnnnnnnnnnnnnnnnnnnnnnnnnnnnnnnnnnnnnnnnnnnnnnnnnnnnnnnnnnnnnnnnnnnnnnnnnnnnnnnnnnnnnnnnnnnnnnnnnnnngccaccaggcaccaggtgtgatctaccacacctgtctaaaaagtatgtatttttaaatttttttgtagagacaggatctcactatgttctccagctggtctcaagctcctgnnnnnnnnnnnnnnnnnnnnnnnnnnnnnnagtgtgagccactgtgcctagtcactttaattgagatattggcaagtcaactgccatgcagagcccagggcactggttatattcagtaggaaactgaactcagcactcagaattttaaattaaatcaatgatcttcaagtatttgccactttcgagtacagctaattggataatctcaaaccctttagtgaaaatatcttaaatgcattgagaatattttctaattacctgtgtatgctacagtacagacattaattctataaacatgttcataggtctttccccctcgccccgcccggtcttctaagggcaattttctgtttcctttttagtgagttcatgaatgtttaacgggttctggggccaagcttttcttgctttctgagccttaaaattattaaaaccccccttatatttgctggaaaaccaagccccacatccaattacnnaattccccttgtggggccggccttgggcccctccaaaaagtttttctaaaaccatttcctttgggccccgcgggcccccttaaggaaaagggaaacttggggcaataacctgttttcc

SEQ ID NO: 249328 - DNA, 932 bp, Homo Sapiens
  misc_feature (719)..(744): n is a, c, g, or t
ttggctaatagataaactagtaccatcatgtaaggaagatgaagccatgttgcatccacatgttcccgtttgcagaaacctcacaggacagtacgaatatctggcatttttaagttcattaaagcagcaaattccttctcgcctttaagggctatggttgtagtgtgacccgtggctaacctgctttcaaaatcaagtatttgctgtagcagagctttattgcaggcattttaaaaattgaataaccatgtgaaataatttgggcttaaaagtgaacataaattatagagtggaaggtaagggacaaaagccttttacctttaattttcctggagaattatataaaggttttcttagaacaattttgccctgattactgaagcgtcaaataaagctggagtgaaaattttgttttgaaaaggtgctcaagctctgacatttttggttttcatagtcgtgaagtatttatcatttgcatgactaatggcacaggaaaaacctattcataagttttacaatcaagtatagaggggtcttcagctaacttagttatacataaatgctgaaaagattatcttgagctgggccttgggagaagaatttggccttcagaactgcaatatcactgagcctgcgatctatacaccaccccacattttgttggtttcacagtcttgtgcaagtaacctctggtcttacgtgtgtaactgagagaagannnnnnnnnnnnnnnnnnnnnnnnnnttattgttcctaagaatttggcacaagtcagagataattgcctatactaagaatctatactgcagaatatagtgtatcaaaaacttttttcttttaaattattaaagtgtcttttatacttttatgaaatcattgggtagctctctaagtgtttaataactggcattaagcttagagggtgaaaaaaa

SEQ ID NO: 249329 - DNA, 896 bp, Homo Sapiens
tccaagctgtatgactgcccaagattgctaggggactgagaaggctcaggaagtaatacaagcacaattacttgtattacgtaagtcacttaactcaaccaaaaactccctccatacgtgggagccccattcgtgttatatgacatgaaaattacagaggtggcagcctaaagaggtctttagcaaactctgacttggagaccagaagtttaactatattttgaagcagatcacaggtaaaaggaggctatgcaacaggtccaggctgtgttcccaggcctgtaaagctctctgtggcctaaggattcattctaccttgagataatgtggatctttggaggaacctagcatgctcagcagtcccacacacgtaaagcaaaaaagtttttgtttcttttcaaatgtctaaaatttcaaactttattttcatccttaaactattttctgacctttggaaaacaatgcaagttttcaaactattttgttttaaaaagcatacataccattcatatacagcacaatacatgttgtaattactgctaatggtatgggtataagtgcatatctgtgtcttgaatgaccgctgcttgggatacaggttgtcaaaatgattgatgatgttgtattaaataatggattgctaagagtacactgtattttttgtggaagatcattttccatcttaaaatatatactggttgagttacgtttacattgctccataggacaatcccatgagtacattataagtcctcgatggctgttgtaatgctctggtatcatgcattggacttcaatgcttccattagtcaatgcacaagttagtgtgggagatggaagagactcaagcacataaagaaagaacttcatggtatcagtaatatttggcgccaact

SEQ ID NO: 249330 - DNA, 985 bp, Homo Sapiens
  misc_feature (602)..(614): n is a, c, g, or t
ttggggaaagaatatcttatttctttcccttaccctcactcaaccattccaatcaggggagaataagggaaagaatatcttatttcttttatgattggtgcaaattggctaaagtgcatttttaaatttcctctacttaatttgtttttcagagataaggaaaaatattttgcacagatttactccactatggaaaagggatgctgtaggttgaaccattatagcctcagattcgatcttttcctaactaaaaatattaaagcctcatgtgtgaaataaatttttaaaaagatttatctggatttagagaattttagatcaacagatacctctcagtgtgtttgctaattaataaaaatcagtttcttacaaataaagtttgtaagaaaatgttcattttaagtgatagatagtggagaaaatttatcacctaaaatatacccatcagtataaggcaagcaaaagtcttaacatggcagccattctgcctttgccgtggccctgtcctgtttagttcttagtgggttaatttttgtacttttgcagaagaaacttcagcaagctagaactggaaggtactttaatttttcatatatatttgnnnnnnnnnnnnnaatgaaggctcatttacttgaaatgtaaaaactttcactgaatacaaatagaaaaagtgatgtgttttatatcatattgctttttgtccatctttgtggtttagtttatttactcacttcatgtttttcacctataaaattgtcaagctagcaaaaaaactcttgtttttttaattgggagagaagagacctgccagattatcagaacctcttcatgttaaaagaccatctccctgtaaaaactgaccctagtgggacaagctgaattttgaaaataggactgtgaaaagtaagctgtaaacttggccattttttaatttttggtttaaccaccggttaactgacctttaaaatggaatgtatttaaaata

SEQ ID NO: 249331 - DNA, 1304 bp, Homo Sapiens
  misc_feature (592)..(610): n is a, c, g, or t
ttggctgcaattggaactcactcctttgaatttgcacagtttgacaactttcttgtggaagccacacgctaatacttaacagggcatcatagaatactctggattttcttcccttctttttggttttggttcagagccaattcttgtttcattggaacagtatatgaggcttttgagactaaaaataatgaagagtaaaaggggagagaaatttatttttaatttaccctgtggaagattttattagaattaattccaaggggaaaactggtgaatctttaacattacctggtgtgttccctaacattcaaactgtgcattggccatacccttaggagtggtttgagtagtacagacctcgaagccttgctgctaacactgaggtagctctcttcatcttatttgcaagcggtcctgtagatggcagtaacttgatcatcactgagatgtatttatgcatgctgaccgtgtgtccaagtgagccagtgtcttcatcacaagatgatgctgccataatagaaagctgaagaacactagaagtagctttttgaaaaccacttcaacctgttatgctttatgctctaaaaagtannnnnnnnnnnnnnnnnnnaagatgatacttttgaaatgcaggatatgatgagtgggatgattttaaaaacgcctctttaataaactacctctaacactatttctgcggtaatagatattagcagattaattgggttatttgcattatttaatttttttgattccaagttttggtcttgtaaccactataactctctgtgaacgtttttccaggtggctggaagaaggaagaaaacctgatatagccaatgctgttgtagtcgtttcctcagcctcatctcactgtgctgtggtctgtcctcacatgtgcactggtaacagactcacacagctgatgaatgcttttctctccttatgtgtggaaggaggggagcacttagacatttgctaactcccagaattggatcatctcctaagatgtacttactttttaaaagtccaaatatgtttatatttaaatatacgtgagcatgttcatcatgttgtatgatttatactaagcattaatgtggctctatgtagcaaatcagttattcatgtaggtaaagtaaatctagaattatttataagaattactcattgaactaattctactattttaggaatttataagagtctaacataggcttagctacagtgaagttttgcattgcttttgaagaccagaaagtgctagaataaataacattacagagaaaattttttgttaaaac

SEQ ID NO: 249332 - DNA, 909 bp, Homo Sapiens
ccacttggacaactgggggaggctggatgcatcagcttgtgaaaagtaactttagtctacgctgcccagaaataaagcaactttccaatgtcctttttctcatatggaagtatagaatgtcagcttcccagctgtgagggctccatagccactgttttcttatcttgttaagaggacatggcatgtggcagccaacaccttgacttcaaggtgaatgctaaaggaagagctttgtatttaaaatgaaatgaaagacaagcaacaagtcctgggcagtccagagattgtattctctacagatggcctgtttgcaaacagtaggtctgggtttgacctattggaatacaccatgcaagaaactactcaaaaaggaaattccacttcatgaaccaggaaagttgtccaatagcctgtcccatctgagggtcctttacatgattagatactcaatatctcagttccacaacgttatttacagacatgttttcaaatattttgtgtaaatggcagaagggagctgggagcagtccccctgcctccattacttttttagctttcacatatgttcttgacttgtacagaaaatcccaaattttaaatgattccccaactcagccagttctatagatgaggccagatcatttttgagaattaagataagagtgggaacttgttaaaacaaaaatgaaaataaaacccacctcactcctgtatctctccctgattagacattaaagaggtgaatcactgcctctggctgcttcagccttccaggaatgaagagccatccaccttgcccttctcagccagccacaggcagctcttctgattcttccctcgcagcagtggcggtccagcccctccctcccctgcacagtgcctgagaaagtttcccaggatttcatccaa

SEQ ID NO: 249333 - DNA, 1518 bp, Homo Sapiens
  misc_feature (236)..(353): n is a, c, g, or t
  misc_feature (926)..(1012): n is a, c, g, or t
  misc_feature (1245)..(1246): n is a, c, g, or t
  misc_feature (1248)..(1248): n is a, c, g, or t
ttggagtaatattttgaattggtaagttagaactacctaatattttccaactacattatttttatgaggctcatttgtaaaatttttaataataggaataacttgcagttgaacttgattctgttcactgtcacacttctaattattcatttcttcatttatggacatatataatttatttcttggctagcttgcttacatggttaaatttttctttctacatctgcaatgtatcnnnnnnnnnnnnnnnnnnnnnnnnnnnnnnnnnnnnnnnnnnnnnnnnnnnnnnnnnnnnnnnnnnnnnnnnnnnnnnnnnnnnnnnnnnnnnnnnnnnnnnnnnnnnnnnnnnnnnnatgagctgcattgtgcttttaatgatctaaagacactgattagcttctcaactagttctctttctaaaagatcaattttatacaaataagttttctaaatgtaataaagtctgttttctttctccagggaattaagaacaacattgtgctgcccttattagttcctaattacagattaaaaatctgtatctttgaactctagatttacataaatcctggcttccctgcacattttgcccctgtaaattggaatacatgatgattgaaccatctgttatgagaatattacatttcctatttacacaattgtttgtgacagagtaaaaaccattttcatagtatatgttggatcactgttgtcttcatatttctaaaataaatgaattaaaaaatttaatttcttagatgcttatctctatcatagctcagaatgcaacttcaataccccccattcttttatatttccagatttcttttaatttagatatattgaacaaattaagttaattgaagtctgtattttcatgcaaatatattagtattcattaatatacatttattctttgcaaatannnnnnnnnnnnnnnnnnnnnnnnnnnnnnnnnnnnnnnnnnnnnnnnnnnnnnnnnnnnnnnnnnnnnnnnnnnnnnnnnnnnnnngcactgtaaaataatatgtaaaggacttggaatgttaaaaataaccattcatcattttgctttatattacatctaatatttcctgaaacattttgtaatacccacatggaaagtggagaaagagaaaccttgtgctttttataaacattgcccaggagaataatggttaaacaaatctgttcaaatacatattttaattttttttacaaataaaagttttacattaacatacnnanatcacacgaccaaccccccccattaaaccttgtccggcccgcctcgggccctcgaaaaaacctttctagaaccatttcgtttggccgcgccgggccccgttaaggtaaactggaacattgggccaatacctgcttcccctagggaaaatcccgggccatggacatagtggcctgggaattctcccccaattaaaaaaaccccccgggcggggtaacccgcaagcgcttttctgaaaccaaatctccagaatggggaagtttcctcgaaga

SEQ ID NO: 249334 - DNA, 1043 bp, Homo Sapiens
ttggcttagttcccaaacccctttcaatgcctgtctttcccatcttcgtagagttgctaatattaaggcttcagggctacttttatcaacatgcctgtcttcaagatcccagtttatgttctgtgtccttcctcatgatttccaaccttaatactattagtaaccacaagttcaagggtcaaagggaccctctgtgccttcttctttgttttgtgataaacataacttgccaacagtctctatgcttatttacatcttctactgttcaaactaagagatttttaaattctgaaaaactgcttacaattcatgttttctagccactccacaaaccactaaaattttagttttagcctatcactcatgtcaatcatatctatgagacaaatgtctccgatgctcttctgcgtaaattaaattgtgtactgaagggaaaagtttgatcatacccaacatttcctaaactctctagttagatatctgacttgggagtattaaaaattgggtctatgacatattgtccaaaaggaatgctgttcttaaagcattatttacagtatgaactggggagtaaatctgttccctacagtttgctgctgagctggaagctgtgggggaaggagttgacaggtgggtccagtgaacttttccagtaaatgaagcaagcactgactaaaaacctcttgaactgggaacaaagatctacaggcgagcaagatgcccacacaacaggcttattttctgtgaaggaacccactgatctcccccacccttggattagagttcctgctctaccttacccacagataacacctggtgtttctacttgtagatgtaaagtcctctaaaataaacctatttacgaccagcgtaatttccaataaaccccatttggaaatggtgggccggccttcggcccttaaaaaagctttcctaaaccatttcgtttggcccccggggcccaataaggtaaaggaaaaatggccctaacccggttccccaagaaaaccccggcctagaactcaaggtttggcattcccccc

SEQ ID NO: 249335 - DNA, 1130 bp, Homo Sapiens
ttgggttacggtaggttcatccttcctttttccatgttatatgtggagaagtgttaaacttgctcaagcaaatgggagtaggagataggctgaaaatagagattgctacaccattctattttgttttcatgcctgttttttctccaatcctatatggacatttgagaaatggaccacaaatctgagagggatagagtaaaaagaggcattaatgtatgtactcacaagttagacctattttgctgttaaaataggtctggtcttgtcataggtcataggaattgtgtagtttgagttgctgcgagaaagagtcaagaacttagacttgaatgggaaggccaactggtgagggaagtggggtattatctactcaaatgttctaagctaatacaaaagaattacctggcaagcatccccctctgcccttcttgagattctgaatgaacttagaatcagatcaatggtgagacccagttatgtaactttcctttgaagttctaaaggataattgaaaataaagtagtctggcatgtttaacagtaaggagtgacactaaaatttgaatataacagtatgttgcaactatttataatagacctatttatgttttgagaactaagtataatgctatgaaaaattcacataaagcacttaagcaccaaatgaaaatcatttcgtgctttcaaattaatgatactaggcttgtaggatgtcttagaatcatgtttaacaagaagttaaaatatttgcattttgaaatttttatgcagtttggctaaggaggaacttggaaaataacattcatcagctttctacactgcactttttgtatgtggactttgtaaagtttaatgtccgtttaacagttgcttgtttatttgtgtaaacctagctagtaaatattgatgatgttccggccccctgacttgcacagcccttggagcactatttccacggaacaccatttccaattttgttcaaaacatttaacacacttttgatatcctattccaaaaataacttttggtaccacagggttcattgcctggccatttagaccaaaattatggaactggggatattttcccaactcctaaaaaagatgttgccccaccctaaaaccggtcaaa

SEQ ID NO: 249336 - DNA, 901 bp, Homo Sapiens
  misc_feature (200)..(211): n is a, c, g, or t
ccgccgaggttagcactttcatcaccaaagaccccgtgcctctcgtggtcctttgagggatcccgccgccaccacccttgtattttatcacgtgctcttcagggcatgtggaattcgttgagtttgcttttagagccaagtttctttccctgtgtgggtttttgaggaaaacctgaggtcccctaatctgtggccaccannnnnnnnnnnngccgccacgccttagagcagagcagcccctcctctcatttggtgcagaaacagtcaagaggaaccattggcctagagctcctgtgaccgagagcgccacggaagcctggggatgatgtcgggcagctttattctttgcttggctttggtaactaggtggtcccctcaagcatcctcagttcctcttgctgtttatgaatctaagacaaggaagtcctatagaagccaaagggacagggacggaaaggacaggtcccaagggatggggctgtctttacttgtggaaaccaggaaattgctcctctcagccaaccaaggttgaccacacaccacccttccggagcagctcagtcagccctcggggacgagaaaccacaagcgcagagacgctgaggcccaggcaggtgaagaggaagtggctttgggtttttaaagtaggtgagcgtgagcctctctgactgcttcttccccgggggggactgcaaaccgctcagggttgcggcagagccatggacttccggtccctgcaacgggtgacctaagcgtggtgcacccatcagtcacgcaggaggactgacttgacagacgaaagacaagcccggatgacacagggtgagaagagtcaggccgcacctctgtccctgcaaaccaacaggtgcatggtgagtgtggcagtccccacagctccaca

SEQ ID NO: 249337 - DNA, 850 bp, Homo Sapiens
  misc_feature (237)..(489): n is a, c, g, or t
ttacacattctaaattatgacgtccacataccatttacttttctgtggaattataaggtgatattttaaatgatgggaatgaacaacttgacatgtgtatcagtaacctctaaacatctatttcaaacatctattaaccgaaagtcatgatccttcagctcttatactaagaacttccatacattagagcaatacacatattcaaattgacctagttcaatttgacaagtaaacaannnnnnnnnnnnnnnnnnnnnnnnnnnnnnnnnnnnnnnnnnnnnnnnnnnnnnnnnnnnnnnnnnnnnnnnnnnnnnnnnnnnnnnnnnnnnnnnnnnnnnnnnnnnnnnnnnnnnnnnnnnnnnnnnnnnnnnnnnnnnnnnnnnnnnnnnnnnnnnnnnnnnnnnnnnnnnnnnnnnnnnnnnnnnnnnnnnnnnnnnnnnnnnnnnnnnnnnnnnnnnnnnnnnnnnnnnnnnnnnnnnnnnnnnnnnnaataatctttctgtttaggtaaatttgaaaaatatacatcattactaccacattcatcctagttagaatctcatttatatttattccactctgtttatgatttggtaactaatttgaaaggcattatattatcaaaagtgtatcagattagctccctcaactcactatatctgttaacagttctgaagaaataggcactggctttgaatatggcctgttccagtttgtgaaccgttgtaggcaagtaaagttgttgggcacagaggtgacctgtaggatgactgaaggtaaactgtcactactgtatacaaagaagaaaaataagatgtaggaagagatctgttataataacatatgaccc

SEQ ID NO: 249338 - DNA, 888 bp, Homo Sapiens
  misc_feature (757)..(757): n is a, c, g, or t
  misc_feature (791)..(791): n is a, c, g, or t
  misc_feature (843)..(843): n is a, c, g, or t
gccaactttgtacaaaaaaagttggcctcaagcaaattgagatcttactaatttattttgtaaatgcctaatgaggcagatttttgaattaaagaaatgctacatgttccggttgcagagtatattcataagatgtctcaccttgttcatttcacatagtggtttattagatattggaacctaaagaattctgtccacttgtattagcttaatccagcagatgatattgtgcagttactgtttgtgtctttgatattgctgtgtccctcagattttagtagtttgacaagcaagaacacatatccaaatggaattttaccctgagaaattatcattttaaagggcatagcacagcaatctgcaacaatatgtaaagttgatattgactacaataaaaatccagtcttaattccagatttactgaaaatgtcagatcattttgtattaatctattttcatctttgtgtgaagccagttatagaatgtttgacaataaattgtgctgtacacgtaaatgtccttacccactaaatgatgtaaaacttttcttaaagtaatttttaggttccatttatttataacttccaccctggggatttcccgaactatttggaaaggggtttactggaacagctggggaaatatggggtttttaacaaatccctaagtcttcccccctggggagaggccttccttggagaagagcagttggaaaagttctcaaaaacttggggtccaatcctcgaaaaagggaacntcggaaccggcttggctcctgggggcccttggcnaaagaactctccaggaacccctccccaataagcgttccccaccggtttggcncggctccttcccatccccgcgcccaacacgctctgggagagacac

SEQ ID NO: 249339 - DNA, 1225 bp, Homo Sapiens
ttggcactgttacatgccttgaagtgatgaggaggtttctgttactatatgctacacagcagggacaggcagaggccatcgcagaagaaatgtgtgagcaagctgtggtacatggattttctgcagatcttcactgtattagtgaatccgataagtatgacctaaaaaccgaaacagctcctcttgttgttgtggtttctaccacgggcaccggagacccacccgacacagcccgcaagtttgttaaggaaatacagaaccaaacactgccggttgatttctttgctcacctgcggtatgggttactgggtctcggtgattcagaatacacctacttttgcaatggggggaagataattgataaacgacttcaagagcttggagcccggcatttctatgacactggacatgcagatgactgtgtaggtttagaacttgtggttgagccgtggattgctggactctggccagccctcagaaagcattttaggtcaagcagaggacaagaggagataagtggcgcactcccggtggcatcacctgcatcctcgaggacagaccttgtgaagtcagagctgctacacattgaatctcaagtcgagcttctgagattcgatgattcaggaggaaaggattctgaggttttgaagcaaaatgcagtgaacagcaaccaatccaatgttgtaattgaagactttgagtcctcacttacccgttcggtacccccactctcacaagcctctctgaatattcctggtttacccccagaatatttacaggtacatctgcaggagtctcttggccaggaggaaagccaagtatctgtgacttcagcagatccagtttttcaagtgccaatttcaaaggcagttcaacttactacgaatgatgccataaaaaccactctgctggtagaattggacatttcaaatacagacttttcctatcagcctggagatgccttcagcgtgatctgccctaacagtgattctgaggtacaaagcctactccaagactgcagcttgaagataaaagagagcactgcgtcctttttgaaataaggcagacacaaagagaaggagctacctaccccacattacctgcgggatgtctctccgttctttttcctggggctgaatcgacatctaaaagatttggagctggacttcagaggtgaacagtaggatgggaagacatacctaacgcgtgctctccgtcagtaccg

SEQ ID NO: 249340 - DNA, 980 bp, Homo Sapiens
acattataatgcccactttgtacaaaaaagttgggccctcaactctgccatcacccgagccaagaaccgtatcttggatgaggtcaccgttgaggaggacagctatcttgcccatcccactcgagacagggcaaaaatccagcactcccgccgccccccaacaaggggacacctaatggctgtggcttccacctctacctcggatgggatgctgaccttggacttgatccaagaggaagacccttcccctgaggaaccaacctcttgtgctgagagctttcgggttgacctggacaagtctgtggcccagctggcagggagccggcggagagcggactcagaccgcatccagccctccgcagaccgggcaagcagtctctcccgaccttgggaaaaaacagacaaaggggccacctacaccccccaggcacccaagaagttgacgcccacagagaaaggccgctgcgcctccctggaggagatcctatctcagcgggatgctgcctctgcccgcaccctccagctgcgggctgaggaacccccaacccctgccctccccaacccggggcagctgtcccggatccaggacctggtagcaaggaaactggaggagactcaggagcttctggcagaggttcagggactgggagatgggaagcgaaaggccaaggacccccctcggtctccgccggattctgagtcagagcagctgctgctggagacggaacggctgctgggagaggcatcatcgaattggagccaggcaaagagggtgctgcaggatgtcagggagctgagagacctgtacagacagatggacctgcagaccccggactccccacctcagacagaccaccccgcacagtcagtaccggaagagccttgatgtgagggcagggtggggtctggaacttgtcgggttggacagactcttatctccgtgttgctggataaagcttttttatttacctcaatcgaaa

SEQ ID NO: 249341 - DNA, 379 bp, Homo Sapiens
ttggctttgttttaatatgaatgattccagttaacaaatggagaaatagttgtttgaaaattaatatttagcttctcaaaagagactcctgtttggaagcaaattgttggtttaacaggacatactttagatatttgaaaaattctctgtggaatcacaatctcttatttttaagaatgtaggaatatgtgttctatatgcttttaagttatgtattacatactattctctaaaatagaaatgtttatttggcttctaaaagtcatttgtgagttgatgttatttaaaactgcttttcagtcaacttattctttataaaaaagtttgttcaaatagcatgtttttattttgtttctaaataaattcatgtttgataatt

SEQ ID NO: 249342 - DNA, 331 bp, Homo Sapiens
cagtagactatcaaatgtcctttaatttcacagacaacaatatgatgcatactgtgtaagagcacacaatagttttgcagtacaattttaaactgtatacaaattggaatatagatgttaaacgctggtgtactgacagtatttttgaattttagataaactgcatacaaaatttacaatgcaaatattagccaatctgaaaacgtcccataatataaaaatgatactttgagatgcaaattttactaaactatataaacatttaaaataatcattaaaaatttaacgttagaatttatccaacttttttgtacaaagttgccttttatcg

SEQ ID NO: 249343 - DNA, 1062 bp, Homo Sapiens
  misc_feature (592)..(667): n is a, c, g, or t
aaaagttgggtatatgttcctataagtttaattcttgagtcagggccagcacgcatttatattttctaccaattaccttgatagaaatatcctacaaattgctgacctggaacggttgtgagaagactcctggcttcttacttgcctcacttaacaaatattttaaggtcaaagcaatatctgtgcacggctttccttttgctcctccagacaagtgaggctgttggtatagtcctcttcaccctctgcatgtagcttcaccctagatcagacttttgtctcttgggtcccagatggcacaggagcactgcatgcttgttttctagagcccagccagtcatgggtgctagcctagtctccacacaccagcaagtagaacccaagtgtattgtataaatatttcctgagtaccagtaagagaatgcattcttttctcatctaggccaggaatgttgaaaatgctcagccttacatagaaactcctagattttcactaacgcatttcacaaaagtaaataagtatttcatataattcagaggatgtttaaattgtcagcattttaataaatacttgcattatcacaaaaaacannnnnnnnnnnnnnnnnnnnnnnnnnnnnnnnnnnnnnnnnnnnnnnnnnnnnnnnnnnnnnnnnnnnnnnnnnnnttttaacatataccctccacctaccacaatccccttttgttttgtttcccgcccctcccggtctcctaagaaacgttttctcctcaaaaccatttcttgctgcggggggccggggggccccccaggaagggaaaagcggaaacgcggggccataagccgtgttttttccgaagagaaaatttccgggctaatagcaacaaagggtgtgtgggtgtatctccccaccaccaacaaaaaacccgcgccgggtggggacaaccccaggacttcctctttaaaaaactcttctcctgatatgggcctcttctggacggtcccattattaggggggacctcttatacaagagggtggggcccgagcggcgggcgcttccaaatacacaaaataaccgccc

SEQ ID NO: 249344 - DNA, 398 bp, Homo Sapiens
gctttacgtataattcttttttattttcatgcaaaataaaggcacacttaataacaccctttcaattttgacttacgggatttaaattcaaccccttataacaatgacttaatatctaatgttacattcatgttcagaatgcacaaagtgcagcaacaaatgcagcaaacctcaaaacaaggtgctacaaagctgcttttacattgcaagacagacaagtgtctgatggagtaatttaattgaacatacttttacagacatacagctaacctaaagaaagacagacagatttaggaaagcagctacatctgcagaggaaggaaacagcatgttacagacagttaattatacatagaacatttgacaaacccaacttttttgtacaaagtttttattag

SEQ ID NO: 249345 - DNA, 140 bp, Homo Sapiens
tttgtacaaaaaagttggatttttccttgaagttcttagcataatgtatccattacttagtatatatctaggcaacaacacttagatgtttatcagtgtttaatctaaaaaaataacgattcctgtgtactggtttaaac

SEQ ID NO: 249346 - DNA, 292 bp, Homo Sapiens
agaggtgtcatgtttactttttatttaggagtacaaactgagacaaaatcatccttccagttagtgaggttttgagggatcatactaaagagaagacaggaaaacaccagtaatggtgaaggtcttgagaaaaggacaggacccgcagatagcgagagatcagaggaggccttaatttctttcctcatttcctttccaaatatcccaaatgtgcaaagcatctcctgagccaacttttttgtacaaagttggcataaggggaaagcattgctcatcaatttgtgcaacgaac

SEQ ID NO: 249347 - DNA, 1229 bp, Homo Sapiens
  misc_feature (428)..(445): n is a, c, g, or t
ttgggccacagtccacggcccggtcggcaccgctcgcctgaatcgtgggctttgggaaccttggaggctgctgctccaggaactcgcggtcggccgggagccggggagcttcgttgctgggagcgggcggtattcgcggactccggcggccctggcgggtcgcggccgggatccgagccggggatgacgatgctgatggagctgatggggcaagagtgggaacggaggcacgtacactgaaatttaagtcatccaagttgggacttaagatagcaggttaatattgtctcaggcgagacttaaaacgtcttttctggtatcccagtctgcagtgggcaaatctattgtctttatttctcatttaagggcagaatggagggatgacatatttttacttttcaagaggcggttgccacttttaagtcacnnnnnnnnnnnnnnnnnnacatacacaaacatacgatagtgtgttttcagagcaagtatcaaaggctaaagacttggagtgatactagtgtttaaaagcctttttaaaaaaattaagatgtgatgagaaactggagaattgacttttaaaaatttcttttctgtagaagaggctatcttcaaaatggagtcctaaagtatatctgatggatagaatttaaattcttaacactgtatataccctgtggtcaaaagcatcaacgtaaaacttgatgtttatcagattacttatgtttcaattttcctgtggttagaaaaattaagacagaagtaagctattaacggtatttgcttgtaagagtaacgttaaaggtttaaggaaaggtttgttgaaatcgatatgcatcacacgaatcatttattttcaatgttgttttccagttgcagcaatcatttgtgtttacatgactttgaaaaagggtttagtttatgttgattttgaccctcttatttaatctctagtgcagaagtgcagctttctgcaggctgcgcctcaatcgctaagttccactctccatcctctgccgcgctactcctggcatgttggatcaccaagatacaatttctggtcctgtctgttcttattgatgtcctttacagttaataaatttgattgccactaatcagtctgtatctcttgcaaaaacaccacattttagcatccaagtagagtcagagtatgttttttatgagattgtactaaagtaaccttctattacattttcttattaccatattgcatt

SEQ ID NO: 249348 - DNA, 1262 bp, Homo Sapiens
  misc_feature (616)..(626): n is a, c, g, or t
acattataaaattaacttgtttacaaaataggctttgccaaacttcattactgaattgtaaagtcaatgactgtgttgtttttaaaatatgtaccaaggaaatacaaattggataatgatcatttttcatgctcaggagagaacagcacagaaataaaggatactgcacaaggtgcaaggaaaccggaacccattgtgtacactgtcttcacacagagcattctttctcaccttaactgcagctgtgcaagatgcctcagtgtgatgcaaagactctatattggaaaaattacaacttggtctaaaaacttattggtgttgatatttttaatccaaaataaatttataaaaaaatcctttaatggactatttcagtttaatatacagtaatacactgtagataaagttaatattccccccactaatttaatagggattgatatcaatgtttctgatcactggagaaataaaaactaatgtggacctttgatatccatggcataggaggattcccacagtttatcctaagaggatctggggaatattaaatattctaatacagtgtcttagcaatatgaattttaagtacaaggatatttcaaaagcagggtttggnnnnnnnnnnngtaatcaaaacccataatcacatctcttgtggataacaatattaatataactttttacccagcccaggacttgcctgtacaaactcagaactgaaagtttggtatctgtagacttctggtaacaatctggcaaaacactaaatggagtgttgtacttatctattttgcttatgttatgctagttttgataatatttaagtaaaacagccattccaacagtttactctagttttaattacacactgtaccattgtatcctaattacaactaagaccagtattttcttcacagtaagacactgataactaggaagttgatttttttcaacactaaacagtaatcacacagcaaatgagtattgcgcagtagaacaaacacatgtcagcatttgctagttaggcaaacaaactgattgaacatttagttgttatagttagtgtaaaagcaaggccatgggtggttttatggaggtctttgcaattcatagcatagttacttcagaagagacattgaaatttgaattactcacttatttaactggcaactatccatttaggttaggcaaaggcacggtaacatgttgcgcaggatgttttattgaatttcttaataatcgtgggatttactataacccaa

SEQ ID NO: 249349 - DNA, 1543 bp, Homo Sapiens
  misc_feature (1012)..(1059): n is a, c, g, or t
  misc_feature (1231)..(1292): n is a, c, g, or t
  misc_feature (1455)..(1499): n is a, c, g, or t
ttggcacaagggtacctacgggctgctgcggcggcgagaggactggccctcccggctccagatgttcttcgctaataaccacgaccaggaatttgaccctccaaaggtttacccacctgtcccagctgagaagaggaagcccatccgggtgctgtctctctttgatggaatcgctacagggctcctggtgctgaaggacttgggcattcaggtggaccgctacattgcctcggaggtgtgtgaggactccatcacggtgggcatggtgcggcaccaggggaagatcatgtacgtcggggacgtccgcagcgtcacacagaagcatatccaggagtggggcccattcgatctggtgattgggggcagtccctgcaatgacctctccatcgtcaaccctgctcgcaagggcctctacgagggcactggccggctcttctttgagttctaccgcctcctgcatgatgcgcggcccgaggagggagatgatcgccccttcttctggctctttgataatgtggtggccatgggctttagtgacaagagggacttctcgcgatttctcgagctccaaccctgtgatgattgatagccaaagaagtgtcagctgcacacagggcccgctacttctggggtaaccttcccggtatgaacaggccgttggcatccactgtgaatgataagctggagctgcaggagtgtctggagcatggcaggatagccaagttcagcaaagtgaggaccattactacgaggtcaaactccataaagcagggcaaagaccagcattttcctgtcttcatgaatgagaaagaggacatcttatggtgcactgaaatggaaagggtatttggttttcccagtccactatactgacgtctccaacatgagccgcttggcgaggcagagactgctgggccggtcatggagcgtgccagtcatccgccacctcttcgctccgctgaaggagtattttgcgtgtgtgtaagggacatgggggcaaactgaggtagcnnnnnnnnnnnnnnnnnnnnnnnnnnnnnnnnnnnnnnnnnnnnnnnnccaagaacatgaggatggagagaagtatcagcacccagaagagaaaaaggaatttaaaacaaaaaccacagaggcggaaataccggagggctttgccttgcgaaaagggttggacatcatctcctgatttttcaatgttattcttcagtcctatttaaaaacaaaaccaagnnnnnnnnnnnnnnnnnnnnnnnnnnnnnnnnnnnnnnnnnnnnnnnnnnnnnnnnnnnnnncagaggggttttctgtttgtttgggttttgtttcttgctgtgactgaaacaagaaggttattgcagcaaaaatcagtaacaaaaaatagtaacaataccttgcagaggaaaggtgggagagaggaaaaaaggaaattctatagaaatctatatattgggttgnnnnnnnnnnnnnnnnnnnnnnnnnnnnnnnnnnnnnnnnnnnnnactatataccctttttttgttgtctctagcccgatcagaaagga

SEQ ID NO: 249350 - DNA, 866 bp, Homo Sapiens
aaggagtgttgtgaacattacatatttatttataatacaaaatgaagattggagggaaaaagtgcttttaaaaatagcatgtaagtgtataaatgaaattgttgcttcttctccgatacaattttgattgggtgagcattatttgcttttacaataatgctttattttgttttttgcattgcattgcactaacctgtccattaatacaaacagaaaaagaaggtggaggacgtgcccagccgcgtggtcagcgtgccgaacctcgcctcctatgcaaagaactttctgagtggcgatctgagttccaggattaatgcccctccaataactacatcacccagcttggacccaagccccagctgtggccggacctacaaacccaaccagtctacagatgcaaaaactgccacaaggtttgggggatgttggggacaggggcccttattctatttccctgtagataagaggggaagtaggattctttctagcacctggtaccaaattccagaaggccttttttcatggatgattagacaagggacactgaatcacttacctgaaaacttcagcatgggttatacaaaaggtggactccatctggcctggaggtctgaattcaaattacagtcttcctcattcttagctctgtggccttggacaggtcacttgacctctccaggtctccatataccttgcctttaaaattaagataatacagcacctatctcatcagactgacgtgagactaaaggaattaatccataggatgtgcttagcacaggacttggcacaaaaatcttcaatatagtttcagtattattactaacattattcctcaagatttactctatcaccttggaatccaa

SEQ ID NO: 249351 - DNA, 673 bp, Homo Sapiens
ttggcttagggacccggctgtgcacccccgggacaaacagcggatgaagcaggagctcagctctgagttgagcacgctgctgtccagcctctcgcgctacttccgccggggagcccccagctcccctgccactggtgtcctcccctcgccgcagggcaagtccacctctctctccaaagccagccctgagagtcaggagcctctgatccagttggtgcaggcgtttgtccggcatatgcaaagatagggcagtgctgttctgcccacctacccctctccaccagcctacactgcaccctggctggcaggggtgctgctggctgctagggcctatacaatggagggcacctcctgtcacccccctcccggagtagccacgactccagccaccacccactgacgttatttttatactagatgaagaggtcaacagcaggcatggggagccgagtcttctgtgctcaggtcctcacgctgcagacgccccctagaggaactttccttcctttccagcattccccacagcactgccggccaggggagaggcggcagcccagcagagggctctatgcacgggtttcatacctgttttccacactctgtctttgcagttttggtaattctgtggtctatttatacagatattaaaatcttgtttatacgagaaaacaat

SEQ ID NO: 249352 - DNA, 948 bp, Homo Sapiens
  misc_feature (396)..(408): n is a, c, g, or t
ccactttcatgagtttcctttactgtattctcaacttgggccttgcttcaagcaggcaaacatacattgaagaatgcactttggtactgtttaaataacaacacatcagcccacttgattccatgccatgtccttgctgacagaaacatccccaacagggcatgccctggtccaagtcctctgtctttgtcaaaatgctcttctgatgagttggagaggaggcagccagcagtggcagtccacaaggatccaggtaccttctccaatcctaaagcagacagcaggttgaataaaaccaatacacaacctattttctaggcaggaggggaaaaggcccttaggacaataatattttgtacaaagagttgagagtaaacaaacagtatatcaggttcnnnnnnnnnnnnnctattcgttggcatttaaatttttttcccttgcatagtatctattctctcactaggacttttaagtgctctgctggaggctcagcgttggtaataccatgtttgatgcaaacttgaacccaatgctctcattggtggcacagctttggagggtggtggccccaagaaggggcaatctgcctgctgctatattaatctggaaccagggccaacagctactcttgaactatggtatttgaagagcgagttcattgcctgttttaccttaaatgacaggaaaggaagatgaacaaaccttgctttgccttggcttcaaactagttcttgatttaagacaccagaaagggagagagggagtctgcttagagtttgaggttgcctctcacaagatgacagttaaaagttgccaccttacttaaaaggcattaaggaggcatttactcacaaagggagagagagtaaattttttttcttaagaggaaaaaaatactgataatacatagaacaatctgcacatccagtcttggcactttttccattt

SEQ ID NO: 249353 - DNA, 1377 bp, Homo Sapiens
  misc_feature (714)..(714): n is a, c, g, or t
  misc_feature (716)..(814): n is a, c, g, or t
  misc_feature (903)..(911): n is a, c, g, or t
  misc_feature (1161)..(1161): n is a, c, g, or t
  misc_feature (1200)..(1200): n is a, c, g, or t
  misc_feature (1202)..(1202): n is a, c, g, or t
  misc_feature (1288)..(1288): n is a, c, g, or t
  misc_feature (1295)..(1295): n is a, c, g, or t
  misc_feature (1314)..(1314): n is a, c, g, or t
  misc_feature (1342)..(1342): n is a, c, g, or t
  misc_feature (1351)..(1351): n is a, c, g, or t
ccttataaaagccaactttgtacaaaaaagttggcttctgaagtctgacaagcagcagcatagaccctggtctgagtatcaagcagttgggtggtttgtatattaattttaatgcagataaactacagtctaacaagagaaccctaacacagatcaaggagaaaaagaaaaatgagcttctgcagaaagccgtcattacacctgattttgaaaaaaaccactgtgttccaccatatagtgaatcaaagtatcaacttcagaaaaaacgcagaaaagaacgacaaaaaacagcaggggatggctggtttggtatgaaagctccagaaatgacaaatgaactgaaaaatgatctcaaagcactgaagatgagagccagcatggacccgaaaagattttacaagaaaaatgatagagatggcttccccaagtacttccagattggaaccattgttgacaatccagctgatttctaccattcacgaattcccaagaagcaaaggaaaagaactattgtggaagaactgctggctgattctgaattcagaagatacaaccgaaggaagtactcagagatcatggctgaaaaagcagcaaatgcagcaggaaaaaaagttccgaaagaagaagaaatttcgcaattaagatttaccaagcaaactgcaacatttttacattgctcctttatttacttattaaagacgtttggaaaactancnnnnnnnnnnnnnnnnnnnnnnnnnnnnnnnnnnnnnnnnnnnnnnnnnnnnnnnnnnnnnnnnnnnnnnnnnnnnnnnnnnnnnnnnnnnnnnnnnnnttgtctaaaccatcccatcgggccccaagaaactgttccgaaaccctttccctgcgaaaaacttgttcacaaacgaacgctgggcgcgnnnnnnnnngattgtaatcgccaaacccttgcccaggccccgtggacaaaaacccccgcggagaaaaaaagcgcgctgtggggcccctaaacaattttaaagggccacccgcgggcgcgcagagtccgagagacaaacccccgggttctatactgacccctcgccgcccactgtgctttgtcttttcaacgaaagggtggggcccgccgcccctgccaaaatccataaaccccacccgggagggccccctacccttccnattacacaaagggccacttgagaaacgcctcggccgacnantccgcgacactaaaaaacatcgacacacgcgcacacaaagcggagcgccaacacataagaaaacaccccgccctcgaactaaaagnttccccnagtggggcgaacagagganaaataacaaacaaacgggctcaaaaatntcgaccccncgagcgataatcacacctctcccccg

SEQ ID NO: 249354 - DNA, 299 bp, Homo Sapiens
ttggtaaaatgtttctcttgatgtttacatgcacaagctttgcgttctgactataaaaagtgtgaacaaatcaatgccagattcctgttttgcgcattgtcatgggattcttaagtgaacctttctaaatgtggtcttgttcacatgctccacgtagctgtaacttcacatcatcagcttgcagtttgtaattgactaaagcattccagtgtcctctttctagattgccagctcatgacatggtgcttataaagatttaattaaagtaagaatgaaataaagtttttataattgtaaaa

SEQ ID NO: 249355 - DNA, 1302 bp, Homo Sapiens
  misc_feature (409)..(466): n is a, c, g, or t
  misc_feature (657)..(665): n is a, c, g, or t
  misc_feature (1098)..(1120): n is a, c, g, or t
aaacataaaggacaattaagtggtacacacacacacatgcatttggattttgatgacttaggtttgccaatgtggaaaaaatagtagcaaattaagttctcctgtgaaaaagtcgttacttatttaaaattctgtgcccattggttatccttgtcttttgtgaaaattagtgttcctgtttataatattgacaaaacacctatgcggatgacatttaagaattctaaaagtcctaatatatgtaatatatattcagttgcctgaagagaaacataaagaatcctttcttaatattttttccattaatgaaatttgttacctgtacacatgaagccatcgtatatattcacattttaatactttttatgtatttcagggtgttgatgatgccttctatacattagttcgnnnnnnnnnnnnnnnnnnnnnnnnnnnnnnnnnnnnnnnnnnnnnnnnnnnnnnnnnntcaaagacaaagtgtgtaattatgtaaatacaatttgtacttttttcttaaggcatactagtacaagtggtaatttttgtacattacactaaattattagcatttgttttagcattacctaatttttttcctgctccatgcagactgttagcttttaccttaaatgcttattttaaaatgacagtggaagnnnnnnnnncctctaagtgccagtattcccagagttttggtttttgaactagcaatgcctgtgaaaaagaaactgaatacctaagatttctgtcttggggtttttggtgcatgcagttgattacttcttatttttcttaccaattgtgaatgttggtgtgaaacaaattaatgaagcttttgaatcatccctattctgtgttttatctagtcacataaatggattaattactaatttcagttgagaccttctaattggtttttactgaaacattgagggaacacaaatttatgggcttcctgatgatgattcttctaggcatcatgtcctatagtttgtcatccctgatgaatgtaaagttacactgttcacaaaggttttgtctcctttccactgctattagtcatggtcactctccccaaaatattatattttttctatnnnnnnnnnnnnnnnnnnnnnnnttacaaggcaatggaaactattataaggccatttccttttcacattagataaattactataaagactcctaatagcttttcctgttaaggcagacccagtatgaaatggggattattatagcaaccattttggggctatatttacatgctactaaatttttataataattgaaaagatccaa

SEQ ID NO: 249356 - DNA, 734 bp, Homo Sapiens
  misc_feature (316)..(324): n is a, c, g, or t
gccatccaccttcagagccgttggcatcgtgatgacggtgtgaggtctcttccaagcaggagggagtccttctctctggaactttttaacaaacaacaggtcacctggcgggaatgaatggcagggccctgtctgttcaggaattggattgggatgggttcctcgaacaagtggcaggatgatatcttgtacctgttggggagactgaccccggggtcagcagttgaggactcagaggtggaattttggtgggcacccgcatggtagtcgatccgctgtcctccggaagacggtcaccctttggggacctggaaannnnnnnnncaggtggcactcccccctacaagctggctgtccttccgggggagcacacagcgggcccggctctcgcccggtgacgtttctcccggtgacgtttctcgctggggcctccaaatgtcgtacctttaatctggagacaatacgggtcagaggtcaggaaactacatcagcgccagtgcgagcgcccacgagtccggtggacggatgagaaacggccggggggcagcctgagtcccagttcccgccgtggcaatggccaatttcccacccgtggacgcaaaaggccaggactccacgctgctgaccctccagcgtcccatgtccggcaggcacgtggccgaatagcccaagactgaggactcacacttcccactttgcacctggaggccacctgcagaccaaccttgcgccaa

SEQ ID NO: 249357 - DNA, 1086 bp, Homo Sapiens
  misc_feature (912)..(920): n is a, c, g, or t
ttggaatggttacatttttgcagccctttgtattttgtggtagttgaaattgtatcacttctaaacagcaaactgtttttgtttttaattagcagatatctgaagtactatttttgcagggtttgcacaggcccgtaactgtctactactttgatataatctgtatacatcctgtatgctgagctggtaaaatacattgtaaattacatattaaatattttatctgcttttacaagcgcaaggtgcaaaaatatatacaatagtctcattgatgactgtaaagtgaattaacatttggtgattatgcctagcttttttgactaatataaagatcatagctccccttcacttctgtcttaacttgaacatggcgtgtttaaattttcatacatactttacttgaattattgctgttgtcacatatttttgcctctgtgagttcatctgatgattgagcagtagcatttgccttttgggttttttgtttgttattatagaagagatgacttctgctgattttgctttagaatggttaccttagaagaatttgggtggctcatgttgaatttcacttctgcaatagctttcattttctcataggctttataagagatgggttcagtggtatgagcagaggaagagatcccagatagtagccagttaaccaagactcattcatatagcacgtagtttatgttcctgaggcagcacttttagatcctttgtgagcaagttctatttgttcattgcttgccagagatgaacacagaatgttctgtttcattttacaagaactatcctgagtttctgtggatggaaacattacatgtaatgcagatatttttgtattctggaaagatttattaaagaattatatttgtgtatcctttataaattagtccctcattagannnnnnnnncttaagcataagactgaacttaaatgtgttaattttagtagaatcaggcactgctcgcagaaggaacacagattgtagagattaacataaattgttcttgttctaatatatatattttttcatttctgtcgtgcttggaaaactagtaaatattatgtctaagata

SEQ ID NO: 249358 - DNA, 606 bp, Homo Sapiens
ccttttagacaactttgtacaaaaaagttggcagagactgccacaaagtggagcggctacatggaaggggcagttgaggctggagaacgagcagctagggaggtcttaaatggtctcgggaaggtgaccgagaaagacatctgggtacaagaacctgaatcaaaggacgttccagcggtagaaatcacccacaccttctgggaaaggaacctgccctctgtttctggcctgctgaagatcattggattttccacatcagtaactgccctggggtttgtgctgtacaaatacaagctcctgccacggtcttgaagttctgttcttatgctctctgctcactggttttcaataccaccaagaggaaaatattgacaagtttaaaggctgtgtcattgggccatgtttaagtgtactggatttaactacctttggcttaattccaatcattgttaaagtaaaaacaattcaaagaatcacctaattaatttcagtaagatcaagctccatcttatttgtcagtgtagatcaactcatgttaattgatagaataaagccttgtgatcactttctgaaaattcacaaagttaaacgtgatgtgctcatcag

SEQ ID NO: 249359 - DNA, 902 bp, Homo Sapiens
  misc_feature (483)..(510): n is a, c, g, or t
gcaatgctttttctataatagccaactttgtacaaaaaagttggggaaagggcaaagactttctctttcccttatgtatttaactgtgccaatctaaatacatactgttttatacaatgagatgcattacaagacttttctgttggagtgctctcgacattttggttttcatacctgaatgatcattgcattttctgtattttctaaaatggctccaattttgtgttttaagcttcagcttaagaggaagtttatgttctaattcttgactgagaatacagtattgagattctctgttttacagataacaactggtttttattactcattaagttcatttgcatcccgtagccctctgtaaatgtttcccctagttgtatgtacgtaaatgcacgcttatccagtgtatattagacatttttgtgctaaaatatattaagtgggatttttgtagcaaagcattctatttttctgttcttacannnnnnnnnnnnnnnnnnnnnnnnnnnnatgcgtttttttaaccttaacttcagtttaaacactggtgtatttatttttttaagcaacttgactcttagaagccttagactgattttttcaataaatattcaaccaaaaattataaatttattaagatgtggccttacatatggcattccttgtgttcgtaatgtgagatttttgatttagataaatcaagattcaggattaaagtttcattgtaagttgaaatagaaaatgtattaaaatgtctaggcttctgggagaaagttcttatactcttctttcttggcattagaaagaagcaatatgaatttttgtgaatattctaaatattcacgcaacactgttcaaattgatttaggtttgtctttacccgatgttctttttttagaatt

SEQ ID NO: 249360 - DNA, 373 bp, Homo Sapiens
gggttttccattataaaaatttatcaagggaataatttgagtttttagaggcttggtttagcaaggtaaaaaagacaacctaattattaaaacactttataaattattttaatacctaccaactggggcctaaatgaaataaaccccgtattaccttaggaaagagactgctttcctaaatcacagaagttggtttccaagctacacttttacttctaatgccttggaaccctaaggagaactaaagctcaccagcgatggctgctttggaagtcaaggtgggaagaacaggcaatatcctgacacaggctagatacagactctgagccaaaagcagactttttttgaaggaagaaagggacccaactttttt

SEQ ID NO: 249361 - DNA, 1778 bp, Homo Sapiens
  misc_feature (887)..(923): n is a, c, g, or t
  misc_feature (1214)..(1221): n is a, c, g, or t
  misc_feature (1224)..(1226): n is a, c, g, or t
  misc_feature (1228)..(1233): n is a, c, g, or t
  misc_feature (1244)..(1257): n is a, c, g, or t
  misc_feature (1260)..(1260): n is a, c, g, or t
  misc_feature (1262)..(1262): n is a, c, g, or t
  misc_feature (1280)..(1280): n is a, c, g, or t
  misc_feature (1284)..(1337): n is a, c, g, or t
  misc_feature (1384)..(1419): n is a, c, g, or t
  misc_feature (1684)..(1684): n is a, c, g, or t
ttggcatggttatgatgacgacaaccatgactacatcgtgcgcagtggcgagcgctggctggagcgctacgaaattgactcgctcattggcaaaggctcctttggccaggtggtgaaagcctatgatcatcagacccaggagcttgtggccatcaagatcatcaagaacaaaaaggctttcctgaaccaggcccagattgagctgcggctgctggagctgatgaaccagcatgacacggagatgaagtactatatagtacacctgaagcggcacttcatgttccggaaccacctgtgcctggtatttgagctgctgtcctacaacctgtacgacctcctgcgcaacacccacttccgcggcgtctcgctgaacctgacccggaagctggcgcagcagctctgcacggcactgctctttctggccacgcctgagctcagcatcattcactgcgacctcaagcccgaaaacatcttgctgtgcaaccccaagcgcagcgccatcaagattgtggacttcggcagctcctgccagcttggccagaggatctaccagtatatccagagccgcttctaccgctcacctgaggtgctcctgggcacaccctacgacctggccattgacatgtggtccctggagctgcatccttgtggagatgcacaccggagagcccctcttcagtggctccaatgaggtcgaccacatgaaccgcattgtggaggtgctgggcatcccaccggccgccatgctggaccaggcgccccaaggctcgcgagtactttgaacggctgcctgggggtggctggaccctacgaaggacgaaagaactcaggaaggattaccagggccccgggacacggcggctgcaggaggtgctgggcgtgcagannnnnnnnnnnnnnnnnnnnnnnnnnnnnnnnnnnnnccacagccccgccgactacctccgcttccaggacctggtgctgcgcatgctggagtatgagcccgccgcccgcatcagccccctgggggctctgcagcacggcttcttccgccgcacggccgacgaggccaccaacacgggcccggcaggcagcagtgcctccacctcgcccgcgcccctcgacacctgcccctcttccagcaccgccagctccatctccagttctggaggctccagtggctcctccagtgacaaccggacctaccgctacagcaaccgatattgtggggnnnnnnnnccnnntnnnnnnaccccgccctnnnnnnnnnnnnnnccncnccccgcccggcgcgcgcncgcnnnnnnnnnnnnnnnnnnnnnnnnnnnnnnnnnnnnnnnnnnnnnnnnnnnnnnctccgtttcgggttgcgtgcctggtcggccctgccccgggtttgttnnnnnnnnnnnnnnnnnnnnnnnnnnnnnnnnnnnntccgccgttttcccccgctttttgttcctctccccgcgccttttggttcccgttcgtctccgccccctccccttcccctggtttcttcggtccctctcccgacccgcccgtgtttccttcgctcgccgcccgctccgcccgttgccgttttgtcttcgcgtgcgccgccctcgcggttcccgccgggctacccgccgcgtattgttcgcgccattgtctgcgccgcgcccccactatggcgcgcggtcgtaccgccgctccctcnccaccgcaaattttccgccgggtgttttttcaccccctctacctccgttttatttgtttagtctcccgtcgtccgtctctttttcgctccgcgt

SEQ ID NO: 249362 - DNA, 936 bp, Homo Sapiens
  misc_feature (781)..(838): n is a, c, g, or t
ttggaagagagcggcctggacagcgcgtggccggcgccgctgtggggacagcatgagcggcggttggatggcgcaggttggagcgtggcgaacaggggctctgggcctggcgctgctgctgctgctcggcctcggactaggcctggaggccgccgcgagcccgctttccaccccgacctctgcccaggccgcaggccccagctcaggctcgtgcccacccaccaagttccagtgccgcaccagtggcttatgcgtgcccctcacctggcgctgcgacagggacttggactgcagcgatggcagcgatgaggaggagtgcaggattgagccatgtacccagaaagggcaatgcccaccgccccctggcctcccctgcccctgcaccggcgtcagtgactgctctgggggaactgacaagaaactgcgcaactgcagccgcctggcctgcctagcaggcgagctccgttgcacgctgagcgatgactgcattccactcacgtggcgctgcgacggccacccagactgtcccgactccagcgacgagctcggctgtggaaccaatgagatcctcccggaaggggatgccacaaccatggggccccctgtgacccctggagagtgtcccctctctcaggaatgccacaaccatggggccccctgtgaccctggagagtgtcccctctgtcgggaatgccacatccctcctctgccggagaccagtctggaagcccactgcctatggggttattgcaactggtgcgggggtccggcaagcctggtnnnnnnnnnnnnnnnnnnnnnnnnnnnnnnnnnnnnnnnnnnnnnnnnnnnnnnnnnngggggttccggggggccgtgaaggggtacttcgctgcgggcaccccataataatctccaccttcctcccgccctaagtcgtcggcgccccgcggcggg

SEQ ID NO: 249363 - DNA, 783 bp, Homo Sapiens
attttctccttaattccaaaacctttatttttaaggagtatttgtagggggccttcaagggtttcctgtaaagcaagtggctataggttaaaaataaaaccttataatatggttttcacactaaaagatggaattctttcggtaaaaagttcaccacattgcaagtccgtggttcaaattactcttcagcagtggagacacatcttgctccaataaataacgtcatgctactcactataaaaaaacccaagggcagacaagagaagacagggttatcgccattttcagggtcctttgctgtaacccaacccattgacttcatcactgctctcttccatgttgaaaaacgaatttcactctctgtggcttggatttgtggttcatatcgttccatcaagatcgtagacaaatcttcaggttcaagactccaaacatttaccccttctgcagctccggctgccatggcagctcccagggccgtcgtttcaggcatgacagacttaactaccggaatgtgcagaatgtctgcttgtagctgcataagaattttgttgttggtcattcctccatctacctgcaaatgactgagtggaattccacagtctcgattcatggcatccaaaatctctcgggtttggaaacaaacagcttttaatgcagcaaaggcaatatggcatttgttggtgaactgagtgagaccacagattatccctcttgcactgggttcccagtaaggtgcatacagccccgaaaaggctgggacaaagtagcagccataggacc

SEQ ID NO: 249364 - DNA, 219 bp, Homo Sapiens
gatttaatcgtctatttattaatgcatttcaagtttcaaaaaaccttacatctttgcacaatactttattttttgcaatttttagtaaaaatttccaaagtgaacaaaaaaagatactgtataaaacacagtggacattaaaactgacagtagtattagatctcatttgtcttgatccttttatattaccacatcttgattcgcagtggaaagagttcc

SEQ ID NO: 249365 - DNA, 1417 bp, Homo Sapiens
  misc_feature (248)..(248): n is a, c, g, or t
  misc_feature (395)..(395): n is a, c, g, or t
tttccaaggtttaacgtttttggacccttgttccacaggcacctgctcccaagggcctccctccctgagttcaaacgcccaagacagagttgatctgattggctagttcaggcccagccttacctgattggacagagcttggtgccaaaccccctcataggctgctggtcagagcctgtgggggcgtgtggtcaggtgcccaatcaagctgtgagcaaggcctgtaagtgcaggtgcctgagggctcncaggtcagagttagctggggactggggtcactgtcctgctggggtggaatgttgtttgagccattgcaacgtgatctgcctaggaaagatacgtggaggggtcggggtagggggttgagccccttgcaggagggggcatgccagacntaatgggcacgggactctgcctctctgtgtgaatgtcaggcgcagggagcccagacgaggtggtgccaggtaattaattcgttcatccagggtatacgacggggtgttgggcactgtgtctggggcagtgaaaaataatgaggccctgccctgtggagctgcccttctggaggccagtgtgccagtccctgagctgcagaggagacccctccagtggagggggcagtgggaggtcccaggcctggcagcatcagggcccaccactaggcggggctgctgcctgggcctcggactccagggtttactccccatcagcttctcttgtgggtctgtgaagccactgtgggaagatgcagcaggcatccactttgtggggggatctgtgcccttacttgggccccagcattaaagatacagcagccaagcactctgaggcctcagagatcccaaaggaatagtaacagggcctctttctccaggcgccctgggtccctgacagcttctccctccagcactgacgctagaagtttctggcagattaagggaggcagtgcttccctccaggagaagcaaaaccggcacttgaagagtcagggaagtttgtcacctagatgagggggagcgcactgcagccccagggaatagcatgtgcaacagagggggtgtgagggagctctgagtggctcaggaggacggtagggaggattgcagaaggggatgtccccacacgacaccggaggtacaagtaccaggctgagaagtggggctgagggcagtgggacctgtgcaaggttttgaaccgagggggagcgtggccatatttgggttttggaaagcacgctcaggctgccctgtggacggggaggggagggaaggaggaggctggggcagaaaacccagggaagaggtcagggcagggagccctggagagccgcgaggactgatattggtgaatagctgcagggctggagaggagcgatgcttctgagcctaaattcgtgggatcctgtgattaacgccaa

SEQ ID NO: 249366 - DNA, 774 bp, Homo Sapiens
  misc_feature (88)..(148): n is a, c, g, or t
ttggcccagcgcagctcgggagcccgcgcaccgaggcgctaggggcaccgcgcactagagggacacccgccgcgcctggacagccccnnnnnnnnnnnnnnnnnnnnnnnnnnnnnnnnnnnnnnnnnnnnnnnnnnnnnnnnnnnnngtgtccccagggcgcagggccgcgcgtccagccccagacccgccggggtccctggggacgcgccagcccggcagtggctcgacgatggaggagccgcagcgcgcccgctcgcacacagtcaccaccaccgccagctccttcgcagagaacttctccaccagcagcagcagcttcgcctacgaccgggagttcctccgcaccctgcccggcttcctcatcgtggccgagatcgttctggggctgctggtatggacgcttattgctggaactgagtacttccgggtccccgcatttggctgggtcatgtttgtagctgtattttactgggtcctcaccgtcttcttcctcattatctacataacaatgacctacaccaggattccccaggtgccctggacaacagtgggcctgtgctttaacggcagtgccttcgtcttgtacctctctgccgctgttgtagatgcatcttccgtctccccctgagagggacagtcacaacttcaacagctgggcggcctcatcgttctttgccttcctggtcaccatctgctacgctggaaatacatatttcagttttatagcatggagatccaggaccatacagtgatttaccattttgataatta

SEQ ID NO: 249367 - DNA, 792 bp, Homo Sapiens
ttgggaacggtttcccaggttggacagaaacatcagtcaaggagaacaaaaatattaatgaggctatgagagtcctcattgaaaagatgatgagaaattccacagaagatatcatgtctttgtccacccaaggggactacatcaatctacaaaccaagtcctccagctggtcctgctgctagtagtgtttggcttattttccatcccagttctgggaggtcttttaagtctcttccctttggttgcccacctgaccattttattaagtacatttgaattgtctcctgactactgtccagtaaggaggcccattgtctcttagaaaagacacctggaacccatgtgcatttctgcatctcctggattagcctttcacatgttgctggctcacattagtgccagttagtgccttcggtgtaagatcttctcatcagccctcaatttgtgatccggaattttgtgagaaggattagaaatcagcacctgcgttttagagatcataattctcacctacttctgagcttatttttccatttgatattcattgatatcatgacttccaattgagaggaaaatgagatcaaatgtcatttcccaaatttcttgtaggccgttgtttcagattctttctgtcttggaatgtaaacatctgattctggaatgcagaaggaggggtctgggcatctgtggatttttggctactagaagtgtcccagaagtcactgtatttttgaaacttctaacgtcataattaagtttctcttgtcttggcatcaagaatagtcaagtttt

SEQ ID NO: 249368 - DNA, 899 bp, Homo Sapiens
  misc_feature (225)..(335): n is a, c, g, or t
gaatttattattgagagttttgttgtagctgtgagcttagaggaagaagcgaggtccaacccaagaaacactttgggcaccaaataaaactggaaaccctgatcccaaaactcacacaaaagtgagagataaggatgaatcaagaaacccttggacaagatcaaaagaagcattagaggtcagtcaagaatgtcactttcctggcaggaaagattcgatgtggannnnnnnnnnnnnnnnnnnnnnnnnnnnnnnnnnnnnnnnnnnnnnnnnnnnnnnnnnnnnnnnnnnnnnnnnnnnnnnnnnnnnnnnnnnnnnnnnnnnnnnnnnnnnnnccagggtcacttcttggcagggtctcccaaaattccttcctgagagacatttaatgcaccgaaagggtttcatatcggacgtttttgctccggggggtcaacctaaagcaggaagctgcgcagctgagcgtccgcacccccggtccctcaggaacccagccaagtcagccgacatccgctcctgacctcaggcgcctcctggcgggtgctgctgcacgcacctgcgggacgtggacctccaggacagccccgtcggcccccggacccggctcctccgagaatcgaaagcgctgggcccggaccccctgtcctcggaaatcgtgctcgcccagtagggcgtcgttgggccccgggcgggcgggggaccgcggaaggctccgggctgccagactgcgcgagcgggaagccgcgggccacgtggccgtagcacctgacggcaagaaggggaaagcccagatctggtgataaccctgccgcgctgcgagcgaagaaagcccggagcaaggcgaaagagactcacacgcgcagaactggcaacgggcggctggcgcgaccggaagtccc

SEQ ID NO: 249369 - DNA, 1585 bp, Homo Sapiens
  misc_feature (199)..(398): n is a, c, g, or t
  misc_feature (1492)..(1492): n is a, c, g, or t
  misc_feature (1520)..(1520): n is a, c, g, or t
ttggatttgatatagaaatgaatgatattagaacaactaattaacaatttgaggccaggcgtgagccaccgcgcccggccccagaccctctttaatgtcattctttcattatttgtaatggaatttttctctctgtttttgtcttctctctcctctcctctgataatatatatatattttttgagacagggtcttgctnnnnnnnnnnnnnnnnnnnnnnnnnnnnnnnnnnnnnnnnnnnnnnnnnnnnnnnnnnnnnnnnnnnnnnnnnnnnnnnnnnnnnnnnnnnnnnnnnnnnnnnnnnnnnnnnnnnnnnnnnnnnnnnnnnnnnnnnnnnnnnnnnnnnnnnnnnnnnnnnnnnnnnnnnnnnnnnnnnnnnnnnnnnnnnnnnnnnnnnnggtgctccctaccagacatgaaaatatatatcattagtctagaataaaataaatggtgtagcactggaacaagaatattcaaatgaggaaatcagaatccaaagcccagacctctgagtaaagagacaacttaaacacaaacatatgactcccaattctgatgacaatggccaaaagaatgcaagaatagaaaaaaatactgctttgattctggaagcctagaaagactgacacccaaatgtcagaatcatgagagagatttctgctgttgataaaaacattgggatgatgtagaaaagacaccaagaactcacttcccacgaccttccaaagataagaatgaggtccccaaaaaggtgaatgaagagaaaactccaggaatacctgtcacttagaggtgggtagaactgggagtggaaagaaggcatgggccaaaaagtaaccttctgctcaaacagtacttttagctatgatgggttcatggaggtttgccaggagctctgggacacaaatgggcgcagcaagctgaaagcagggaagggaagggaagctctgctcagcaaagcacaaaaaggcatccgggaaggggccaagcaaaagctgcaggtggctgtgcccagagagcaaggtagcttcaccaagcataaggccagtggggcaaggtttctgtctgaagtgtcaggactgtcctatctgcagtgggaagcagccgcagagagggatgggtgcatttgagctcaatctctagtatcaaagctcagccgaacctggagaagaagccacccagggacgaattccactgctgagatcatccaggacttagctctctgcccactccctttagagttagaccctgacccagcagccaggcctccagcttcagaggagagaaagattccagtagcttccatgtgataggagcaacaaggccaagagaaatgggcaacctggtcatactttgtgggaagatcagaacaaccttttaggagagctattgtcatacgtaccaaacgccttcaaatttgacatttcctgtgatgaaatcattctacttctaggagtgtttcttaatgtaatatcaaagacgtggccanaaatcaactagaaagaatgtccactgtngatttttaatgttaaaactttaagaaatctaaaccttcaataatggccaatggttcaatgactta

SEQ ID NO: 249370 - DNA, 829 bp, Homo Sapiens
  misc_feature (611)..(611): n is a, c, g, or t
  misc_feature (817)..(817): n is a, c, g, or t
ttggcggccgccctgccgcgcgcacatgtaggcgttccgagcggcggcggagattgtccgcagtgactacactcatggcaggtcccctgtggcggaccgcagcatttgtgcagagacacaggacaggcctcttggtgggttcctgtgcaggcctgtttggagttccagtctcgtaccacctcttcccggatcccgtggtccaatggctctaccagtactggcctcagggccagccagctccgctccctccacagctgcagagcctcttccaagaggtgctacaggacataggtgttccttcaggccattgctacaagcccttcaccaccttcaccttccagcctgtgagtgcaggcttcccaagactccctgctggggctgtggtgggcatccctgccagtttcttgggagacctagtgatcaacactaaccatcccgtggtcatacatgggcatacagtggactggcggagcccagcaggcgcccggctgagagcttccctgaccttgtcccgtgaagcccagaagttcgccttggccagggaagtggtgtacctggaaagcagtaccactgccgtgcacgccctgctggccccagcttgcctggcaggnatctgggcactgggcgtgggtgccaagtacaccctggggctccatgcaggccccatgaatttacgggctgccttcagcttggtggcagcagtgggcagctttgtggcctacgccttctccccagattctctcactcatgcccgtgggagtcctggctggaccgcccgcacgggcctcccctctctgcagacctatggcctgtgggntggattggaatt

SEQ ID NO: 249371 - DNA, 780 bp, Homo Sapiens
gggtataattttcaaactctgtcaataacttgctgggtccaacctgcagaccctggctgcgtgatggatgaagaaatgcactcagacacaggtatcctgtgaaagaatggggtaggggactgggcagctcccagacactgaggagggtgctatgaagagtcagcaggtgctataaagagtcagcaggcacagccctgtcaggctggggctccaggcatttattcagtacagatttaatgacaaagttctcaagtaaacaccacaccactagagggtaattaacattgctgacctcctgagtagagagcagtcatgcgcccgcaaatgatcaaaggtctgttttaggaccacatgagtaaacaagctatttagataaacttctctacattcctatgtatctacgccctaagcttttaagagaattcagctgccttcagccaaatcttttactgaaggtatgcaaacctcccagccttccaagaagttttgtgtctatctcctacaacttaatttttataatttctcccaccaccctgacagatcccctacaaaagaccatgtttcttctcagcttgctcagtccagctgagccagctttccactggactcctgaatgtgagaaggacacaggctccccggaccatccagaagcatctctcatccacttaaaagctctgaaacactggctgggtgccagaggctcccacaagtaatcccaacacattaaaaaggctaagggtgggaaggattgcctggaggccaggaaatccagggacccgc

SEQ ID NO: 249372 - DNA, 994 bp, Homo Sapiens
acttataaaagccaactttgtacaaaaaagttgggtccgcccctgaggttaatcttaaaagcccaggttacccgcggaaatttatgctgtccggtcaccgtgacaatgcagctgaggaacccagaactacatctgggctgcgcgcttgcgcttcgcttcctggccctcgtttcctgggacatccctggggctagagcactggacaatggattggcaaggacgcctaccatgggctggctgcactgggagcgcttcatgtgcaaccttgactgccaggaagagccagattcctgcatcagtgagaagctcttcatggagatggcagagctcatggtctcagaaggctggaaggatgcaggttatgagtacctctgcattgatgactgttggatggctccccaaagagattcagaaggcagacttcaggcagaccctcagcgctttcctcatgggattcgccagctagctaattatgttcacagcaaaggactgaagctagggatttatgcagatgttggaaataaaacctgcgcaggcttccctgggagttttggatactacgacattgatgcccagacctttgctgactggggagtagatctgctaaaatttgatggttgttactgtgacagtttggaaaatttggcagatggttataagcacatgtccttggccctgaataggactggcagaagcattgtgtactcctgtgagtggcctctttatatgtggccctttcaaaagcccaattatacagaaatccgacagtactgcaatcactggcgaaattttgctgacattgatgattcctggaaaagtataaagagtatcttggactggacatcttttaaccaggagagaattgttgatgttgctggaccagggggttggaatgacccagatatggtaaaacttgagccctccttgttcagaccctgcggtaggcttgtttcctattttgacattcaaggtaaatacaggtaaagttcctggg

SEQ ID NO: 249373 - DNA, 909 bp, Homo Sapiens
ttggctccgctgggcaccccgctgcccccagactgggtgacgctggagggggactttgtgctcatgttggccatctcgcccagccacctaggcgctgacctggtggcagctccgcatgcgcgcttcgacgacggcctggtgcacctgtgctgggtgcgtagcggcatctcgcgggctgcgctgctgcgccttttcttggccatggagcgtggtagccacttcagcctgggctgtccgcagctgggctacgccgcggcccgtgccttccgcctagagccgctcacaccacgcggcgtgctcacagtggacggggagcaggtggagtatgggccgctacaggcacagatgcaccctggcatcggtacactgctcactgggcctcctggctgcccggggcgggagccctgaaactaaacaagcttggtacccgccgggggcggggcctacattccaatggggcggagcctgagctagggggtgtggcctggctgctagagttgtggtggcaggggccctggccccgtctcaggattgcgctcgctttcatgggaccagacgtgatgctggaaggtgggcgtcgtcacggttaaagagaaatggggctcgtcccgagggtagtgcctgatcaatgagggcggggcctggcgtctgatctggggccgcccttacggggcagggctcagtcctgacgcttgccacctgctccctaccggccaggatggctgagggcggagtctattttacgcgtcccccaatgacaggacctggaatgtactggcttggggtaggcctcagtgagtccgcccggccagggccccccagccttcccccatccactccgggggcctcccattaagttggccaaacacgcccatgaaggggcccggttcccccggggccccgccctaa

SEQ ID NO: 249374 - DNA, 925 bp, Homo Sapiens
  misc_feature (70)..(118): n is a, c, g, or t
  misc_feature (295)..(566): n is a, c, g, or t
  misc_feature (641)..(642): n is a, c, g, or t
  misc_feature (650)..(650): n is a, c, g, or t
  misc_feature (659)..(660): n is a, c, g, or t
  misc_feature (820)..(865): n is a, c, g, or t
gggtttatcaggccgtttctggcttttgcttcttcctcattttctcttgcctctgctatgtaagaaaacnnnnnnnnnnnnnnnnnnnnnnnnnnnnnnnnnnnnnnnnnnnnnnnnnaagggtcctgtcctgtacccgggaggaagaaatgctacgcagagaagccaagatgaatctgaacagacagcctttgtcagttccaccgattccataaaagttaactccagagcagagaatgatgccacagtcgggataacatccaatatttgtaatcagaagaactatgagagtctnnnnnnnnnnnnnnnnnnnnnnnnnnnnnnnnnnnnnnnnnnnnnnnnnnnnnnnnnnnnnnnnnnnnnnnnnnnnnnnnnnnnnnnnnnnnnnnnnnnnnnnnnnnnnnnnnnnnnnnnnnnnnnnnnnnnnnnnnnnnnnnnnnnnnnnnnnnnnnnnnnnnnnnnnnnnnnnnnnnnnnnnnnnnnnnnnnnnnnnnnnnnnnnnnnnnnnnnnnnnnnnnnnnnnnnnnnnnnnnnnnnnnnnnnnnnnnnnnnnnnnnnnnnnnnnntaattattcttttcgtgttaagcaatggtaaaagaactgactgaaaataagaatattaaaaagtttctctgctannaacaaccntatgaaggnncccccctggccataataatacaggaatggcccttttttaaaacctgggagagaaacacataaacacaccgcaactttgcataaaaatatccccaaccgatatttccttgtgggcgccccccccgccctcacaaaaaatttttctaaaacactttcttttnnnnnnnnnnnnnnnnnnnnnnnnnnnnnnnnnnnnnnnnnnnnnnaaagcgttttctccccaaagagaaacccgcgggccaaggaaaaaggggcgtgtgggttct

SEQ ID NO: 249375 - DNA, 1153 bp, Homo Sapiens
ttggcttggtttttcccccgggtggtcgtaatcctccttcctctgatgaacttgatggtattattaaaactatagcaagtgaactaaatgttgctgctgttgatacaaacctcacattagctgtgtcaaaaaatgtggcaaagaccatccagttatacagtgtaaaatcagagcagcttctctccacacaaggagatgcaagtcaggtgattgggcctcttactgaaggacagagaagaaatgtggcagtagtgaattcattgtataagttgcaccaatcagtaacaaaggctattcatgctcttatggaaaatgctgtgcaacccttactcacttctgtgggagatgctatagaggccataatcatcaccatgcatcaagaagacttttctgggtcattatccagctcaggaaaacctgatgttccttgttctctgtacatgaaggagctacaaggtttcattgccagagttatgagtgactattttaaacactttgaatgcttggattttgtctttgacaacactgaggctattgcccaaagagctgttgaactttttatccgccatgccagtctcataagacctcttggtgaaggtgggaaaatgcgacttgctgctgattttgcacagatggagttggctgtgggtccattctgtagacgagtatctgatttaggaaagtcctatcggatgctgagatcattcagacctctgctcttccaggtaagtgaacatgtagccagtagtcctgcattggggggatgtgattccgttcagcatcattattcagtttttgttcacgagagcacccgctgaactgaaatctcctttccagagggcagagtggtcccacacacgcttctctcagtgggttggatgaccatccatctgaaaaaggacaggctcctccccatcaggggagccctggaagcttatgttccatcagtgagaagtagagaaggcaaagaatttgcaccagcttaatcccataagggttcagctgcttccaaaggctatggtctgcctcttccagaatggacatgaaaatctttggtccatctccactttgtggctaacccattcatagttggcgagttatacccatacctccaaaaagactgctactaatctacctatttttaagaatggta

SEQ ID NO: 249376 - DNA, 805 bp, Homo Sapiens
  misc_feature (747)..(760): n is a, c, g, or t
ggagttttagaggaagctgaactatgacgatgctgggcgaagcggttggaaatggcagagctgaaacttattccaagctttcaaaataatcttttaagaagccaggattctccggtctggaatttctgagtgagtcctttttttatggtgtcctccctctgtgaatgtacaggcggaactgtacgaacagctcccttccatccatttttaactctttcggaaataacacctcacagcagcttcgtgcttttgtacagacctttgtaacaagtgtacagaaaactcattttgtttgagaaacaggagttgatgaacccatcatgctggtttttctctgagcacaaagttttaggctgtacacagccagccttgggaatctcgttgagcgttcggcgtggatccacgggggccaggccaccctgcggggagcgccacacgcatcccacttcggattcagctgggtgaagacagaactctgagagtctgcaggcgggctcctgtgcttttttatttctgggctccttcgggatggtcttctacacatttttactattcattggccctgaaagaaaaaaatcaccttttttaccccttccttaatttaaaaaagcacaaaaccggaaaatgggaccgtttcctttcgcctaggcttttaagccctttcctggttcccccttttttataaaatccttgacccatttggattaatggttcctaatccttaaattttgggaacaggtggggaannnnnnnnnnnnnnctacaaaataaattattttttaattaaaaaaaggggcacaaaaac

SEQ ID NO: 249377 - DNA, 920 bp, Homo Sapiens
ggccctttcttccttcagatattcaagaactcccaaggtgtttaaaccgtatgctggagtcagtgatgggacagacaggagcccaagactgaagccagcccttgcctcttgtgttcccttcccaactcctggtgctggagtaatggggtgctctgcattttgatggggagcaaggggggaccccccctgtaggagtatcggcctctcccctgccccctaccctctctcgtggaccaaagtctccagcagaagggactcatcataagactgacgactcccccacctccacccacacaccgagtgtcatcagtcctaaaggcagggaaacgctcacagaattctgcccacgggttagatgtggggagaaggatattctcagctccagagtgattaggtgatcagccagaaactaaggcaaggtgacaagcagcagcctggagtcacagttggtcccaggcgtgtgggcactaagcagcctctggagacatgcgggcagttgaggatgcaaggacacagtgagtgagtggcgctcctttttggggtcctccagcctctagtcaagccccaggttcgtaaatatgtttgtattacattttaaaacctgtatccacagtcacatttaagctccctattggtttaaagaaaattcatactccaggttactttttcccattcgacctcctatagagacaatatgcagtgtgtcatttcccagtctcagtccctgtgaacagtggctgacaccggtgcccagggctgacctgctacactccaaattcctaaactgggctgcctctaactgcctcctgggaagccacccgagccactcggtctctttgtgcctaaacatgaaaggtgaaaattggagaacagggaagctcgtaagttggagtcattgtacaggcagggatctttgccaa

SEQ ID NO: 249378 - DNA, 935 bp, Homo Sapiens
ttggctcttcagcttctgacgttgtctttcccaaggtgggcgacgggaacccgctgaagctgtggaaggcttctgtggaggtggaagcacccccctcagtggtcctgaaccgcgtgctgagagagcgccacctgtgggacgaggactttgtgcagtggaaggttgtggaaactctagacaggcaaacagagatctaccagtatgtgctgaacagcatggctccccatccttccagagactttgtggttctcaggacctggaaaactgatttgcccaaaggaatgtgtaccctggtgtccctctccgtggagcatgaggaagcccagctcctgggtggtgtgcgagcagtggtgatggactcgcagtacttgatagaaccgtgtggctctggcaagtcccgactgactcacatctgcaggatagacctgaaaggtcactctccagaatggtacagcaaaggctttggacatctgtgtgcagcagaagcttgccaggattagaaactctttccagcccctccttgcttgagggcccagaaactacaatctgagttttgcccattgtgacctctaattccgggaagaggacgctcaagtgcttattgtggcagagagtgtgcttgtgagaaagcgagagaaagaggaactgaatgacgcggtttatgcctaaaaatggaaaccctcaagaacccgcaaacgttggagaatgcccccacttcccccgaccctttctttacccttccccgcgagatgggttacattaccctactaactacccctctttgaaactgaacaaccttcatatcccaccccctctaaaatccaaccggacccaattcccctggtgccacccgccctaattttgtctattctaagagccttcctcacaacgacttactccccaaattggcaaatcacactgtatgcgatagtatt

SEQ ID NO: 249379 - DNA, 945 bp, Homo Sapiens
ggaccccgagcctgccggcggctcccgtcccggccccgcggtccccgggctccgcgccctgctgccggcgcgggctttcctctgctctctcaaaggccgcctcctgctggccgagtcgggtctctcattcatcacttttatctgctatgtggcgtcctcagcatctgccttcctcacagcgcctctgctggagttcctgctggccttgtacttcctctttgctgatgccatgcagctgaatgacaagtggcagggcttgtgctggcccatgatggacttcctgcgctgtgtcaccgcggccctcatctactttgctatctccatcacggccatcgccaagtactcggatggggcttccaaagccgctggggtgtttggcttctttgctaccatcgtgtttgcaactgatttctacctgatctttaacgacgtggccaaattcctcaaacaaggggactctgcagatgagaccacagcccacaagacagaagaagagaattccgactcggactctgactgaaggcctggcgggtgccttggcaacctgagccacacaggcctccacccctgcgcctcacaggggtcgctggcgttggagcggaggcctggacttctgagttgcagagggggctgcggacacagcaggccccctacagcctcaggttctgcctgagcccagcctaccaggcttgcccctcagctcagcactgttgaccacgctgcgtatgaggggcatcttgggtatcccactccttctccccatttctgtcccacaggccttcagccctttaacgtctctgccaaaaaccagcacaagggagacaaagcagagcctttgtctgtatctggggcaacaggtgtttccatgctgctagggtgccggggggtccgggggtccttctggtttccctaaccggaaccaaagaccggaacccctggacgggg

SEQ ID NO: 249380 - DNA, 1313 bp, Homo Sapiens
ttggcacatgattcgatttcttaaagccattggctctggagaatctgagacacctccatccacacccacagctcaggaacccagttcaagtggtggatttgagttcttcaggaatcgaagcatcagtttatcccagtcagctgaaaatgttcctgccagtaaattcagtttacagaaaacactaagtatgccatctggtccctctggaaaaagatggagcaaagacagtgactgtgctgagaacatgtatattgacatgatgctctggagacatgctcggcgcctcttagaagatgtgaggttaaaggaccttggctgctttgcagcccagctgggctttgaactaattagttggctatgcaaggaacgtacccgagccgcccgggtagacaactttgtaatagccctgaagagactccacaaagatttcctgtggccacttccaatcatcccagcctcttctatcagttctcctttcaaaaatggaaaataccgaactgtgggagagcagctgttaaagtctcaatcagctgacccatttttgaaccttgagatggatgctggcatctccaacatccagcgaagtcagagctggctcagcaacattggccccacccatcatgagatagacacagcttcatcccatggaccacaaatgcaagatgccttcttgtcacctttatctaataaaggtgatgaatgcagtattggttcagccacagacttgactgaaagtagctccatggtggatggcgactggacaatggtggatgaaaatttctctacactcagtttaactcagtcagagctggagcacatttccatggagttggccagtaaagggcctcataaatcccaggtccagcttcggtatttgctacacattttcatggaggcagggtgcctagactggtgcatcgttataggcctgattcttagagaatcctcaataatcaatcagattttggttattacacagtcttcagaggtagatggagagatgttaccagaacataaagacagggctccatgcagtggaccgatgggcctctacagactgtcctggatataagccatttttaaacatcattaagccaccacttgcgaaagctcagtgagataacagaagagcagggtccagcccagatgcccttccaaccaattaactatgggggtaagactcccgaaaaggactagccccccgggcaaaaagaaagcaagggggcttcctccagccatggaaagcatccccccaggggtgaaatttgggaaacaacaaataagggtcagcccggaaaagagggaggaccccc

SEQ ID NO: 249381 - DNA, 805 bp, Homo Sapiens
ttggcttagaaaccaggcggcgcgttcccggtggcggcgccctggactcccgggcccgcgcatccccgccagccttccttaaggcggatgggtggcccccgagaccccgtcggacccttggtttccagtgcagcgcggagtgggcgatgccagcgtgccaggagccatgtctgaccaggacgtttggaagatcatatccatgccagaggctcttgtgaggagatgagttggtaaagagagaggctgggatgaagatgctgccaggagtgggcgtgtttgggactggcagctccgcccgagttctggtcccactgctgagggcagaagggttcactgttgaggccctgtgggggaagactgaggaggaggcgaatcagcttgctgaggagatgaacatcgccttctacaccagccggactgatgacatcttgctgcatcaagatgtggatctggtgtgcatcagcatcccctctccactcacccggcagatatccgtgaaggctctaggtattgggaagaatgtggtttgcgagaaggcagcaacatcgggtggatgcctttcgggatggtgacagcctcgcgctactacccgcagctcatggaccctgggaagggaaacgtgctggcgcttcctgccctgccttccgggcgcatgaaaacagctggaatttcgggaaccctattgtggggagcccggggattaatcttggtgaatggccccccaatctaacctccaggcaggccttggcttgagacccctcaacctaattggcctcgagaatcttgtggatatggaagcctccat

SEQ ID NO: 249382 - DNA, 809 bp, Homo Sapiens
  misc_feature (88)..(106): n is a, c, g, or t
  misc_feature (108)..(108): n is a, c, g, or t
  misc_feature (110)..(111): n is a, c, g, or t
  misc_feature (115)..(116): n is a, c, g, or t
  misc_feature (118)..(118): n is a, c, g, or t
  misc_feature (124)..(124): n is a, c, g, or t
  misc_feature (126)..(126): n is a, c, g, or t
  misc_feature (212)..(212): n is a, c, g, or t
aacgatgtgtcaggccaatctttattgatttaccctaatgttatgcataaagtttatctcttccccccaatcgttctcatcctccctnnnnnnnnnnnnnnnnnnntntnnggcnncncatacncncacataaagaagcaaagtcaccagctgagagcgaagtttggggtggaagttttgaggtttgagaaaaaagaagtctgaaagtctancctctttttgaaatgtgcctgtgatgaagagtgacaatcggcaaagcaaatctaataggatctctaaagagccttttcctgttgtttacaattgtggctaaagccctgcactagaaaacaacaaatgctaagatcctccctgcatcccctacccccgaccccctggggcacacacaaccctcctccaccacgttctaaaaagactggaaggacttggaaaaacattcctatgggatgaactagaaggtggcaggactgctatcttcagacctcgtttacccaccgcttccagctgaaaaccagggatttcacaaaggaaaaatcatgagagtcatagttctgtggttttctcaaaaggagaaggaagggacgctcttccttcccacccctgagaacaggcctaatgagagcaagcccactggctggactgagggtgaccaaatgaatgtgacgatggcatctcatttcccaggtggacatgtgctgggcagcatgtgcctaggactgacccagaagacacacagcaccacacaacaggattgatgtgatgacaaggccaagacagaaggctgtgggaggagtgaggagaaggtggcc

SEQ ID NO: 249383 - DNA, 1511 bp, Homo Sapiens
  misc_feature (875)..(1301): n is a, c, g, or t
  misc_feature (1416)..(1416): n is a, c, g, or t
ttggcgcggacgtggaagaacctcgtctgcggaggaaaaggtgccgagtcaatccccatacacagccgccgccattgcctcgagtccttgtgtctgactgtctgttcctgctgctgtatgacacagcacctcgaggcaaggaaataagaaaactgcctctgatccaagcagagaaggtcagtgagaagaactcctgtagcctgtaataccagctgtgggtactactctcagtgttggagatcatcaaaatacaattggaccagaccctttggaaataattctgtgtctcaaatgccctgtggagcacacacttaatcagttgatggctatggaattttccaacatcagctaaagagaagggatagagtggtgacttccaagcttcatgcagaaccggacaacagaaattgagagggaaatttctatgacagaagagagaaagaagaaaattgctggaataatgaccttgaatagaggaaatgggatatcatctggtaagcaaatagagaagctggctttagataagagcctggacaattcattcatagaatagcagaaaaggcagaatttatgtccatagatgcaagtggtatagtagatatagtgatgggagtttgtaaaagttaccttctaattgctattttttttaatgaaataagaaacaaagtcatcaactcaaagtgagtaatatgtaggaggtgattattgtttgaggagagaggagaatgtgtgatatcttttgttaattatggtaaaatataacacaaaatttgccattttaaccattttaagtggacaattaagtgtcattaattacattcacactgttgtacatctgccaccactatcttcttctaaaactttttatcacctcnnnnnnnnnnnnnnnnnnnnnnnnnnnnnnnnnnnnnnnnnnnnnnnnnnnnnnnnnnnnnnnnnnnnnnnnnnnnnnnnnnnnnnnnnnnnnnnnnnnnnnnnnnnnnnnnnnnnnnnnnnnnnnnnnnnnnnnnnnnnnnnnnnnnnnnnnnnnnnnnnnnnnnnnnnnnnnnnnnnnnnnnnnnnnnnnnnnnnnnnnnnnnnnnnnnnnnnnnnnnnnnnnnnnnnnnnnnnnnnnnnnnnnnnnnnnnnnnnnnnnnnnnnnnnnnnnnnnnnnnnnnnnnnnnnnnnnnnnnnnnnnnnnnnnnnnnnnnnnnnnnnnnnnnnnnnnnnnnnnnnnnnnnnnnnnnnnnnnnnnnnnnnnnnnnnnnnnnnnnnnnnnnnnnnnnnnnnnnnnnnnnnnnnnnnnnnnnnnnnnnnnnnnncaaatgtattctatttagaatacatcattctaaatagaaattttttaataattaagtattttcctctccttggagcacttggaaacttctaattccactttctatctctaataantttgcctattctagatatatcaaatgagtgaaaataatacaatagttggcctttttgtggctgggcttccttttacttttgcataaagggttttc

SEQ ID NO: 249384 - DNA, 1184 bp, Homo Sapiens
ggggaacagtagaggaccgaggggcatgagacctgaggggcagttgaaacaccatcaaggcagagcctgtgataaaggctttaggttttattccagttgcagcaggaaaccagggaggcagggaagtgatatgctctgatttatggtttagaattgtcatttggttgctgtgtggacattaagactgagatagaaagcaactaggagcctcttgcaagaattcaggtgaaagatgataaaggttggaatcaagatgtcacagtaaagatggtgagaagatggtgtgtatctttgtggtagagtggacatgacctgctgaagaatcctatgtggagtatgggggaagacaggaaccaaggatcacatgtaaattttctgcttcagcaacttggtagataatgtggctatttaaagagatgacaaaaggtatttatgagcctccatttcttatactactgcagtgaaccaacattggatgtgaaaattgccttttgtcaggtgtgtgttccttacaggtaaaacaagggattcgataaacaagtggatgtgtcatatattgccaaacattacaacatgagcaaaagcaaagttgacaaccagttctacagtgtggaagtgggagactcaaccttcacagttctcaagcgctaccagaatctaaagcctattggctctggggctcagggcatagttttgtgccgcgtatgatgctgtccttggcagaaatgtgggccattaagaagctcagcagaaccctttcggaaccaaacacatgccaagagagcgtaccgggagctggtcctcatgaagtgtgtgaaccataaaaacattattagtttattaaatgtcttcacaccccagaaaacgctggaggagttccaagatgtttacttagtaatggaactgatggatgccaacttatgtcaagtgattcagatggaattagaccatgagcgaatgtcttacctgctgtaccaaatgttgtgtggcattaagcacctccattctgctggaattattcacagggatttaaaaccaagtaacattgtagtcaagtctgattgcacattgaaaatcctggactttgggactggccaggacagcaagcacaagcttcatgatgactccatatgtggtgacacgttattacagagcccctgaaggtcatcctggggatgggctac

SEQ ID NO: 249385 - DNA, 816 bp, Homo Sapiens
acttatttttactttcattttatttcagagcatttaatgcggtttaccaatcaatcacatcttccaaaaacacactgtgttgtttttctcctcaaagcagtttttcatacattgcatcattttctgttcataacagtcccaaggactggatagggtcggctttgctgtctccattttaatgacaggaacttagatgtggaggccttacgctgtccaggaaggggttttacagacgttacttcgtttggtcttctcctcccaccctgcacggcgcaaagagcccatcagtttgcggaagtctggggtggaggacagtctggagtgacaggctgctaccagaccagtcgatctggttcgggctgtgacataagctaggggtcgaagtcaggggcacccgcacaggcggacctgcctggcacctagccaaggcgaatccaccttcccggccagcccccagggccttgaattggcaaaagtatcgaatcctgttgtgtgtgaagcaagctcttcatgcgacaccttcagggcgacctcgggtcaagaactactcattgtgctgcttggacgcgccggggcccgagtcttcgtggatcggccaggccaggagtgaaaggtctgggagttcttccggccaagagcacccgaagagccactgggatcagaaatgcgccccggtggaccccaaaccctgcagccgggggcggggggtgtcgtggagtgtccgctcgccccatgccgtgaccgggacaaccggtacagcaaactcacatggagccccaagactctggatccccaagactctggatccctccccgg

SEQ ID NO: 249386 - DNA, 1430 bp, Homo Sapiens
  misc_feature (688)..(755): n is a, c, g, or t
  misc_feature (778)..(861): n is a, c, g, or t
  misc_feature (901)..(965): n is a, c, g, or t
  misc_feature (1200)..(1200): n is a, c, g, or t
  misc_feature (1204)..(1205): n is a, c, g, or t
  misc_feature (1232)..(1232): n is a, c, g, or t
cagccaaaagaacgatttcttagatggaggacctaggaaccaacagatgggctgctgtattactcttacccctttcattttcctgtatgcttcttcccaaggcagcatcaaattttgaattaatttttgctgcttaataaggacttaaactggtacccaagtcagaaagactctgcctctaattttctggggcttggggatgaagataaagtgttacacccagtgtttgtccaccacagtctgtggggcagagagacccttcctgggactgaattctcaatttgaagcactgttgttcaaagatctcccttctgggtctgacaagaagaaacataacccttatttattgcattcttctggcttacatacattgccctcactaatcaatggacatttcagcatttcattactaattttgagagaaggccaccatggaatttaataaaaatattattgaagagaattgccatcattctccattttccctgaactaccacaagcttctcagaattttagacaaatgtttttcccctcaaaactgagcatcagtgctgctttggaaaaacattccatgtgaatactgtggtttcagtgtcaggacctgtacttgggcagttggaagagagtgtgccagttttttattgtgagatgggaacaccaatttaattgatgcaattaggttgtaggnnnnnnnnnnnnnnnnnnnnnnnnnnnnnnnnnnnnnnnnnnnnnnnnnnnnnnnnnnnnnnnnnnnngagacataggctggctctgtcannnnnnnnnnnnnnnnnnnnnnnnnnnnnnnnnnnnnnnnnnnnnnnnnnnnnnnnnnnnnnnnnnnnnnnnnnnnnnnnnnnntaggaggattacaggcacctgccaccactcccagctaatnnnnnnnnnnnnnnnnnnnnnnnnnnnnnnnnnnnnnnnnnnnnnnnnnnnnnnnnnnnnnnnnntgaggtggatccacccgtctccggcctccccaagggctggggattatagggattgacccaccgcacccgggcgggttttctaacgtttttctaatactcaagaagttgacttctgacaacaccttatgtttggtataccttgaaatctttattaatgggggaaaaagggcgtataaagaatggttttaatatggaatggaagctttttcaataaaatcctttaatgcccttgggncccnnatccacccccaaccccaacaaaaatantctttggtgggccccgcctcggcccctccaaaaaatcttttctaaaaccatttccgtttggggccgccggggcccccataaaggcgaagatggaaacctggggccctaattctgtttccccctagggagaaacccgtgggccctgacactaaaggctttgggatcctcccccccaataaaaaaaccgcgccggcgggc

SEQ ID NO: 249387 - DNA, 2095 bp, Homo Sapiens
  misc_feature (871)..(871): n is a, c, g, or t
aaaaatttagagaataaataaaatccggattgaaatcccattttcgtttgcaaaaaaacttcccacggagatttttattaccggggacagaatccaatatattcacattttctaaaatttatttctaattctccaccttgagagtaaaattttaaaggcaagaataatgacaaacaaaacaaattctgtaaagccatacttataatcctggacatcaagatgttaaaaaggttttttaaaaaaaagccatacttgagattcctaatatagaacatttgattgtttagttttgtttaatgactgaaatccttatttcttcaaaaaaatagcaagtatcctttgaaacacatcacccatccaataagattgtttagttttgtttaatgactggaaatccttatttcttcaaaaaatagcaagtatcttttgaaacacatcacccatctaataatttattaaataaccattcaagatttattaggtaagcactaaaattacttttatgtaataaaagtaaataggaattttgcatgtttgttgtttcattttacaaatttttttattccgttatttataggatataaaactttaagaaaacattctcaactaacattctcattagatgtaaatgattcaaattacaaataatactaacctaagcattgtcattacttttaaaatccaagtttctcaaagtttgatttttttactcaatacaaaaatgacctggttcacactattagctgcccaacaaactgtttgaaaaactaaatattctttgttcaagagtagattacaagaaatgttttccatgctcttatttcaaaaaaacaagattctgatatacataatgaatctaaataaaaattcnacaagtggtgggtgaaatcctgtccacttttcagccccaatccaatataaatcccgcagttataatgcataaacaattcaaaattaaagtttataatggaaatgtcaacaagtcataactactacccattactactgatgggttccactatactcaacctgggcacagcagatgtgcacatctgatagacagactgcttagaaaattaaagctatcagagctataaataaggaatacataaatatgaacatagcaatgccaaagcattagagctgttaaaaaaagtgaataagatgtgatgtaaacacatctgatagttctctctgtaagccactttccactgatttataaagctatggttttataattcttttaaaaagtaaaatttttctacactgctgcatgcagtaatttcattgtacattctcaactacaatgcaatcttctaaccctcttgcagagcttgacatatctcatcagaatttctccagaaagtcagcttgtcatattttcagcagcctagaacaagaaagtaagattcattacaataaaaccatggaaaaagaggcatcatgaagataaatttgtcaatactgcactgtcattaacaaacaactattccccataaaacagaaccacttttatcacagtaatgcagtgcttttcatgttttgctatacatcaggactaccttttgaatgtacagttaacagtccacaggctaacagtggaaaatagttatatcacctaaaataatagttaagagcacaaaaaacatactgctacttgaaacattaacctatggcagacctgttgccacagacttcattagtttgtctgtttctgtgttttattctagtaatagggattaaaaatgaaaaagacctttcatgctacaaggcagagagaacaagagcaaaagatgaataatgaacatcttatctaatcctgtctcatctacatccctaactactactctttcccaggtgattctgaagaaattccaagataccatatcatcaataaatactttgatacattatttctagagatttaaacaaatcaccatactattatcctacctaaaaaatttcttaacatcaatataaaaagatataattttaaataagtttaattttagaaatatgtgttagtattttaattcatttacctttctaactcctttttataagacctacctacacagggacacatcgcagccaa

SEQ ID NO: 249388 - DNA, 845 bp, Homo Sapiens
tttcttagccaaaatataatcttctttaatataaaataagtccacatgatgtataatggtaaaatattttcaaatatctcacatttgttatacaaataaggactgtatttgattatttttgattgccacccaataaatccagacaataaacataattatctctacacccaataatgagcattgattccaggaccacaggagaagagaagacttctccaggaagttcataaacactttgcaattgtccactctgagattccaagatccacactttcccatcagtagatgctgctgccagcaacatttcattgctgccattgtcgttatggaaagcaaacggtgttgcatagacccttgaagtagtttcaaatttccactgcaggtgacctttcatgttacaacagtagataaagcaatcatgggaaccaaaaaatattttttgctctgatggtgaggtacacggggatgaaaagattggtccactggtagagaactgccaaacctataacaagtaataaaaataaatataattcattcatctaattgctccaattctcccttaaagctctatgaggttcttaatgcaaatctaagagatataggctatttgaatggtaactatacacagacaaaatggctttttctgaaaagtagcactatcatactagacctctgtcccagtggtaaaatgtaaaatctaagacaaaatatactggagtgttgttactatgtgattcactgccgtgcataataagtaaaattaattttgaactccattcaagagttagtattattcagagacactgagttcaaaggtaaaactacattgagttttcaatattatc

SEQ ID NO: 249389 - DNA, 905 bp, Homo Sapiens
  misc_feature (366)..(398): n is a, c, g, or t
  misc_feature (722)..(734): n is a, c, g, or t
  misc_feature (834)..(847): n is a, c, g, or t
ttgggttctcctccccaagtcggcaccctttaactcatgaggagggaaaagagtgcctaagcgggggtgaaagaggacgtgttacccactgccatgcaccaggactggctgtgtaaccttgggtggcccctgctgtctctctgggctgcagagtctgccccacatgtggccatggcctctgcaactgctcagctctggtccaggccctgtggcaggacacacatggtgagcctagccctgggacatcaggagactgggctctggctctgttcggcctttgggtgtgtggtggattctccctgggcctcagtgtgcccatctgtaaaggggcagctgacagtttgtggcatcttgccaagggtcccnnnnnnnnnnnnnnnnnnnnnnnnnnnnnnnnnctccatgtgcgtccatatttaacatgtaaaaatgtcccccccgctccgtcccccaaacatgttgtacatttcaccatggccccctcatcatagcaataacattcccactgccaggggttcttgagccagccaggccctgccagtggggaaggaggccaagcagtgcctgcctatgaaatttcaacttttcctttcatacgtctttattacccaagtcttctcccgtccattccagtcaaatctgggctcactcaccccagcgagctctcaaatccctctccaactgcctaaggccctttgtgtaaggtgtcttaatactgtccnnnnnnnnnnnnnaacagtgttttgtagatttcagatgactatgcagaggcctgggggacccctggctctgggccgggcctggggctccgaaattccaaggcccagacttgcnnnnnnnnnnnnnntatccagaattggttgtaaatactttgcatattgtctgattaaacacaaacagacctc

SEQ ID NO: 249390 - DNA, 1043 bp, Homo Sapiens
ttggactccttcggatggccctcagtggacagcagcaaggacctcctgtagctgagatgatgttggccttgggaccaaaggaagtacgggaacggatccagaaggtggtttccagctagggagaggatgtgtcgggcagtggagatcgccctaagaacctgtgagcttagaaacagctttcagagaccagaaggaggcctggggcccgtcgggaagtttgctgaaggaactaagagtggaaacaatctctgactgcacacaagtgcatttgtgatccaccacaggcacgtttttgtcaattggctggggaagcccaacccatctaacctcctggactctggaaaggcattctccgggtctggtttctcacacattacacagcagaggtttggagttagttcacagaaaagttaacatcccggaacagtgcagaaggcttgggtttcagtttgctagggcccccataacaaaatgccacagaaccaggtggtttaaacaacagatttattttctcacatttggaggctagaagttcaagatcaaggtgtcagcaggcctggtttttcctagaggcctcttttgttggcttgcagacagctgtcttctcactgtgtccttgtgcggtcttccctccatgcacacacatctctagtttcattatgtgcccaacgttcctcttctaagaacaccagttggactggattttaactttaaccagcctcatttaagttaatcacctctttaaatgctcaatctccaagtacagtctcattctgaggttccaggggtttctcaacgtaagaatttagggggacagaattcagcccgtagcagctgggcagcaggactcatgggtcccagttctcaggccccaaggactcagagcagcaaaggatacgtgacacaagcagggctgaactggacaccagactttctttgggggtgtaaaaaggagagtgtgactccactgcccagggtaagcactcttggtctatgctaccctttattctgaaccttggggcagcctgtgtctcccttcctaa

SEQ ID NO: 249391 - DNA, 952 bp, Homo Sapiens
ggggggagactgtattcgggggcgcgagctgccccagtaaatggaaatgttttctaacatataaaaacctacagaagaagaaaataattttctggatcaaattagaagtctgtattatattgatgtctccagattcaaatatattagaaagcagccgtggagacaaccatcttcattttgggagaaataactaaagcccgcctcaagcattagaactacagacaaaccctgatgcgacctctccagattgtcccaagtcgattgatttcccagctatattgtggcctgaagcctccagcgtccacacgaaaccagatttgcctgaaaatggctcggccaagttcaagtatggcagattttcgaaagttttttgcaaaagcaaagcacatagtcatcatctcaggagctggtgttagtgcagaaagtggtgttccgaccttcagaggagctggaggttattggagaaaatggcaagcccaggacctggcgactcccctggcctttgcccacaacccgtcccgggtgtgggagttctaccactaccggcgggaggtcatggggagcaaggagcccaacgccgggcaccgcgccatagccgagtgtgagacccggctgggcaagcagggccggcgagtcgtggtcatcacccagaacatcgatgagctgcaccgcaaggctggcaccaagaaccttctggagatccctggtagcttatttaaaactcgatgtacctcttgtggagttgtggctgagaatttacaagagtccaatttgtccagctttatcaggaaaaggtgctccagaacctggaactcaagatggccgcatcccagttgagaaacttccccggtgtgaagaggcaggctgcgggggcttgctgcgacctcatgtcgtgtggtttggagaaaacctggatcctgccattctggaggagttgacagagagctcgccc

SEQ ID NO: 249392 - DNA, 1172 bp, Homo Sapiens
  misc_feature (310)..(322): n is a, c, g, or t
ttggctacaacctaagaaagcaagagtgatcaatctcagctctgttaaacatcttgtttacttactgcattcagcagcttgcaaatggttaactatatgcaaaaaagtcagcatagctgtgaagtatgccgtgaattttaattgagggaaaaagggacaattgcttcaggatgctctagtatgcactctgcttgaaatattttcaatgaaatgctcagtattctatctttgaccagaggttttaactttatgaagctatgggacttgacaaaaagtgatatttgagaagaaagtacgcagtggttggtgnnnnnnnnnnnnnaataaaggaattgaattactttgaacacctcttccagctgtgcattacagataacgtcaggaagagtctctgctttacagaatcggatttcatcacatgacaacatgaagctgtggattcatctcttttattcatctctccttgcctgtatatctttacactcccaaactccagtgctctcatccagaggctcttgtgattctctttgcaattgtgaggaaaaagatggcacaatgctaataaattgtgaagcaaaaggtatcaagatggtatctgaaataagtgtgccaccatcacgacctttccaactaagcttattaaataacggcttgacgatgcttcacacaaatgacttttctgggcttaccaatgctatttcaatacaccttggatttaacaatattgcagatattgagataggtgcatttaatggccttggcctcctgaaacaacttcatatcaatcacaattctttagaaattcttaaagaggatactttccatggactggaaaacctggaattcctgcaagcagataacaattttatcacagtgattgaaccaagtgcctttagcaagctcaacagactcaaagtgttaattttaaatgacaatgctattgagagtcttcctccaaacatcttccgatttgttcctttaacccatctagatcttcgtggaaatcaattacaaacattgccttatgttggttttctcgaacacattggccgaatattggatcttcagttggaggacaacaaatgggcctgcaattgtgacttattgcagttaaaaacttggttggagaacatgcctccacagtctataattggtgatgttgtctgcaacag

SEQ ID NO: 249393 - DNA, 1546 bp, Homo Sapiens
  misc_feature (474)..(482): n is a, c, g, or t
  misc_feature (1519)..(1519): n is a, c, g, or t
tttactacagctatgaagaaacgcaacaagaaactcaatgcacaacaaaggattaattgctgcaaggacattcttgtaaggctttgattagttttcttgttgctttgttgcactgaaatggaattcccatgcccctaccccttaccccagttttttgaacatggaaagaaaatttaataactttttaaagtgacataatttacatgcaatatgtttatcaactcaagaatttaatatagttggtacacaactagttttgtttataaattggagatgcaaatagcaaaactaaatacttgctccatttacaaactacttgattttattgtacaagttgaaatatgctcttttgtttgggttacagtatgcttgctctaagtcaaattccaaggaactaatttcttctcctggagttgcattgattcagtattacaaatatatagcacatcacctgggacttggcaatctttgttnnnnnnnnntttcctttctaatgggatttggccaattttggtaatgaagttaggatggtaatgtctgcatctgctaaaggtaattttcttttgagaattgctttctttagtgttaagacctactcatattttgaagaaatcttgagttaagtgagttctgaggctgctgggggaaccagatcaattcaaagctaaatacttctttcagaaaggggccactgtggaaagtgctggtggggtttgcccttgatcaagtgcctccattgtgctgcaagggctgtagacagcagggtgggacagtcagtcctccgagcagcaggaatcatcccgtcacctgcagccttcccatgcttccgcctttattcagaactttctgtgccactgtagatagctcaggcaaaactattacctgggtatttatccactaatgagtcacaagaaaaggagtggatttggtaagaatagagatttgttttatttaaaccacttcccattactgaccattaaaagctcaccactagagttcctgaaacaggtgaaacctgtatgacagcccttccactttggggagccacgcttttgatgtgacagtaccgcagagtgattcccccactgaggatgtcatcatcaaactcttctttggtgtgtgaattattagtggaaaagacccagctgtaattagacctccactgtgtacttagctggaagaacatgttaattctgcaatatgtttcttggttaaacattgcacagttcttacctcatttctgtaaataaagttttgtgaatccgggtttgaattgggaccaattcataagacacaattgctattcttgccctgaaaccactttcccactggcgagcctccccctggacaagtcccccctccgactattttctgcgtggggcacgcgcggcaccgtttcccgctccgccacgccctgggcgccacccccctcgaagaaaatcccgccgggtcggctcgagaagtcccaagccgcgccgtatacacgccgccggcgccttcggtgttacgcgcagagcancgcccccccgcgcccccgcctattcac

SEQ ID NO: 249394 - DNA, 687 bp, Homo Sapiens
ggactcactccatggctttcctcatcctcctctcttttttcttcttggtgggaagctggatgcggggcatgcatcattctgtatggacaaatgtgttatgtccacccatactcttgtgacaactccccagcactgtcctgcaataccatgctggccttggtagtaaaactccttggtatctgtgagagtcctctttttctatgccctagactacttttaaccacttttctctggaatgactcccacatttgattgggtattgaaagggtaacagcaaaatgatgattgtggagatggatctattaggtctcatgttggtcccctggttgaaactattttctaataagccccaacaatgggcctgtcaccttgctagtcatccattcttaatgcctatttatcagccctctgaggtcatataaaagttgcaccttttgaaccaagtatttgtatttactatgggaaaggtgtggactacagattcgtattatattattttaatggattttaagtaatttataagtatgctgagtgtaaattttttttaaaaactgtattataaaaggacatagcctgtgaaatataacattttactgtttatagaataattctataagaagaatgatttatctcacccacagaactgattacattccagatgcaatcaataggcactttgtaatttcc

SEQ ID NO: 249395 - DNA, 955 bp, Homo Sapiens
ttggcctgtttggaggttatggatgataaacccaatcctgaagccctaagtgacagttcagagcgtcttttctcctttggcgtcatcgcagatgttcaatttgcagacttagaagatggctttaatttccaaggaaccaggcggcgatactacagacatagtcttcttcacttacagggtgccattgaagactggaataatgaaagcagcatgccctgttgtgtccttcagcttggagatatcatcgatggatataatgcacagtataatgcatccaaaaagtccctagaacttgttatggacatgttcaagaggcttaaagttccagttcatcatacatggggaaaccatgaattctataacttcagtagagagtatttaacacactctaaacttaacactaagtttctagaagatcagattgtacatcatcctgagaccatgccttcagaagattattatgcttatcattttgtaccattccctaaattccggttcattttacttgatgcatatgacttgagtgtcttgggcgtggatcagtcttctccaaaatacgagcagtgtatgaagatattgagggagcacaatccaaatacggaactgaatagtcctcaaggtgaattattcctttgagctgagaatctaatagattgtctttaaattcttcagctaccttttattcagcaggaagatggacaattaaggactttctgagccccagtttgtccagtttaatgggaggattcagccaagaacagctaaactggttgaatgaagtgctaacattctctgacacaaaccaagaaaaggtggtgattgtgagtaagtatttaatttatctgattacactaacattttagagattgggaaaagttaggcgttaaagcatactaaacaatatttgtgtttcgatatcctctttctataaatggacacttagtttaaaaatttc

SEQ ID NO: 249396 - DNA, 1162 bp, Homo Sapiens
ttggcaattaaaaggtttggaggatacaaagagtccacagtttaatagatacttttatttattagagaatttagcttgggttaaatcatataacatctgctttgaattggaagattgcaatgaaatttttattcagctttttagaactctcttctcagtgatcaacaatagccacaataagaaggtacaaatgcacatgctagatttgatgagttctatcatcatggaaggtgatggagttactcaagaattattggactccattcttattaacctcattcctgcacataagaacttaaataaacagtcctttgaccttgcaaaagtgctattgaaaagaacagtccagactattgaggcatgcattgccaattttttcaatcaagtcctggtgctgggaagatcatcagtaagtgatttgtcagaacatgtatttgatctgattcaggaactttttgctatagatcctcatttattattatccgtcatgccacagcttgaattcaaactaaagagcaatgatggagaagagcgattagctgttgttcgacttctagctaaattgtttggctccaaagattctgatttggcaacacagaatcgtcctctttggcaatgttttcttggacgatttaatgatattcatgttcctgtgagattagaaagtgtgaaatttgccagtcattgtttaatgaatcacccagatttagcgaaggatctcacagaatatttaaaggttagatcacatgatccagaagaagctattcgtcatgatgtcattgttactataataacagctgccaagagggacctggtctttagtaaatgatcagctgcttggctttgtaagggaaagaacactggataaacggtggcgagtaagaaaagaagctatgatgggtctggctcagctttataagaaatactgtcttcatggtgaagcaggaaaggaagctgcagagaaagtcagctggataaaggacaaacttctgcatatttattatcagaacagcattgacgacaaactgttggtagagaaaatctttgctcagtatcttgtcccccacaacctgaaacagaagagagaatgaaatgcttatattacttatatgctagtttggatccaaatgctgtaaagctctcaacgaaatgtggaagtgtc

SEQ ID NO: 249397 - DNA, 910 bp, Homo Sapiens
  misc_feature (206)..(227): n is a, c, g, or t
ttgggaaggaacaaggcttgttttatttgtttggttcaagtttgtgatatagtgaatggcactttcatagatacatttcttccctgacaggttttgccacaggcagctggactggagtatcaacattaataccatgttttatacatccttttagataggggcaggcattgtgcttcattcagagtgaggtgtggcatgccctctcnnnnnnnnnnnnnnnnnnnnnncagtttggcttcattaactatgaagtaggagatagcaagaagctctttttccatgtgaaagaagttcaggatggcattgagctacaggcaggagatgaggtggagttctcagtgattcttaatcagcgcactggcaagtgcagcgcctgtaatgtttggcgagtctggtgagttttgttgttgtggtttgattagtaactaccctggagtgtctcaactttatagtctctgttttgtcacatcacttttctgtgccttgtcttctgccacttattatttcttgatacttcctacttctagttgaatacaaaaagattgtttagtacatgttttttaaaatttttgccaaattcttcttcttccattaagtcatttctaggttatatgctacttaaaattctaatagtttagccatgctgattcataatgccgctttgcttccccagagacagtctcacagtctgattcggttacccaggcgctatcacgactcactgcagactcaaccccctgggcctaagcaattctcccacgtcagcttccccagtagctgggactacaagcatgcgccaccacatgcagccaattttattttttgtagagacatggtcccactgttttgcccaaggctgatctcgaacttctgggctcaagtgttcctcctgccctgtcctcctcaaagc

SEQ ID NO: 249398 - DNA, 1127 bp, Homo Sapiens
  misc_feature (408)..(416): n is a, c, g, or t
tttgccatacttcgaaagattgcctccacatcagatttcttgaccacaagagtgttgagattcccaatgaatacacgggagttcatggagcgaggatctgtcttgttggtaacgttgctggccatcgtgtttgatggtaaggtttctcacaaagccgaaaactgtaaagcaaaaaaaagtatacaggtgaacagatgctaaaaacaatattccttgataaaacattctccactctcactctgaatcactgttaactgcccagagtattaggcaacttaaagggactcacagcattaagtatgtatttgctaataatttcagagactccagcctctgaatatactctagaaagtcaacttcttcctcttccattctatttcagcagcactaaactctaaattctcaggnnnnnnnnnttctccctggcagatcattggcaatataatttccttggacataattccaagtggccctcctctaagtactcaagcaaattagatttgcctaaattctctgacaccagtttctgctgtttttcacattacaggtcatgctaactattccctgccatcaataatcttgattcacgttgcttttattgagtttcaccggttctgtatatatacacacagcatagcaaacgtcaaattctgtcccaagccattcattagctagattaatatggatagcttacacttacccattaagtataattttcttcaaaaggcaataaatagaatcaattcatttacactggaaacacctatttccagatacttcaattaatctgcagtatgctttagatacataagtatcaataccatctttttacagactgcaatgactcgaaggctactttttatataacctaaaatataggacatttaataatatcggatggtgatgatgataaaactagccagtggaacacggcatgaatcaaattaaagattggggaattaaagaaaaatacacaactttccacgcattatttaaaaccaaaaattatctgtctttatgtatgtgatggaggctcaatcctaccataaccatatgcagattcacaataccatctcaggtcccgtaaagcgaaaatgttttatttcattcttttagcattttgccaa

SEQ ID NO: 249399 - DNA, 1073 bp, Homo Sapiens
  misc_feature (446)..(498): n is a, c, g, or t
aaatattttagtcaatgatatctgtaatatgttcaaacaatggcactcaaggaaatgtatatattttgtacataaatgaatgataaaacatacctattagcatttcatacataatcactcccaaagaccaccagtcacacaatttgttgtaaccagtctgcatgaatacttctggagcaatgtaatctggtgtcccaactgtggaatatgcctacaaaggagcaactcgtcaaaccagcattcttaacatttaaaaaatatctatctgaggatggcttactactggaaaaagcaatatatagaggagttaaattttcacttgtatttattttgcatgtttatcatgtgcaaggcttagtggtaggtagtgagtcagataatatgttatagactactatttttcagtctatttactttcctgagggaatgctgaattagttttcctnnnnnnnnnnnnnnnnnnnnnnnnnnnnnnnnnnnnnnnnnnnnnnnnnnnnnttataagaatatatcatttctgcccccacaagaagctcagttaagttatttatatatatagccttcagtctatttcaaaaagaatgaaaaagttgaacctagaagacctggcttccccactcactactaatgtgttcttgggcaaattattcaatttctctgaggctcagcttctgcttacataaaactagaataataatacctgccctaatagagttgatatgaagatgaaacaataaacggcatgtgttttgtaaactacaaactacaaaaataagcatgaggtattttcattataaatgtaattccagggtactgcttatcctttaggaagctatgcagtttttaattcttaattcatataaaatcttacaaaaatgatttctacaaggcagtaattctcaaccaggggtagtactcttggggccatggcaaaatgtaggaccacagattttgtcatctcagtgacataactggcatttacagggcaggggatccaggtgctaaagaaatttcctgccccaaacactgagtcctctctacttctcccttgggaaacactcgatctaagccaa

SEQ ID NO: 249400 - DNA, 1266 bp, Homo Sapiens
  misc_feature (541)..(556): n is a, c, g, or t
cataaaggccaactttgtacaaaaaagttggatctaattagacattaaaacccagaaatttaaaaaattcaagcacatattccattagctgccagagcaatgtcaccacacatcctgtagcttctagaaaaccatgtaacatatactcatgagggaatgagagcaaggggaaaaggcaaaatgtgaaacataaggatatataatgtcttagtataataatgaaataattttgacttcatgtattccctgaagagtccacactgtgataactgctgctttatattgttatgattactcacagacagaagctatgtggaagagaagcaaaaaagtaaaggagtataatagacagcggagcatgttttaaaatgtaaaatatagagtacctgtaaaatgtagtagtattttcttcttatagtagtatttacagccctgagagagaagattgaattaattacaacttgaacacttgaccatttctactgctgtattttttgtgaaaaacgaaaattcaaatgtttgttttattatttcccactannnnnnnnnnnnnnnngtatatggcttaatatgtgccacacttaggtagtatggtaaagatgtaaaggtacctaggctttggatctaaacagacctatactcaaatctcagttcttgttagggcttgtaccttgggcaagttactaatcttttttctcaccattaaaatgagaattgtgtttagaagtttgttatgaggactaactatttatgtaaaattctagatacaatgcatttgtcccaccccaatttcacaaaagtctggtcatcccctttttgtaattataatttgactctcatgtgcttttattcaaatgagagagaaacataaacttttcatcataagcgacaaacttaaaataatgtcttttacttattattgcttggaatcatccaattatttatgcttttttcctaatcaaagtaaacaagtatggagatacttgggatgaatgaaaaattacatcattggacatgaaggagtttcaacatccagcttcatctaggtggtcatgattacctgcatgctttgagctcagcagcagtcttcataaacacatttaaaacaagatcctgggtttttgtggtttgacttctatggtgttttaaaaaaacacagatttttagtgttaatattgtgtaaatgtactcaccttagggattcatttgaatgatggtattatacccatgattgtatacagtttgtgaaattgttgcaagggcaaa

SEQ ID NO: 249401 - DNA, 790 bp, Homo Sapiens
  misc_feature (629)..(643): n is a, c, g, or t
ggcatttattaggtgacagacatctttctcattgaatccttacaatgactattcaattttagagactaaacgaactaagtttatagttaataacaacaaagatttactgaacgctgtttatttgctaggcaccatcaaaggcactatttccatagcaagaagtagcaggagaaggattaaatctcagttctctctcactctggaggccaaggtcttctgccttgactaaatgctccacccgtaaacagacctgtcattacaaaacaaacctgctcgctgctgacgctgatgggttccttgagcacaatccaggtcacacattccagaagaggaggggtggtcagtgagcctgggtaggtccagtaatccaaggattcaggaaggaggccacgaggatcgaagttagtgaagtcagcactcttgccctagaacaaggcaaatacgcagcttcaaactatcacattgacagagtaggaggaaggtaggagagcagcagacacaaataggtatactcccctctgatggtcaaaaacactttttaaaaaagaggttctatattcactggcaaacaaaataaagagaaattaacagaagacattcaacttgaaaatatgtggcaagtcgtagtnnnnnnnnnnnnnnnctattttcacatgtccatttttcatcttggccttttatctaaaatgatcccttacattccccattaagtcattagctgatcacacccagtatttaaagtgagactgctgccactaaaatgaggtgacttcaagttgcaataacccaa

SEQ ID NO: 249402 - DNA, 1049 bp, Homo Sapiens
  misc_feature (163)..(178): n is a, c, g, or t
  misc_feature (201)..(312): n is a, c, g, or t
  misc_feature (324)..(445): n is a, c, g, or t
  misc_feature (531)..(540): n is a, c, g, or t
ttgggttttagattatggttggttgttttttttcagacagattacctacttcaagtagactttatatttgcttttgtatttaatcaagatttgtttatataaattgtttatgtactgttaaatccaaatgctcttacactttaaggttctattagttttagannnnnnnnnnnnnnnngagatggagtctcactctgttgnnnnnnnnnnnnnnnnnnnnnnnnnnnnnnnnnnnnnnnnnnnnnnnnnnnnnnnnnnnnnnnnnnnnnnnnnnnnnnnnnnnnnnnnnnnnnnnnnnnnnnnnnnnnnnnnaccacgtatagnnnnnnnnnnnnnnnnnnnnnnnnnnnnnnnnnnnnnnnnnnnnnnnnnnnnnnnnnnnnnnnnnnnnnnnnnnnnnnnnnnnnnnnnnnnnnnnnnnnnnnnnnnnnnnnnnnnnnnnnnnaccacacccggccagtagaactctttaaacctgaaaaatcagtcaactttgcagactagaggaggatgttgaacacctatgtgtgnnnnnnnnnnctttaccaactatgcacctatttttcagacacctaaaagtaatgtctgtgaaacagtggttttctttttctacatattacagcaggaagtgttcctatttatgtactgtctgtatcaatactaacggggcatgataagcaaaattttaaactttggtagttaaacctttatgttgcctcccctctgggctgccagctgtggggatgtgcttctcccttaaggactttggcaagaataacaagttcattggaatttgactttctgacatagagcagacagccttgccctgtcatgccaggcctttcatgtgaagttaccatttattagctgcttctgtctctccagggaaggatttcccttttataagcctgggccagggggatgatagtaagattccccatgtgataccagagttggaataggctgtagtgagattagggccaggactgtcccattttgattcttgaatggtttctgttacaacttgtcatggggaaaagtaacactta

SEQ ID NO: 249403 - DNA, 933 bp, Homo Sapiens
acaaaaaagttgggagcggacagcctctctgggtgctgggcggtcatggcgctactagatgtatgcggagccccccgagggcagcggccggaatcggctctcccggttgcgggaagcgggcgtcgctcggacccaggacactacagtttctctatgcgatctccagagctcgctttaccccggggaatgcagcccacagaattcttccagtccctgggtggggacggagaaaggaacgttcagattgagatggcccatggcaccaccacgctcgccttcaagttccagcatggagtgattgcagcagtggattctcgggcctcagctgggtcctacattagtgccttacgggtgaacaaggtgattgagattaacccttacctgcttggcaccatgtctggctgtgcagcagactgtcagtactgggagcgcctgctggccaaggaatgcaggctgtactatctgcgaaatggagaacgtatttcagtgtcggcagcctccaagctgctgtccaacatgatgtgccagtaccggggcatgggcctctctatgggcagtatgatctgtggctgggataagaagggtcctggactctactacgtggatgaacatgggactcggctctcaggaaatatgttctccacgggtagtgggaacacttatgcctacggggtcatggacagtggctatcggcctaatcttagcccctgaagaggccctatgaccttggccgcaagggctattgcttatgccactcacagagacagctattctgggaggcgttgtcaatatgtaccacatgaaggaagatggttggggtgaaagtagcaaagtacagatgtcagtgacctgctgcaccagtaccggggaagcccatccataatggtgggtgggtgggcagctgggaggtctcctctgggaaggtcttgggcc

SEQ ID NO: 249404 - DNA, 1102 bp, Homo Sapiens
  misc_feature (679)..(690): n is a, c, g, or t
ttggatttttgtaatacccttatttggagattataagagaataatatacttaaattttttgagttataaattcatactggttagtagatattttaaatgtacccactgatattctctattttgcataaaagcataatgtcagactttctctgtgtggtggttatattcggggtgtctctgaatgccagcataaaaattcacggaattgaatagaaattggcctgtcttaatgacctatggtttcttttttaatgttttgaaataattaaagagagtttagtcacacagggaggtctaggtgaactgatgttgaagtttattactagacttttcagacctaaaaattttatttattgttattacttgaatatgtcaaaagtatattactggacaaccttttacacattcctctttctaaaatcgaattggacaattacagttctctggttcagaaaattacattagctcagaacccagtaacccttgataaccctgttagcgcagcaattcccgagtgtgtgctttgtgcagagcgttggactatgtactgctcttgatgtggggacagcggggacagagagctgtcattgaaatagacatctgtttaagaagcgatacttagatgaacctctgtatttctgaaaaataaatgtgaaatatcttaagagcttaagtatgnnnnnnnnnnnnagatggttcaaatccagatcattagctcatcatttttattgcttctcattctgttaagcggcaaagggggaaatatttgttttgactagttcttcactggaaagttttggactttctgcatttgagtctctgggagctagtttttccagttgttttatcagagaatatattcatctttgggttttaaacacttcaaatatcactgatcatggtatagaacttctctgtgacagagtggtaagcacttaccacaaatgttttgtgatttgtgataaagatgatttagggaaataattctggtctcccaaaatatgagacaactattaacaaagcatttttgttttaagtttggattttctttcccttattccagttgatccccagtactgtcctcctatgtttttggatagtc

SEQ ID NO: 249405 - DNA, 776 bp, Homo Sapiens
  misc_feature (223)..(279): n is a, c, g, or t
tagctcccctttttcttgcaaggctgttttttaccccaataatttagagtcctggggtgaaaggactagaaaaacaaaaatagaattttcaacaatctctatcttacaaagatatttagctatccaatgaaattgcactttactcaattcaaaattcgattgttttgattgattcctgtcagtttctgtcaaaacagaccatcttccccatttccatgtgaannnnnnnnnnnnnnnnnnnnnnnnnnnnnnnnnnnnnnnnnnnnnnnnnnnnnnnnnagtgcagcatttcaaaacttttaaaaaactgaacagtagtagtagtagtttgccattttcggaattgttctgcaatgtgagtggattcattgtccttgcgggccatgttatatacttaactgctgactgctgaaccaaaacaaactaaaggaacaaataaaaaaggaatataactgcattttctttttccaatatgttacagaaaaacattgccctttgactgtcccgttatatattgcagatctcagctactacaaaagatttagttctccatgtgcctcctcaatgctcaaggaggatcacacctgtgtgggtaaattcatgaaatactgtgaaacagccaggctccgtaaggaaagtgtgttacaacaggaagtcagtgagcaagggtagtcctccgctagccacgtcacctaatgctcacgctaccatggaaacacttcaaatgttacaaagcccaaccatttccccaacttttttgtacaaagtttttcatg

SEQ ID NO: 249406 - DNA, 1119 bp, Homo Sapiens
  misc_feature (765)..(781): n is a, c, g, or t
tgtacaataagcagcaatgggtacaaatgaagaaaataagctgaatcaatatatttggggatatttttgaaagtaaatattgttaatttgataagatgatttacaaaatcaataacaaacatgtcttgtcaggtcattgtgagacaacttcaaaaaaacttggctgatctcaataaacagtgtgtgtctgaggcttcactagaggttacatcacattatcacattaatctcaaagatgagatacaggatttaatgaagaaatgatttcaaatcaaaagtcaagtatgcattaaatgtaacatgccaacagtgaatctatagctggttaaataatataaattgttttatgatactaacttccatgggaagacttcttttatatgtcattatagttagttttgttacaattttattatctttaaaatgtgcttatttttaaaactgtggctgtcattctgtaatgtttttcttataattacatatttttctcataatatttacccttaagaagattaagaattatacattgtttagcccacaggttgggagactattcttcagataaacagtgtttttcagtgatttatgttaccatggcgaggcaagccatatttaatcagagaagaatgtataatggaatattccagaaaattatcttatttcttagctccacttttgtgagtggatgccaaggacattatactgttctccaaaatggagatgtttaggttaatatacacagtattagaatagctaggcaattcnnnnnnnnnnnnnnnnnaattatattgtataaacataaacatttagatcatgtatagtatgcattcaaacattcaaaatagaaaatagaggaaattatcttgatactgccattggatgtttaaaaaggaactttattgggataaaattcacatatcatatagttcacacatttaaattgtacaactcagcatctcttaatatattcacaaagttgtataaccatcaccacagtcattttcagaacattttcatcaccctaaagagaaacttcacatctcttagtcatcaccaccgcccacctccatgtttcttcaccttccccagtcctagcaaccatcatctagttttgtcttt

SEQ ID NO: 249407 - DNA, 1418 bp, Homo Sapiens
  misc_feature (652)..(661): n is a, c, g, or t
ttggcaaagtgttgggattacaggcatgagccactgtgcttggcctgttattttattttcttataactacaacttttcttcttgaattttcaggtcagaggcaagaaaaactctttacaggtttttagtggggggcttatggagtatttcaggagttctttgcaattaaatcatcttttcacttgtattgtttttcaaaactttgttgatttctaaaatgtgccaactgtgagtaaactatggtatttgcaagtggtttttacataatatttgagatgaggaagtgagattgtgcatgacatacttctcctttgtattctctcagtgccttacagcaggttactccattctgctatgacaacttgtttcaaatgttaatttacataggattttttataagccattaaggcatatgtataatatatcagtaaagatggatggtgcatatataaatagtcttctgtaatagtgattggatttacttctcaattatgagagacaaaaattatcccctcacctgtctctattctttcaacaggttgatcccttttcatgatttttcattaggtggttcaggaagtttccatattacagcgcttcagactgtatatgttagtttaaaaatcacttttctctctctcaatttctttcnnnnnnnnnngaagacttaatttaaaaaatttgggttgttagatccgtatcatagatttggcctggcctcttctgttaacctagtccacagatgagcgaatctggttagttgaaggacattgtgatttgactctggtcacgcgaggaagtagaagggcaaagacaggaccggcagtttacatttccagtggttaaacctcacggtactttgggactgcttgttaacttttgtggttgtctgaggccaatctaacgtgaccatttctgacacctcaacagagagaggaaagcaacttgagcaatgagagtaaataacttgggctctcagagatttgaagatagagatctcattgtgagggggactattttgcaggtcctcatttctccaagaaagagatggtgttacaggaacccactgaaagccatatcccattaaatgaggaactaattttggctgggccttcttgtaatgtcctcgcaggtgtgttgtgaagattaatgcagggtagtatgtttgtagattgacacctagtctaaactttgaggtaattggtgctctgtgaatactcagtcgtgttcttttatagccttaatcatgatttgaactaattcccttgctttttaaatgactgaatgaagtccttcgtggtaaagggagtacgttgataacttagttttactatatgggtttgtggtcgcatcccagtcatcagctgctatcattttccttcttcatcccttatactgagatttgggttacagctttt

SEQ ID NO: 249408 - DNA, 999 bp, Homo Sapiens
acctataaaagccaactttgtacaaaaaagttgggaaactttgtccaacgatacaagttactaagaaggcttcatccttgcacatcctctggccccgacagcccatatcctgccaaagggctccctgaatggtgtccacacagcgaggaagccacgcttgaacctctcatccaggacattctccacactctgccggtcctaactcaggcagcagccataactggtgactcggctgaggccatgccagcccccatgcactgtggcaggaccaaggtgttcatgactgactctatgctggagcttctggaatgtgggcgtgcccgggtgctggagcagtgtgcccgctgcatccagggtggctggaggcgacaccggcaccgagagcaggagcggcagtggcgggccgtcatgctcatccaggcagccattcgttcctggttaactcggaaacacatccagaggctgcatgcagctgccacagtcatcaagcgtgcatggcagaagtggagaatcagaatggcctgccttgctgctaaagagctggatggtgtggaagaaaaacacttctctcaagctccctgttccctgagcacctcgccgctgcagaccaggctcctggaggcaataatccgcctctggcccctgggactggtcctggccaatacggctatgggtgtatgcagctttcagaggaaattattggtctgggcttgcctccagctccccaggggcagccccagtagctacactgtccagacagcacaagaccaggctggtgtcacgtccatccgagcgctgcctcagggatcgataaagtttcactgcagaaagtctccactgcggtatgctgacatctgccctgaaccttcaccctacagcattacaaggcttttaatcagatttctgctggaaaagacacagggctgatccacgtgacctcttctgccttcactgggctggggtgatcccttggtgcctttgtttccacaaggccttttc

SEQ ID NO: 249409 - DNA, 889 bp, Homo Sapiens
caactttgtacaaaaaagttggtgtcgagggagtttgcctgcctctccagagaaagatggtcatgaggcccctgtggagtctgcttctctgggaagccctacttcccattacagttactggtgcccaagtgctgagcaaagtcgggggctcggtgctgctggtggcagcgcgtccccctggcttccaagtccgtgaggctatctggcgatctctctggccttcagaagagctcctggccacgtttttccgaggctccctggagactctgtaccattcccgcttcctgggccgagcccagctacacagcaacctcagcctggagctcgggccgctggagtctggagacagcggcaacttctccgtgttgatggtggacacaaggggccagccctggacccagaccctccagctcaaggtgtacgatgcagtgcccaggcccgtggtacaagtgttcattgctgtagaaagggatgctcagccctccaagacctgccaggttttcttgtcctgttgggcccccaacatcagcgaaataacctatagctggcgacgggagacaaccatggactttggtatggaaccacacagcctcttcacagacggacaggtgctgagcatttccctgggaccaggagacagagatgtggcctattcctgcattgtctccaaccctgtcagctgggacttggccacagtcacgccctgtgatagctgtcatcatgaggcagcaccagggaaggcctcctacaaagatgtgctgctggtggtggtgcctgtctcgctgctcctgatgctggttactctcttctctgcctggcactggtgcccctgctcagggaaaaagaaaaaggatgtccatgctgacagagtgggtccagagacagagaa

SEQ ID NO: 249410 - DNA, 1116 bp, Homo Sapiens
  misc_feature (488)..(499): n is a, c, g, or t
ttggctctctgccatttggcacggggtatacccaggatattatctaacgtttctaacaggggtgttaatgacattagcagcaagagctatgagaaataactttagacattatttcattgaaccttcccaactgaaattattttatgatgttataacatggatagtaactcaagtagcaataagttacacagttgtgccatttgtgcttctttctataaaaccatcactcacgttttacagctcctggtattattgcctgcacattcttggtatcttagtattattgttgttgccagtgaaaaaaactcaaagaagaaagaatacacatgaaaacattcagctctcacaatccaaaaagtttgatgaaggagaaaattctttgggacagaacagtttttctacaacaaacaatgtttgcaatcagaatcaagaaatagcctcgagacattcatcactaaagcagtgatcgggaaggctctgagggctgnnnnnnnnnnnngatgttaacagaaaccaatcttagcaccttttcaaggggtttgagtttgttggaaaagcagttaactggggggaaatggacagttatagataaggaatttcctgtacaccagattggaaatggagtgaaacaagccctcccatgccatgtccccgtgggccacgccttatgtaagaatatttccatatttcagtgggcactcccaacctcagcacttgtccgtatggtcacacgcgtgccctgttgctgaatgtatgttgcgtatcccaaggcactgaagaggtggaaaaataatcgtgtcaatctggatgatagagagaaattaacttttccaaatgaatgtcttgccttaaaccctctatttcctaaaatattgttcctaaatggtattttcaagtgtaatattgtgagaacgctactgcagtagttgatgttgtgtgctgtaaaggattttaggaggaatttgaaacaggatatttaagagtgtggatatttttaaaatgcaataaacatctcagtatttgaagggttttcttaaagtatgtcaaatgactacaatccatagtgaaactgtaaacagtaatggacgccaaattatagtagctgattttgctgga

SEQ ID NO: 249411 - DNA, 923 bp, Homo Sapiens
ttgggccaccattcccataagcgcttggtggcatgtttccagggccagcatggcaccgatgccgagaggagacacaaaaaactgcctctgacagctcttgctcaaaatatgcaagaagcatcgactcagctggaagactctctcctggggaagatgctggagacgtgtggagatgctgagaatcagctggctctcgagctctccccgcccgaagtctttgttgagaaggagatcgtggaccctctgtacgggatagctgaggtggagattcccaacatccctaagcagaggaagcagcttgcaagattggtgttagactgggattcagtcagagccaggtggaaccaagctcacaaatcctcaggaaccaactttcaggggcttccatcaaaaatagatactctaaaggaagagatggatgaagctggaaataaagtagaacagtgcaaggatcaacttgcagcagacatgtacaactttatggccaaagaaggggagtatggcaaattctttgttacgttattagaagcccaagcagattaccatagaaaagcattagcagtcttagaaaagaccctccccgaaatgcgagcccatcaagataagtgggcggaaaaaccagcctttgggactcccctagaagaacacctgaagaggagcgggcgcgagattgcgctgcccattgaagcctgtgtcatgctgcttctggagacaggcatgaaggaggagggccttttccgaattggggctggggcctccaagttaaagaagctgaaagctgctttggactgttctacttctcacctggatgagttctattcagacccccatgctgtagcacgtgctttaaaatcctatttacaggaattgcctgaacctttgatgacttttaatctgtatgaagaatggacacaagttgcaag

SEQ ID NO: 249412 - DNA, 932 bp, Homo Sapiens
  misc_feature (457)..(470): n is a, c, g, or t
aatgagtaagaattttttcatactgtaagttattgagacttttgaactccttgttactgcagcattatctactctttcctgactattataatggggaatttaacactcggctggataaagatataccagagctatgattttctgaaaacaaggggaaactatataagaaaggtagatcagatatcacacctcattaagtggtcagtcttgaaacccactgatgatctggcaaccaggtaagttgtgtctccgatggaaggcaatatggcatatagatcatctatgttgtattctagccaaaaatgcttaatattactgtaaccatatctttaactctaacttccagttaatagaacatcatagggatagaggaataggctaactgacaccataaatcccaaaggtaaaactaatgacaagacaattagcctggtctcttcaacagattgctgtcatnnnnnnnnnnnnnntgactacatgcagaggcttaaccaaatgcaacgtgttgtcccaaattgtatctggatttggaaaaaccatccacataagtgatatggaagacaatgggtacattttaatataaaatagatattagataatattgaggaattggtagtaattctgttaagtgtaatgatattattttgaatatgtaggaacatgttcttattgtttaaatattaattataatatttaaaagtaaaatgtcacttttaaatatattggcatactgaaaataagcctttaaaatatctgagttccataattggtgacagaaatgttagtttaaaagctatacataaaaatttgaaatgaactaaagcaaagttgaaaaagacaaaaaagatggagacttaaatggtttatatttccgtttataattacatatgaattaatcttaagctagatttctagtttaaggttttacccaa

SEQ ID NO: 249413 - DNA, 1562 bp, Homo Sapiens
atgagccactgtgccaggccaggtagagggatttaagacacagaaaggcaaagttgttcaggacaggtgtctacaatccaagcctcacccaggcatcacattttgtctcagattaggcctcaataaaactgacttgagtgtattgctttgggaggagctcaggttaaaaagtagaaaaacatggcttcaccagaaattgtgtattggcttttgcctcctattccttttgagaactccctgaggaaaactgttcttatcctgtctcccaggctcatacaaagcaggccttcagccagccagactgactgcctctttctcttttcattcccaagaattatatccagatcgagagacagaagattctgaaagggttcaatgaaatgagagtcatcttggacaatgaggagcagagagagctgcaaaagctggaggaaggtgaggtgaatgtgctggataacctggcagcagctacagaccagctggtccagcagaggcaggatgccagcacgctcatctcagatctccagcggaggttgacgggatcgtcagtagagatgctgcaggatgtgattgacgtcatgaaaaggagtgaaagctggacattgaagaagccaaaatctgtttccaagaaactaaagagtgtattccgagtaccagatctgagtgggatgctgcaaagttcttaaagagctgacagatgtccagtactactgggtggacgtgatgctgaatccaggcagtgccacttcgaatgttgctatttctgtggatcagagacaagtgaaaactgtacgcacctgcacattttagaattcaaatccatgtgatttttctgcttttggtgtcttcggctgccaatatttctcttcggggaaatattactgggaagtagatgtgtctggaaagattgcctggatcctgggcgtacacagtaaaataagtagtctgaataaaaggaagagctctgggtttgcttttgatccaagtgtaaattattcaaaagtttactccagatatagacctcaatatggctactgggttataggattacagaatacatgtgaatataatgcttttgaggactcctcctcttctgatcccaaggttttgactctctttatggctgtgcctccctgtcgtattggggttttcctagactatgaggcaggcattgtctcatttttcaatgtcacaaaccacggagcactcatctacaagttctctggatgtcgcttttctcgacctgcttatccgtatttcaatccttggaactgcctagtccccatgactgtgtgcccaccgagctcctgagtgttctcattcctttacccacttctgcatagtagcccttgtgctgagactcagattctgcacctgagttcatctctactgagaccatctcttcctttctttccccttcttttacttagaatgtctttgtattcatttgctagggcttccatagcaaagcatcatagattgctgatttaaactgtaattgtattgccgtactgtgggctggaaatcccaaatctagatttccagcagagttggttctttct

SEQ ID NO: 249414 - DNA, 1073 bp, Homo Sapiens
  misc_feature (117)..(139): n is a, c, g, or t
  misc_feature (421)..(429): n is a, c, g, or t
tttctaatatgacaatagagttttggccaaagatatgtagacattaagctaatacaattcaaatatccaccatcttcagttacgttatctgttacactgtcaagttgttcagcaggnnnnnnnnnnnnnnnnnnnnnnntgtattttctggctagtgtcctttgctatttgatttttgctctagcatagagttttggatgtcttaaaaactaaactctttgtaaacaaacagtatcttcatctctgaagcataaaattacatggtcttgacccagagaaagaggagagacatttaatagacatttctcttccagttaagtaggagtctgatcttctacaaaatagtttatttgtctttttaataaaggttgaaaaaatgtccaccctggattaaaaaatcagttaaccaaggggaacgtannnnnnnnnaaaagagtagttttaaaaagtattaactggtgtccattagacatatttccttatattcagctactagagaaaaaacagttcccagggaatttggggctttctgcttctatatgtggtcatcttgtgcgagtgttctaatctaatctattccctgcccatacatagcctcctattcataagactggctgaggtattcacgctgagatgaatacacatgctctaagaccagacgcgaaaacctaatgggcccaagtactgtctgtgaacatcaacacatacccaatgatgaaaacttgtaatgttttcatcaacataaaatgggtgacattatgtatgtgaggctgcatcctattaagagttcagagactccagatccatagcaatgaagtcgcctctagggacaggttcttctattaagtggtaagaaaaaagtagcttttgttgcttttaaaaggttatttaacacttggatatttctagcaccgtcaattctgaggaactctacatatttcaaagcaagtggcttttgatcctatgaataggttcacttctaattcagcatccttcagaagagcccattactggctctagaaagctgtcaatgtccagagcaacacattattactctgtaaactcagtgccaa

SEQ ID NO: 249415 - DNA, 601 bp, Homo Sapiens
cgataaaaggcaactttgtacaaaaaagttggaaaatacatcgccattagtagaaaataatattaggacgaaatagaaaagaaaatctggaaccaaatgctgaatttgataaaagaactgaatttattacacaagaagaaaacagaatttgtagttcaccggtacagtctttactagacttgtttcagactatgtgaagagaaatcagaatttttgggtttcacaagctacacagaaaagagtggtatatgccatgttttagatatttgggaagaggaaaattcttataatctgttaacagcgtttttctcgtccccttcaacttctacatttactggcttttatattttaaaaaatgcatacttttcagaagtgataaggatcatattcttgaaatttttataaatatgtatggaaattcttaggatttttttaccagctttgtttacagacccaaatgtaaatattaaaaataaatatttgcaattttctacagaattgggtacctgttaaagaaaaataacttactaaatctgtgggcggtcttgtcttggatacgagcgccaagaatgccaccaatgtcaagcaggcgttcatgacc

SEQ ID NO: 249416 - DNA, 1505 bp, Homo Sapiens
  misc_feature (938)..(993): n is a, c, g, or t
ttggggcagacatggcccaagaagggctgtgaatgactggaggcagcttgctgaatgactccttggctgaaggaggagcttgggtgggatcagacaccatgtggcggcctcccttcatctggtggaagtgccctggctcctcacggaggtggggcctctggaggggagccccctattccggcccaacccatggcacccacagaggcctccttgcagggcagcctcttcctccgggtcggaggctgtggtgggccctgccctgggccctctggccaccagcggcctggcctggggacactgcctccgggcttagcctcccatcacaccctactttagcccaccttggtggaagggcctggacatgagccttgcacggggagaaggtggcccctgattgccatccccagcaggtgaagagtcaaggcgtgctccgatgggggcaacagcagttgggtccctgtggcctgagactcacccttgtctcccagagacacagcattgccccttatggcagcctctccctgcactctctgcccgtctgtgcccgcctcttcctgcggcaggtgtcctagccagtgctgcctctttccgccgctctctctgtcttttgcttgtagcgctcggatccttccagggcctgggggctgaccggctgggtgggggtgcagctgcggacatgttagggggtgttgcatggtgattttttttctctctctctgctgatgctctagcttagatgtctttccttttgcctttttgcagtccctgtgggccttgctcagagcggagaaagcatttgtttgtacaagatccgcagacgtgtaaatgttcctgcaaaaacacagactcgcgttgcaaggcgaggcagcttgagttaaacgaacgtacttgcaggttggttcccagagggcaagcaagtcagagaggggcatcacacnnnnnnnnnnnnnnnnnnnnnnnnnnnnnnnnnnnnnnnnnnnnnnnnnnnnnnnncctgagaggggccagctgcttgctcagtttctagctgcctgcctggtgactgctgccttctctgcttttaaggcccctgtggtgggctgcaggcactggtccagcctggcggggcctgttccgaggttgccctggttgcctgagtggtaggctggtgtggcttagtgtagtggtgtggacgcaagctgtgtgttgtgtcctgtggtccttctgctcatagtggctgttggtcctgatgttattactacctctggtagtaatgctgagaagctgaaagccgattccaggtgtggacaatgtcaacaaagcacagatgctctcgctggggccttgcctcggccctttgaagtctgcatggctgggcttctcactcactcagtgtttcttgctgggggaaggaattgagtctcccacttcagactgggcctccctgaggaaagggttgtgtctccccactcagactgaggttccctgagggtagggctgtgtctctccctccgacctgggctccc

SEQ ID NO: 249417 - DNA, 1059 bp, Homo Sapiens
  misc_feature (65)..(83): n is a, c, g, or t
ttgggtttcttttcttgtccaattttatccaaaatcttcaagttacatttaacccataaggtttnnnnnnnnnnnnnnnnnnncggttgtggttccctttcttccctacccttgccactcccactttctggcaccgagtttatttttcacttacttacttccccagaccccgggctcgcctccacaaaggagaagagactgccctggcggtcctggtggcttttcttagcatgtgtggcactgttgcccagtgtgggagttggtttaaattctcctgactccagtttataacatccttttaaaaaatttaaaaacaaacagccacacccctcctccagtccttctcctcagttcttgtgtgaaactccagctgatgttaccacagtaacatcagttaattgggcaagccctgatgtcagtgtgtgtaactgacctctggcctggcctgcacagagaagccctataatcacaggtctgtggtggccccgaaatggggggcctgctagtcaggaggatgctgtgcacactgtgtgtgatgaatctcgccagaaaggctcctgaggtcccaggttggcacttctccctgcagccattgtagaagatctgctggtccttgcaggcaaagctacagccagaatgtccgtttgaaactcctagctcatctgtcaccgagcttcatccgaatgtgccacggagcttgctctccacttcctccgtgcagtggccctgccacagccctccctcggcacactttgaccctttgtaggattggaattagcaggactcggctatttaaagcaccagtctggggtcgcctgggcccctgctgaccctctcctccagagcagccagcccagcccgggaacaagacggacttcctctcccttcggactcacagcctttgcagagtcaagctccacttgaagctcactcagtaatatcctttcaatgtgttttatattgttttgactgcctttttttgtagaaataaaaattgaccttagaatttatcgtcagataacttgtaagatttgaatattaatgtcttttcaaggcaaa

SEQ ID NO: 249418 - DNA, 1391 bp, Homo Sapiens
  misc_feature (290)..(434): n is a, c, g, or t
  misc_feature (724)..(741): n is a, c, g, or t
  misc_feature (843)..(852): n is a, c, g, or t
  misc_feature (954)..(978): n is a, c, g, or t
ttggtgccttcttcaccaagcttattcatttctagcttttgatttaaagtgagatacatgtgactcttcaatttacttgaacaaatagtagccattgtagggttattaattggccttatttcaatgtagttgtgtctcaaggaacagggaggcccaagaagagggagaaacattgcgggggtgggggagggcaggagcagtcagaacacacagaacatttcttgattaagtttgcccatattatttgggcatcctttgtggcactccaaaataattaaaatactagcatnnnnnnnnnnnnnnnnnnnnnnnnnnnnnnnnnnnnnnnnnnnnnnnnnnnnnnnnnnnnnnnnnnnnnnnnnnnnnnnnnnnnnnnnnnnnnnnnnnnnnnnnnnnnnnnnnnnnnnnnnnnnnnnnnnnnnnnnnnnnnnnnnataaggaaaaaaattttaaagatcactaatcaagatcaccataacaaatataataatgaaaaatttttaaatagcatgagaattaccaaaatgtgacacagaggcatgaagtaagcttgtgctgttggaaaatggcaccaacagacttgcttaaggcactgttaccacaaacctttggtttgttaaaaactcagcatctgcgaaactcagtaaaacaaagtgcagtaaaacaaggtatgcctatatgatagccagtcagcattcaaatgtccccagttgacatgtcggcnnnnnnnnnnnnnnnnnnctcccagttcgagttgaggctaaacaaagtctacaaactgcatctggttgatatagcttatggggtctcctgagaatctattacagctttgccgcctcctannnnnnnnnnccttgccatctattttttgtacagacttggtcagttgttttgaggtattaatgttctggatatggctgatagtgtttaaattggtgtttagcattacatacnnnnnnnnnnnnnnnnnnnnnnnnnaaactatatgagagattattctttattagagaaagaaactgagtctcagggaagtcagggaactttagagtttacaccgcctgtaagttgcagggtcctaatgaaaacccatgcctatctagcccatgatttctaattttttcctctgtacttgatttagtgacttctgcatattacattgtatttgctgattattgatgcttttcaaatttaaatacaagttaatttccaaatcacttacattcttggattgtactggaatgtgtgaaagtattaaatattaaggcttctaaaacttggtgggttatacatatatatttttttaatttttcttatagagagaattgggatttgtttttcttatacatagacttgaaactaaaatgtatttgaccttcttttaaagtgacatc

SEQ ID NO: 249419 - DNA, 833 bp, Homo Sapiens
  misc_feature (604)..(612): n is a, c, g, or t
cccaggcagataggcaagagtagtgtttagcagtatttctataaattacccaaattagatattgtataatcctgacctattaaaaatagtaggtccttttcttggtccctagtagtgtatgtgttttttgttgattgagatttctgagtgtggagtttttgggaagtggagtgaaagaaggatgttgttgcctttttagtccacggtgtccacataaattataatggtccaattaatttgatgtaattttctcagttatgaaaagaaatgaaaaacatttaaacgcctttttggggaaggggctcagattaatatctgtaaagtactttgaagctggacactattattgttatgttctaaaaatgggaatcaagatgtatcctccctcactccaaataaattcgaggtgtaattccctaaagaattatctagaaataaaggtgacttatgctatggaaagccatgtaaatacaaatttattcatcccttaaccaatgctacttttcctggcatctttttgtagtattttaaaaagtgcaacatcaacaaaacaagagcaaaattctccagaagttttgatgtatgctttaaaattagggttgannnnnnnnncacactttccaaaacaataagacttgttttacagcctgggcactggacttacaccctgaacaatacccatcattctctgcaagccctgaaagtgacagtgacctctcgcgcctccaactcagctgtgcccccagccactgtggaagcctttgtggaaagagacagcctccattttcctcatccttgtgatgatttatgccaatgtgaaacagggattttat

SEQ ID NO: 249420 - DNA, 659 bp, Homo Sapiens
  misc_feature (294)..(319): n is a, c, g, or t
tttgggggtttgccggggcgcggagaggagagccgggccgaggggaaggaaggaagccgtagagctccccggtctcgggctgcgtctcccctccagcgctctcctgcctgtgcgctccgacgcggcagcggcggtggcgctgagcgctcctcggtggggacgcggtgctcaagctgggagcagcgagaaccctttgcggaggcttcccgtgcccgctggacttaggatgccagggcgtttgatttgcacctactgagcccggagttcctccccggccctgggaagggcttgcannnnnnnnnnnnnnnnnnnnnnnnnnagtagcagacggaacagcaggctctcctctccgagggggggcgtcgaagcgcccgcgccgggctcccgccctcaccctccggcgctcctgcggccccaagccaccacctcgtagcccgcctccttcctcttctcgccgcgagccccaggcccggacgcctctaggatcggacccgcgcgccccggatgcttggggctgccccggcgcgcccccctacaggcgcgacccgctgagtgacccggagggggcccgagctcgccccaggaggggcccccggcctcgggaccccgcgctggacctgctggagagccgacgatgtccgcgcagtcccaggcattga

SEQ ID NO: 249421 - DNA, 993 bp, Homo Sapiens
  misc_feature (297)..(392): n is a, c, g, or t
tgacaacatagaagaaatgtagcagtttttcagaaaccaaaaactattacaactcaattagggtgatatagataatttgaatgacccataggttttcataaaggttgacttaatttgaatcaaatactttaaattttaaataaaaaacctccaaaaaaccaatttctgtgtactagagagttgtagtcctcactagagaattctaccaaacatttacacaagaattaatgatgattttacacaatgtcctcagaaaatagaagcgggaatatttattttatttatttaattagatgnnnnnnnnnnnnnnnnnnnnnnnnnnnnnnnnnnnnnnnnnnnnnnnnnnnnnnnnnnnnnnnnnnnnnnnnnnnnnnnnnnnnnnnnnnnnnnnntgtaaacctcccagaaagaatgaatgatttccaaaaagtttcaggatccaagatgaacacatataatcaatttctctctactaacaatgaacatatggaaatctaaattaaaaacataataccacttattccatagaaaattaaatagtttggtataaattgaacaaaatatgtataggacttttgtgctgaaaattacaaaatgctgatgaaagaaataatagaaataaatgaagacacatggtctcttgatagattggaaaactcaacttagtaagtatgccagttctctccaaattgatctgtaggtttaatggcattcctgtcaagattccagtaaggtttttctcagctttaaataaacttattccaaaatttgcataaacagtcaaagtcataaacagttgaaacaatttgggaaaatttttctcaaaagttttgagaaaaagaatagtaggaattattgtatccagtgttaaggcttattacattagtctccccttttctgtggttttgctttctgcagtttcagttacctgaggccagctgtggttcaaaaatattaataggaaacttcagaaataaataattcctcagtttt

SEQ ID NO: 249422 - DNA, 993 bp, Homo Sapiens
ttggtgtgactatttttcattgataactagtgaaaagctggcgagtcagtttcagaggtggtttctttgtgccatatcacagagcctggacttgaccaaagattctcacctctgcatctgtaaaccgggagtcttccctgggccaaacgtttggattgcagttgggaaaacggaggcagccgcagctcgcgtggcaacagtgcagggatcccagggctggggagagacctgaggtcttgtcctagttctgcctggaatgggctgtgagatcccatgctggtcactgggcctcagggtgaaagaagatgttggctggatgttttgaggtgcagagtggctgtttgacggcgactgcaaagcaattcaggactgcagcatgaagaaaggaggctgtgggtctaagccacagctttcctggtctgaaacccttagcccaggcaaaggagaggcaggcaactcaattaatcctccctggagacctccctctcctcagttcattttgtgtataaagttgtggtcgggagtgtgacctacagtcaccaagaatccacatggaggccctagggtggccctgcctcctgcttcccgaatctgtggtcactagatgtaggaaagggagtgaggtggatctccacagttgcctctgggtgctggccttaccctcactcctgtttcctttcagctacgagagtacaaggtagtgggtcgctgcctgcccacccccaaatgccacacgccgcccctctaccgcatgcgaatctttgcgcctaatcatgtcgtcgccaagtcccgcttctggtactttgtatctcagttaaagaagatgaagaagtcttcaggggagattgtctactgtgggcaggtgtttgagaagtcccccctgcgggtgaagaacttcgggatctggctgcgctatgactcccggagcggcactctctacatgtaccgggaataccgggacctgaccaccgccacgccctgtcacccagtgct

SEQ ID NO: 249423 - DNA, 1365 bp, Homo Sapiens
cagatggaagaatgctctggtgagataagccacaggggtccctggggaggatctggggccagaggattctggaggtttcccagtttgggctctgtgggaactatgatctggagatatttttttcatttaggtcaccaagagacaacccctaacccctgagcaaggcatggtcaagctctggcatgagattctcttccagcaatgcaatgcttgcagagacaggtacaaaagctggtgaccaggcctgctgtcccccaggtaaggacagtgtgctacccaccctctgagaggtggtgccagtccacagcactgggtgcctgtacccctggctctgcagataccggtcatggaagtcccatggaggtcctcccctctccacattaccttcttgctgcttctagacttcttctagtcattaagcatgttgagccatttttctgtgcatccgatctgacatttttgctctcagatgaaacatgataaaggaagccaagccgccagtattcctggaggggaccttgggtgctgggtcttgggctccagggccctaatgggactgatcctgaaggagccagggaagggcaaacactggggctgaggccctaggacccaatggccattggtggccgggacttatggccccaacacaccctgtcctcaggccacagacaccatgggcttcggtcaggtcccagcctcccagtagtgtcctggtactagcaggtgctgacccctgagccacaagcacaattctgggttttgggttttggtaaaaccacctcagggacagagttctggggttgggtttggcaggaaccatggtgcctcccagggatggtgtgtcactcctacttgccacaaaatgtgcacacaggctgtcccactgtccagcccatcctgctggacaggatggaggaagtcagggaacaggcagggtggacatctggggtgcagggaggggcaggtgcacgctgggaggccagaccctgcgagggctgcgggggcatcaggcggagtgggctccaggtgcaccctcaatgcactgggcaggtcccaggccaggctccccggaccccggctgggtgacgtggtcactccctgggggactgccgtcaggccccggccacccaccctgggcagcaccgtcccatctcaggactggaatttctgcagtctgagacaggacagtactgtccaggcctgacagactgggaggacccgttaagtcctccatccctagaccagcctcccacacagcaaggacagtccctcagctctaccttcagggcactgactgcttctctctttgcgtcactctgagccaacttttttgtacaaagtggagaccacttattgaaggagagt

SEQ ID NO: 249424 - DNA, 959 bp, Homo Sapiens
  misc_feature (226)..(248): n is a, c, g, or t
ttggctaggagaaagggaagaacaattttttctcctcttttgggaaggtttgcgtctagtagtgcctgtgcccctgggcagattggagagaagagggacgactggagaatcgtcgagaaccagcggagaaaagaaaaagcaacgtttaattctagaaggcctcctgtccctgcctgctctgggtgctcatggaatcagctgctgccctgcacttctcccggccagnnnnnnnnnnnnnnnnnnnnnnnagcctgtgtgcactggtctcagcccagtttattgtcgtggggcccactgatcccatcttggccacggttggagaaaacactacgttacgctgccatctgtcacccgagaaaaatgctgaggacatggaggtgcggtggttccggtctcagttctcccccgcagtgtttgtgtataaaggtggcagagagagaacagaggagcagatggaggagtaccgaggaagaaccacctttgtgagcaaagacatcagcaggggcagcgtggccctggtcatacacaacatcacagcccaggaaaacggcacctaccgctgttacttccaagaaggcaggtcctacgatgaggccatcctgcacctcgtagtggcagagcttctggaagctgaggtctactgagaagtcgtcccagaagcagaaagtgaaatccaaaacctgcctgtttgaagttggagtcgacacacccatctcaaagactaggctctaagcccctcatttcaatgaggggccatgaagacgggggcatccggctggagtgcatatctagagggtggtaccctaaagcccctcacagtgtggagggacccctacggtggggttgcgcctgccctgaaagaggtctccatgcctgatgcagacggcctcttcatggtcacaacggctgtgatcatcagagacaagtctgtgaggaacatgtcctgctctatcaacaac

SEQ ID NO: 249425 - DNA, 1207 bp, Homo Sapiens
gaggggaagccacaatatgccactcagaatatacttcttgggcatatttcaagttgattattctgagaactgcaggcagggaatagctctgaaaagctgtccattctaaaggaaatttacatctatccaccttactaaacagaggatgcaagcagaggtttctctctgaaggccctttatctgcttaaagaaagataaagctctgacacctccctaaaacagagactaccacaggcagtcacctattcttctgatagctgttgcctaagagatttcatttgcacaagacagcctttgcttaccatgcaaagttgctcaccatccatctaggcagagtggggcaagccaagcagcattcatcaagtggaagtggagcttatgggatctgaagcagcagtccctaaaggcccgtccacacaaactacatacgtaagttgctcatacttccagcatgtccacttgttataatattgcccttcatttagtatatacccaacacccaacatatttcaatgtcagggcttcaagtaaccacctggtcatttgtcagattttgtttgtctaacagtctttcccacaatttcctttgaataaattacctctcctttcacatttagtcttgatgaatcagtaaacccagctgctttgcctcaaaccatttaagccgaagtagttcctgtagagtcctctcaaagctccaagactgccaggggtgatttctgacctaggtttgcacactcacgtccaggcatttaaatcttgaatgggcattttaagcagctggagttaatttaatccatgatgaataaaagcaagattattgagcaatttctgcttaaaaaaatcttcgggagctaagtttctatcctgagtctggttctttagcttccgtttgatcttatatccttcaaataaattctttattgcttaggttagctagagttggttgctacaaacagaatcctaactggtattctttgtaagtctatgactatggcctaacagatgaccctcatctcccttagacatgactgcaagtgattttgttttactggatatagccaatcccctatttgagttatcttggccattctttgaatttctggaaactgtgtattttcagaacagtgagatatacaccactgtgttctagtttcagttccaaatttgcatgtcagtaacttatttcaatgttttggctttaggg

SEQ ID NO: 249426 - DNA, 1463 bp, Homo Sapiens
  misc_feature (134)..(145): n is a, c, g, or t
  misc_feature (179)..(200): n is a, c, g, or t
  misc_feature (204)..(219): n is a, c, g, or t
  misc_feature (223)..(282): n is a, c, g, or t
  misc_feature (802)..(810): n is a, c, g, or t
acctctacctaagggcccactttgtacaaaaaagttgggaactatttccattatagagagagcagagttcagactttttaacaaaaacaaatatcatcaagaaggcaatagctagaaaatgagaggtgcctttnnnnnnnnnnnntgcagccttacagtgaggatgaagattgagtttnnnnnnnnnnnnnnnnnnnnnncacnnnnnnnnnnnnnnnnttannnnnnnnnnnnnnnnnnnnnnnnnnnnnnnnnnnnnnnnnnnnnnnnnnnnnnnnnnnnttaccaatctgtgaaggtcctgatttgtgaccatcaatgtctttttaatgtatctgctcaacttctaggacttcaggggacatttcatgcgctttgtgctcttctgagcaccatatatactttccaagaattttgaatgtgaattcctagaaatttcagtagagaaaacaatagctattctttaattatagtaaagttcaggtagaaggagaaattatttgttcaccaaaattatgggatctcattaatgttggctaagtaaatgtaattttttaaaggctcactttttaatacttcatatatttccctcttacaaaacagcatgtcatgaagttcttatgtggtaaagattcaactagtaaatatttttaggttaaatacctgaactagttaaaattccacctaagaatagtcttaaaaatatttaaaaagcatctctcatatctacctctttgtcattgctgccattttaactgaagcaaatctttatgacatctgaaatgatggttggatgcaattnnnnnnnnntctatgttggtgcttttctcaggctttgtcatttaatttatattgtatttagatgtcacaaatcagactgaaaggcttagaatttattttgtttttctttgaaagaattgcttaaaattaaccatcaatgtttttagcgagtggagataatgaatctttggttggtgtctgtctgtgtgatgttttcaaccaatagccaaataattattgaacttacatgaaaaagagtgctaactataattttatttagattactttattctttgaaagtgactacaaggctattaagtacataatcattcattttatttactcagaagttgcctctccattactgttaacttgtttagtaatttatataattgcagtacttttaagtgttggacactgggattcaggttgtatacaaagtagtagctgacgaaaaatatgtatatttttgtgaaatgtatcaagccctaaagttcattttagagaaaggcccagaaaaacgtatctgtgtttaaaaacaaaggacaggtcattcgtcaatttgaatcatttttacttttgccactacaaactttttaattggcaatatccatcatccaactggatcttcatgtcagtgtcagggatgccaggttgacaaagtatttaacagatcctttcag

SEQ ID NO: 249427 - DNA, 1041 bp, Homo Sapiens
tcccatcaaccatacatccaatagtctttagcagaatattttagatttagctgtatgcaaatctacacaggggaaggtgttgggtagaagggcttaaatcagtcctttgcaaagacttctccaattctgtaacaagttaaaccccctttttctggaaaaggctgtttagttcataaagtagtgatcaataaccatggcgatcctctaaaaaacacttttaagtccacaggtactgccagcatctggaaaagttgtaaacagacacagcaacagcccttctttttggtttgttgccgggtctcccagggccacttgatcccctttggaaagaacgtattgttttcagaagctcagcaagatgtgtgaattcactgggtacatgttagagaatatttggcaatagggttaacacatcacggtgataaaatctgaaacagtcccaataatgctcctcttgaatatcaaaataacttaaaatattttatcctctaaatgaggcgtcattttctggaaaaatattagtgatcctttataaaagtcccatatctgataaggcttatccagagacatacctgaaagaaaaggctttttaaaaagtattaacaatttttgcaaataaagacttcctcctcttcctcctttctagcctgttcttagcaacaaatgcctacctcatttcaattgtatacattgtattatcagagtattatctaatctaaactggttatcactggttatacttttttctgcataaggaaagatccccattttcctcttgaaaaatgactgagaccaaggtgaccatgtgaaatcctcaatgaagccacaaactagtccatgcagcttgatttgaggattttctctttcttctttaccgcaggacaaacttttgacgaatcatattcctccatcatgttattctgatacatgtgcctattatcagtccaaagaacgtttctaaccttcccacatcccggactggttctcgacgggatggacgtcctcgtgatcggggctgagaatgcattcttctcttgccaa

SEQ ID NO: 249428 - DNA, 870 bp, Homo Sapiens
  misc_feature (413)..(421): n is a, c, g, or t
ccttgatatatcttctcaagacatttttctatctgtttctgttggaatcttccctttgattacaagttggttattacccatctatagaaccactatgaaagaaaacaaaaatatctccattattattgttttttcctaaaggaaccaaattccagcacctttaaacttaatgaacttaaaatatattcagtagcataggataaactctaggactggtgctatactacttggtttcccaaaatttatttatttatgagacagggtctcacactctgtcgcccagactggaggtttaataggcaaaagagaaagaatagctctgtcttgcgagagagacggacgtccgagtgggactctcctggattatacactttaaatttgtaagctgttatctcaataaagctgtttgaagnnnnnnnnnggatagttgaatcacaagccacaaactgtcaatggtacttaatgataaactgataggaaactgttgacaggcacttttgagaaagcaaagctctaggctagatattatcattcattcaaaattataaatcataaagtgaaacaacaaaattcagtcaagcagggttaaatttcctcctccacagattgtaacccttaatctccaggctacagtgattgcaatgcttgatgtagaaattctttttcattcactgtcaaaataaatggaattttctcgaaaacccatttaacccattgaccataagtttactggccacaacttgttataatagtttatcccacctctaacaaaacctctagattattctaacaatagaaaaaacaatgctagcttttgctccctcattagtttgtgcaagttacaaataacgatggtaacaaatttaccaa

SEQ ID NO: 249429 - DNA, 1218 bp, Homo Sapiens
  misc_feature (749)..(749): n is a, c, g, or t
  misc_feature (885)..(918): n is a, c, g, or t
tttcacaaagaaaattgtatggtattctttctcaccttcattgaaaaaataacagaaagagctttggtttcaatttttgttctccttgtctaaacacactaagaagtttgaagaaatggttcagaaatttaatgcaaggatctttatgaactatttgaagcatgccactcaaaataaaccccaaatctggagtaaacaaaaaagtccttgcatttgtgtgtatctatccactattcgagtctgaatcccagcattctcaactaaagaaacaatcaagtggtatttttgtgaccctcatcaagtgcagtaatttcactgacttttgaaataaggcagctaatttggaggggtaacaatcccaacagtacagattaagggaagggaagcatgtattttttggaggcatcccctggatccattggggctgccatgatacagaaccacacgctcctcaccctccttaatgcagctcttccttcacagcctccccagttttttcaccttggaactcaagcccgtgtcaacctgcatctccagtactgtcccgaagacctctgtggcaggcttgtgttggaaagagcaagtggccttcaccggctttgacttctctgaatttaggcgttcctaagtcaggttggtgtttgtgcccttctcttgtaagataggccaattcataaaaaggtactaaaacttgatgttttttccttttcatctcaatttatgataacgagaagtgcagctacagagcnaaaataaaaaattttaaaaagtggaaactgaatcttgctcagccagaagcttgggttgcactgctaatgattttgtcagcgtgactttgtgcaaaatatcctcaagaaggctctggctcattttcaaagtaacccnnnnnnnnnnnnnnnnnnnnnnnnnnnnnnnnnntagccaatgatgcatgtctggcaaatcaaaaacaagcttgttgcctgtcgtatgtgtatatttgttatagacacgtcatgcataacaaaacaaatgtagtgtgtgaattgtgaacatttgaaaaagcattggttttcttattttccatttccaagtctagatcgaagcaatcttgttttagaaatggataattgcaatgaaaatgagcctgagatatgttaaaaggccgcccctgtaaacatttcctcaaagggaacagtagcagttgagtatgtatcagttactcatactattcaccaa

SEQ ID NO: 249430 - DNA, 1272 bp, Homo Sapiens
tttgtacaaaaaagttggctcgtgagtgtcgcaggccataaagactctgtgacttgtgctggtttcagccatgactccactctagtggccacaggggacatgagtggcctcttgaaagtgtggcaggtggacactaaggaggaggtctggtcctttgaagcgggagacctggagtggatggagtggcatcctcgggcacctgtcctgttggcgggcacagctgacggcaacacctggatgtggaaagtcccgaatggtgactgcaagaccttccagggtcccaactgcccagccacctgtggccgagtcctccctgatgggaagagagctgtggtaggctatgaagatgggaccatcaggatttgggacctgaagcagggaagccctatccatgtactgaaagggactgagggtcaccagggcccactcacctgtgttgctgccaaccaggatggcagcttgatcctaactggctctgtggactgccaggccaagctggtcagtgccaccaccggcaaggtggtgggtgtttttagacctgagactgtggcctcccagcccagcctgggagaaggggaggagagtgagtccaactcggtggagtccttgggcttctgcagtgtgatgcccctggcagctgttggctacctggatgggaccttggccatctatgacctggctacgcagactcttaggcatcagtgtcagcaccagtcgggcatcgtgcagctgctgtgggaggcaggcactgccgtggtatatacctgcagcctggatggcatcgtgcgcctctgggacgcccggaccggccgcctgcttactgactaccggggccacacggctgagatcctggactttgccctcagcaaagatgcctccctggtggtgaccacgtcaggagaccacaaagcgaaagtattttgtgtcccaaggcctgaccgttaatggctgcatttttctgcctgtgtgtctggtgttgaggggactaagggacccctgcccctgtctgccagcagaggcagtagggcacagagggaagaggagggtggggccctggatgactttccagcctcttcaactgacttgctcccctctccttttcttctctttagagacccagcccagggccctcccacccttgcccatacttggtgggcccttcatagggaggggtggatctgtttctctttcactttcatttgctggtgtgaaccatggggggtgtatttgtatgtggggagtaagtgtttgaggttcccattctttcccttc

SEQ ID NO: 249431 - DNA, 1114 bp, Homo Sapiens
ttggattcctgtgtggatcttagataacatactggaccaactcatcttccccaagctgcaaaaggaggtggaaaactggaacccgctcacagacactgttcccatccactcttggatccacccatggctgccccttatgcaggcacggctggagccactctattcccccatccgtagtaagctgtccagcgccctgcagaagtggcaccccagcgactcctctgccaagctcatccagccagccctggaaggatgtcttcactcctggctcctgggaagcattcatggtcaaaaacatagtgcccaagctggggatgtgtcttggtgagctagtcattaacccccaccagcagcacatggatgcattctattgggtgattgactgggaagggatgatctctgtctctagcctggtgggacttcttgaaaagcacttcttccccaagtggcttcaggtgctgtgctcttggctcagtaacagcccaaattatgaggagatcaccaagtggtacctgggttggaagtcgatgttctcagaccaagtgctggcacatccatctgtcaaggacaaatttaatgaggcacttgatatcatgaaccgggcggtgtcctccaacgttggtgcctacatgcagccaggagcacgggagaacattgcctatctcacccacacggagcggaggaaggacttccagtacgaggccatgcaggagaggcgggaggctgagaacatggctcagaggggcattggcgtggccgctagctctgtgcccatgaactttaaggacctcattgagaccaaggctgaggagcacaacattgtcttcatgcccgtcattgggaagcgacacgaagggaagcagctctacacctttggccgcattgtgatctacatcgaccggggagtggtctttgtccagggcgagaagacgtgggtgcccacctcactgcagagcctgatcgacatggccaagtgaactgtggcaggtccagaaccagtcagagacttgcccctaagagggatgtactgtaaataaacagtatttttagatcaccttcaaaagggtaacttctttactcaggagctactccacatcaggccaggtcatgccaa

SEQ ID NO: 249432 - DNA, 1122 bp, Homo Sapiens
  misc_feature (726)..(772): n is a, c, g, or t
ttggaaattcttttttcccttcttttcacaagtgttgatgtacttctttatttcttctgtgctttcctttctctcagacccataccccctcctccctcacagatccagtacgggcctgactggggtctgaggctgcacatgatcaatgctcttctctcccacccaggacctctgccctacccccactggactggcctctgcccagccaatatgagcagctggagctgaggatcgaggtacagcctagagcccaccaccgggcccactatgagacagaaggcagccgtggagctgtcaaagctgcccctggcggtcaccccgtagtcaagctcctaggctacagtgagaagccactgaccctacagatgttcatcggcactgcagatgaaaggaacctgcggcctcatgccttctatcaggtgcaccgtatcacaggcaagatggtggccacggccagctatgaagccgtagtcagtggcaccaaggtgttggagatgactctgctgcctgagaacaacatggcggccaacattgactgcgcgggaatcctgaagcttcggaattcagacattgagcttcggaagggtgagacggacatcgggcgcaaaaacacacgtgtacggctggtgttccgggtacacgtgccccagggcggcgggaaggtcgtctcagtacaggcagcatcggtgcccatcgagtgctgtgagcaaagaggccctgggccannnnnnnnnnnnnnnnnnnnnnnnnnnnnnnnnnnnnnnnnnnnnnngcccattccctctgcagcgtcctgtgccctgtctgtcctgggtagctctatagaggactcagcttctttctattctagtttgcccctgccacagactctgtctctggggtggcccagagtgacactggaccctatctattcctggggtgccctgtgcccttgtttgggaaactccctggtctaccctgtttaaccctctctctgctctgggagcggccccttacatggtgtatgtgactccatggatattactggtttatttgtgtgtctactgctgaggagggctccctcagagccctgtggcagttttcccaaagagggttggggacagaggaggccacccctccatg

SEQ ID NO: 249433 - DNA, 973 bp, Homo Sapiens
  misc_feature (363)..(387): n is a, c, g, or t
  misc_feature (839)..(924): n is a, c, g, or t
tcacatgcataaaaaataaaactcattttaatactatactgatgtatgaagaaaatccatacaaaacccaacaaactaataaaaagtaaatacaaaatataataagtattgactcaccaactttttctggatctgatacaccaatttctatgtcaaaaatgtctccatttgcttcttcttcaatctagaaagtataaattattttttggcattaaaaattataatttaaattattgtcatgacactaatttttatcatctattttctgtaagagtcactgtcacaacaaataatttagccacccagcacttcatttttgaaaaacaataaaaactttcacatttcctgactttataaataaannnnnnnnnnnnnnnnnnnnnnnnnaagagtagatgacctctcaatacaaaagcaaaaaaaagagaagcaaggcctgagacaacttagggactgacaaaggaggatcaggaaggcagaaagagaaccagaacaatgttgtgtcataaaagctaagagaagaatgtccagaaggaaggcctgttcaatccttatcttcttccttgacccacaaattcaacccatcaacaagccttatcagctctacctccaaaatatatactaaacacatccatttctctccatctctttagcgacctacctagtagttcaaactttcatcactgcctagatttctgcagtagcctgttcaacccacctcaatcaagtcctgcccccaaataatccactctctttgtagcaactggattaatcttttaaaaatggaaatcagggccaggcgcggtggcttatgcctgtaatcgcggtactttcagagnnnnnnnnnnnnnnnnnnnnnnnnnnnnnnnnnnnnnnnnnnnnnnnnnnnnnnnnnnnnnnnnnnnnnnnnnnnnnnnnnnnnnnttagccgggcatggtggcgggtgcctgtaatcccaccaacttttttgta

SEQ ID NO: 249434 - DNA, 958 bp, Homo Sapiens
  misc_feature (849)..(858): n is a, c, g, or t
taaatgagaataaggttaagtaccaattctgccgacaaaggcagtaaagttgatacaagtggcatttttctggacaagggagagggactcatctttgaacacaacacgaagaatctcctttcatcgccaaacagcttttcagagatagatgctttgtttccaatcgagcatgctattccagtgtactgaacatactgtatacctcgtgttaggcacctttatgaagagatgaagacactggcatttcagtgggattgtaagcatttgtaatagcttcatgtacagcatgctgcttggtgaacaatcattaattcttcgatatttctgtagcttgaatgtaactgctttaagaaaggttctcaaatgttttgaaaaaaataaaatgtttaaaagtaaattatggcttataggagcttataactttattcagatagcatcaatcagggatgaccagaacacattaggaccccagattattcaaaaactttaacgaattttaaggggaagaattttatcttttcccttaaaatgcagtcatagaaattagaggatgactcactgccacagtgtctaaaagcatttgctagcaaagaggcaggacactaatttgtaaactgctcaactgttctgactggaagggaggcctggagctctgctatcaccaatccttcccttccctctactccacatccttctaaggagcatgatttgaaaactactttcctaggttaatgggcatgtgcatcaatggagagaatagtataagcaagtgagatgtagactaagcaaaatttagatggagaagcacattttaaaaaattaataacttaaaagtctcaagttattaannnnnnnnnngctaactcaattggaagtaagactatgaaatatttcagtgtgtttccaattcccagttgaatgcagtgtttcagaatttcaggtatttcttaagatccaa

SEQ ID NO: 249435 - DNA, 1321 bp, Homo Sapiens
aagtattcaacattaaattcaatttatttcacattaatgtttgcaaatacatcatcaattcttacatatttcaaatcaacttcaagtacagaaggcttcctctcaaataagtctcctgaggtgacataaagactgaaagaagcctatgacttgagtccaagtctcttaaccaacaatcaccatatcgtcactggtgaactcatacgtggggacttcaaggttgagaggagcaggacccaatctgatcctgccagatgcatcatagtgtgacccatggcaagggcagtaataaccaccaaaatctcctgcatttgcaatgggtacacagccaagatgagtgcaaacacctatcaggataacccattcaggtttctttactcgatctagatcatgctgtgggtccctcaactgtgataattcaactgcagcttcctgctcaatttccttctgggttctatgacgcacaaacaggggtttgcctctccatttgaaagccatgttcttgcccttctggaatatcggataacttgatttcgattttcgccagggccaacacatcagcagaagcactcatgctggaaacgaactgggtgacggcattcttggcagcatatgcgacacccacagtagttactccagttaccaaataggagaaacctttcctagcctcgctgctttctcttgaagacttcgtactatctaaaacttcaaggcggcggtattcagagaagtcaggcaccttgatgtctgtgtgggaataacaaacagaagcagggactgcaagacaaacagaaggttaaaaaacacaattagatgagtatcccgaagggagtatatatcaggaaatagccctttatggattcacaggtaaaaaatcaaattctaaaaatgtgaaatatggcactcactgggtctcagaaatagtcaaattggcggtgctagcatataaaatcttaaaaatgaaatgaagtgaaccaccacctatcatactggtatgaaatcacaagatactatttgtaaattgagctccccctagttggttgaacattgctgattcaggattcacaacacctcagtgcatcatgctaaaaacgttaaacagcaaaataaacagtaataactcaaagtttccgaaaattcaactgccaagacttactatataaatcatgctaaatacctcccatactctctggattagaaggacaccctaaaactcatctagtccacacagtaagttgacgtgtgatcaccttattaaggcaaatgtctgccccttatagtccaatctatgttctcggaaaaaactgttaattcataccaa

SEQ ID NO: 249436 - DNA, 937 bp, Homo Sapiens
aagttctccatgatgatgtaggtacacaagggggtgaaggctgctgtgccacaagtgaacagttgactgccgctgagcggcaggaggatcttgatgtagtttagacagtcgcacagtgggtccatacccttgaagctgcagtgctgtttcttctctgcgtctgcaccccaaagcagctcctggtactccccgcctggcaggaagctgaggttgttactgagtgcaaagagggcctctcgagcacccacgtacagggtcctgccatccctgctcagcagaagggctgtgtagttggagatgtgttcagcttcgaatctgaggaatggccgctcttcagagcctggggggaggatgatgggtattggctgggcgccaccggtcggatgggcggcgtcttaacaccaacctttagatggactggtttaaaggaaggtagtcagcgaggcggcagggtggcaatggcatggggctgggggccgggtgctgaggtttgatcgcggtgcgcagcattcgtggagtctgagcgacggtttcctgcgagctggtgctgaggtgtctgtgcacggatacttacgtgcggcagctcttccccttggtccgcccctgagtcgccccggggtccgtcgcctccggacgtggaccttgtcaaaataaattatgatgcctcaatccaactgaatactatacagctgggaaaaaaaatgatgtattagaagctccagaaaaacaggcaagaaaggcatggtcaaaatatcaagcaaactaaaatataaagtgatgagttttgagcacataatagaatattaagaaaggaaaatacatttaacactttcctttgagtgacattagacccaaagagaaggaaatgttaagtgggccctgcagtgaatgctatttgcattgacagagtaatgcaaatgttgagcatgggcttttc

SEQ ID NO: 249437 - DNA, 1324 bp, Homo Sapiens
  misc_feature (665)..(673): n is a, c, g, or t
  misc_feature (913)..(923): n is a, c, g, or t
ttggataaaacttgccaattttatgccacaaaaagtgtgaagatatttaacgaaaaaaaaggtagatcttgaatgtgttgtagcacgaataaattgctgtacttcattaagcttcattgccaattagctaggaattgttaagcacattgcagattgttcttggagaattctggagttgttatgaacatgaataccaacggaaaaccttaactgaatctaaaagaaaactattttgaagatggtggtgagctgcaaaatagctggatggatttgaatgattgggatgatacatcattgaactgcactttatataaccaaagcttagcagtttgttagataagagtctatgtatgtctctggttaggatgaagttaattttatgtttttaacatggtatttttgaaggagctaatgaaacactggacatataattggtttaaacataaggggaattaagtctttgtagtctgtcatttttttaagtggatcctcttggatgcgttattttctcatcagctggctccgatcatgaatttgttgtaattttatgttgtactcagtgcatttaagaaatggtagagtattttaatcctattacttgactaagagtgtgaaggtagtactttttagagtgcactgagtgcactttacatctttatttaaannnnnnnnnaacatcttatgtttacaggcttcctgtttgatgaagatagcaacggaaaactcaaaatggtggcagttcttattaccagttgttagtattgtttctggaaactgcttgccaagacaacatttattaactgttagaacacttgctttatgtttgtgtgtacatattttccacaaatgttataatttatatagtgtggttgaacaggatgcaatcttttgttgtctaaaggtgctgcagttnnnnnnnnnnncaaccttttctttcaatatggcatgtagtggagtttttttaactttaaaaacatcaaaaattgttaaaatcattgtgttatctagtagtttataattatcggcttatatttccccatgaatgatcagaactgacatttaattcatgtttgtctcgccatgcttctttactttaacatatttcttttgcagaatgtaaaaggtaatgataattagtttatataagtgtactggctgtaaatgatgctaaatatactttatgcaattaagggcttacagaacatgttgaaactttttttacttttattgggaataaggaatgtttgcacctccacattttattgcttctgggatgtgaaatcatgtaattatttctgctgttatataaagtgccatactttta

SEQ ID NO: 249438 - DNA, 1080 bp, Homo Sapiens
  misc_feature (200)..(254): n is a, c, g, or t
  misc_feature (1013)..(1029): n is a, c, g, or t
ttcagtaagaaaaccacaccaataaaggaaaagggagataaataattatgtgtgatgtctttagatgagactttaaatgttctttaaataactttttgataatgtattttagatcattacatacaactgccactgcagtgacaatattccagtaggggcagcatttttgctaaatgtaaaggattgccatttaaaactcnnnnnnnnnnnnnnnnnnnnnnnnnnnnnnnnnnnnnnnnnnnnnnnnnnnnnnnctggagagcaatatttcattgcctttgaatatctatatatctactcccacaatatatactagagacatactgtgtgagtacatacgaaagcatatgtacacatgctctgacatgtatatatacacttttgtctgtgtgtgcataagagctttaaaggcacaatatatagggatgcaagttttctagagagctgcagcaaagttaatacagaatgtcacaaactgagaaaagtcaaaaggaaatatagcagaattcatcacacaggaattcatcaaagcagtttcatcatgagaaaaatgagttagttacagaattcaagaggctaacatgtgaccttgtatgctttccattaaaatgtaaatggtgaagttatgattaaactacaaagcaaataaaaatatgtaaatgacaaattaatgacagtaagtgtggaaataaacctaacagtaatatcgatcataaaatcataattatgttcttttgtaatttaagtaaaatgtccccaaattattgagctaaaactttcaaatttgttttatttgaaggttggctttctgtttgtttttgagacaaagatgaatgcccaagtctcaaaattcctattgataatattaccaaaacttgtattttgtgggaaaatttcagagataaagatctttaaaagaaataacagagaagttgatgaaatatgcttaagccagatgcttctggctagaagagacagaattaagggggaaaaaaaccacaatgatgtgtgannnnnnnnnnnnnnnnnaagtgatgaaagactgaccagtagaaggtggtgaagatgaagaatagccaa

SEQ ID NO: 249439 - DNA, 1276 bp, Homo Sapiens
  misc_feature (528)..(571): n is a, c, g, or t
ttggatattttcatgggattactcaatctcacccaccattagttgcaggtgacaagaaagctaagttggcagatgtttgtgctagaagctgtgggtttacgtctcctttgtgcatgtgttccagacataccagtggcttggtatttaaacatcatgctcaggtgtgcagggtagtttttgagttataataggtatgcaggcgctgtgggattacttggttgtttatgtaaaaattattttgcactcacttctgaaatgagtgttagtagaatcatctttagaggaggttccaaggcattgaactgagatacctgcactgtttgctgtaaatttaagcttaaaattgaaaccaggttatcagcatttcatgccaggagagagtgggcatgaatgatttcaggaaatgaagagctagatttcagccttgaatttgcttccacccttctgtggcaaattagtgtgggctcactgagcactttatctgcccgtggtaatttattttaccagacagggtgtcactttgtcatnnnnnnnnnnnnnnnnnnnnnnnnnnnnnnnnnnnnnnnnnnnnattctcttgggcacaagcgctcctcagcctccctcctcagcctcccagttgctggaacttacaggtgcaccaccataaccagctagttttattttttgtagagacagaagtctcacttttttttcctagactggtctgaaatagaccattctatttgctagaatggtctcaaaccatccttctgcctcagcctcccaaattgctggaatttcaggcataattcatcatgcctagccatttcttttttctgctgcattgcagagttagaaccaatttcatttgtcctgcactgagaatgtgcattcccagcagatcatggttgagctcagcacacctgcaactcagccagcctctttgaagggtgcacagttactaactgtcagcgttgcacagccacctttagcaagtatgttcagaacttacattcccaccctttctaaaacagctcacagtaacaagagaacgggatttaacttttgacatgcacactcatgaaaacaaatgattttgggaaagcccaattgttgagaagataagggggggattctgactactagtatttttacaaatctgattgtcgttgcaggttttgttttatttttgttgtgtaaatgctgaaagtggaaaataaaatggaatatttgccctcttggtgttcctttttgccttgtacattgcaagtggtccacattttcctttattaaa

SEQ ID NO: 249440 - DNA, 1195 bp, Homo Sapiens
gaaatggagagttcctactaactgtcctgtgctcccagaggggattcaatgaggatcgtaagaaggaaaacaacgtgcaggggaagcagcatcttggatttcagataaagtaccaaaaaatattagctatctctttctgcagacatgcctctttctctgttaacactttcagtcattcaaaaggctattggtagaggtgcagcaaatccaagtgtagatttactgtaacagtttatttaactatgctgtattcaccaataacggcattaccaataatggcattagtgcacatcaaaagatctgaaaatgctaatgggacatttcccacaaaaggaaagaaatccaatggctcctataaagggagaatatagcaatggcaagcagaatgaaaatttctgtcaaaagaaagtacttctcaaagcaatcaggaaaaactgttcccaaattaggcctggggagccacattagccactatctcagatactgattattttgtttagccttaggggcctcaatattccccctcatctgctaaacttcaacttgtttactcacaagtctgataaattccagccaagtaaccttaacattccctatggcagtgcaaaattccagacatttgtaaacactgtaaatttcacgtttggtacatgagacagcttaccggttcatctttgattctaaaaacatagctagttcctaatctatggccatttttagcaaaggtagcatcaggatcaaaacatgcttgcacacatgcacactcatgactgggagaaccatcagaactaattgctcgttaggatatagttctgaacaatttaagcagataactgactaaatggaaaacagattcacagtatctaaagccatatatcagaaattcacataattctgaggggaaaaaactcaaatatctagttaacaattgtcttcctttcaaaagcgagtcaagaggtaacattacatagctttgtattatagatcagaagaatattcaccaatatatcaaagacttcaaaaggcagccaacattgcattgaattgacacacacaaaatgttacaaatgaccttgacccttaaaaataaattcttacaaaccaaataataccacacaatgcactacatacatctaactatacataaattataattaaaacacaactgcatatttcaaatgcttggcagtgccaa

SEQ ID NO: 249441 - DNA, 922 bp, Homo Sapiens
  misc_feature (317)..(330): n is a, c, g, or t
ttggaaacacctatgtaactcatcttttagtttacccttcctggggaaattgtctttggtgtttagaggagggaatgagaacacaaattggataatccactgtctcccatcccaggaggtggtgagttggctacaagagaaagggacaagtgaggcaggcctagcagttcccttacctgaagttttcaaatccatactgcagttccctctcgtaatgatgtaactttacaactattcttaatgcttgaacatgtatttaggggcaagtttctcatgatgatgaaaaagtatcaagtcatattgctatgttaattggnnnnnnnnnnnnnnaaaaggtaagttagtgattactgttaatggtgggggagtaagttttcactgtaaattgaacttataatttatgtgcaagtgttttcagtgccctgaatcaaactataaatgtggggagaaatcacctccatcaaacagttgcatatttactgtaaaagtattcccagtatgtgtgcagcatgaagaaagtattagtgcttctcagtgttctcagtgtaaattctatttatatacagcatattcacatactactttccttatattttatatagttctatgactgttgaaacatcaaggagttaaaaaaatcttaatatttcatgattaactctaagtactattaattaatagcttgcgaaatattagcaattttcccattatggactattctctctaaagcaagagagactagcattcccagacatcattctagggtctttaagctcattttgggtctgctaaagtttgggggggaaatgttacgcaaaagtgatactgtgtatgttggccattttgctttattcttctgttgaaagcaaaattgtgggggttttattatgtgtgtgtgcttttcctaagatgtcccagttag

SEQ ID NO: 249442 - DNA, 1455 bp, Homo Sapiens
ttggcgttctcccacctgtagcgactcagatccatctgtgtgtgctgtggaattcaggatacttgggcattgcctactatgatactagtgactccactatccacttcatgccagatgccccagaccacgagagcctcaagcttctccagagagttctggatgagatcaatccccagtctgttgttacgagtgccaaacaggatgagaatatgactcgatttctgggaaagcttgcctcccaggagcacagagagcctaaaagacctgaaatcatatttttgccaagtgtggattttggtctggagataagcaaacaacgcctcctttctggaaactactccttcatcccagacgccatgactgccactgagaaaatcctcttcctctcttccattattccctttgactgcctcctcacagttcgagcacttggagggctgctgaagttcctgggtcgaagaagaatcggggttgaactggaagactataatgtcagcgtccccatcctgggctttaagaaatttatgttgactcatctggtgaacatagatcaagacacttacaggaatcctcaacagatgccactgtaagtggggagagaagctgctcaggctatggttcacacgtccgactcatgacctgggggagctcagttctcgtctggacgtcattcagttttttctgctgccccagaatctggacatggctcagatgctgcatcggctcctgggtcacatcaagaacgtgcctctgattctgaaacgcatgaagttgtcccacaccaaatcagcgactggcagttctctacaagactgtgtacagtgccctgggcctgagggatgcctgccgctccctgccgcagtccatccagctctttcgggacattgcccaagagttctctgatgacctgcaccatatcgccagcctcattgggaaagtagtggactttgagggcagccttgctgaaaatcgcttcacagtcctccccaacatagatcctgaaattgatgagaaaaagcgaagactgatgggacttcccagtttccttactgaggttgcccgcaaggagctggagaatctggactcccgtattccttcatgcagtgtcatctacatccctctgattggcttccttctttctattccccgcctgccttccatggtagaggccagtgactttgagattaatggactggacttcatgtttctctcagaggagaagctgcactatcgtagtgcccgaaccaaggagctggatgcattgctgggggacctgcactgcgagatccgggaccaggagacgctgctgatgtaccagctacagtgccaggtgctggcacgagcagctgtcttaacccgagtattggaccttgcctcccgcctggacgtcctgctggctcttgccagtgctgcccgggactatggctactcaaggccgcgttactcccctcaagt

SEQ ID NO: 249443 - DNA, 1100 bp, Homo Sapiens
ttgggcttcggtttccctcggcccagcacgccccggccccgccccagccctcctgatccctcgcagcccggctccggccgcccgcctctgccgccgcaatgatgatgatggcgctgagcaagaccttcgggcagaagcccgtgaagttccagctggaggacgacggcgagttctacatgatcggctccgaggtgggaaactacctccgtatgttccgaggttctctgtacaagagatacccctcactctggaggcgactagccactgtggaagagaggaagaaaatagttgcatcgtcacatggtaaaaaaacaaaacctaacactaaggatcacggatacacgactctagccaccagtgtgaccctgttaaaagcctcggaagtggaagagattctggatggcaacgatgagaagtacaaggctgtgtccatcagcacagagccccccacctacctcagggaacagaaggccaagaggaacagccagtgggtacccaccctgcccaacagctcccaccacttagatgccgtgccatgctccacaaccatcaacaggaaccgcatgggccgagacaagaagagaaccttccccctttgctttgatgaccatgacccagctgtgatccatgagaacgcatctcagcccgaggtgctggtccccatccggctggacatggagatcgatgggcagaagctgcgagacgccttcacctggaacatgaatgagaagttgatgacgcctgagatgttttcagaaatcctctgtgacgatctggatttgaacccgctgacgtttgtgccagccatcgcctctgccatcagacagcagatcgagtcctaccccacggacagcatcctggaggaccagtcagaccagcgcgtcatcatcaagctgaacatccatgtgggaaacatttccctggtggaccagtttgagtgggacatgtcagagaaggagaactcaccagagaagtttgccctgaagctgtgctcggagctggggttgggcggggagtttgtcaccaccatcgcatacagcatccggggacagctgagctggcatcagaagacctacgccttcagcgagaaccctctgccc

SEQ ID NO: 249444 - DNA, 800 bp, Homo Sapiens
actctctagaatatatttattgacacatttttaattttcttttccatattctgagaaataaacaaaatacacaaaatacagtaaaatgcactttttcccatttcaaataaatatactatactcttgtaaaaaaatttaataatctgtgtaatttgccacagtatattaatcagtgaaataaaacaaagaatctctaaattgtcacatgttttaatgattctcacaagcatttttctggagaaaaagaacactattttctgtagaatttatattgacttggagactattgcttcttgtttggagaaggcaaagataagctttttaaaaagtgtttagtgtcaaaaagagtcttcatttgggagaaaaacagcatacaagtcctttctgaatcaactaagttatgtgcaaattttcttattaatacttcctaaagaccagactacattctgaataatgattcctatgtatcacactggtaattttcaaaattagtggttaagtatttaaataacagttatatgtgtaatataagcccaggacagaatagtaaagctttattaacaggaaaggctaaaaataatgatgctatacaggacaaattttccttttcataatggttattcttaacattatcagaactgaaatcgactgaattatacagatttaacacagacttatatacaaaaaatccctgatcagcttaagacaatgtgttagcttgctcttttaagtggtaagaatattttagtaaccagcggaaaatcacccaacttttttgtacaaagttggcccttttaaag

SEQ ID NO: 249445 - DNA, 982 bp, Homo Sapiens
  misc_feature (280)..(321): n is a, c, g, or t
ttggatgtagtaattactgtaaaatcttttaattctctcacttattggcaggaaacctaaaaacccttttattatcataatattttatatatgtgcattcataccatttcttctgccatacagtgagcacaacttaaacgtctactgagtgtcttattcttagtctgatgataaagagcctcatggttctcattctgaagataggtactcattgtaccatattgtaatccatttttagtaaagcataagctttggaattcaagtacagttgtatcatttnnnnnnnnnnnnnnnnnnnnnnnnnnnnnnnnnnnnnnnnnncacgtatattcagctgtaactggaacctatatactcatctggcagagttgttttgaaaatgataaatcgtgtatgtaaagtacctaccacagcacctagtaggctctcaagaaatagaccttttgtcatcattattgggcatgataaattgaactctgccttgtattgtactctaaaatatcctactttaaatacattcagacagttaatttagaattccagttaattgggtgctggtgaaataagttgtattgtgtttcataaaatcatgactagagttaatgcaagtctatatatcactatagaacattaactaaattatttgaaaacatttcagtgtactgcccacaactcttattttgaaaagtttttgaaatccttaatatcacagccatacttaatagttgatttctgtttgtgtagtcgtcatccctatggtctttcagaacttgggcagttaatcctcctgggttttgactagttcagtgttttaacccctaagttagctttgggagctaggacacaagttcacaagtgtggacaggaacattaaactttctgccagccgaaatctgtcagagcttgggttcagattttttttactctaaaaagcgctttggttcaaagcagattcgttaagagtgtgggggagttttgtttt

SEQ ID NO: 249446 - DNA, 1488 bp, Homo Sapiens
ttggatcacacagccttcataagaataaagactaatgcttcagacagcacagagtttatcattcttcctgttgaggttgaagttacaacagctcctggaatttattcctcaactgaaatgttagattttggtacactaagaacacaagatctaccaaaagttttaaaccttcatttattaaattcaggaacaaaagatgtaccaataacaagtgttcgacctacaccacaaaatgatgctataacggtacactttaaaccaattacattaaaagcatcagaaagtaaatacaccaaggttgcaagcattagttttgatgcatcgaaggcaaaaaagccatctcagttttctgggaaaataacagttaaagcaaaggaaaagagttattctaaacttgaaataccatatcaagcagaagttttagatggttatttgggatttgatcatgctgcaacattatttcacatccgagacagccctgctgatcctgtggaaaggccaatttaccttactaacactttcagttttgcgatcctcattcacgatgtgttgctaccagaagaagccaaaacaatgtttaaagttcacaacttcagcaaaccagtcttaattcttcctaatgaatcaggatacatttttaccctgctttttatgccttccacatcatccatgcacattgataacaacattttacttattaccaatgcttctaaatttcatttacccgtgcgggtatacacaggctttttagattactttgtattgccccccaaaatagaggaacgtttcatagattttggagtactgagtgctacagaagcaagtaatattttatttgcaattataaacagcaatccaattgagttggctataaaaagttggcatatcataggagacggtttatcaatagaacttgtagctgtggaaagaggcaatagaactacaataatttcaagcctgccagagtttgaaaaatcctctttatcagatcaatcatcggtaacattagcttcaggctattttgcagtcttcagagtcaaacttactgcaaaaaaattagaggggattcatgatggagccatccagatcacaacagactatgagatcctgacaatccctgtgaaggctgtgattgcagtaggctcactgacctgcttccctaagcacgtggttcttccaccttcctttccagggaaaatagttcatcaaagtttaaatattatgaattccttctcacagaaggtaaaaatacagcaaatacgatctttgtcagaagatgtgcgattttactataaacgattacggggcaataaggaagacttggagccaggaaaaaaatcaaagattgcaaacatttattttgatcctggactacagtgtggggatcattgctatgttggcttgccttttctatccaaatctgaacccaaagtgcagcctggtgtagccatgcagaagatatgtgggatgctgactgggatttgcatc

SEQ ID NO: 249447 - DNA, 1023 bp, Homo Sapiens
  misc_feature (453)..(461): n is a, c, g, or t
ttagtgaaactatttttatttcacagacttagagtctctcgaacttggtatgcaactctgggcaaaagcatttgaatgtgtgtttttcattttgattaagaaatgagagcactttgaagatacatccatgatgctggctacccgtaaagaaaataaactgagtgtcaatggaacagacagagaatcagagaacaaaagaaagtcaagagatttacccaaggtcagtgagcacatttgttatagagctgagaatagatgtcacctacctccttggccagtgtcctgtacaacagatcctctggtcaatatttctttttgtgccatgaagggcagtagacaaacctctttagtataacaaatgtgagtcctggtgccttggctttttacttgaatttacttctatccttaaaatcttctcttcagtgcattctcaggagtactgtagttttaagnnnnnnnnnctatttaaacatatatatttaagtactacatgtgtaaatatatagtttaagaaaattgagacatatcattttacagattagttacatgtattaatatgaaaattcatgcaatttctatcctatcttcaaggtacagttcaaatactgaataatttttgttattcttactccaacataccaaaattaattattctgtctcctataatcctatatttattattatacttattttaattacctgtgcctttatctggtttctttagatgcagataatttttcttatccctattgggatccctcatccttagtagtttctggcatgtagtatgaatttaataaatgctaagagaaaatatgtttatatacaccttcaatgatttttccccctagattccattgtactttcaagaagcatcatagtagatatgatgcagacccaacaatgtaacccataataaataccacacttagggctttccagtgcttactttatacggcattttgctcttgcaactgtgcagcaaggaaagaaaaatctcctgcctctgccagtggtagccaa

SEQ ID NO: 249448 - DNA, 1683 bp, Homo Sapiens
  misc_feature (132)..(143): n is a, c, g, or t
  misc_feature (500)..(518): n is a, c, g, or t
  misc_feature (1041)..(1052): n is a, c, g, or t
ttggagacagggctctgtatcagtgagacgatgagaaaagtcccaggctaatggcagaaatttgcactttgaacatgtgtgtttttgtgttgtggaacctgagattccttatttattaacaggaagtctgannnnnnnnnnnnggagtctttgttgctatattttgtggggctgggagagagagattagattattttgacatgggatcccttccataacaggtactttgaaggcaagacatagggttgaagaagcacagccagcctctgaaatcatagctctccagtggcttttaaagaaagctggtcctcagcactaacaaaatcactacaatagcctagtgcttttttggaagcctttttagggaagaatgttaggttcatggtaactagtatgctctttgagatttttacagtgttgaaacttaagaattttgagagggtgaggagggttgttcagaatctaaattacagatagatgattgtttcttgtgaatttgnnnnnnnnnnnnnnnnnnngtccctaccatttccttacatttcccttggggcccatctctggctccttgctttttgtttcttgctttgctttatcagttcattccagctccctgttagtgaaggacactgctgttagtgaaggaacaaagtctatgagtcctaaaattttaagtcaaagaaaactgctctgtttcccctttagtaacacttctgaagaggaaaaacttcaatagccaaagttaataatcctatataataattgctttggctttcacctaaaattctgggcatcacaatttccttggggatagaggttgtgttggggaatagattgcttattgctgttcactgggagagaaaaggtagtgtttttgtacaaggtcataccgccagaagccccaaatcctattttggctcatcttcaggtaaagagtaattcctatcctgtgtgcctcagaagctagaatcgaaggcttaccctattcattgtttattgtcagaaatgcatgatggctcttggaaagaatgacgttttgctggnnnnnnnnnnnngaacagtttgtgtttcacaaacatggcttatcaattttttcaaagaattcttttttcccaaaaagaggagtaacaaaatgtcatttctgaaagaggcttactttataccaactagtgtcagcatttgggatgccagggaacagagagtgagacacctacaatcaccagtctcaaatgcgctattgtttcttttcagagtgttgcagatttgccatttctccataatatggggatagaaaatggaataaagatagaagggatgtagaatatgctttcctgccaacatggtttggagtcgactttggtatattgactagatttgaaaatacaagattgattagatgaatctacaaaaaagttgtcctcctctcaggtcccttttacactttttgactaactagcatctatattccacacttagcttttttgtcacacttatcctttgtctccgtaaatttcatttgcagtggttagtcatcagatattttagccacctacacaaaagcaaactgcatttttaaaatctttctgagatgggagaaaatgtattctcctttctataccgctctcccaacaaaaaacactagttagttctactaattagaaacttgctgtactttttcttttcttt

SEQ ID NO: 249449 - DNA, 958 bp, Homo Sapiens
  misc_feature (524)..(532): n is a, c, g, or t
tttttttgatagtacacagcaataaaaaaatattaagggggtgtgtgtatggttgctgtgtctgaatatgcaagtatagagagaagaatctagaaagtgttgaacaaatatatttcattatatttttaaaattcttcgagattaaaaaatgacttgtatctcacaaatatacatacataacatgtaaaatctaagtgtattaaaattgttgaaagaaaatattttctttgtatttagtacagatcattattaattcattcagaatagatcattactaatactttatctggaccaccattttttctaagacttattgaaaaggctatgaaatataattaaaacaaatcactatctagttggattcctttttcatacttatgcatgacaaattttgaatctcaatgcagaaaagatagactgtataaatcccaactactttgaaacatgctagttttatggtaaaggagagttgaacactatcactgtgttgtgttttgctacacttaaatatggttcatatgttnnnnnnnnncaagtacatatgtgtatacatatgtgtaagcaattttcccttaaaagctgtaactatgtattttaatcattttctattattacttatatcaagtatatagtcctattgcatttggttttggtcaacattttagcattttgtttgtaaaaatattgataagctactttgcgctagccttttctttgcctactgactacaagagaagtttacccatttatttacaggatcaacaagggcaatccacttcatgctatagcactgacccttcacaaagatcttgtaaatgagtagcctattacaatatgtacaagtgacctttaattgcaccaagaagctttttgttaccatctttttcaatgctacaccatagctacagtacaagctgggaaaatatttcttatggatccggcagaaatatcaacccaa

SEQ ID NO: 249450 - DNA, 982 bp, Homo Sapiens
ttgggttttcaaacagggctaatcataaataatagaacatattttacaatagttgaaggtaacaaaaagtaagtgccatttaaaaaattgtattagattgtttaaaaatgttgtgggtacatagtatgtgttgggggtacatcgtatgtgttgtgggtacatagtatgtggggtccatgagatgttttgatacaggcatgcaatgtgaaataagcatattatggggaatggggtattccttccctcaagtatttatcttttaagttataaaaaattcaattacagtcttagttatgtcaaaatgtacaattaaattattattgaatatagtcaccctattgtgctatcaaatagtaggtcttattaactctctatttttatatccattagccatccccaccttcccacaaaccgcccctgccaactacctttcccagcctctgataaccatccttatactctctatgtccgtgagtttgttttgattttagattccacaaattagtgagaacatgtgacatttgtctttctgtgcctggcttatttcacttaacataatgatccataatgttccatcaatgttactgacagtgactggatcttattctttgttatggctgaatagtcagtcctccgttgtttatatgtaccacattttctttatccattcatctgttgatggacacttaggtttcttccaaatcttggctaatgtgaatagtgctgcaataaacatgggagtgcaggtatctctttagtattattgatttcctttctttggggtatgtacctaggagtgggattgccgaattataagatagctctagttttagctttttgaggaacctccaaactgttcttcacagtggttatactaatttacattcccatctacagtgtacaagggttcccttttctccacattctcgccagctagctccttggcagtgtgttaatgtgttaacctgcctactttagagtt

SEQ ID NO: 249451 - DNA, 1135 bp, Homo Sapiens
ttttttgctggtaattaagtcccagtcatcaacaagccacggttttagctcttcaggaatctttactttaacttcaactctgttcatgaatgtttcctcctaaacagaaacaggagggagtattaaaaactaacctttcttgctaaataccaaacatggaggggagctgacttttagaggcactagggataaatcttaaagtagccaagcatacagctgtactgtcattttttaaaatcattaataaaaccgaccatacgcggttcgctgttgggagaaaagaatctgacctgaactatagtctatttagtgcattttcttgtaaaggtaaaaattcttcagtaaggttcctcttgttcaggaaatgaaacaccctgacttgatacattttaacttagtattttcttatttaccatggatatcaaaactattccaaacacaaccatcttaaaggtacatctttaactcctaaaaataaatacgtaacaccaaagaaatagtcttgtaggtgaacatgaagcttacacaacaaatgatcaattgggtaggtaaatctggagctacaggtgaaataaagatatacagaaatttatcctttacccccaaaagagaaaatttttaatttcaggtattaaccatgtaagcaaatcttgtagataatcaaagctcccatggttatgtcatgtaactgagactaaaaatcctaacatgctattcataaacacaagaaaaactcacattttcaacagtaggatctacccgggcccttttcttccgaggaggctgaggggtctcactggtactgccaccatctccatttccaggtgttttctgtttgttctttttcgttttcacttcaacatttttctgttgcagaccagatgtcttctttcctggggcagcccctctcatcttcccctctgcatactgctcctgattggctttttgaagttctcgctgtttctgcaaattggtgtccacgtatttgagtactctgctctccggaacccattcatcccaatttttattccaaccactgtaatgtatgaagtatttcacttgtttgtcctttatggcaacctttacacactttgcttcataaagaagaggcccatgaaagcacagcactcgccaa

SEQ ID NO: 249452 - DNA, 847 bp, Homo Sapiens
  misc_feature (548)..(565): n is a, c, g, or t
gtaccccaaattatatgatatcaaataatttctatttaaccactcataaaaatttaggatcaaataattgcattcttgaaacaattttttaatcatttattttcaacacgtgtactataaagaacctaagaaatcagacaattttaataacccataaacatgttgaatccatttgcagatttaaattttgtaaaaatagctgtcactgcctccatatatcaagtgtactatgtttataatcacatttatgctaccgatactcctcagaaaaaaacagattctgcttggttctagcttcagtattatgaactccaataatgctttgaggacctccaaaggaaaaaaacagattctactaggttctagctgaaatattatcaactccaaattgaagctgaagtattatcaactccaaataatgcttcgaggacctccaaaaaaaagagattctgcttggttgtagctgaagtattatcaactccaaataatgcttggaggacctccacaggtaaactactaatccctttggccatttattgagacagacnnnnnnnnnnnnnnnnnnttttgaagcaacaatgtaccattagtaaagttgctgtgcagaattacctcagtcctattctaagcttacagttcagttgattttattgtcctcacctaagtatatacaattcacatatgggagaaaaacactaaatcaagatggttattttcactgttttgcttaagattcatatttaaatataaatcaagaagttaatgccacagtttgagagatacttatattagaaattttaaatgttaaatacctaattgtaaatatggtgtatgtactgtttcccaa

SEQ ID NO: 249453 - DNA, 1061 bp, Homo Sapiens
  misc_feature (265)..(278): n is a, c, g, or t
  misc_feature (576)..(591): n is a, c, g, or t
ccattattgatatttctcaaaaattttgtttcactaaatattctcaacatcaaatgagattttctattctccctccaaatgttttaacacctggaccattcatccaaaatgatgcctctgagttctgcgtcagtcacccttcttggagtcaacccaacccatggtgttgaccaagccagtataaattatgcaaaaggtttcaagtctttaatttctttcagaaaatcccttttctttgacactactagaaacatgcctatgtttnnnnnnnnnnnnnntaggacccatgtctggctcccctggcagcagcaactttagtggcaggatctcacatgtcgggtagccaacaaggaccctggtcaatgtttggaactgacctcaccttctgcatccatttttatcgactacagaactttacttcctgtgtgaaatgcaggcttatctctgtctctctggaaacttgacgagcacaagcactctggcttccttcacccctaacatttccattgtcccggttgatgcttccttgctgttaccctttactacctcacaccagatcgactaagcagtttatcnnnnnnnnnnnnnnnncctgagtttggcatctcaggtgccactataggaatagctggcataattattgcctcctcaacttaccaaaacctgtctctggaactgactcacgaaaataaaaactactgctcagactcttacagagtgacaccaacaagttgattatctcgtggctgtagtttgaaattgtagaggtcttgctgcagctcaggaaagaatctgccttatgctaggagaaaaatgctgtttctgggttaacagattagggaaagtccaggaccatgttagaggttttacaaaccaggcctgtcaccatcagaaacatgccactgaaagctagttctcttggggtgccacttggttccaattctcatgacatcccactttttggggatccctagcctttgtcttcctttctctcttttgtgagccttgctcactaaatctagtaaccaggttcgtttcctctcacctagaaactctcccaa

SEQ ID NO: 249454 - DNA, 815 bp, Homo Sapiens
  misc_feature (163)..(210): n is a, c, g, or t
ttgggcatttttaattaaggattcccagcagctctttgggatttttacagcttccactcatgtgttgacacccgcgtccaggagaaactcgctccaagtgcatctagcgcctgggacctgagacggcgttggcctttcgtgcatgcaaatccagggatttagnnnnnnnnnnnnnnnnnnnnnnnnnnnnnnnnnnnnnnnnnnnnnnnngcagggagtaagaagggagctgggggtatcaacaagcctgcctttcggatcctgcgggaaaagcccatgtagttaagcgctttggtttaaaaaaaaggcaaggtaaaggcagggctttccagacacatttaggggttcgcgcgagcgctttgtgctcatggaccagccgcacaacttttgaaggctcgccggcccatgtggggtctttctggcggcgcgccgcctgcagcccccctaaagcgcgggggctggagttgttaagcagccccgccgctgtggtccatgtagccgctggccgcgcgcggactgcggctcggcgtgcgcgtgttcccggccgtcttgcctcggcgagctccctcatgttgtcgccctgcggcgccccttcgacgacaggctgtgcgcggtctgcacggcgctccgcggcggagcttcatgtggggctgcgacccgcgcagccggcgcgtcgctgagggaacggactcccggtaaccggagaccgcctcccccccacccctggcgccaaaggatatcgtatgttcaggtccaaacgctcggggctggtgcggcgactttggcgaagtcgtgtggtccccgaccgggaggaa

SEQ ID NO: 249455 - DNA, 997 bp, Homo Sapiens
ttggctcttgtgcggtgtggagctgcgcgccccccgccgaggcgggcccaggtacaggctgccggtgagggcgggcccggggcgtgcggctgccgcggcgggaccaggacgagggctggcctctgcgcgtgtctgccgagtccccggctccgggcgtccgagccggggcggcctcggcaggtgccttctccaagagaggcagcagggagggagaaatggcaaggaggttgctgccagcccatgtacaggagtccgtgacgttcagggatgtggccgtgttcttcagccaggacgagtggttgcacctggactctgcccagagagccttgtaccgggaggtgatgctggagaactacagcatcctggtctcactggggattctcttttccaagccaaaggtcatctcccagttagagcaaggagaagacccctggatggtggagagtggagttccccaaggcgcacatctcggatgggaaagcttgtttggaaccatagtttctaaagaagaaaatcaggaagtcatgaaaaaactcataattgatggcgcatttgacttcaagttggagaagacctacataaatgaagataagttagagaagcaacaaggcaaaaagaacagacttttcagtaaagtgttagttaccatcaaaaaagtctacatgaaggagaggagctttaaaggtgttgactttgggaaaaatcttggtctaaaatcatcgcttattagaaaaccgagaatagtttccagaggaaaggagaccccgttcacagcagtattcagttctctttaaacaactgggggtcaacacagtgcgtaaatgttataaatgtaatatctgtgggaaaatccttcctccacagttcctctctgagtaaacaccagagaatccacactggagagaagctctataaatgtaagaatgtagaaagccttcagccaaagctcatccctaactcagcacttgagggttcatacaggagagaaaccttatat

SEQ ID NO: 249456 - DNA, 935 bp, Homo Sapiens
  misc_feature (259)..(299): n is a, c, g, or t
ttggggagcattgatgactgggttttcatgtgcttctttgtgggaaatgacttcctccctcatttgccatcgttagagattagggaaaatgcaattgaccgtttggttaacatatacaaaaatgtggtacacaaaactgggggttaccttacagaaagtggttatgtcaatctgcaaagagtacagatgatcatgttagcagttggtgaagttgaggatagcatttttaaaaagagaaaggatgatgaggacagttttnnnnnnnnnnnnnnnnnnnnnnnnnnnnnnnnnnnnnnnnntcaaccagctttcactcctagtggaatattaactcctcatgccttgggttcaagaaattcaccaggttctcaagtagccagtaatccgagacaagcagcctatgaaatgaggatgcagaataactctagtccttcgatatctcctaatacgagtttcacatctgatggctccccgtctccattaggaggaattaagcgaaaagcagaagacagtgacagtgaacctgagccagaggataatgtcaggttatgggaagctggctggaagcagcggtactacaagaacaaatttgatgtggatgcagctgatgagaaattccgtcggaaagttgtgcagtcgtacgttgaaggactttgctgggttcttagatattattaccagggctgtgcttcctggaagtggtattatccatttcattatgcaccatttgcttcagactttgaaggcattgcagacatgccatctgattttgagaagggtacgaaaccgtttaaaccactagaacaacttatgggggtatttccagctgcaagtggtaattttctacctccatcatggcggaagctcatgagtgatcctgattctagtataattgacttctatcctgaagattttgctattgatttgaatgggaa

SEQ ID NO: 249457 - DNA, 1199 bp, Homo Sapiens
  misc_feature (1051)..(1074): n is a, c, g, or t
ttggctcatcgataagttagaagaaaggtttcgattcaacaggcgcgacctgatagggtttgagttcacagtgctcgtggccttggagctggccctgtatcttcccgagaaccaagtgttacctcattacaggcgcctcacccagcagttctagcagaggccccacagaaggctcagggcaccgaggtgcacttgccggcctgggaggtgtcccactgaagccccgcgcctcctcctgccagcacccccagcacctgctagcaggaggcacctggcctccgctggtgcagctttcctttttgcctctttgccatttccttggaaagagacgtcgctttcatccccaagtgcaccgtccctccgaggggatttctgagaattctcctgcatttttacataaactaaatgtgaggtttgttactggtatttttttcacgtgcctgagaccagcctggtaccaggaccttttgttcacagcgtgcagcagcgagccggctgcagtgtgtctcccctggcctcgccttctgcaaaccaccgcagccaccacagcgtcagggtggagatctgggtttctagacctcactgaacacactggaatggctgagtttaacttatttaggcattcatcttggagatgtggtttttcgggttccccagcagcatctcccgacaccaactgtgccgctggctccctgccacctgaagccgagctcctccagagctttctccgcccacctcactgcatcccaagtggagcttttggtgtccagttaggccagcgggagcagtctcctgatttattttgatctcattcttggactcttggacctctctgttcttccaggcatcgtgtcactgtgaaatccttacgcccctgtgtcctacagaccgactggcacaacagacagctgcccatcccatgccatgctctaccctctgcctctcaccagggagacactctgggcctccaggacaattgctgcttgccggctcttatttttctaagcaatattgtgatggagaaaaataacatatttattggggatttggnnnnnnnnnnnnnnnnnnnnnnnnaagggaacaaaaaatggttaaatgagtctggctgaagttgacttgaaaacacaccttgaccctcaggcaggagggcactgaccacaccccacacaacctcaaaggtcagtgcgtcagtgcctttt

SEQ ID NO: 249458 - DNA, 779 bp, Homo Sapiens
ttggatggcctatcagcttataaaccctcacccaggacccctgacaggggccctctcctccctcctagtgatcttcggcctagccatgtgatttcccttcccctgcttaacgctcctcatactgatgatactaaccaactaaaatatgaaacttaatgatggagcgatgtgtccttaaaaattctttttttggccaattgttgaacctgtccaaatttgccttgcatacttgccacccgcagttattagtgaagaacattttttcttcacatgatttttctgacccttttaagtaaactgtgtgcccctaccccccgaaatgcctcatactggcccccctcaactttcaccccgctatttttttctctgtaatatttttattggctcataaagatgttttcatatctgaactcctaaataagtgaaattacagtagattatattaacaaaatactttttaggtagccatgcttgagactttttaaaaatataactttttccttaaagttttcagctatagcaaaaggtagttatgtatgccagacctaatatgagctgccaccaacacccctagaactttcagccatggtgtcttcagaattgtagcgcatttctgaatctagcaaatcctccttttacccgttgaatgttttgaatgccctgactctaccagcgcccataaatgatctctagaaggactgtttttaccaatctgtttttcaactttgaagctaaaaaccctgatatggtaatattatggtgcatagcagaggtctcgg

SEQ ID NO: 249459 - DNA, 890 bp, Homo Sapiens
gaggcaactaatatttttccctatttaaccagtgaagggaagtgagattcagaaatggtttagtggctcgctacgggtcacacacctgcagttgtaacaatactgaattagaaatcagtctttatctgctaggtatcatccttgaggaagaaaatatcttgtcgtacctgtttgcactgtgtccatataagcagaattggcccatacataagaacttttgtgtccagatttatttgtgagtcctacagtccatgcatgatgggccatcagtgacccaatatggcatgagatcgaacttgattgtcctcttggatgtctaattcataggtgaggagcatgttttcactcccttccttagttcccataccagttttcccttaatatcataaggcttctgttaatgtcagatttatatttaaaaagagaccaacttgcttattttgttcttaaaaccttctctgataatttccagatttttattctgccttacggctgtaagaacacattgaccagtggctacagaaaattctgggtttcttttccaagttgtaaatggtaatctatttttatttaagttttaccttttatacgtctttgggtaatggcttttatgaaacatatttctactctttgaagcagggttgtttatggtcccctaacaatggttcttataaggtttataggatagtccctggttctaatagtctagagtatgacttctctttaggtagtttctataggctcatatttccataggctttaacacatactttgggggcacttaattgttaagggtgccagcttcctgggtttgaagtctggctcccttacttgctagctacaaaatactaggcaaatttcctccaacttttttgtacaaagttggctct

SEQ ID NO: 249460 - DNA, 859 bp, Homo Sapiens
  misc_feature (674)..(683): n is a, c, g, or t
  misc_feature (791)..(812): n is a, c, g, or t
ctaatagaaaactttgtacaaaaaagttggtgggactttgctacagggcacaaatgatccaaatcaagaaggccacacacaacagacctaaaggaaaggataaactaaaggttgatgagctgatttcatctgctatatttcatttcaaagcagccatggaacgagactctatgtttgcatttgcctacacagacctggccaacatgtatgctgaaggaggccagtatagcaatgctgaggacattttccggaaagctcttcgtctggagaacataaccgatgatcacaaacatcagatccattaccactatggccgctttcaggaatttcaccgtaaatcagaaaatactgccatccatcattatttagaagccttaaaggtcaaagacagatcaccccttcgcaccaaactgacaagtgctctgaagaaattgtctaccaagagactttgtcacaatgctttagatgtgcagagtttaagtgccctagggtttgtttacaagctggaaggagaaaagaggcaagctgctgagtactatgagaaggcacaaaagatagatccagaaaatgcagaattcctgactgctctctgtgagctccgactttccatttaaatacatactctaggaaattagctctaagtttttcccttcattttgggttctcctgtttgnnnnnnnnnnattattttaatcccttgtttattatagagctaatatttattgaatagttattgtgtaccaagcattgtgctaaatactttatatgcattatgatgaatcttgtgcggnnnnnnnnnnnnnnnnnnnnnnaattaaaatactataatccattgagaatagcaatattctagctattg

SEQ ID NO: 249461 - DNA, 1214 bp, Homo Sapiens
  misc_feature (261)..(363): n is a, c, g, or t
ttggcttcattttaaatagttaacttattttctgtcatcacagaaaatagtataaatgagtttaatagaaatccacaggtgccagtaaaagattagaagattgttcagactgctaaattgcaggctatttggaggtaaagtactccttgcacagtaattccacctcttcaaagcgtccttgttcgtgagaaatatttgccagcactgcactacttagagacaatgaagtatcttgtctacagcttgtcaaaagaggtaccnnnnnnnnnnnnnnnnnnnnnnnnnnnnnnnnnnnnnnnnnnnnnnnnnnnnnnnnnnnnnnnnnnnnnnnnnnnnnnnnnnnnnnnnnnnnnnnnnnnnnnnaaaagatttttataacttaaaatgcattttcctatgctatattgtatttggtgtttcccaagcctcccctgtacaaaggctacctgttagacattttcagtcaaattttaacatagattagttagtaactatatagtctgtaactcttcagtgccttccattcctcctaggttattgttgtgggtaatccagccaataccaactgcctgactgcttccaagtcagctccatccatccccaaggagaacttcagttgcttgactcgtttggatcacaaccgagctaaagctcaaattgctcttaaacttggtgtgactgctaatgatgtaaagaatgtcattatctggggaaaccattcctcgactcagtatccagatgtcaaccatgccaaggtgaaattgcaaggaaaggaagttggtgtttatgaagctctgaaagatgacagctggctcaagggagaatttgtcacggtaagaaaaatctgtgagccttctttacactgagcgtaaagaactcttgagagactcttaggacagaaaaccttaaagagggcaggtctttcacagttgctctgatgactgcatactttcgggatcatagtaagccagtcatgatctagtgtgatctgatgtgacagcagttgagatttataccaagatccatgtctttgtctgacctatgataaactttgtatggagatacatagtttcctttttccagaagattggtaaagctgacattgggttgttgcatgattttggaggggaaacattaagctctggtcatagcttttcaccccaaggtcgacttggaaataatgaaaactttgctatcatgaccaagtaatactg

SEQ ID NO: 249462 - DNA, 1340 bp, Homo Sapiens
  misc_feature (805)..(823): n is a, c, g, or t
tacttaaaaaatattttctcccaaattattttagcatttttgactagtttaataatatgaacactgccaaaaatgggttcaaagtcgcctggagaaacagtttcttcttctggagtccatctcagcagcagcgattttctcccacattcattcccaagttaggcagatgtgtagaagtacctgggctttggcattgcccagaaggtcatcttcgtagttggggaggcagcagaagaagaaggcacagccgatcaggataatcgtggctgcccacccaaagccgtaggcccagttatagatgtaagtgacagcacggttggcatgaagggtgaaggtctgggtgtacttcacggggtaaattaccagggagatgatctggaacacagctaaagggaagaaaaaaatcccagggtatgaatgcatacatgcatgaaggaataaatacacattagcgacagattacctccttccaccaagtttctgccttgaaataagtataaaatctacctggaggcaggaggaatctggttaggcagaggccaaaaaagattcttgactactgtgtgtaagagatgcctggcactgagcagtatcacacacatatgccaaatatgtgaaaaacacacaaaaaaatcattggagatccattctatattacataagcattatatatactaaagcaaaaaagtgcaaaactgtggcatacaatagaaagcaggacagtaaagaacaacctatttttttcatctttgtgtttcctataccaaacacatattcaatatgttcagtgttagcaaaaattacnnnnnnnnnnnnnnnnnnncacacaggcatgcacacatgactcaatattgatattcaataacacatcactggaatattcattcaataagtaaatgactaaatgaaacaatgaactaatattgagaatgatcaaggggagaatccgcagagaagcctgcagaggacgcgggaatctgaagaggaaacagacgtggagggagggcagggggaagggcatggggaagtgtggtggggacagaaaaaacaaaagcagcaaatgatcacagtgcttagggaggtgtgagtgaagatgtggaaagaaacacatgaagatttctaaactctctggcataatagtcacattattacaattattaatctttgtaatagtatttaagcaatttcaaacaaaatgaacattattgagtctactttcgtggtctttttcaatggacatgcatgattttataaagctacaatgagtatatacatgtgtgttctgcatcattttaactttatatgtacattgccatgtcaaagggtctgattttagccaa

SEQ ID NO: 249463 - DNA, 1246 bp, Homo Sapiens
ttgggaaaacttaaaaatacagatagagaaaaactggagtaatttctctctacacatcagctagagtcagcagttatcagaattttgccacgtggcttcttttttatatctggaatttattttgagaatttagttcttttgagcagcccagttttcttgtcatcagatcacactgccttcagttatgctattttttaagtaggagttctttaaaaatagaactcatgagtcttagatttctaaagtgttctttcatggaatcctgctttatatcttacatactgtctcctttggaaatctggctagagatttttataacttatgcaacctggttttttagatagtgatagtggtaggctctcactttttaagtttatattttgctcaatattcacagaatcacagattctcagaatttgaagggatgcagttacttagctgacaacttcttctcataggtgaaatagaaagatttgatttgaactatttattatacctttaaacaaacctaaaccatgagagaaacattgatttagaatctgaaaaaagctatgattaatatatgttctttgtagtaacttgagaaactacaaaaaattatgaagatgaaaaattagacgtagctactaaaattacctactcagaaacaatcatttatattgtggcatatttccttctgcccgttctatatttagtaaaatgagtaccagcttattgcatattctacatgtactttatttttctacatacattttcatgttatgagcaatatattttggtgacctactgcacactgagtgtaggttctagagaccgcagagttgatgacatctaatcaaagttacctttgaaaagtgccctcttaatcatgagcacttttgtaagcttgaagttcaataattatccagttttgatctttttgcattttggatgtagccttcctttctatccctctctgaacagtcgggcaaggaaggggagagattttccccttttggcgcttatagccaagttggaggaatacaattctggtaaaatgtggctccggattatgagtatttagtttgtttgattgctttcttcccccagggactgtgatttaccctctcagcacatatccaggggtgatagtcaaaatattaacatcctcaaaatttctgaccagaagctccctgtgctgaaaatttccaaggtgggggagctttggcaagtgatatttgggcaaggttgaggtgggggcgggggg

SEQ ID NO: 249464 - DNA, 1912 bp, Homo Sapiens
  misc_feature (1463)..(1471): n is a, c, g, or t
  misc_feature (1576)..(1607): n is a, c, g, or t
aaaacagcacatctatccattcaaatcacctggcttaactgtttttgaaaaacgcagcaggtgctataccactagggatagactctagcttgctgttcataaaggattctgtaaaggaaactttgctctataataacagagagccagatattacagaaactttagattgtcttgctactcactgacccttaaatattatcctttcttttgcaactatcaattcacttaaaagttttaatcattgcataccccgtaaacttcctataaacaatatgttattgcaaaatgttttaaaagatgtgagaaagtatctgtggagtttggtatcagaaagggcagagcctttgttttatctaacgattctttcccaaactgggaagttcgggtagagacagtggcttttggtaatatttaggcagtgatttcttattcttaaaatcaacagtaatgaataaagttttgacatcagaaatgtttacaactaaagtagacattgattacattcttagtacaatacaatttctaacataactacaaatgtgtatacacttcaaatattagcaaattgcttcaaaatgaaattctaagcaagtttttggtaatttattcacagttcaggcttactcactggacttaacgacatgaggaagaaatgaccaactggctcagtaaactaaacattcatttcaaaaatcacaaaactgaaacaaagcaaagatgatcctaaaatttccacttctcaagaagtgtaatttaaacaaataccaaaagctttatttaagcaaaaacacattcaaccacagaacattcagaaagctaacaggatcatttctacattcattctgcaaacagtgtagtaagaaaggtaatttgagaatttccaaagatgttctcgctagccattatttatggtaattacataacattttgatgtcaagttattacagacttaaaagttaatatagcataattttacaatcgtactttcactatgatttttattttaaccctggatattattggtttgaagctaatattatcagtcctattggctgtcactgtcacagatctgaagatatgtttaaattcatcaagctaggaagatatcaaaatattaacaatcttcaagtatagtgagaaaaaaactgatttaagtgttagcatttttaaacttgagactctaacagtaaaaataaagtaatttgaaacctgtttccatgggtaaaacactttgcctggtattcttgtacacaaaatttactaaatatgtgaatatcataaaatgaaaatatcactcccttcaatttctttggccttcacaaattcaatgtgactatgatccttttcaataatactttcaatgacattgtgcttctttagaaaaatcacttaagttgtagcatacaatagttaacattagttcttttattgctatggtatatgctaatttttttaaaaggggnnnnnnnnncccagagaacttattaaaatgtttgttaaagcaaacatttcagttggtttcctttctttgaagaataatagaaataaatgtcagaggagtattactaaggagccnnnnnnnnnnnnnnnnnnnnnnnnnnnnnnnntcctttattactcccatcctcagaactaactcaagacaagagatctgtattcaaaaagataaaacaatctcatctcagtaactacctcctatgaaacctaagagagaaaacctgtaatagctctcttaaccaacagccccatctgcacatcaccaagcaccagttccctttgggtagcagtaatgcttgtttttcatctttgcatattaaggactgttgttaacagatttatgggtcatttgtagcttactttgcaaatacctttcacttcttatgaaacacaatatgcccccaaacatggccaa

SEQ ID NO: 249465 - DNA, 983 bp, Homo Sapiens
  misc_feature (838)..(853): n is a, c, g, or t
ttggctttgtgtccttggtttcacacagccagcctttgtcgggccgactcagatatcccatttccttgaatatctaaagacccacagaaaaccttcagaaatactacactgggtcctttagtcatgtgaatgtatctgtgttctttcggacacctagataaaacctagaagtggaaggagtatgtaaaagccaacactccaatccatgcttgaggctcagagggatcctcatgctatgggtccatatattaattcaatacatatggatatattacctactgtgtgttggactctgtgctagattctggggacacattggtaagcaggactgacaagcttcttgccctcccagagtttaccatctagcacagaagacagacattgggcaatgtagtacattatgtctgtagcatctccactgggctgcaagcctgcactgcaaagaccatgtagtttttcccatcattgttctttcagccctttgcatgctgtttgacacataacagccagccagttaatgctggtatgaagggaagggggatggacgatgagcagcaggccataggagcatgcagcagcagcaggaggacctgcagacacagtggtaatcactaaatagttgttgatttaattacatttggggagacacaaccattttcctttccagtccacagagtagtgggatcctctgataatgcctagtatagattcttcaggattttctaaaacaggtgatctttggtctatcattctctgaactcctgtcatattagtaaagaaaaagtttttgtgagagttataaaggtattcaaatcttctaaaattttccagcattaannnnnnnnnnnnnnnnctgcctgagtgttgatttataaagtggggccctatatctgggcatagttggggggagacatttttcttcacaatatagagagtttccaaaagaccacccccatgcttttttgtcacccttttctcctccc

SEQ ID NO: 249466 - DNA, 1195 bp, Homo Sapiens
  misc_feature (621)..(651): n is a, c, g, or t
  misc_feature (994)..(1003): n is a, c, g, or t
ttgggttttaaagctagagtggtctttatccacttttattaacacatctgaatgtgaaggtcaagagaggaaagtgatatgtcctaagtcagagtagagtcaacaagaaaataagacaaacagcgactgagcccctggtgtatactgggcattggccagctactggggatatggagatgaagaaaacataacccttcttcaaggagcccaacctaccaaggtagacagacatatagacaaatagatacttgcatagaaaaaaagaggaaaaggggatcagtgtgacctgtgtaactaagtaccctataaaccctcctgcaacagatcatattgccctttatagtggggatggtaatcccatctgaattccacaggtactttgcagtcataccacacccatgtgtctgtcggtcctgactgtaccatttataaacagcttcactttcagcagttctcagccctcttaagctagggtcattgtcagtagggatactgcttcataagcaccagcagaacaccaaaggagaccatatgggtgaaagcaaccagcactgccctggcgcttcataggttcttagagtttttatcttttactttcagtctaacacagcactgcctgcnnnnnnnnnnnnnnnnnnnnnnnnnnnnnnncttaccgtgttcaccaaacttgtgtccaaatagctttgggctgatgcaaaaatatctatgtggaagagaagagttgttctcatggagggccttcagatgagtgctatagactctctaggcaactccaagaggcttctcaagcagggtgggcagtgagagctgctatggaatcaatggacaaactgacagggactgctttgaaagacagtactcagttgagtatatatattctctcttaagggctaaaagtttataatcatcccttaaacactctgtgatgggatcttcaggatcatcttttgaagtaaactatattttacaatgtgatataaatcaagtgagnnnnnnnnnnaattaggaattcccgtaagtataaagccattttaagatgtacattttagagactagctattgttaagtggtctgttacatttgtgtaaaccataaagatctttccagaggaagcaagtctctcataccagaatatgaaaacactagccccaggcttgagtaacctagatcacatgaagctgacttcctctga

SEQ ID NO: 249467 - DNA, 935 bp, Homo Sapiens
aattgatgagcaatgctttcttaaaagagccaactttgtacaaaaaagttggctgcttttggtgccaatgattttcatcgcatctacattggttgatctaagtcaagagaagaagaggagctggctagtcaggaacttattcattaaccaccaaacctctacctcttctctccttgactgtcacctgtaggacagtttatcagtcaactacctttcctccagactttacttccaggctctcctcttcagtagctggatgactttagcagaaaggactggtaaatacaagccttgggtttcagaatgaattagaaacaaataactcttactgtcttccctcccagctttgtttattttgtgcttttagacttttcagtgttttctttttccagcccactgtataaacttggattgtccattcctcctgaagaaatcaagttggtatttttgatgtggaaaagggaacaaaagtggaaacatggctacttttggggagtgatattttaaaaaataagttgtctatgggcacaaagttttcttcatttgtgtagcaaacttcttgtgaatgtggattacaaaatggtataattgtgctactctcccctgggtggtttgcagccctaatgaaattatgtctaggatgattcagtctatttcccatttactagcagagtaacttgttaagatcagctggctttcttgttaaagttatttaagttttgaatgctctactacttcaagtctttaaatttcttgagactagaaataattttaaataatatgaccctttgtcttctaatgaaataaagattgaagaggttgagtcaggactgagctggtgaagaaatcttgtgggtattctggaaatttgataccgagagaacttggtgagctatgaattactctcagtctcctttttacagggttgttgtgat

SEQ ID NO: 249468 - DNA, 930 bp, Homo Sapiens
  misc_feature (91)..(100): n is a, c, g, or t
ctgaataatctgaatttttcattatgtaaaaatgaaagctgataacagctaagtaagcttttaaaatgctgttactacttctcaaccaggnnnnnnnnnnttcaatacaaataatgacatggaatcacagcagtctttgtacaaaatatagaattcatttctctgctttcaacttaggaggctcaattcattatatgattgcataaaatccttaagataaggaagggaaagtacttctgccttaataaatagtgcttatcactcttgttatgggatcaatgaggaagtaaacttgactttgaagaagaatcatgaaagttaaattcagtctcctgctggactatttaaatacttgttaatatacttgacaggggcaatatactgttaggatgaaaaattctcaaatcagatggcagacactcatttaccgtgcaaccttatacatgttaaccactataggccacagtttcctcaattcaaaattccagataattatctcttccacctgtaagattgttatttgggttagaagagttaatgtaggtaaaacattacatgttaaataaatttttactattattattgtctaacagttagattgagaaaataatctttttttaaacaattttaaccttaaaacacaatggtaatacgatttttatgatttcattcttattattagccaatgaactgtttcttctgaaacccaggatcaaaccagagacctttagatcttcagtctaatgctctcccagctgagctattttggctactcttaaatgtttcttctttacaaacagtatgttttctattttaagaggaactgtagtgccattaattattaaaactatcataattacatatgaaaagataacttactttataaaatgtagaagaagatcagtcacgaatttagcagatttcacccaa

SEQ ID NO: 249469 - DNA, 965 bp, Homo Sapiens
  misc_feature (455)..(467): n is a, c, g, or t
tttgtacaaaaaagttggcatggacctcctgaatcctcacagaaaaagcgaagtagagaggccagcaagtattcctctgtcctctggctatagtacagcatcatcagattcaactcccagagcctctaccgttaattactgtggtttgaatgagatttcagaggaaacaacaatccagaaaatggaaaggatgaaaaaaatgtttgaagaaactgcagagttactgaaatgtccaaatcactacttgtaggattttctacatgaacttttttctaggactttggttactatacatattgtatattttaagaattctttatacaattttaatatactgcaatactgcagtttttgacaatttggattccatttggtatatgaatttttgcattcattattgaataactcttttaatatttttgagcaatgattatactgctttaccttgtgtcacnnnnnnnnnnnnnaggaaaaactcatgttccagtatatttctcttacagagtgaagtcattacagcactgtatttctgtgttgacatttgttggcagtgtgctaagtaatgttttttaaagcacaggcttgaggactatggtttacatcctgttggaaacattccaaatgggacttgtgtattatacccaggaggctctcatatataccatcttggcatctgtactgatgaataagttataatgaacagttaaaaatgctcattgaaaattaaataaaacaaaaaggcagttatttcatgcttggtcaaaaacatcaatacctttccaattaacactgagaaattaaggttaagattctccttttgtactgggaaacaggctggaggactatggtcctcaagtttagaccaagaggactatggtctcaaggttcaccatgagaaatgtgttgaacattttagtatgctctattgtataatttttttggagggggggatggagtttcgctgt

SEQ ID NO: 249470 - DNA, 953 bp, Homo Sapiens
cccttctaatagggcccactttgtacaaaaaagttggcttttataggcactttgatatctttgctaaagtcagtgatgtgaaaagacttgaaatggatgatattgctgataggatgaggatggatgctggagaagtgactttagtgaaccacaactccgtattcaaaacccacctcctgccacaaacaggttttccagaggaccagctttcgctttctgaccagcagattttatcttccaggcaaggacatttggaccgatcttttacatgttccacaagaagtgcagcttataatccaagctattactcagataatccttcctcagacagttttcttggctcaggcgatttaagaacctttggccagagtgcaaatggccaatggagaaattctaccccatcgtcaagctcatctttacaaaaatcaagaaacagccgaagtctttacctcgaaacccgaaagacctcaagtggattatcaaacagttttgcgggaaagtcaaaccatcactgccatgtatctgcatatgaaaaatcttttcctattaaacctgttccaagtccatcttggagtggttcatgtcgtcgaagtcttttgagccccaagaaaactcagaggcgacatgttagtacagcagaagagacagttcaagaagaagaaagagagatttacagacagctgctacagatggtcacagggaaacagtttactatagccaaacccaccacacattttcctttacacctgtctcgatgtcttagttccagtaaaaatactttgaaagactcactgtttaaaaatggaaactcttgtgcatctcagatcattggctctgatacttcatcatctggatctgccagcattttaactaaccaggaacagctgtcccacagtgtatattccctatcttcttataccccagatgttgcatttggatccaaagatttctgg

SEQ ID NO: 249471 - DNA, 1339 bp, Homo Sapiens
  misc_feature (610)..(628): n is a, c, g, or t
ttggcaaagtttcttggtgctagttctaaagtggttgaaaattctgcaggtgactggtcagagttgaatcagaactcctgtggttgggttgtagcatagtggcaaatttccaaggtgtgcaaagacaattttcctctcatccctggggccactggagccaccagctggctattggcaatcttgttcttttactttgggtgtattgtgcaaatattttctatatgtgccatgatcggaaaaatcttgggaaacttggcttagcaaatttaaatttcagggccttttaagatgggaactcagtaaagtttccttgatagaaatttgcaataagatttactaggaatgcttcaagtattagctctgtgctgtaatttttattaaaaggattgtggtgtctattaggatgtggaagctggattctttggccttgcaaagtgtgttataaaagggaagaactcctcttcttaaaccacaatagagagctatttggaatttatttttgatgctttgtaggtattcatcaatcttaggaaaactgaatcaaagtaaaaatctgtaaggctttgtagtttatggggaaaataatcactagatacataaaatatttacnnnnnnnnnnnnnnnnnnnccccccacagaacatatagaggacagggctttgctctgccttctcactttctccccactcacccccaacctccagagtgtgttttccaagtaaaattttaggccatagagaaattcgcaattgataggccaaggtgactgataaaactctagaggtcaggattggtaatagtggagcgaggaccagatggaatttttgtttaatactgtatctgaaattgaggatgggatagataggaaatgacttatcatttcatgaggagatgacttttctgtgataatgggacagagatgagcttagatgaatgaatatatattttagcacttacctttttccataaaacacaaatagacttggtgcaaaattaccagtctcactccatggtatttctgatgagatcggtaaataatagagagagacatacttctttaggagctagctgactttaacatatgctggagtacaattgacttacaactatttggcgttagaaatgatttttctagggcttggtgggggaaaaatactcgtgaaatacctgccttgacttaaacttcaacatattttaaagtcattttattatcccacaactcagaatgtcttcaattaaaggtaagaaaataaagtgatgggctacagtggcttaatcagtgttcagttaatgaagtagaagaagatacagattctaataattcacagttgtagaggttc

SEQ ID NO: 249472 - DNA, 1274 bp, Homo Sapiens
  misc_feature (570)..(589): n is a, c, g, or t
ttggcataaacttttggtaaagcatcaataattttatctttcatccacacaagcttcaccataaatttgatgtttattcttccattttagcagaattcatgttgctccaataggggctgtcttcaaactgatgttttctccttcttagtgcctcagagtagatcctgttcagatacgttataacaggttaatatgagtttattttggtgtaaaagtactttgaaattcatgcatagttttttcatcatatgcattttccatagctttgaacacccccatgtaactctccccttccacaaaccaaacaatgaaaaagcacctttgtgatggaagtttattttgcaataggaactcacagtgatctaagccctgctattcatgaatataattcattactggagtccaagttgctttttggtttttgaagttctcttcttcccttgcaggtatagaacaagatgcagtgaatacttttaccaaatatatatctccagatgctgctaaaccaataccaattacagaagcaatgagaaatgacatcataggtaagcagtgcttgaaactatggcnnnnnnnnnnnnnnnnnnnntgcacagaactgacaattttcgttattgactaagataattttttcttaacatggaatttagcagttcccttcctaatttgttttctgagtattttttatatcggattatagctcactttaaaagtttctcggctgcattcggtgcgagggtctttgcctgggccagatgggctgcagtgtagcgggtgctcaggcctgcccgctgctgagcagccgggccggcgggcggctacgctaaccggcacagaccaccggatggactggccggcagccccgcaccagtgcacgaagtgggcgggacagaaacttctggggttggaagtccagtgaggctaaaagccggtaccaaagtctctaggcatcagggctgcagcccaagagtctcacgaccagtgggcaactggatggccagacaggtgtctcagtggtggcctctccgtctcagggcttcatcccacttctcagtgggcctgacgtccctgggcaccctggatgtctacctgcattagccagagccatcacatggcctgtgacttgcctttttttgccagttgattgtgccacacacagtgtcatttctgtgtcatttggcacagctggaggtgcaaaggaggagggcagcctcatgtccagtcccagtttcacgtaactttattcttctgaataaagacaatttgctaacctt

SEQ ID NO: 249473 - DNA, 968 bp, Homo Sapiens
ttgggtaaaagacacatagcaccaaacatagattctagcaatcctaaagtgaatgggctctgtatgccattatttaccacactcacttttaattcctttaacaacttaaattctagtggggtgtgttcatgattaagctgctgtggattattgtggatcaggccttatggaaataggaacagtgcaaggtcctaagggctctccagctgtggcggcagagcgtaaaattctttgtattggggtttctgtttgtgctactgaaggaggcggtacagatgtttctgcaattggagggggcggtataggccaatttttatcctctctgtcctattacttattttcaattggagctgtgggtgggacaacatattctttcagatttttagattcaggctgttgtcccgcagaataataaggagataatggtagaagtacagtacgaactaaactccaagtggagaaaactgaagaatcaactaagaatcagctaagacctttttgatgagcctgttttaatccttctcctgctttgtctcaattttctatatcaagggtgcctgcctgtgggaaccatgggttatgcgtaatgactttttgtggcttctgcagtaggttagtgtctgcgaattaacctgagctccagtttgtttctacagaactttaagcaactgcacataatgtttttcttcaacagaccaattcttccccttgttagcctgattcagaaaacttcctgttcctagtacttctttaaagcactgctcccagtacctctttagggcactgatcagtacctctttagggcactgaccttatctctgctgctggcagactcgtttcggggtccccattcgccttgtcaatttcagttcctctgctccagcggactttcttcattcatgtcctcgaagtcctgtgttcggatgccactatgcagagcacccgatcctgttgctgtttggggccaa

SEQ ID NO: 249474 - DNA, 839 bp, Homo Sapiens
tgtacccatgcaaatattaacttaaaagtagaagtcgctatattaatactaatacagtagacctcagagcaaagaattactggagcaaagagggacattacataatgattttttaaaaattaatttactatgaagacaaaatggttttacatgtgtacacaccaagagcagagccttaaaatgcataaaccaaaaccaataaagctgaaagaagaaatcaacaaatccacaattgtaagttggacttcaacactcttctcagcaattgataaaagtactagacatatttttaaaagttataataatcaaaaaatggagtgaataatataaaatcaaattaagagtgtgttttgattatgagaaatgtcatttgcagactccttcctttggcagaccttgattgggcaggtttgatgtgcctgagcttaatgcaggatgcacttggatgtggtcaagagctagtctggactttgtgtctgcagctgtggccactttgccctccttcagactctgaggccacttttgctctcagaggcacacagaagagacatcgggcgcatggtaagcactgctcagcagcctcagtggggcaccaagcacattagcaaaagcatctgtcatgaattccaggcctctgaaagtcactgaccaccataaccatcggccagatggatcccacaactggggaacacatagatgccacataattcccggccctggactgtctctctccatgaaatcaggtgataacagaaatcccaggagcttctgatcctcaagagctttttccaaaactggtctggaaagtcatccaacatctgcagccaagcctgtgccaa

SEQ ID NO: 249475 - DNA, 1280 bp, Homo Sapiens
  misc_feature (607)..(640): n is a, c, g, or t
ttgggatatctttctacaggaatattttcagacattatatagcacattactgatttaatgcttttacttttatctttcaaaacaaattcactaaaaataacacctattgattttgaagtcacttttctcaaaccttgaaaatgagctctaggatctctataaacatttctaacacttttcctgtagtttacatagacagacatctgttgttagacctgtgtgtttttaaagaatcatatgttaacaaatacccatgcaaagagcttcaaaaagtgaaaccgtgttaaaggaacacaatttttctcactcagacatatttgtttattgaattgcaaagttttattttaaatcagcatttccccaaagaatatatcatatgacgctagttccaaggggcttgactgagtggtgttttgctggggggagacaggggtttgttaatacactttactaaatactgagctgaaaaatgttaaatagatttcacgattgcctccttgaagattttaaagttcattgtggttcttcaaggcgaaatccggtgaaccattcctcacacttacctacaggactcttttctaatggagcatcttgtgaagctagtggnnnnnnnnnnnnnnnnnnnnnnnnnnnnnnnnnnaatgctttagaaaacacagctttaggatattgactttttgtttatttctattttcaaatgctgaaaagtcaagtcccagtttgaataccatagaaaagctttgatgcatttgtaaattatattgcactctttcactatatattttcaaaatcactggaatgttgttatacaagagaattataattgtgtattgtaaataacatattaaaatacatatattaatgccaatagttaaattcaacaatatgtaatctaaggtgctcggttctacatgaagtatgagttaactgctcataattaagttgccaagattctattatatatttatagacaaattaaaatgatcataattacaaatatgatttctttatcacttaagctttgggctgattaatatctgtgtgggggtcaatggaaactacattctctacatttataaacatttaatttaattatttatattttaggaaaatatatttgaataaaattaatgcattttctagagtaaattaaatgttattagcaagaaataggaaaatttgactaagataattgtgtatatgaatcatttttcccccaagttaaaatgtatcataatagagaggctctaatgaatcaatttccaatactcatttctttc

SEQ ID NO: 249476 - DNA, 1344 bp, Homo Sapiens
  misc_feature (98)..(117): n is a, c, g, or t
ttggcttttacatgcaggaggagaggtattggttctctatgaacatattttgaatataggttttattaaggatttcacaatctataaatgctactagnnnnnnnnnnnnnnnnnnnnaccatcatgagggtattggatacattgtgtctctatttaactcattatgtgttaatgaaattgttgtaaatgggaaccaaatttgtagaacttaatttctactttttagagtgcttaatttcatttttgccttactaaatagtcaaagacttataaaacatttttaacaagttagaacttttttgttattcagtcatataaaatagcagaaaactaacatcaagtgacactgcactaaatactttttttgtattttactgctatcaaatcagaatgaaatatactttaccatagatatttttcttctatttttgcgttttccaaagctatatgaaagacaaatttttaaaggtacagcgttcaaaaagtgcttaatgaactccaacagctgcctcaaataaaaatctgtatatgaatacattttccctaagcggtgatacattatccaaagatgaagagtgctcctatttttaataggtagaatgtacctttgtcagtcttgcagaaactttaatggagaagaaatggactttatttttgaaaggtggaatgaacaggcatttatattattagagaatggtagtcttattttggtggaacataatgtaacaaccttgaatttcagaggactctgagtgcttctatgtccactaccctattgttctattcttcaataatgaaaaaagaattcaacgagcgcgaccgtgattccctctactacaaatatttatgtcttgtaagttagcatttttagcacacgggagaaattttaatgtaataaaattactgtatcttttggatttaacaaatttgtatttgaaacacattctatgtctgataattcttaatggcacttttactaatttatttggggatcttgggtacattcttaatttgtgtttattcttcacgcttgacttgcaagtgggatattcccctgccacaagtgtcaaacagtgatattcttcctgtgttgtgactggacagttttctagatctttattgggagattttcctacagcttggttgtatgtcttgagataacaccaccaaacagctctcagaaattctcttttgattgatcagtagctatgatgaattctcctccatgacactaaagattattttatatattttaagagaaataatttgctaaaattacaatgccctctatccaaggaacgccattataaataatcgttaacattctccagtattaatttttta

SEQ ID NO: 249477 - DNA, 798 bp, Homo Sapiens
ttgggtgaaacccagtagtgctgtcaaaggatggaaccaatttcttcatcagttatctcatgatatgcccgagctgtcaaccccacatcacacttcaggtaataaatgtaagagaaggaattgcattccgtcctgcttcccagacatttactgtgcacaaaggtataagtagcaaaaaattggtggattatatcctgggaacatatcatgccatcgatgaggactttaacaaagctgcctcaaatgtcaaatatgtcatgggacgtaacgatggtggatacctaatgattgattcaaaaactgctgaaatctcttttgtcaaaaatatgaaccgagattctactttcgtagttaacaaaacaatcacagctgaggttctggccatagatgaatacacgggtaaaacttctacaggcacggtatatgttagagtacccgatttcaatgacaattgtccaacagctgtcctcgaaaatgatgcagtttgcagttcttcaccttccgtggttgtctccgctagaacactgaataatagatatcactggcccctatacatttgcactggaagatcaacctgtaaagttgcctgccgtatggagtatcacaaccctcaatgctacctcggcgctcctcagagtcccaggagcagatacctcctggagtataccacatctccctggtacttacagacagtctgaacaatcggtgtgagatgcctcgcagtttgacactggaagtctgtcagtgtgacaacagggggcatctgtggaacttcttacccaaccacaagccctggga

SEQ ID NO: 249478 - DNA, 853 bp, Homo Sapiens
ttccaggtgagcgcgcgggatgcgggcgtgccgcctctgggcagcaacgtgacgctgcaggtgttcgtgctggacgagaacgacaacgcgccggcgctgttggcgcctcgggttggtggcgctgttggtgcagtgagtgagctggtgccgtggttggtgggtgcgggtcatgtggtggcgaaggtgcgcgcagtggacgctgactcgggctacaacgcgtggctttcgtatgagcttcagctgggtgctggcggcgctcgcatcccgttccgcgtggggctgtacacgggtgagatcagcacgactcgtgtcctggacgaggctgacttgtctcgctaccgccttctggtgctggtgaaggatcacggtgagccggcgttgacagccacggccactgtgtttgtgtctttggtggagagtggccaggcgcccaaggcgtcttcgcgggcgtgggtgggtgtcgcgggctcagaggctgcgctggtggatgtcaacgtgtacctgatcatcgccatctgcgcggtgtccagcctgttggtgctcacggtgctgctgtacactgcgctgcggtgctcggtgccgcccactgagggtgcgtgtgtgccgggcaagcccactctggtgtgctccagcgcgttggggagctggtcttactcgcagcagaggcggcagagggtgttctctggggagggcccccccaagacggacctcatggccttcagcccaggcctatctccaagtcttaacacgtcagaaagaaatgaacaaccagaagcaaatttggatctttctggtaatgtaagtccaactttcgagttttggctttaaatatttttcatatttaacttgccaa

SEQ ID NO: 249479 - DNA, 958 bp, Homo Sapiens
ttggattttgaaagggctgctattcagttctcaaaaaagtgtttgagaactgtttcctctgttctttcactgaccattataagtgcttccatccattttggggtagctgtagcaggtagcagcatggctgatgagactgagaatccactgagaactgtctactgaatcactgatccccctcgcaaagtggaactgtacagaaagatgacacctgcagttacgtttatgtgtgaccagtctaaactaagtttactggttggagaatatttctaaatcccttatcagaaagaagcagcttctaggtgtccccagcctctgtgggtagttgctgccaggcgaaggagtgtctgggcctgtgtaagtccttctctgttcccgacacagctcatgggccctggatggagggtcctgccattgcccctggccatgcaggctctcctcagactcagagccgggcaggaggacagcgtgctgggcagagagcttattctgtccctctgctatttctgacccacccagcacgtcctgaacagagcgcaggacatcaccctgccccacctgtgcagcgtacttctggcttttgcgcgtctgaacttccatccagaccaagaggatcagttcttcagcctggtagggcctctgggctcccactgctcgacctttatcctccccttcagctaatggctcatgaaccgtcctcccaagatcagctcgggctaggtggaggggggaggggccactatgtgtggcatgggagggcagggggaactgattggagccaggcatcctagggattactgagaacacatgaaatcctgctgtctggttgactgccctgccaggcagcgctggggggtcctgcctctggtgctccttttaatgccctgttgatgctcagaagctccagtgggccttcgtgctatgtgcaccagctcagggcagagggggagccttcttt

SEQ ID NO: 249480 - DNA, 1049 bp, Homo Sapiens
  misc_feature (576)..(639): n is a, c, g, or t
tcggaatgttttaagatggctgtagctagagttctgacttccatttggacgtgctctccttcactgtttggaggtggttttggttttggcatcttactaagaatggttgccatctcttttctctcatcgaaattcttccactgctcatatagttttaaaataaccgtgattatttccaaaatcttttccatatccacagaaagctcagcaaaccattgcctggcatctttctgctgtacaacacaggctacatgtaggcaagctaaagctatcatgaaaggaggatacagtaggcaaagatccgttctgtaggtatcattcactatcctcctatagaaatgtaaatcatattattactgaaagcagaactacctcatctgattgtatatttcctccagagagggccagatttcccatctttgcacacatttatttccttttatactactgaagcacagctataaaagtgaaaacatcaaggcaaaaggatggatacatgaatgtgacaacaaataagcacatatcaatgaataaaattacagctaaatatattttaaatttcaaaatctcataacnnnnnnnnnnnnnnnnnnnnnnnnnnnnnnnnnnnnnnnnnnnnnnnnnnnnnnnnnnnnnnnntatacagtaaatttatatgtatgttgcagactaccaaaaagtattctgattactttaaagataacttgtcttaatttttatgttaacagtctgtgttttgtataaaattaaattttaataggtatatttatggaacagataatttaggattgttttcattttggcatttacaccactatagttattaaaattcaacaagtggtattttgctcaacataaaatatcttggggcaatagtttaatgactttaaaaatacttaacttcatatttaattgtcaaccttcctatctaataacatgttacactattaataacttctgttctaattaccatgcaaggggaagcaacatgtcttcttggcccatgtcctgcacatactggagcaaaggtctataaggatgatacccaa

SEQ ID NO: 249481 - DNA, 1199 bp, Homo Sapiens
  misc_feature (434)..(485): n is a, c, g, or t
  misc_feature (698)..(698): n is a, c, g, or t
ttcacacaatttataaaatcatcatcagtggtctactcaaatcactcagtatgagactgcattccaatatccaaattgtttaaagtgcacattgctacccaaagcaattaaaacagtttcaaaacagctattttggtgtctagaaaacagtgacttaagcaaaccattgaaaatcacccctcttttttcaagcatttactctgcaggctgccatctcatcttgcctctgatccttctaagaggcgcaagttggctgcctttccagaatcctctgattttcgttgatccaaggggctggaactgagcttcctttttcatgccaagtagggtccaaacaacagagaaacataaagctcttcctttctccccaacctcaccagcccttaccatggctggcttcccagtgattcattcaaggcaacactccattaaannnnnnnnnnnnnnnnnnnnnnnnnnnnnnnnnnnnnnnnnnnnnnnnnnnngaaacaaaagatgtttgtttagttcaagtagagattactcaaccatagaatcactaaggctaattaaagtgatttagcatggctgataagaccagagatgctaaaaagcaactagtgagcagttattactctttgacttgatggaatatatttccccattagaactgacactttttggggggtctaaagaatcaattcaaaatctattcattnaaaaaaaaccctcatttcttctagttttatcataaaactaagataatcagtccatgcaaactgtgatatgatatgaaacaaaacaaaccaccaccactaaaaaacccgtaagaggggctgcatttcaaagaaagggaccaaatgtcatgcatacacagacatacaagacaacagaaacagcaggccacataatatctacattaaacactgaagcaaataaaactgtaagtggctctatcctcctttcaagacaacctagatgagtggggaaacctgctttagaaaccctgccctgctgttgttgcccaaatgaaatctgattcaaattccagaaaaatccgatttaactaataagtctgaatcagcaagaatgccaagacagagaaatctattcacatggtaaaaggagtgatgatagagaatgacacaatgtctctctgagtgtcttatctgtaaattcttatcaagaaaagtaacgctgggccaggcgcagtggctcat

SEQ ID NO: 249482 - DNA, 968 bp, Homo Sapiens
  misc_feature (213)..(228): n is a, c, g, or t
ttgggaaaacttggccccaaatttatttaggtagaaactctttaaaaatagtttcttcctattattaactgaagaatatatttaagaaagtcttcataattaaataagagtttggataccaaagggttaaaaatacacatgtatttcttttgctgaagatatcttagatgtttgctaatgttttatctttacaaatggacaatttagtaatgnnnnnnnnnnnnnnnnaatgattccatgtatttgcttatttccatctaggaatagttactaatgtatttgagatacagcataccaaattttaaagtaaccagaatcgtgagttgatggtttttagtccatactgttaaacttatgttgaaatattgacatatttaaattggcttcatgctaaaaaattaccaaaggtaatttaaaaggcagtgttttagagcagtagctcatggtcaaggtggtcacatgacaatggcttaagctcagtgtgcttctgcaccttatgttgtctatgtatttttaatccaaatgttgcctgcaaatatgtgatcccttattatttaagtttcctgtattatgaaccattgcccgttttaaatcacacagaagattctgaatctgtaaaaactacacatgtcaatgttttacagctacgtaattcgaattgacttgatttttttcaagtaatcctagaaagggggagcattccatatagaaactgctgaaactgccacaggtgcttctccgaaaaccttacagttgtggcattgaatgttcagtatcgcttcctttctgcacacgaggcatactgttgaggtatttgttgcggtgattggttttaacgctaatctaggaattcagatagagatgctttagatttgcatgctttgcttacctaatttatgatatctacctttctatttgtaaactaacaatagctaagttgagatcagaattttaacagaaatattatt

SEQ ID NO: 249483 - DNA, 1383 bp, Homo Sapiens
  misc_feature (339)..(381): n is a, c, g, or t
  misc_feature (779)..(787): n is a, c, g, or t
  misc_feature (1117)..(1229): n is a, c, g, or t
aaagaaaatgtgtttgttactcaaggtgggtccctaggatcacaccgagttcttggtaatgagatgtctcaagatggtgactaaccaggccacaaaagatcaaacaaagactaaagggttggggttttgagcaagccctcctgggagggcaggagagttgctgactgaattcagtgacatgtccagtgattcaatcttgtcaacataatgaatccccaacaaaaatcatcgacatctggagttctggtgagcttcctgattggtgatatacgctaatgtgcaggtaatgcatcctgaggacagggaagatttgtgtgggacctgcccagattttgctcnnnnnnnnnnnnnnnnnnnnnnnnnnnnnnnnnnnnnnnnnnngtatagcactttcttgagatctactagtcatttataaaaccttagtcaattataaagtctgagaaaatagtaggacctcagaatctatagactgttggtcggaagtgtgggtgccctgccaaccctggagcttggagttggtgtctgcattgaggggaatgttctggagggcatctagacaactgtgaaatttgcactaactccaagtagtcagaattgcactgcacatacctctaaatcttcacactctaattcatagtctactttatactctaattcatagtctaatcactgaataaataaatcttaatttgggcattctccactctaacctctgtttacaaatgacaactaagtttctgattattattcataaaggtctaaaaagtgtttcagtnnnnnnnnntatatataatgttatcttgaaacgtaagataattctctattgcaatgtccccctcagatctaacctgtaacccaatagaagattaaagactgagaaaatgaggcagcctacacagaatttaattcatagagtgcagaatattaatttgaaaagacatgtgaagcttagcataaaatatattaagacaactctccagctccaatttccaatttcccttcgaactcacgatacatcatccagccccaaagaataagagctaatttagtgacaaatacactgaaagacagaataaaaaatttaaaataaatcagtgaactttttatttttacnnnnnnnnnnnnnnnnnnnnnnnnnnnnnnnnnnnnnnnnnnnnnnnnnnnnnnnnnnnnnnnnnnnnnnnnnnnnnnnnnnnnnnnnnnnnnnnnnnnnnnnnnnnnnnnnnctaggaaattgaaaaggaactcccttgctgcatcctaaatgtctcttcattctaaatgcaaaagcttcaggacagtccccagggtgaacagcatctcctggatcctcaaaactacttccagatgtaagccccaacttttttgtacaaagttggc

SEQ ID NO: 249484 - DNA, 714 bp, Homo Sapiens
atatttattatacaaatataaaaactttacattttagctgatgatatatacttaatcaaaaagtctttttaatttggatatatgcatcatttccttcattgtggtgtctctgcttctcagatgtattaatccattctccaaaagtagtttcagtaaccaaaactgtgaagagaatactcatttcatcatacttcgaataaagttgttccaatgaggactgcatagtttccaaataaccaggccacacagaaatcccattttctagtaactcattaaatagcccttgacaaaccctgggagaaaatgtgggacatacgccattatcttctccttctttgagctcactatctcccatcttcccagacctctccacaaaagccagggtcagaaagctgggggactctcaaagtctttaaatctttttagtgtccgcattcaggtctgggctgggtctcaatcacccagacagaaatgacgactgctgaaggagtctctggaacgaaatgaaagccatcccccatggcctttcttaagagtatttaatcattagaacaaattagaaaaatcaaaataaaattatagatctagaatatctgaatatagtcagttaccaaaagtgttaagttcaaaggggaaaggctgcgcacggtggctcacgcctgacctaaaacattttaaaaagcaaatgaatcaaaataaaattttaaatgccaa

SEQ ID NO: 249485 - DNA, 874 bp, Homo Sapiens
cagttgattctcatgattaactattttcatatcccagtgaattttcagcttatcagctactcaaattgccatctgcttttcttctctgtcttcccatcacaatgcaaatgccctcccatgtgtatctcgtgattggctggttgtttcttctagcagtcttggtgacatactcaacacagtgcagggataagatacactaggcaaggttaagtgaagccggccagcacactcaccccagggaagtcagagtaagcctgtttccaccgcagcacagcagtgagcacagctaggcagaattccagcagagtgcaaatcagcatcagagagagagttccagccagactggctttggctgtatagcagtccgtggtataaagtgaatcatgataaaagtaagaaacataacttcttgttggtatattatttttgtccaactcacactgcagtgaggcaggatttaaggtggcctgtttgacagacaggataatgaaacccaccagggcagacagagcactcagaatgcttccaaccaggctgctatgcacctgaaagagaaatgttgggtaaggatcattgctaatgactcatgaatctgttatgcatctttgccattaaattgtaagttattcccttatctgtcccctcaggaggtctgggattgatcatttattgctgtatgcctctccagtgtccagcaaaaatctctcaatctccagggtaattcttggctgaatgaatgactatacgaactggttcaccttaagcaggacctcagtggtgtggtagagaatgttactctcctaaattctttccccaggacagatagcagggctttcatgaggctttacctgcaacattaccaagagagcgccaa

SEQ ID NO: 249486 - DNA, 964 bp, Homo Sapiens
  misc_feature (573)..(591): n is a, c, g, or t
ttgggtcataaatagagccggttttgtggtgttttcactactcggttggatgcctcagccatagtaagtgggaaagtgagcgagcaagcgagctactagcgaccggaggaaagtgaacagggggagaagggaacagcaagaacaggactccagagcgataaacactcgctggagagggagacgcaggaagcgatgaaagagatgtctgcaaacaccgtgctggacagccagcgtcaacaaaagcattatggaattacctccccaattagtttggcatctcctaaagaaattgatcatatttacacacagaaattaattgacgccatgaaaccatttggagtgtttgaagatgaggaagaattgaaccacaggctggtggttcttggtaaattgaacaatttagtaaaagaatggatttctgatgtcagcgagagtaagaacctcccaccttctgttgtggctactgttggtggtaaaattttcacatttggatcctataggcttggagtacacaccaaaggagctgacattgatgcactttgtgtagctccaagacatgtggaaagatctgannnnnnnnnnnnnnnnnnngaaaaattgaaacatcaagatggcattagaaacttaagagctgtagaagatgcctttgtacctgttataaaatttgaatttgatggtattgaaattgatctagtctttgcaagactggcaatacaaaccatatcagataatttagatctaagagacgactctcgcctgagaagccttgatataaggtgtattcgcagcttaaatggttgtagagttactgatgaaattttgcatttagtgccaaataaagaaacttttagactcaccctaagagctgtcaaattatgggcaaaacgacgtggtatttattccaacatgctagaatcccttggtggtgtctcctgggcaatgctagttgcaagaacttgccaat

SEQ ID NO: 249487 - DNA, 302 bp, Homo Sapiens
ttgggttctcttttctgtgatcgtattacttatgcaaaacgagcccaagtcacttgcgcggccagagaggggcaggtgctgggcggcggctgacgggcgcagcaccctaggcccagtgtctggctccagccccgcatccggcgccggccccgcatccagctctggccctgcgacaatagagtccggaagtgcaggcaaagcggctcccgggagcgccgcgcggtcctgcgcgggatcagcgagggccgcgccccggcgggcgggcggcatggctgcagtgctggctctcagggtggtcgcgg

SEQ ID NO: 249488 - DNA, 1227 bp, Homo Sapiens
  misc_feature (489)..(502): n is a, c, g, or t
ttgggaactcctggaacacctccaggaaatgagagaagaaaagaaaaggattcgaaagaaacttcgggattttgaagacaactttttcagacagaatggaagaaatgtccagaaggaagaccgcactcctatggctgaagaatacagtgaatataagcacataaaggcgaaactgaggctcctggaggtgctcatcagcaagagagacactgattccaagtccatgtgaggggcatggccaagcacagggggccggcagctgcggtgagagtttactgtccccagagaaagtgcagctctggaaggcagccttggggctggccctgcaaagcatgcagcccttctgcctctagaccatttggcatcggctcctgtttccattgcctgccttagaaactggctggaagaagacaatgtgacccgacttaggcattttgtaattggaaagtcaagactgcagtatgtgcacatgcgcacgcgcatgcacgnnnnnnnnnnnnnngtagtggagctttcctaacactagcagagattaatcactacattagacaacactcatctacagagaatatacactgttcttccctggataactgagaaacaagagaccattctctgtctaactgtgataaaaacaagctcaggactttattctatagagcaaacttgctgtggagggccatgctctccttggacccagttaactgcaaacgtgcattggagccctatttgctgccgctgccattctagtgacctttccacagagctgcgccttcctcacgtgtgtgaaaggttttccccttcagccctcaggtagatggaagctgcatctgcccacgatggcagtgcagtcatcatcttcaggatgtttcttcaggacttcctcagctgacaaggaattttggtccctgcctaggaccgggtcatctgcagaggacagagagatggtaagcagctgtatgaatgctgattttaaaaccaggtcatgggagaagagcctggagattctttcctgaacactgactgcacttaccagtctgattttatcgtcaaacaccaagccaggctagcatgctcatggcaatctgtttggggctgttttgttgtggcactagccaaacataaaggggcttaagtcagcctgcatacagaggatcggggagagatggggcctgtgttctcagcctcctgagtacttaccagagtttaattttttaaaaaaatctg

SEQ ID NO: 249489 - DNA, 724 bp, Homo Sapiens
tgggcacacttggcacagcccacagggcagcaggagcagcagccttgggggcagacaggaggcggcagagatgagtactagcgacaccgggaataaggattcttgctctccctgataaggatcactgaggaggcaacaatttccgcgcaatgggggcatccccagactgctttaattcccctgaggatggtggagaggggacaggctggaggacagggaaggggtagaggaaagagaggatcccacttacttttcttgcaggaggtgcatttgcactctttgcatttgcaggagccggcgcaggtgcaggagtcacctgcaaggagaaaagacagaggtgagaaccgtccctggatacctgaacaagggacggcgtactaagagcccggggccgagttcctcagtccacaaccgattcctgggaacttgagcaagccattaactcagatctccttaacggtaaaaagggggctccgaataacctagaatggagagaaagataccccaaaactctttgggaaggagcaactcctgtcctgaaattgagtgaccagagaaagaaagaggggtcagaaattgcttctctagcgctacagtctacactgggcatccccagcctcttaccggcggcgcaggagcagttgggatccatggcgagctgaagaggcggctagagtcgggacaggttgcacgcggtttcggggggacttgccaacttttttgt

SEQ ID NO: 249490 - DNA, 1077 bp, Homo Sapiens
tcttaattttgaatgttaatatatgaaatcctaataatattaatatcaattttgaatatttggacaaaaatcccaaacaaaatattcataagataaattaagcagcttatcaaaacaataatataccacagctaagcatattatatttcagaaatggtttaaaacaagaaatcagaatgaattataacattaaaatagcagaggagaatgatatatgaacaaagcaaaagaagtgataggatttgaaaaaatataagaagttagccctaattatagagcatacttgcatacaacaaagtaaatattagttgaatggtaaaatattgtactgatttccattaaactgtttaaacaactaagacactggctattaccccaatacttgacataatcgtatttattttaataaaagtaaagaaataataatgattttaaaagaaaattcatttccattcatagataatctgactgaatacacagaaatctcacatactattaaaaatataaatagattaccagtttatggttagagtgataatggcaacatccaaatataatatgatagtatgtgggaaaactatcagtatcagaaaaatcatgaatgcactttaaacagctactctccaggaaaaggatattatatataaaataacagaagaatcaagatctagagtatgtgtgtgtattcataaatcagcaggttgagaaaatgagcaaaagaaacaaacaggaaagtcacagtaaataacatgattggctaataaatacatataaaaaatacttaatgggttagttaaaaaaataattatatttttagatggacaagtggagttactggatacttttatttccagctgaccagactagaaattacaagagtagaagagcatttggaaaagatccaagtatagatacatcagctatgactgcaattatagagttttgttatttacagactcctctgaaacaatattctaagtagagttttaaaaaattatctataacctaaatactgatcaggatgagagtttaaaaacatttaggccaggcgtgggggcgcacacctgtaatccccaa

SEQ ID NO: 249491 - DNA, 1638 bp, Homo Sapiens
  misc_feature (868)..(876): n is a, c, g, or t
  misc_feature (1464)..(1483): n is a, c, g, or t
  misc_feature (1534)..(1572): n is a, c, g, or t
cccctcacatcaggggccaactttgtacaaaaaagttggctcatttttgttccataggcggctctgactcttcatcacagtgtctttccttacatcttcctcagtgccttcacaatgtaaatagaaatgaaacccacaaataatagcaagacaacttttctttactcctgttctctgtgcttttatcaaaaatgtaatattttaaacaaatccatggctatttctgtgcagctgtgaccagtagggaaaactccagctgctgatgactgtgctttgtcatatatttggagtaatcccattattattaaaataatttgaaaattatttttgccccaagacacaaaagctgaaatactcttttcacaaagtattattggtaggttagtagtgatttataaatatataattaggatttatttttctcagtgtttcttcattgcttggcccctttctaaccttcattgactgaaagcagatgtttatatcaccatctctgattttgcagaattgatctgtccttacactgcatttagcattgattgtgtatggaacataaattgcttttctgatgcatatgtattccatagctctttgaatttgtgactgtgtactataacctatttaattgaaaagaatgtgctaaaatttagtcattgtccattctgctaacaaaagcagttaaaacatgctagagaaatatatcagaattttaagaaagaggcatgagccactgcgcccagtgctagatttgttgttatttcttatgtagtacatatttatggtgattttcttttgaataaaaatgatttttattcttgatttttaaggaaactttagtaaaatatgtcagacataattttaattgggnnnnnnnnngcctgttacatgtgactatattggctgaaaactttttagttatgaagtttttctgtgtgctactgtcttgtattttgtatatctagtattttgattgtcaaaacactttttgaccccaaattatgattttgtcattgcaggcaagaagacaacaagaccctagtcctggttccaatttaggtggtggtgatgacctcaaacttcgttaattaatagcacagcagatgtgtgctgcccatctttacatacacattgcttctagttggcagaaataattgattaaaagaccagaaactgtgataactggaggtactacggtctatttctcaaccttaggcagtaatagacatcacaaactgccatggttttgcactatgattataatacctgcatttctaattttttaagcatgtagccagtaataatttgaagttttttttctatgcaagcttaccttgttggcattattttagggagttgaaactatcaactgtaaagctccttttcttccactttaatttaaaagttcatgtcatttaaaaacaagtcaagaaattaaaattgtatcagagggttttctctaatcannnnnnnnnnnnnnnnnnnngtacttctagatgttttggttatacagcttcattttagatgagcattcttnnnnnnnnnnnnnnnnnnnnnnnnnnnnnnnnnnnnnnnatagtctatagcattttaaaactgctgatgttgtttgcattatttacaggctaaaaacttagtagc

SEQ ID NO: 249492 - DNA, 913 bp, Homo Sapiens
  misc_feature (170)..(182): n is a, c, g, or t
  misc_feature (339)..(368): n is a, c, g, or t
ttggatctaagtaacctatgaagtctgtgctcggtgtcatgaatattttaaatgttttatttcatgatgggggagaatttgcatgaaggaaattaaatatagttattgattgccaagtgagaagttggattgtttttagagataatagataataatgggcatatcagggnnnnnnnnnnnnngtaagtctagaaaagtttatgtgctgtagaagagatctagtctatatgttaagacattcccttgctaattattttcttctctgttgttctattttttttggtccagtttgctgtttttaaagttttgagtcccagctggtcctgtacatttaactgnnnnnnnnnnnnnnnnnnnnnnnnnnnnnntagcactcatgtatgtcctacagttataggtgaaatttgatattgtttgtcttacatagcatacctatagacagcttaagtaaagtgactgttaagagggttatgcttattgatgaactcttgtagttgtttaccagctctgttagtatagttaaattgatctcagtagcttcaagtatttataaaatggttgaagtccaaatacatgtgataattacaatacactttgaattaatggagggtgggaggctagttgaaatgcattttatttacccaaggagtatgttaaaatgatagttataaatgttggaagtttaaagcaagatactcagtttagttctttacaaatcataagaagaacaaaattagatgttgacattgctattttaggctgtgtgttttccatatgcttcttgctttccctgtcacaggtggtggcagcaatattggtgtgattgaggttatgctggcaccactcgcacacaggcgcacaatggtgttagctgggcagaaagagtggcatctctggctaccgggctgggggc

SEQ ID NO: 249493 - DNA, 916 bp, Homo Sapiens
  misc_feature (138)..(146): n is a, c, g, or t
  misc_feature (674)..(696): n is a, c, g, or t
  misc_feature (838)..(849): n is a, c, g, or t
tcaataactttcaaaatctaaatatattacaaataaagcatcttacgtcaataacttacttacagtgaaaactacatttatttattaccctctggcaactttgggtctgtttcttctaactgtaaacttcacactagnnnnnnnnncccagttagtattaatatttagaaaatttttaattctcattcacttggatgtgtatttcagaattacagcttcatactttgcagatgactgaaacaaagtaacatatgaaagtttctaattcttttgttcattccaccaatctccaacttcagctaaaatattaaaattttaggattattcattcaagtaataagtctttgttacagaattgccacattatacagtaatgtatttttcaaggactattaaagctaaaagggactaaaacataatttgagaattttcaagaataaaagctgataaaatagataactggcctctatttagattaagagaaaaaattagaaataaaagactgaaagatttaatacagcttccaaaggctcccaagagaaccctttataaactgggagagtttcctgaaccagcctattagttagaaggtaactgagttacccataattatggacatcagatgtattgactagtttatttcatttggcaaagtattttaacaagatgaaagnnnnnnnnnnnnnnnnnnnnnnngctagttattaagaacaaagggcatgtgtcgtaacaggggatctaattactgtaagccagaatgattgctgaaatgtcaaaatgtaagattgaatgaggctatttaaacattttagtatattttgtcttactgaaattgatnnnnnnnnnnnnctggcaatgtaactaaatgcgtaactaattacttgaaataaaaagattacttgaaattcaaatccaa

SEQ ID NO: 249494 - DNA, 1242 bp, Homo Sapiens
ttggaagaagaacaataaggcttgagtctagtcggatgggtcttgagccactctctctggtttgacggtgtcctcttcccaggtggaggcgccaggcacggaatccgatccccgtctgcccaccgtcctggagtcggaggtaggcgcccgcgggtctccatctccccagggccttgtgcacgcgcgtgtggcctcagcccgataactagcatcaatctccctctcctctccgcagcttgtccagcggatccagacactgtcccagctgctcctgaaccttcaggcggtaatcgcccaccaggacagctatgtggagacgcagcgggctgccatccaggagcgggagaagcagttccggctgcagtcgacgcgtgggaacctgctgctggagcaggagcggcaacgcaacttcgagaagcagcgggaggagcgcgcggccctggagaagctgcagagccagctgcggcacgagcagcagcgctgggagcgcgagcgccagtggcagcaccaggagctggagcgtgcgggcgcgcggctgcaggagcgcgagggcgaggcgcggcagctacgcgagcggctggagcaggagcgggccgagctggagcgccagcgccaggcctaccagcacgacctggagcggctgcgcgaggccccagcgtgcccgtggagcgcgagcgggagcgcctggagctgctgcgccgccctcaagaagcagaaccccgccgccagggcgcgctgccggcccgacacactggccgaggcccagcccccaagccaccctcccagcttcaacggggaagggctggagggccctcgggtgagcatgctgccatccggcgtggggccagagtacgcagagcgccccgaggtggctcgccgggacagcgcccccaccgagagccggctggccaagagcgatgtgcccatccagctgctcagcgccaccaaccagttccagaggcaggcggccgtgcagcagcagatccccaccaagctggcggcctccaccaagggtggcaaggacaagggcggcaagagcaggggctctcagcgctgggagagctcagcgtccttcgacctgaagcagcagctgctgctcaacaagctcatggggaaagatgagagcacctcacgaaaccgccgctcgctgagccctatcctgcccggcagacacagtcctgcgcccccaccagaccctggcttccccgccccgagcccaccgccagctgacagcccctccga

SEQ ID NO: 249495 - DNA, 846 bp, Homo Sapiens
  misc_feature (385)..(439): n is a, c, g, or t
tcatctgtattctttcagtttgctttgctgtgagtcctttctttggtaagacattgagaggtattccctgttttagaagatattcgaatttgtttgggctttggttgatacttgataagctgtggatggttatataaatttgagtatgtactacaaatagattcacaatcccacttctctttggcttcttcaaggactacagtaatcatttcttcctcctcagactcatcaagcatcaaccaaagcccaaacaaattcgaatatcttctaaaacaggaatacctctcaatgtcttaccaaagaaaggactcacagcaaagcaaactgaaagaatacagatgattaatggcagtgatcttcctaaagtatcaactcagccacgttnnnnnnnnnnnnnnnnnnnnnnnnnnnnnnnnnnnnnnnnnnnnnnnnnnnnnnngcgcaaggaacgaagagtggagaagaaagctaacaaattagcatttaaactggagaaaagaaggcaagaaaaagagctgctgaacttgaagaagaatgttgagggtctaaagctatagacagtggagcatacagggcaaggcactttattaggggctcctcatctttggttattgactagaaacttcagaaagacaaaactgtttgccatttttactggcagataagaggaaaatacaatatttgtattatttttatactagtaagtgtcccctgccaaccatcttgtaaatattgtaatactttaatttttaatattataagcttacatttgctctgaagtaaatgacttcatgaatgtgaaatgttttgataaattaaaaggaaaaatatcttcatacgtgaaat

SEQ ID NO: 249496 - DNA, 710 bp, Homo Sapiens
ttggcaactggtttcctcttggagtctgggaggaggaaagcggagccggcagggagcgaaccaggactggggtgacggcagggcagggggcgcctggccggggagaagcgcgggggctggagcaccaccaactggagggtccggagtagcgagcgccccgaaggaggccatcggggagccgggaggggggactgcgagaggaccccggcgtccgggctcccggtgccagcgctatgaggccactcctcgtcctgctgctcctgggcctggcggccggctcgcccccactggacgacaacaagatccccatcctctgcccgggactgccgggacctcgaggggaccccgggccgcgaggagaggcgggacccgcggggcccaccgggcctgccggggagtgctcggtgcctccgcgatccgccttcagcgccaagcgctccgagagccgggtgcctccgccgtctgacgcacccttgcccttcgaccgcgtgctggtgaacgagcagggacattacgacgccgtcaccggcaagttcacctgccaggtgcctggggtctactacttcgcagtccatgccaccgtctaccgggccagcctgcagtttgatctggtgaagaatggcgaatccattgcctctttcttccagtttttcggggggtggcccaagccagcctcgctctcggggggggccatggtgaggctggagcct

SEQ ID NO: 249497 - DNA, 1195 bp, Homo Sapiens
  misc_feature (352)..(371): n is a, c, g, or t
gtagatgaactcattatttgacatattaaattagacaaagaaaatatatatgtacccagataaaaacaatcacattctcatactactggaacacatagcagtggtcaaaaataatggattgtaaaatggaccccaggatttaatgcaaaaacctctcccatacgagaaaagtttcagggcttctaacttcattgaattccagtactaaacgtgcttctttatattcctcagcttcttccaagtctttttcattttcctaaaatgaaatacaataaaaattaagtttatccttttcaagtttcagtactttgttatttactcaaatattacaaaccattaatgttaataactnnnnnnnnnnnnnnnnnnnntcccaagcctcatctaaatatattgtaattccacaggtttcccacattctgttccttctttacaaggaaaggaagaaataactggtggttttgtttcactgtatatattctcataaaataagtgaataacagtcttctaaagctaccagcattaattaaataaaaacctcagaaaaagtttattctcattttgttgacccatcatcatcatacgaaagagaaaagtaaaaaggaagatttactaacatgttacatatatgacagcattcaggccaaaataatccactgactattcacaatgacaaagaaggcttctgatgtcacaacagagttaaatataatctttgaattaaacaaatgaattgcctgcttgctaatgggtattacataccctacactaaaggaaacaaaatacatctttcattttctgatatttaaagattgagtttttccataatactgatatacaggcaacttttactaatatattgtaatgataacagacaaatgaaataatattatctaaagtacacaggaaattttgtttgatttttaaatgaagctatggttagcaatttatgtcaggtcaataaaagatggagatatacaaacagtagaggaaataaagtatgtgtgtatttaatatgaaaactgaaagcaaaacgactgagaatttgcttagctcaaactatacgtaagaatttcttaaacctccatgttataccttaaacacatctttgttctctgttagtaaatacaagctcttcaagggcagagatattgttgaatacatcttcacatacaaatatatcatccaaatccaa

SEQ ID NO: 249498 - DNA, 1249 bp, Homo Sapiens
  misc_feature (140)..(149): n is a, c, g, or t
  misc_feature (678)..(686): n is a, c, g, or t
  misc_feature (882)..(890): n is a, c, g, or t
tacagtttgaagtagatgtcgtcttttccacatataaatctcaagacataaaaggcacacacaattcaactcctctcttttcatatatgggttctcacagcaatttaaaaaatctattgccatatccagacaacaggagnnnnnnnnnntacctggtttgcttattgacaaaagtggtgtaattgaacctttgtctttcctgagtttcaaaaaggctatttgacagtagagatacataaacaattcatattcagtaagataaaatgtatcagtccacaaaacattttcatctttttaagtataaaagaatcaatgttcaaccaccaccatgtgtgaaagcccctttttccaaattaaacttactctagaatcatgaattgaagattattcagtcatggcactttacaccccaaacgagcaaaagtaacaagttaataccctccgtgagtatttacatcatcttatcacctggtttaaatggagtaaatacctatatttcaatcatctaggaaataaaaaggttactgaagatccaatacactagtatttcatacctgtgcagtaaagtcagtgggaagattacagtagaaaaggaggaagttctactgttgtaaaaattagaccacttttgtagctgactcacatagaggaaaaacagaaaatgattaaagttcatgnnnnnnnnnctatacttttctgttctacaaagcatacctttgaattccctttccaactgaggttatcacagctgggtttagcaaactcatctcttctgaccttgtaaaactaaattgtcataaagattctgattatacataagtcatcgttactaatactcatcatgtactttcaaatgtaaaaagttctagaaatgcccaaatnnnnnnnnnttccagaattgaatttagcatggtcaactaatttttactttatgtgcttttttgctgatcatcacagactgctaaaattcatggtgtttggtatatatgtgtgtatacaaccatactatctacatacatacacatgtacatatatagattctaaaccaaaggttcatatgagcatcacctatcaaaagaaaaatctttatgtgatgagagaatgaatacaatctgacaccaatttggttgatataccccttttgatatattaattctactctaaaattcttttttattttatcaagtctaatgctattatttatcaagaattagtaaaggaagataaatattaaaaaattaaaatccaa

SEQ ID NO: 249499 - DNA, 964 bp, Homo Sapiens
agaaaaaaggaaaagaaatacatttcaatttacccatataaccaacacactttaaaatgggtagaaaaaggaaattatttaccagcttaaaaagaagaatacatatttaactcttgtactactgcttgaagaatacttacagaagtcttgctcagctgggcgtggtggctcacgccagcagttcttatgctaaagttgaactgttcagcaaggcagcagcagagaaggaacacccttcttgttggtgggtccagggagtaatatttgctgttatgatttttctttatagcatatacctgcagtacatatcatatcaaagtcttactatctggtgtgcataagagagttaatatgagccgtcacaagactacttacccttagaaatacctgctacaaagttcaacctttgctggtatgagggaacttacattttaagaggcatcccaacaacctaagtgataaaagtagctcactgttgctaaatagtttatctaaacaatctggtatttgctgaacccctgttttccttccaaaagtctattattttgttttattgtagcagtggtgcctagggggatcagcctcaataaacaaacaaaaacacactctgagcactgagtatctgatgagcttccctggtagataatatttcatatatgatgtcacaactttttaattgggaaattgagcccaatccacgtggttacacaaagagaaaatgtgtagaagcttataagtgcttcactcaagcccaaatttaatcaagaggtaattaacactaataatcaatattcaataatccaaaaataattattttacaatttctactgaaaaatgtcaaagcagaatagaataagtgaaaaggcatgcgttcaaagaaaaaaactcaatgtcatctagatgtcacctcttacaaatgatatttatgtaaaatttcatagatgcctgaaacagactttcccaa

SEQ ID NO: 249500 - DNA, 923 bp, Homo Sapiens
  misc_feature (320)..(332): n is a, c, g, or t
  misc_feature (645)..(666): n is a, c, g, or t
aaagacaaaacatgagaaaccctacagagaggacatggtgaatgttatctcatcctgaatctggccacagactgactggaaccattaagacccatcaggaagaaagatccatcaggaagacatagtctggcaatgatcttttcccagcccattggttttagggtattcaagtaatcaacaaagataacaaaagttgaaatacatatttaaccacactatatgcttacagattttaagctaatctacatagccaataacaaagggaaatgtgccttccaatccaaagttcagacaggatatttaaggaccacagttttaannnnnnnnnnnnnaaagataaggctgcaaagtccacaaatgcttataaaccagtgcctcaaccaatacttttattttaaagaaaaaaaatcaattaggaggtcatttgagaaactagctgtttgcacctaattttaaatgtaaacaataaatagtataagaatgccaaacattttgtcaactgactatcctattgaaaaaaacaaacttgggagaaatgaaaccttagaaaaaatgatatccaatgaaatggtttttgaaagaaatcaagcataggcttacttagataaaaactattagcaacaatggtaatcatcatccagggtnnnnnnnnnnnnnnnnnnnnnnctaataaaaatttgcaactttatatgcatatttagaattgcttgtagaaacgtttaaaaataagtttaaacctgaaccagaaaagaaaattttatcagatgagtcccttatattctaagaattcagcacaggccaataataatctaccaccatattgaaataagactttccaaagtcttatttaaatgtgctttaagatattatctttatttctgttttcaacaaaggtattatattgcccttaagagataatccaa

SEQ ID NO: 249501 - DNA, 883 bp, Homo Sapiens
  misc_feature (205)..(280): n is a, c, g, or t
gaccacaagaccatctttctctgagtccccatctctagaaatcctccccattctccaagactcagctcgtgtcacctttcttaggaagtctttccgactcgacctctgaacatgatacatttctctatgttgtcatggctactcctgtgggtgtctttgctcttctgccttgtgttctccaaatgtagtgagtctactggactcnnnnnnnnnnnnnnnnnnnnnnnnnnnnnnnnnnnnnnnnnnnnnnnnnnnnnnnnnnnnnnnnnnnnnnnnnnnnagacagggtccttgccctgatgatgatggtcatggtctaaacatcaaataaccccatataaactgctgtgaacatggttctgagggaactcagagtctcccacaccatacggctggcagcacctcacttcagaggccaggtacgaatgctctcttctcctcttaccagcatcatccgaacactcttagacatcatggtgatgaatattttcagaatgctgatgttgaagccaggtttcacaatctggcggtgctttttccatttagaaccatccagggtcacaagtcctcgaccttatgaaatgagaggggcaactgtttctatcacaggccaggtaagtgaagaaagactaggtaggcagcgagcaattccctatctatgacactggagaaaagctagagtggacagagctttgaaagagtgaatgagcaggagtagacctaaccctttgggaattaagtccaaatcagaaaatttgtttatacaatgaactcaaaaaaaggtccatcctatcctatttgatggtcagattcatcagcctcttgataagagttcaaatttagggtgggtgagaattgcccgaggtgcttgctagaggcccaa

SEQ ID NO: 249502 - DNA, 1000 bp, Homo Sapiens
  misc_feature (272)..(286): n is a, c, g, or t
aaaattttttacattcaatattttctttatacaatttacaaactactttttacaataagcatgtcaaaattaaaatttgttctaaaaattgcatactaaacactgtttagtaagaaaatctgatgttatcttggtattacctattccttttcatttcttggtatatctgtgcaatttaatccaaatcatttaaaaactattgattatctggcatatttcttggaaaaccaacacaattctttaacaaatttaattcatactccaaacaactnnnnnnnnnnnnnnntaagcaaataagttgatatttatacattaagatattgctataggtacagtatgactaaataccatatagtccataatggcttaaaagtcaaggtttacataaaaagaaattaagagagaacaaaaaataatacgttctccctaaacacagacctgtatgggaccgaaagtgtttgttgagctctcctgaggaaataaaacttttcccacaaataccacatatgtatggtttttcacctagatggaaaataaaagatagcgaagtggtgtactataccaatataatatttatcaattacaaataatctaaagtaagcttttctggaatattatttaaattaaaatctctctatattgtactttagaggtattttcagtgatccaagtaaatgaatattagtaattattgtatactgttcataagttttcatatattaaaactttattcctcaaaatgtcccttctaatagagatgatttgggcaaggaatttgatttttatatgattaagaacatgtcaattcataaacccacatttctattcttgctatctactatattaataaaggagaataaaagtatgtagggaagtcttttaaaaaatgtaccctaaaaaagcaatttgtttccaaactgctattttgcatctgaattaccttatttgaaaatcccagaatatctgtgtaggaaaggtcctaagaagtttaaaaatccaa

SEQ ID NO: 249503 - DNA, 1003 bp, Homo Sapiens
ttggacatcatctgcttcaccatgtgctgcatctaccgccccctcaagcccaggaccaataaccgcacgagcccccgggacaacaccctcttacagcagaagctacttcaggaagcctacatgacccctaaggacgatatccggctggtcggggagctggtgactgtcattggggctatcatcatcctgctggtagaggttccagacatcttcagaatgggggtcactcgcttctttggacagaccatccttgggggcccattccatgtcctcatcatcacctatgccttcatggtgctggtgaccatggtgatgcggctcatcagtgccagcggggaggtggtacccatgtcctttgcactcgtgctgggctggtgcaacgtcatgtacttcgcccgaggattccagatgctaggccccttcaccatcatgattcagaagatgatttttggcgacctgatgcgattctgctggctgatggctgtggtcatcctgggctttgcttcagacagaggaccccgaggagctaggccacttctacgactaccccatggccctgttcagcaccttcgagctgttccttaccatcatcgatggcccagccaactacaacgtggacctgcccttcatgtacagcatcacctatgctgcctttgccatcatcgccacactgctcatgctcaacctcctcattgccatgatgggcgacactcactggcgagtggcccatgagcgggatgagctgtggagggcccagattgtggccaccacggtgatgctggagcggaagctgcctcgctgcctgtggcctcgctccgggatctgcggacgggagtatggcctgggagaccgctggttcctgcgggtggaagacaggcaagatctcaaccggcagcggatccaacgctacgcacaggccttccacacccggggctctgagatttggacaaagactcagtggaaaaactagagctgggctgtcccttcagcccccacctgtccc

SEQ ID NO: 249504 - DNA, 884 bp, Homo Sapiens
  misc_feature (88)..(97): n is a, c, g, or t
cctataaaagccaactttgtacaaaaaagttggcaaagctatttatttttaggactatgtggtaatttcaccttcaggtgataaggannnnnnnnnnctcccagctagtgctatctttctcaaaataatttaaaagtaggctagaggctaggatgtacctatatttaccatgtttacttaccatgaatattttctaagtgccatagtctttttcataatacgtatgagttttaccttttcagaggaataatttcaagtcatttatttgctcattaatgatagcagtagtcatagacttaagactattctagagatcttcatctccataagacttttacatttattttagtaaacttttctttctatgcctctttaatggagtggttctgttatttaagcctgttctaagtttgatcaaatggcaatgactaggtctagttttagtttttatttttgcaggagtctattgctaaagaattttattttgatccttgttaaatttttattttaattaataaggtagtcattcctgtagagggataagatgcttgtagagttgtgggtatcattccaaatagaactgttatgatttgggaaatattctttactacaaaggacttatttcataattacaaattttccttcatatttgcctttgtttataaaatcttcaggaatgacattctctagcaataaaaggaatgaaccgttatgtttctaagctgaaaagaggaacaggtgggtaattatcctgccatacttaaatatagtggaaaatcctctattgagaatgtggataaatgaacaattgtaagttttgcatcataaactgagaacttttcttttgacagggggaggcgggagggatagtaagtgggggtgat

SEQ ID NO: 249505 - DNA, 1124 bp, Homo Sapiens
cacttctccttccaagaaagcaccaggtttaagtaaataaagctcctttggagggttccagcacaatccctccccactgggaacttcacacagagaaacttgactggcctttctagagcccttctactgcgtcaggcacagccctgggcctggtgagtggcaggtggcctttcttccccacctgcctaaggaagtcagccgaacaggtcctcccactgctggggcccctgggctctcaaggaaactgagtcaggtaaaactagatcagagatgggcatgtggggccatcacctgaactgccgtggctgcgccgcggacgggcccagaagaccgagggctcctgacatcttcccaagtggaccctgcgggagctgcgcttcagaatcgttgctcacaacacaggggcaggtctcgagtctgaggccccaccgcacccatgggtgcccccttctgtcatctgctcattgaaccgcggggctgctgtgactgtgagagctgctgccccgtgtgctgcctgctggcccggcccacccagtggggccatcagagggtggtatcctttcccgcctcctcccccagccttcttaccacacccaacagcagaatcccccaaacctgcttgttcctcccagcatactgtgtcccactcaccctacagggcagggcaaggtttccagaaaccagacagaacacagagactcgctttggcagtcacgggtggagggccccctccctgctgctgtggccacagaagactggtcccctggagggccggtgccggtttctatctaggcaagagtcctggacccaggggccaccgcacacctcccccagcaacgtgcctccaggcaggagttggcttaaaccctctcgcaaccccttaggggcaaattatttgcattaattaatggattgattcattaattcaggacactgtgcttgggacctacagctgggttctcatcgacttttttcagcaaacttaaaaggctcaggatgaagaaaagcaagaggaaatttagcagtttaggtattttaaataatgctaaaatctgggccctggtaaccttgagaaccacagctcaatatgtttgagggtttcttcctccccttcaagctttttc

SEQ ID NO: 249506 - DNA, 761 bp, Homo Sapiens
aactttaaagggccaactttgtacaaaaaagttggccaggccgccttgtaaaggaggcgccaccaggcgtgcggtccgtcaaggtggtcctggtgggcgacggcggctgcgggaagacgtcgctgctgatggtcttcgccgatggggccttccccgagagctacacccccacggtgtttgagcggtacatggtcaacctgcaagtgaaaggcaaacctgtgcacctccacatctgggacacagcagggcaagatgactatgaccgcctgcggcccctgttctaccctgacgccagcgtcctgctgctttgcttcgatgtcaccagcccgaacagctttgatttttttctttaaccggtggtacccagaagtgaatcatttctgcaagaaggtacccatcatcgtcgtgggctgcaagactgacctgcgcaaggacaaatcactggtgaacaagctccgaagaaacggattggagcctgtgacctaccacaggggccaggagatggcgaggtccgtgggcgcggtggcctacctcgagtgctcggctcggctccatgacaacgtccacgccgtcttccaggaggccgccgaggtggccctcagcagccgcggtcgcaacttctggcggcggattacccagggcttttgcgtggtgacctgagcggctcggggcgtcccagcgacgcgggaagaggcagggcgctgacctgctgctgagctgctgggctggacccggtccctatgctgtgaccgccgaactcc

SEQ ID NO: 249507 - DNA, 1077 bp, Homo Sapiens
  misc_feature (579)..(616): n is a, c, g, or t
gccacttccacctcagcaagcttttccccttcagaccccaactcctcaaatctgctttgctgaagcaaacagctcatagtgaggaaaggtgactcccccaccctcagcttgtgtggagcggccatcccaccagatcgatggcctgggttcttggtcagagatttgctcagatgtctgcttgagtggctttgacagcccggcagcctcacctcggcctttaagccacatacagaaaagcactcgaaaaacactttagacaaatctgttgactgctgttgttgctgatgtaagcacggcagcctctggtcagacagctgcccacctagatgagaaaccacttagtggtgcactcctggccacccttgctctgtatgtgacagcagcagcttacccacccacaaggccccccgagaaggggcagaactgcaggaatgtaccactgtgattgcagatggggtgggtctctatggagccactttaatttgcttacatagaaaggccagtgaagactcacctgcccaggtcaagtggccagtctccctgcaagcagaggctcccatctgggatggggcactcctnnnnnnnnnnnnnnnnnnnnnnnnnnnnnnnnnnnnnngctgaacatgacccccttcccacccaggtgattctggcagacacgtccccaggccctcctagcctcctgggagggaaagccacttcaagaaggaatgccatccttcttgaaggtgatccccactgtgagaatgtctggacactgcaattcccagccatcgctgctccctacctcttatcttggttcaggcagaaccagtcaacccctcaggtacctggatggccttcctcaacaagtgctgtgtagaaggaccaggccttcctatgcctgacccgacctgctgaaaggtctatgtatactaggctgtgtagaccacagctaacaaaataggagggtgtatcggactgtacacttcctagcagatctgaaaaaactcagaggaatgcacccttggcctggccagggatctaattccagccctgtcagttccagctgagtgactctggagagcccagagccaa

SEQ ID NO: 249508 - DNA, 1095 bp, Homo Sapiens
ttggctaaacttccgtgctaggactttctgcgtgtggaccgggggcctagtcctgcgtgggtccaacacagacaggagaaagctgcctgcttttgtgcctcccggaggtcctggtagaagcgaaacggggacaggagctgcagcgtcccaagcccagtgaggcgaagctactggagacagctctgccgggtccaaagttgggctcaccggctggaacttgaaaccggagcacgccggactcctgctgaagccatcatctctctctcctggccccgggcgccttggccggcgggcacaactggtttcggggccaaggtggtctggaagcctgacggtggcgtctggcctgggctcccgcgagcggaaaaggttcccctcctgtgagagggaaactatggaagttcctacgcccggagccagaactcctgctgctcccgcccgacccaaggtctagcttggcggcctcccacctgtgcttctgagggttctgcttccaagaggctgctggtgcccgggacaccagcagtttcgccatgggtgtttcgccatgggagtttcgccatgggtgactttggcctgagatgcgctccatggagcagattctggagttgctggtgttggaggagttcctgactatcctgtcccaggacatccacagcagggtgcagaagctgcaacgggcgagctgtgaagaagctgtaactcttttaaagtatatgtatgacttttaaaagagagagcttgtgaaactgagggaatagtccacagaactctaccctggaagagagagtcggggtcaggtcttcgggaggtggagggatcgaatgagggaactgatattccaagactccccacatcttggagcttcactcgccaggcatcccgcgctttcctgacgtcgcttcccctagtggtgcagcagcggagagctttgctacttgggaagcagggaggcgtggccgctcaggtggaggcgtaatccagcagaggaaaatgaaagtggcctctttggaatgagagctgactgaagtgctcttgggaagaacaattccttgatttggtaccgacctgatgcgccctgatttgtcaaaggtg

SEQ ID NO: 249509 - DNA, 805 bp, Homo Sapiens
  misc_feature (164)..(202): n is a, c, g, or t
gtacaaaaaagttggcgtagtctttgttcccattagagcaaaataatgaactgcagatgggtttcttttaagaggacttttgaaagaacatatacataaatcttcttgattaaattttatacttagaggactgagactggtaaggtgttggatagggtagcagnnnnnnnnnnnnnnnnnnnnnnnnnnnnnnnnnnnnnnngccccctaggcaagaaaaatctcgttgggaagtcctccaacaagaacaacggctaatggaagagaaaaataaacgtaaaaaagctcttttggctaaagctattgcagaaagatccaaaagaactcaggcagagaccatgaaactaaagcggatccagaaggagttgcaggctttagatgacatggtgtcagctgacattggaattctcaggaaccggattgatcaggccagcttagactattcatacgctcggaagcggtttgacagggctgaagcagagtacattgcagcaaagctagatatacagcgcaagactgagataaaagagcaactcactgaacacctttgtacgatcatacagcaaaatgagctccgaaaggccaagaagttggaggagttgatgcaacaactagatgtagaagccgatgaagagactttggagcttgaggtggaggtcgagagattgctacacgaacaagaaagtagaatcaaaggagaccagtggttcgtttagagaggcccttttcatcctgcggaggagagtgtgacattagaatttgctaaagagaacagatagtgtcaagaaccaagctgtttccccaa

SEQ ID NO: 249510 - DNA, 923 bp, Homo Sapiens
ctgttccccccaaagattgcacactcctacccgctctcgttgagtgctgggctgtcatccccaagggcaagacgagaagcacagctccggaactcaggcaggcccaggaattggcagatactcgtgatttaggctattgtcattagcaatcttgtgctccacttttttcactactggcaaaacgcagggatggcagtcatccgtgcgatatgctaatttgagccaagcattgggctaggtgctgggcaaacataagggcagatgtggtccccatccttgtggaacttacagctcttaactatgtgacctccaaaaagtagaatgctgaaataaaactgggacatcacagagcctggtcacatgagaaagtacatagaaaagcactctgcaaagtaaaaagcatcttgcaaatgtcatgtcaatatcactagtgcactgaggtctctaggccattggcccagcagtcttcttccttctgcatctccccaagagacttccagaaaaagcctaggtgctacttccacatgaacctggcacctttaacacaaacatggagaaggagtggaagaaggcccaccactcctcttgtcccagaggaacagaaataagacgaatgataagcaaatgccctgacgatttcaatgacaggtgacacaatcacccaaggacccacttaaacacatctctatcctctctctgtattttgacgtcagccagtgtttacccttctgacttcatcccacttcatctgcctcaccctttcattgatgtaaattgatttatttcacaatatttgatcctgctctacagtaaacctctaagcatttcctcttcctctgaaagtatttttaagtcactctgagttatccagcaccaatttttttccctacactattctatgattatgttaggattagagccaa

SEQ ID NO: 249511 - DNA, 1184 bp, Homo Sapiens
  misc_feature (729)..(738): n is a, c, g, or t
ttaactgtctaaaattaaaatgtgaatattactgctaaatgaaggcatttaaatttccatagaccaaattactcaagtacaacagactatatattttgtacatataaagatttacataaattatattgttttagctcactagcaaattatacggataaaatactttcatgaacttctgaacatcaacactcttataaaacacctctttgatgattactggcacacaaaaatttccttctctaaagagacaagatacaagaaagagttggtagcagttagctatttggcatttttaaatgattgctatttctagaaaaatagcagcagtattgctcacctagaagagctgaatgtaccgacaatttatagactgctacaacctgaaccatttcatcaaattggctttacattattgtacatgaggccaagaagattggtaaaagtgacagaaaacaggatgtaaaaattaatccacagaacaattctgagccttcttattggcagcagctacatatgagctataaattttaaccacaatttaatacattttgctataaagcacatattataaattctctgctcctggtctgatataatcatctatttcttttactcatagatactgaaaaggtcttaatttggtaattaaaaacttgtcacaacaagtgaataaaagtcagttgttaggtacttagtataagttgacattttataacttgcaatatggtnnnnnnnnnntctgattataacaaaacgtctcattaattttgttgtttttaataattgtgctgatgaaataaaaccaaaataacattccaactctctccactgtattacagtatttatgaactgtattagtgtcactaaattctgagactttcttagataaacatatggatggtattttctaaaacattcttccatttccaccaacttctggatctgtgagttattctaatatattttcaatattattttgttgttaaaaagcaaaagggtaagttgtcagcttatatttttcctgatcattcttcccctgtataacagatactgaaattacagcaaaaatttcataaattccttgcttttactgatttccccttttagaatgaataacttaatatttagactcttatgtactaaaatcaggttcagtggtaaaattaaattatgaaaaaatccaa

SEQ ID NO: 249512 - DNA, 968 bp, Homo Sapiens
  misc_feature (578)..(620): n is a, c, g, or t
ttggattttctagcctgggggatggggttcatatgtgttgttgtaactttagattactaaacaaaacaaactgtttttttgtttgaaggtatcctttacatacctgtctgtaggtaagcaagtgttagtaaaaacaattttgtcaaacagtactcctgacagcttggtaaagtctaggtagagtttctgattttgtattatgtcctaagacttgaaagtgcatttgtctagttgccaaaagttctaaaaatgagatggtgggctttctcagcatctttttgcttcctagaattgagttgctcttgaagtctgtactcctgtgtcagaaagatggcagactgcaaatgggcagtacaggctttgccccatgctttcaaagtaggattctggattgcagtttcaaaaaaatatgatagattattgttatagaatcaaagtgtcctgaagggagaagaatagctatagttgctgggcaaagagtgtaagaaagaaactttagagcatttatcaatacttgagtgctttattatgttccaggctagaaatgtgatcattgcatggcctaagtgtagtcattnnnnnnnnnnnnnnnnnnnnnnnnnnnnnnnnnnnnnnnnnnngtatcgccattatcgagtgttttctagccctggataaagttaatttttttgaagtttgattgccaagcaatccagtgaatctaaagtaatttttctcactttaaagaccagtgatgaggagtctggtccttcctgtactgatactgtagaactccagtcaaacttcagtgcactgctttcttacaggaagacaactcagaacacacagccataatctgctttggtgtcagtcacatcacagtggttatacatttgtcctgaatggtgattcattcctttccatctaacttccttgtgacaaatagcatttactattgaaatagtcttaaaatagggaaaagagtgaaa

SEQ ID NO: 249513 - DNA, 928 bp, Homo Sapiens
  misc_feature (649)..(690): n is a, c, g, or t
ttgggtggactccgggctggagctgtcctgggggagcttgtttgcggcagcggctgctgctgccactgctgtgctgggggcccggtcgccaggcaaaaagccctcccacgtttgaggggagtcatgagccgtttcctgaatgtgttaagaagttggctggttatggtgtccatcatagccatggggaacacgctgcagagcttccgagaccacacttttctctatgaaaagctctacactggcaagccaaaccttgtgaatggcctccaagctcggacctttgggatctggacgctgctctcatcagtgattcgctgcctctgtgccattgacattcacaacaagacgctctatcacatcacactctggaccttcctccttgccctggggcatttcctctctgagttgtttgtctatggaactgcagctcccacgattggcgtcctggcacccctgatggtggcaagtttctccatcctgggtatgctggtcgggctccggtatctagaagtagaaccagtatccagacagaagaagagaaactgaggccagcattatcacctccaggactttctcgttttccaccttggccatcttcttccttcgtcgtctctcctctttaatttcttttctattccatcatctgccnnnnnnnnnnnnnnnnnnnnnnnnnnnnnnnnnnnnnnnnnnaaagatatgcatactgaaaagtatataacatgtacgtacaatttaaagaataattttaaagtgaatactacgtaaactccatccaagtcaagaaattgccagcttctcggaaggccactgtgtctccttcccctacctgcaacctcttccaggctccccttttccagccttcccctttttcccttttattttcatgccttgatttgacttgtgtggtgggaacatgtgaactatgaaa

SEQ ID NO: 249514 - DNA, 1132 bp, Homo Sapiens
  misc_feature (228)..(477): n is a, c, g, or t
  misc_feature (716)..(725): n is a, c, g, or t
atagtttaagagcttagaccagagagagctcaacattcacgttatttgttgaacttccaagaccactttcagaggccctcaactgtcttaaattctttgttcttcgtgaaccatccttcctccccaatccactaactctattttctacctgaaaacaaaccaaaaaaactctcatggggctaagtaccttttttgttttctaatctccttattctctcaactcaaccnnnnnnnnnnnnnnnnnnnnnnnnnnnnnnnnnnnnnnnnnnnnnnnnnnnnnnnnnnnnnnnnnnnnnnnnnnnnnnnnnnnnnnnnnnnnnnnnnnnnnnnnnnnnnnnnnnnnnnnnnnnnnnnnnnnnnnnnnnnnnnnnnnnnnnnnnnnnnnnnnnnnnnnnnnnnnnnnnnnnnnnnnnnnnnnnnnnnnnnnnnnnnnnnnnnnnnnnnnnnnnnnnnnnnnnnnnnnnnnnnnnnnnnnnntgaaattctgaccctgaagagcgtacttctgtaagtagaaagacgtttgctcttaacatatagtctgcacaattcaatatgaacgttttatttccaacaagtatgtagttcactgttccatgacttgtgcataacaatatgaattatctactatgaaaatattgtttattagaatatttttaagatggtacagctccatcttaccaatgatataaccaatgtctaataatcacaagttnnnnnnnnnngacaataaatagaaccaatgttaatacattactgccttcaacattttcaaactaacagtttctcttaagtttagtctatggcataagtcagtacacccattaagtctagggactactatatcttctatatcccctttctcatataaacacggaaataacacagaagggtaaggtttgggattccatttgaacagcagaagaccactaggtacgtggctcatgcctgtaatcctaacaccctgggaggcaaagacagggatcgcttgagcccaggagtttgactgagaccagcctgaacaacaaagggagacccccgtcccttcgaaaatgttagctaggcatggtggtgcatgcctggggtcccagctactcagaagactgaggtgggaggatcacttgagcccaac

SEQ ID NO: 249515 - DNA, 912 bp, Homo Sapiens
  misc_feature (300)..(355): n is a, c, g, or t
tgagccaccatgcccggcccataagtaccgtttttgaggttcagtcttaaacatttgctttaagaaaacagtcttgaatttcacatgctgctatttttatattttgccattttacagtactgttttgttttgaattcatgcatatcattgaaaatttctcgttttcattttcttagatgacttcttgtctgagacagaaaattttcctactacagcagtgcagtccagaggttaagatgtattagaattatacaatatcagtttaaaaatctgtatgcataaagaatgcaccactcaacnnnnnnnnnnnnnnnnnnnnnnnnnnnnnnnnnnnnnnnnnnnnnnnnnnnnnnnngcagctacatttgaaagtgatagaataaagagattttaatgagttatcactttttcagctgatatattcattttaatggcttttttgaaagttcctttttcatgaacacacccgagaaatcttatatagacactttgcaatatttaagaacctaatgctgtttaattttggtacagcttccacattgcatgttcactttagtatttgcaatttgatatatttcatggtggcaaaaatattagctctgttttgggacattttaaaatagaactatccttgttcgatagcataggaaaatgttctggtgattgtcagggtctcctaatatttatctcaattcttttataagtctatggaaattatttaattattttaaaacgtacacacttttcttgtaaatatgtcacatctgagttcaaaaaaattacttttgaataccttaatatttgctgcattttttttccgtatatataacatgtcttctttcagaatgggaatatatgtgtgcctcccaacatttactgttaaagtgtgttatcttttatatgtcaaactgg

SEQ ID NO: 249516 - DNA, 999 bp, Homo Sapiens
  misc_feature (174)..(189): n is a, c, g, or t
taattaaaagaagctgaaatttacacctttctttaaattcaattgtattccaaattaaacttaagattttgtgtttttcatgattttggtgtgttgtactgacaacttttaaagtaaatataaagatttttgtcatagaaaaacaaagaaagcaaagccaaactcctctaatgnnnnnnnnnnnnnnnntagaaccatcaagaaactttgtgttattcctttagcacaattctgggtttgtctcctttaccttctcttcaaaatacaatgtctaaacctctcagcttcctggtgacagaagacaacaaggaaacagggaatcaagcaactctataaaggagaaataccctacgttttcctttctgctctgttcaaaatgacttttgaatctgtaagtgctctaaggtctgggcaaaatgagctgatgatgtatggtgataatgacttggctggcacctgaaacaagagacccttttaaagaaatatttagacttcctgttagaggcagcacagtcccaggtgacagtcaacagaggacacaaaatactacagttgataaaagaatgtgaaaaataaaaactttaacatactaacaattccaaagataaccaaataaaacattccaaactcccaaatcactgtgccatagcttaaaacaattttgaaaaaaggtatcactttataatactactaacctaaaaaaatgctttattttttctttgttgcacctatacataatttgacacagttgtgaccatagtgttaatataatgatttgttttcataatgaaatattaagctatatacagaatactatagaaagcatagtaccagtactttgggaagattttttaaacattggtattgaaatggagaaaccctcagctatctggaatgattcattgcttataagttccagtttgctaaagctttactgtattaaatctttcttagaatatttgaaaacatttccggtataattctcttcatattctccaa

SEQ ID NO: 249517 - DNA, 1296 bp, Homo Sapiens
ttgggaagatgataattgtgaaaacctcctttggcttatttgcttttccagattttagtctcctttctccccatccgggaaagatggtggaagacataggctaaatttctccagcctcacaatggtcttcacttggtctgacttgtaccaattctagcacccactgaaaaacaagttgagtagagagtgtagagtgcagaaatgtggcttttgccccactttgcatctccaaaattacaacggttggccgatcccatttgaggacaatgcttagttataagtctccgagttggaaaaggaagaaagccagagctgtctagtttcattcattctttcagtaaatatttattgagtacctactgtgtgctaggcattgacctgggaactagaactagagatacttcacagaataacagggaaagttccctgtgctcatggagcttacattctacagggagaaagagatagccaatacataggaataaatatatacaaggtatcatgtagtgataattgctgtggagaaaaataaagcaggggagggagtaagaaatcctggagatgaggctgcagttttaaatggggcctcactgggaatgtgacgttgagcagagacgttagggaagtggatcctggacaaggcattccaggcagaggaacaggatgtgcactgccccaaagtgagaatttgctctacgtggtcaggaaagagcagggagaccaagcagagtcgtgggcaggggtagaatggaaggagaggcggctggggaggacaggtggtggagggccttggcttctgctaagtgagatgggaaccactggagggtttgaacagaggagtgccttgattgatttatattttgcaagggtcattctagctgccatattgtgaaaaactttagtggacaagggcagaaggaagagggaagacctgttaggaagctactgcaaggttccaggcttgggcctgggccacagcaacagcagtggtcaaatatctagatttattttgaaaagagccaataggatttgctgagagtttgaatgtggagtgtaagagaagaaagagttaatgatgacattaaggtttttggctgaatagccgaaagatggagttaccagttactgaaatatgggaaggatgggctgggttagtaaggaatttggtgcaaaagcagctgtcctgtggttgcaatgggacgttctggctgcaaatcaaagtggaaaagttctccccagtccagcctgcagcgagctctaaacaggatctaaatgcacttggcttatgttgggggg

SEQ ID NO: 249518 - DNA, 956 bp, Homo Sapiens
gccaactttgtacaaaaaagttggctcttggaagaaacctcctgatgattagcagcatgaagagcataaccgataactgcagggatacagttcagctgaggaggaaagtgggccaagatggagtgtcctatctataccacccatcacacagaacattgaaatgcatctatattagtggtgagaagagaggcggcctgggggtgaccttgaaataaaaaagaagcatatggaaataagcctagtgctctcaaattctggatctaaaaagcaacaaagagaatctcagtggttgatgtgtcggaaatagaaagtgaatgagtttgagattttatatatatatatgcaaataataacaaattgtcagttttctctgacaaaagttttaattctgcttcatggctttaaacatatgcagtatatctagcttcgacttagaatatagaaagctggaaggaatattgtttccacccttacaataaacacaacaaaaacatgctggattgtctattaaattacaactttcttcaacctactagattgctgaggacaagaaaacaaactgaagaaaaagaacctccagggagacaaggaggcaagcatttgtgggagaagatacagctgatgacaagaagtttgctaaatttcgagtaaataattgaggccaagggtgggcaagtgtgagagtatagaaaccctcagcacccttttctcatggacctcttgagaaatatgggaacacagcgagacgcagaagcaaacttcctttgtggtgaaagtgtaagggagagaacagtggtgcccacaggcaaagcttcactaaagtccttcactcctatcgctcctatggtacaaaacaaaaagctgggtccaggaagccttgcaaagctgttcttcccatggaaaatctatgggcagttgtggtagggaagactgagggagggagtcagagagaggaa

SEQ ID NO: 249519 - DNA, 895 bp, Homo Sapiens
  misc_feature (541)..(568): n is a, c, g, or t
tttgtacaaaaaagttggctgaactaattccttataaaaacttcaaattagcccttctgagcaagtgggcaggttctgaaacctgtgtgttttgtagcctaatgaattgatggaatgcacatgaacccatcttcacagcatgtgaaagaaccaacctgcctggcagaggtgcagaaatttccagaggactggcctagctataaacaccagcaacatctgcaacacaaaagcccttgaacttctaggcaaggactcatgctaacctagcagtactccagattgagaacgcagatggacaggtgtctcttgagcctgtgttccaagatgtctgtggaaaggattgcaactgtcatcctttggcacactcagtggaacctgtgtgagctacatgttctgctgcattatgggaactcatcaaagggccagattgacatcttgccagaaaaaccagtgttttgaggagcaaaagttttgtgtacttcagtaattgtcacatgtgtcttccacctccttgacatttatttgttaatcatatgatcannnnnnnnnnnnnnnnnnnnnnnnnnnnctcagaagtacttctggggctttgattgcattatttctcttttaatgtatcatttcagtgttggaaagaaaaatctggatctttatgtggggacctattttaacatgtagatagttattcagtagatagtaaattatttctcttaaagagatatttccttttatttctgtacaataatatgtatgaactcagttactaggggactgtattgtgacattatcaacctttattgctatttaaaaatgatagtttgtagaactgaagatttccattgatgtgaagcacaatttaatgaaataagttaaaatataaaactgttgtgatgtc

SEQ ID NO: 249520 - DNA, 845 bp, Homo Sapiens
  misc_feature (400)..(486): n is a, c, g, or t
ttggaaatattattaaggagggaaaaatagcatagataaacattctcagtaacattattatttgtctctattccccagccctgtatgtccaggtcacaatagcttaacaactgtgataagctatattttttgagcaagagagaaaaaaatgccacatattaggaaatcctgctaagaatgtatcaaaaaagccaaggggtgcaagataactttaggtaaacctacagaatgaagaagaaatcatgtgcctcataagttagagatattttctctccttttcaactattttaatgctttagggggtaaataactaggccagaaatgtgatctactcacttcatatctccaatattgattaatcaatgattatagctcctgactcatgttttatgcatgcttnnnnnnnnnnnnnnnnnnnnnnnnnnnnnnnnnnnnnnnnnnnnnnnnnnnnnnnnnnnnnnnnnnnnnnnnnnnnnnnnnnnnnnngaattttaattctctctgtcactttgcatcaagctaaaagcagtaaaaatatgaaaatttgcagataaacagaaattttagtatgttattactctgtaactacatctgacttttcacatttttcagtaagctggattagaacattgaagttattttgcattactgcttgacctattctatgtgggacttataattatttctgcattttataaaattttaggtcagcttttagcaattcattatacctttacatctaatatactattttcttccttttagaaattctattaataaaaatagattggaacatagcagcattgttggcaaacccaagctttattaaatattttaattttatc

SEQ ID NO: 249521 - DNA, 907 bp, Homo Sapiens
  misc_feature (242)..(283): n is a, c, g, or t
ttgggcttccagtctttggtcgggtttcggcggcttcagtgctcggggaggaggcagtgacggccggtgagattggaagtggcggcggcggcaggcggcagaggggagtccgaggttatgcgtctcaatgatcccgcggaaacgctacgggtctaagaacacggatcagggtgtctacctgggtctctcaaagacacaggtcctgtcccctgcaactgctggcagtagcagcagcgacatcnnnnnnnnnnnnnnnnnnnnnnnnnnnnnnnnnnnnnnnnnngacaccatgtcctgccgggatcggacccaggagtttctgtctgcctgcaagtcgctgcagacccgtcagaatggaatccagacaaataagccagctttgcgtgctgtccgacaacgcagtgaattcaccctcatggccaagcgcattgggaaagaccttagcaacacatttgccaagctggagaagctgacaatcttggcaaagcgcaagtccctctttgatgataaagcagtggaaattgaagagctaacatatatcatcaaacaggacatcaatagcctcaacaaacaaattgctcagctccaggatttcgtgagagccaagggcagccagagtggccggcacctgcagacccactccaacaccattgtggtctccttgcagtcgaaactggcttctatgtccaatgacttcaaatcggttttagaagtgaggacagagaacctgaagcagcagaggagccggagagagcagttctcccgggcacctgtgtcagccctgccccttgcccctaaccacctgggcggtggtgctgtggttctgggggcagagtcccatgcctccaaagatgtcgccatcgacatgatggactctcggaccagccagcagctgcagctcattgac

SEQ ID NO: 249522 - DNA, 924 bp, Homo Sapiens
  misc_feature (62)..(71): n is a, c, g, or t
  misc_feature (712)..(828): n is a, c, g, or t
ttggttttgaagttagttttgtcacttaatgttttttctactgctgtttgctatttctgtannnnnnnnnncacagaagaactaacaaaccaaatctaaatctgttttcagccaggaaccatgattgaatggggcaattactggtgagtatattactgaatggtgattttttaagtcttgtgaatagattagtttaggccatagtgttaattctagggaaaaaaatctgaggatagtactgtgacttaacactgcactaatgtttcgtttgatgtttttattatgagatttttcaaacatacaaaactagagagaataatggggctccccttccacatccatctcttagcttcaataattaacacatggccaatcttgtttaggcctaactccttcaacccagattgtttggaattaaatcccagacagcattctatttcattcataaatatttcagtactatatatatttctaaaagataagcaccttttttttaaaagcaaaaccaatattgcataaggttagtttacatacttcttggatatcatcttttctgaaacgttacttttgtcatatatacacaccatgtcaataatggtttcttctttttttccttgctagtttgagtagaaaaataacaatttttccacaagttgatatgtagattcagcagaatccctatcaaactctcagcaggctttagaagtgcaannnnnnnnnnnnnnnnnnnnnnnnnnnnnnnnnnnnnnnnnnnnnnnnnnnnnnnnnnnnnnnnnnnnnnnnnnnnnnnnnnnnnnnnnnnnnnnnnnnnnnnnnnnnnnnnnnnnncccaaccctctacaaaattaaataaaataaataaaactagccaggtgtgatgccacatgcctgaaggtcccaggtatttgaaagctgaataagaaa

SEQ ID NO: 249523 - DNA, 880 bp, Homo Sapiens
  misc_feature (124)..(136): n is a, c, g, or t
ttggataacatcatccactagattatatttaatttataaaataatttccaaattttccaatggcactaattttttcttttcaattttgaaggattctcttaccactctgcttagtaatttctcnnnnnnnnnnnnnacatctttcataatgttgaaaaactaattctgctttctttttaagagaaaagaaaccttgtttattccctgtgaaaatgagaagatttctaaacagctccacctttgttacaatattgtgaaagatcgttatgttcgagtttcaaataacaatcaaaccatttctggatgggagaatggcgtgtggaaaatggaatctatattcagaaaagttgaaacagactggcacatggtatatttggcccgaaaggaaggatcatcttttgcttatatttcctggaagtttgagtgtgggtcagttggcctaaaagtagatagcatttctattagaacaagtagtcaaacttttcagactggaacagtagaatggaaattgcgatctgatacagcacaagtagaactgacaggcgataacagtcttcactcctatgctgatttttctggtgccactgaagttattttggaagcagaattaagcagaggagatggtgatgtcgcttggcaacacacccagctgtttagacaaagcttaaatgaccatgaagaaaattgtttggagataatttataaaattcagtgaccctttgagaacctgaacattatagaaaagctggcaatattcctggacttactgaagtagtctgttggttcagtgcatgcttagttggcagttaccaccctgtgctagcatatttcttttgctagctatccatcatgtaaccctcatgaaaattatcctttatac

SEQ ID NO: 249524 - DNA, 841 bp, Homo Sapiens
ttggtgaaaatcctgttttgattctaggccaaggatgtggccttggtcattgtgggagacttctctgttgttaattactgaaagctttgcagtctctgaatattgcctggttttatacttcctatcactggttgccccccacccaaatgtgccatcatctcatgctagacctttctaattacagtacacccaggacctgtggtctgttacacttcatttgtaatactctgttctgtctcatatgctttttatttcctaccagtgtaggtatctgcgactgaccttcccctaccatctgccatttctcaatgatcaggtctaatcctggccccacccctaccccttacatggccttgttcttgctgcataatccaagcagtgacctaagaacgtaagaatcactgtgtgagttggtgatacatgtcacagaagtacattgaacagagttgtaagagatcttagtagttccctagcctaagcctctcatattatgtatgaggagactgaggcaaagctttgcactctgtatcacagtgggtggcagagatagaactggaattaatagtaacctcattttaaatttctgttatatccactttgaacaaatagccccatcagtatgacattttgttatgacaaaaaatcatttcagtatgcactatcacctgtctgttaagagtttacccttgtgtatttctgtttttacttggaaatacccaaaaaggaattatttgaaaatttgtctgttaccataactgcccatatgtgaaaagctgggatttttaaaaaagtaaagcagtatcattccaccagatgtcactgtttgcatgtagcaatgaaa

SEQ ID NO: 249525 - DNA, 1009 bp, Homo Sapiens
ttggctaatattagtaaatatcttaatttttcattagattcatatcatttaatttcacatattcaacacctttaaatgttgtaatcttaatatgcgaagtgtgcctctgcaagatactaacacaaagctcatgttaagaaaacagttgaggactcagaagtcagttcgaaaatgcactttcctaacagtgaattcacaaccctgaacagcagcatttttggaaggcaaactgttcgtgatggtacaatgtaaatggggacttctgtaaagttctcagtttcggtccatgtggtttatctttacattttaaagatcaaagaagtctttacaacctgaatccaggtctaaaacacactagagtagctggtgactataaataatattttaaaatgctgtgtctacaccatcaagactgtgtctacactatcttggctgaacgagaagagatgtaaatgctgggtggtcccgttgacccacggggttgggtacaacagaaccagccatcggagttactcgccaaagcagcatttgctgtccagctgcctgtcgtttggcccagaccaccctcagaaaaaaaccagctgcctctcccattctctcctcccgttctgccacagcggcctgggctggtccagtgctatgcctggaggctcaacacaagacttcccctccaaacattcagatgaactgagcgtcttacacacgcagtacagaggagcacacattaggatagaaacagtagaataaccacggggcaattaaactttaaattttctgagcagcattttggtatttaaacatttcttgtaaaaagctgagacagtttgtaagaaaagaatccttaaaatctagatttataccattttttaaagtcccacctttcaatgtttaataaaacaaaagagaaatccttaatctaaaggctaaattatttttgaatggaaatactactgagaccattgacactggatacagtaatgatcccattacagatagattgactgacggg

SEQ ID NO: 249526 - DNA, 1163 bp, Homo Sapiens
  misc_feature (677)..(693): n is a, c, g, or t
gagttgaatcacagcagacaagaccctccatggccaccaacccggggaggaaggggtaaagaatgtcacagagggtcctgcattccacagaaaaaagatacagagggaccctgagacaccctgaaacaatcttccaagtgcttactgtagaaaggggtggtgagacgggagaacccaagggtctccggtctgatcccaaatgaaacctttaggtaccaggtaaagtttccagcccttggtaacgcccagacaaaggtccttcccctctcctggcacccagaagaggccactggcagcagcagcagcagcaagtccgcagcctctttccccatgggacgggtctacagtgaactctttccaggcctccccctggttccagaggatggggacccaaggcctcgaactagaagaaccctagagccagcaaaaaaagccttctaccttccgctttccctacctggggaaagtctggacccagaataagccatcgtgggggaaccccctttcccagtatggcaggataagtgagcagcagctgtgggggcaggacagaaggacaagagtctaacacacggagggtggtgtgagagggaataaagggctcagtccacaggcagaggacaagggctggtactgaccattcccctcacaggagtgagcgcctcaaaggccacccnnnnnnnnnnnnnnnnntacgaagtaacaaatcctccccagcttccacaaggcaaagcatccccagcctgggaactgtggagttcttgttgccgtcaccatcgtaagcctgagtcacagagctcggatcagtaggaaccgtagcgatcctgcaaggaattcatcacaccattggccagcacagccattttcccagccacagacttgacaccctgcttaaactgggcaatgtccgctgtaggcagcacgttccccagagatacacttcctgctccgtgagctccatccatgtccccaaagaggtctgaagagctgatggcactgctgcctgagagctgctgcagccgagacctggcctcatactccgcatccacctcccgcccaaagaacatgtcagatgagatggctttggctcctgcgaatttctgacgcgcctcactagactcgaggcctgagctccggttctccacttccctccggtttgccaa

SEQ ID NO: 249527 - DNA, 1457 bp, Homo Sapiens
  misc_feature (591)..(618): n is a, c, g, or t
  misc_feature (741)..(758): n is a, c, g, or t
ttgggtattttgtgagcaagaaatttaaaaattgtttccagtcatgcctctgctgctgctgttaccagtccaaaagtctgatgacctcggtccccatgaacggaacaagcatccagtggaagaaccacgatcaaaacaaccacaacacagaccggagcagccataaggacagcatgaactgaccacccttagaagcactcctcggtactcccataatcctctcggagaaaaaaatcacaaggcaactgtgactccgggaatctcttctctgatccttcttccttaattcactcccacacccaagaagaaatgctttccaaaaccgcaagggtagactggtttatccacccacaacatctacgaatcgtacttctttaattgatctaatttacatattctgcgtgttgtattcagcactaaaaaatggtgggagctgggggagaatgaagactgttaaatgaaaccagaaggatatttactacttttgcatgaaaatagagctttcaagtacatggctagcttttatggcagttctggtgaatgttcaatgggaactggtcaccatgaaactttagagattaacgacaagannnnnnnnnnnnnnnnnnnnnnnnnnnngtccttcagccaaacacaatatgggctcaagtcacttttatttgaaatgtcatttggtgccagtattttttaactgcataatagcctaacatgattatttgaacttatttacacatagtttgnnnnnnnnnnnnnnnnnntagtattcaggtgagcaattagattagtattttccacgtcactgtttatttttttaaaacacaaattctaaagctacaacaaatactacaggcccttaaagcacagtctgatgacacatttggcagtttaatagatgttactcaaagaattttttaggaactgtattttattttttaaatggtgttttattacaagggaccttgaacatgttttgtatgttaaattcaaaagtaatgcttcaatcagatagttctttttcacaagttcaatctgtttttcatgtaaattttgtatgaaaaatcaatgtcaagtaccaaaatgttaatgtatgtgtcatttaactctgcctgagactttcagtgcactgtatatagaagtctaaaacacacctaagagaaaaagatcgaatttttcagatgattcagaaattttcattcaggtatttgtaatagtgacatatatatgtatatacatatcacctcctattctcttaatttttcttaaaatgttaactggcagtaagtcttttttgatcattcccttttccatataggaaacataattttgaagtggccagatgagtttatcatgtcagtgaaaaataattacccacaaatgccaccagaacttacgattcttcacttcttggggttttcagtatgaacctaactcccaccccaacatctcccttcccacat

SEQ ID NO: 249528 - DNA, 512 bp, Homo Sapiens
caatgcttttttctataaaaaaactttgtacaaaaaagttggctcgcctgccagctccctcgccgcgcgtccgtcctccgtcctcccgggccagccagccagccagccagccgggccggcggcgggcaccgggccgtcccgatgcccgagccaggccccaggatgaacggcttctcgctgggcgagctgtgctggctcttctgctgcccgccctgcccgagccgcatcgccgccaagctggccttcctgccgcccgagcccacctacacggtgctggcgccggagcagcgcggcgccggtgcgtccgccccggccccggcccaggctaccgccgtcgccgccgcggcccatccggcactgcttcatcccgaggagggcgcgggcgcggggtccggtgcgtgcagcctgcacctcagcgagcgtgccgagtggtagtactcgcagcgcgagctggacgccgtcgatgtcttcttctcgcgcacggcccgggacaatttgctcgtctgcatgtt

SEQ ID NO: 249529 - DNA, 1026 bp, Homo Sapiens
  misc_feature (705)..(713): n is a, c, g, or t
ttgggaaggaattctggagctttttgacacaaaacctattaccacatttagcagttaaatggctataggtgggaagtaggatttagatgtatagaaaagtaagaaaatcttacttagaaaaaagccccttgaaacttgcaggatttacttaataaaaatacacgctatgagtcataattgtgccaagttgtttcatgcagtcctcaaaaattagatgtaattgagctttgtgtaatattatgtcagctttaacatataatattttgaatattttagctatatttagtggctttctgcaagcaactagaacagagaagtaatgggtcaataatcttgaccttaatttaaaactttcaatggagatagggctagaaatacttttgccaaatagcattcttattcactttatgccggtatttagaaaaaataaattatagcaagtatgatttctaagaataatgtttttctataaattactaattgtaaaaagtcttgctttttaaaacaagttggtaatgcatatcatggaaggcatattttgtatgtataaattcaccacaattaaagattattcttgtcagtccttgctatgtagaatgactattctaaatattaatgtattaaaaagaaaatacaacaaaatgtatatttagacacgagcttacatggcataccttatatttgtatcattctttaaagtttacnnnnnnnnnccttatgtttttatgtaatcagtcattacactagggagaaatttatcagctttagttctaaatatgctcatgaggtataaaagctatttcttcatcagtattttgcttttatgctgctttttctttttgatactccaggtttataaactatcttttaaaattttaagccaggacttcaaaaattgtagagtacttgtttggcgttccctaccttcattctcttagggttaaggagcctttctttctgcagctaagggcagaggctgtgcctagggctataccaccactagcatctgtatttgagactgtttcc

SEQ ID NO: 249530 - DNA, 1445 bp, Homo Sapiens
  misc_feature (987)..(1102): n is a, c, g, or t
  misc_feature (1141)..(1224): n is a, c, g, or t
ttggcatttccatcaggttttttatttacttcatccagatccatcagaggaatcactatctatggcagctatagccttacaaaatgtatttcttaaataataagacttaaaaatgaaaagtaccccttgatcaatgggctgcagaatggatgttgtattagcagccatgaaaataacattgatctccttgtacatcttcatcagacctcctgggtgaccaggtatattgccaatgagcggtaatattttgaaaagaattttatttttctgagcagtaggtctcaacagtgggcctaaaatactcagtaaaccgtgatgtgaacagatatgctgtcatccaggctttgttccatttatagagcatgagcagagcagattttacataattcttaagggccttgggatttttggaatggtaagtgagcattggcttcagcttaaagtcactagccgcattcgtccctaacaggagagtcggcctgtcttttgaagttttgaaggtatgtattgtcttctttctagctatgaaagtcctagatggcatattcttctaatataaggctgtcttgttttcattgaagacctgttgtttagtgtagccatcttcatcaatgatctcagctagatcttctggagaacttgctgcagcttctccatcagcacttgctgtttcaccttgcacttttattttatggatgtggcttctttccttcaacgtcctgaatcacccttgctagtttcagacttttgttgtgcagtttcctcacctctctcatccttcatagacttgaagagagttagggccttgctgtggattaggctttggtttaagggaatgttgtgaccggcttgattttctatccagaccactgaaactttctccatttcagcaatgaggatgcttcactttctgataatttgtatgttcactggagtagcgcttttttgttgttgttgttcttttgaaacagggtctcactctttcannnnnnnnnnnnnnnnnnnnnnnnnnnnnnnnnnnnnnnnnnnnnnnnnnnnnnnnnnnnnnnnnnnnnnnnnnnnnnnnnnnnnnnnnnnnnnnnnnnnnnnnnnnnnnnnnnnntgtccagctaatttatttgttatttttcatatagatggnnnnnnnnnnnnnnnnnnnnnnnnnnnnnnnnnnnnnnnnnnnnnnnnnnnnnnnnnnnnnnnnnnnnnnnnnnnnnnnnnnnncccagagtagcacttttaatttccttctagatcttttcctttacattcacaacttggctagctttggcacaaaaagcctagctttcagcctgtctcagctttcaacatgccttcctcactaagcttaattgtttctagcttttgatttaaagtgaatgatgtgtgacgcttcctttcacttgaacacttagaggccattgtagagttcttaactgggcccc

SEQ ID NO: 249531 - DNA, 942 bp, Homo Sapiens
  misc_feature (615)..(654): n is a, c, g, or t
ttggcaaccagcttatctgcaggatgtttcagatctgataaatcctgatggaaactggtatgatcagaattcagtaccatccacattggaatatacatggaatattgtaaaacctacatgagcagatgaaatagaagcattaaatatttttatctatatccaaaaaggagcacatttttatatttacaaaaccgtttaagctggtttgaataatttaaaaaagtttcagcacacctatacccccgatctcagagggggccaccaatatctagctatggatcgtgtgttttgtttagaaatcagtagcttggttttcttacttgagccaatatattttcacttatttattatcataaaaatttaccagtctgaatagatcttgtaaatatttgtgaatagaatgaatacctttcatgccactgcagccactggaaatacattctgtggtgtcctagaagcattattggtaggttctaaagttttctagactttcctgtcaattgtaagtaattgtgatatattctatgcagtggatgaatgttctttaaatttgtgtaaatacttctgcaaaggtactgatgctgtaaagtcaaaacagttttgtggaactgtgannnnnnnnnnnnnnnnnnnnnnnnnnnnnnnnnnnnnnnngtattatacaccttgtagaactcattttgctggctgaaagagtatggaataatatatctcatgtcattttttagaagaaaaactatttgaaggtattttttggtttttctttaacatgtatccactgtaaacgtttgtcgtgtacaagctcagagcttgggacagaattttttgtatttgtaaattggtttaaatacatggaattttatacaggttttctcctgtgttatatatgcattatgtgcaggtatgatatttttcttcactactttttctatcttaatatag

SEQ ID NO: 249532 - DNA, 1412 bp, Homo Sapiens
  misc_feature (259)..(387): n is a, c, g, or t
  misc_feature (856)..(884): n is a, c, g, or t
  misc_feature (900)..(951): n is a, c, g, or t
tttctattgtttagaattctctctttaacttttgacagtttaactataatgtgcctcaaagaggagacttatgtgttaagtatattcagaagtctttaagcctcctatatttggatgtctatatctcttttaagatttaagaaatttttattatttcaggtttaataggtttttcaatgcttttttctatctcttctcctctggcattcacaatagttgaatgcttgttcacttgatggtgaccaatatgccatttagnnnnnnnnnnnnnnnnnnnnnnnnnnnnnnnnnnnnnnnnnnnnnnnnnnnnnnnnnnnnnnnnnnnnnnnnnnnnnnnnnnnnnnnnnnnnnnnnnnnnnnnnnnnnnnnnnnnnnnnnnnnnnnnnngttatttcattcattaaatttttcagtgccaggaatccttttttatgatatgtcattaatgtttttttaattgtgtggtggtaggatggtaacagatgctcataataactttgtttgtaaatatgtattctttgatttaacccaccaatactactactactactgccatcattcactgattcaccaaaaattgaataaataattgtcttacttgtttttattaatctttcttacatttatgtatagctgacatttgtttcaatgtttaatattagaaggtttttgggtctttattttgaaggttggtgatgttttcttgaccagaaatatcacgtagtaacttaactgatttatattaattagcctatggtaaaattggttttgatatatacaatgtttttcttaaagtcatagtttcctggaacctatcaatgacattaagttaggacttcctgtactgtactaccannnnnnnnnnnnnnnnnnnnnnnnnnnnngtttctcaaataaacnnnnnnnnnnnnnnnnnnnnnnnnnnnnnnnnnnnnnnnnnnnnnnnnnnnnttggtttctcagataaactgcaaattcatgcacagacccacacaaaaagaatagaaagcccagaaacacacccgcacaaaaacagtcaactgatctttaacagaatagcaaaggcaattaaatggagaaaggattccaccttttcaacagtgctagaacaactgaacatccatacagaaaaataatgaacctagacacaggccttactttgtgtcactcgtgagcttagacaggccaagtcttcccaatacccaagactgaggctttcatcccagtattcaccagtcgattacttaatcatccttgtgaaagaacgacctatagcaagactgacctgccacctccaaaaacactgcattctctcacttttcctcatgctattctcccctccaaaattgccaattctctatacaaatagtaagtttcacttctttgatgaatgtttctctaatttcagccaa

SEQ ID NO: 249533 - DNA, 898 bp, Homo Sapiens
  misc_feature (374)..(410): n is a, c, g, or t
tcagctcaactgaaggaacgcataagccaaacaccagagcccggtggcaagaggagagcccaaactgtctcttaaggaaagagcaattccattctaatgcactttcttagcactgtaaggtgaatttttttctcatctccctagaactattgttttgttggtttttccaaagatgttcccaagaccagtcctcttttctatctacacgtctaccagtggtggccatcttgaactgagttcaatttgccttggccagcagaatctgaagtcatcccagagaccaggaagtacaaacctagtatcatgaaggtgtcccatggttggagtggcatcttgtcattgtgatctgggtgtttagaaattacatatctagnnnnnnnnnnnnnnnnnnnnnnnnnnnnnnnnnnnnnaagataagagtcctgccgcacctcttttctgtctcccccagaaccatctgggtaacatctaaggaaatgttccctctcttacatgcttcctcccaaccccctgcactctttcaacaccttattcatttaaatgaatggaactttctcttcccccaaagcccaggagttcatggcaaagtttaaaaccatgacatagaatacttagatttgggggaaaaaaagcaccatctacctgattttcctttcctcatcccaatatcccatctacatgctaactccctagaagcaaacttgcctacctctgaggatgctacactcagtggatggggaaaccatctgtcactggtgaacagagccaatggttcagccaggtaatcctctggagaatatggacagtatcacgtccaactcaaagcatccatgcaggtgagaacccaagaggcagcattccggttaatattgagaaagaaagtgacaagttgccccaa

SEQ ID NO: 249534 - DNA, 902 bp, Homo Sapiens
ttggagaaatcatagaccgaccaggtaaaggcaaagggatgaattcctacttcactaacccttccttatcctgccacctcgccgggggccaggacgtcctccccaacgtcgccctcaattccaccgcctatgatccagtgaggcatttctcgacctatggagcggccgttgcccagaaccggatctactcgactcccttttattcgccacaggagaatgtcgtgttcagttccagccgggggccgtatgactatggatctaattccttttaccaggagaaagacatgctctcaaactgcagacaaaacaccttaggacataacacacagacctcaatcgctcaggattttagttctgagcagggcaggactgcgccccaggaccagaaagccagtatccagatttacccctggatgcagcgaatgaattcgcacagtggggtcggctacggagcggaccggaggcgcggccgccagatctactcgcggtaccagaccctggaactggagaaggaatttcacttcaatcgctacctaacgcggcgccggcgcatcgagatcgccaacgcgctttgcctgaccgagcgacagatcaaaatctggttccagaaccgccggatgaagtggaaaaaagaatctaatctcacatccactctctcggggggcggcggaggggccaccgtcgacagtctgggcggaaaagaggaaaagcgggaagagacagaagaggagaagcagaaagagtgatcaggactgtccctgccacccctctctccctttctccctcgctccccaccaactctcccctaatcacacactctgtatttatcactggcacaattgatgtgttttgattccctaaaacaaaattagggagtcaaacgtggacctgaaagtcagctc

SEQ ID NO: 249535 - DNA, 537 bp, Homo Sapiens
ccctgcagccatattcttatcattactatttaaacgagtgaagaaagcatttttaaggttcctattccaaatttgcctaaaagatgaactccagcccaggggcaggagacttaggctggaaggcactgccggtcctagtccgctcctcctgggcccctgggtctgcggtgagcaggtggcagctctgttgtctccctcccccatctatgcgggcctggacgccgccccaatatcgcaggccacatagggctccacgcgctcctccctcttgctctgctcttccctcgggccctgtgggaattctcgagtcaagcccagccgcccctgctgacccaggtcaaggctctcacggagcatggggcctgcacgctttgaacctcttgaaacattataagcagaacattgccccacagcctgagagccacagccgtgtctctcctaagcaaggatggtgcttagacaaggaaaaaagacagggcctggctttttcatcctaggatttcaaagtgcatttagacacgctaacttatttgtaca

SEQ ID NO: 249536 - DNA, 1356 bp, Homo Sapiens
ttggctttaaggtaaccgtttcactgcacatgacaactctcagtggctctttcagtcaaatagctctattgtcactttaaaaaagaagtgaaacattaccttaaagagccactgagagttgtcatgtgcagtgtgtgtgttttaggcctctgagggcagctgtaggtattgctgaagtcaaatatgaaaaaatctcaagaaatgatcgtgtaatctaaacccttaaaccataagcctgtaaccgttagcatgccttgagatgcacaggtgttcttgtcacttgatgcaggcaacaagtgttgcagcagttgtgtggcacgtggctaggaactgtcagaggtcgccacatcactgatggtggccgtatccttgctgtgcccatggccgtcatcctggaataggaggtcctgcggaaggagccacagaaaccttggcctgttcactgcatttctgagtttccctgagtttgtcatttttggtgcctgcaggtactggtagctcttgcttgtgacctggagctggacactctgccttgctgtgccgagacgcacaagtgggcctggttccggaggtactgcatggcctcccgtgttgctgtggcccttgacaaaagaacaccgttgccccgtctgtttcttgatgaggtggctaagaaaattcgtgaattaatggcagacagcgaaaacatggatgttctgcatgagagccatgacatttttaaaagagagcaagacgaacaacttgtgcagtggatgaacaggcgaccagatgactggactctctctgctggtggcagtggaacaatttatggatggggacataatcacaggggccagctcgggggcattgaaggcgcaaaagtcaaagttcccactccctgtgaagcccttgcaactctcagacccgtgcagttaatcggaggggaacagaccctctttgctgtgacggctgatgggaagctgtatgccactgggtatggtgcaggtggcagactaggcattggagggacagagtcggtgtccaccccaacattgcttgaatccattcagcatgtgtttattaagaaagtagctgtgaactctggaggaaagcactgccttgccctgtcttcagaaggagaagtttactcttggggtgaggcagaagatgggaagttggggcatggcaacagaagtccgtgtgaccgccctcgtgtcatcgagtctctgagaggaattgaagtggtcgatgttgctgctggcggagcccacagcgcctgtgtcacagcagccggggacctctacacatggggcaaaggccgctacggccggctggggcacagcgacagtgagaccagctgaagccgaagctggtgga

SEQ ID NO: 249537 - DNA, 1206 bp, Homo Sapiens
  misc_feature (594)..(630): n is a, c, g, or t
ttggcaaaccccagttctgatggggctccaacagccaggctgtggtcctttgacgttcctcacctgttgccaacctatcccgtagtgaactgaaaccccaatgaagacagaactgtgcctggggagatgcaatgaggtgagggctgaactcatccttttatatttcttttcaagattggatcagagctcatctccatccagtcttgtttctatgaaggcttcaatctgtttccatgcaaatttgctaatcagagcccagagctgctgggtccctcatctccctcatctattatagattgacttacagcagggagagaatctctttagctcattcctaatggggttgggatcacaatatggtctggtccaatctgcatcttgttgtgtcccaagaccctatctcctccccaacattcttattgcctttggctcccagtaaggaacgaattgggggccagggaggagaacaggggggatcaagaagggaaacccaattccccctttgaaagtgggttctttgaactatgtgtttgggggaagttcctctggatactaatttgaatttatatacctcatgttttgggggtttgacgnnnnnnnnnnnnnnnnnnnnnnnnnnnnnnnnnnnnnttcataatatttggaaggtttttgatgctagaaaaatggaaacaagagaaccttcaaaaatggtacttagatgggaactggaggccaatctttcataaagccagccccatagctgcttgctgttagggcctccagccattttgacattggggtggatagtcgattcacctgcctgtcagtcgattcacctgcctgtcacccagttctgtggatgtgctggtgctgagcctttgctctctttccaaatggttacagggatgttgatcagctccaccagagggagctctgatgggaggaattgctctgccatccttgtccctgtgtctcctgtcggcaggcagccattgtatctcaccagcagaccaggagactggtcccaaggttactgcaccacagggcaatttcctgccatagttaggaaggaaacacctgaactaaatggaagagacatccctgcggtgtttaatatcacacccatgccctttgtcagttaccatgtacagagattacttggagagcctcatgccgtctctaccttcgcacactggtcaagtatctgctgagcttcttggccgc

SEQ ID NO: 249538 - DNA, 1053 bp, Homo Sapiens
  misc_feature (420)..(465): n is a, c, g, or t
ttggctctgtgctgttaaacagtaactgccattctacgtccccatcccagcccttgtcaaccaccattctactttgtctatgaatttgactgctcagagtacttcatataagtgggatcatacagtttttgtcctttcattactagcttctttcccttaacataatgtcttcaaggatcatccttgttgtagcatgtgttagaatttctttcctttttaagtctatgatacaccattgtatatacatactatattttgtttattcatctgtcagtggacatttgtgttgcttctacattttggctgttgttaatacgctgctgtgaatgtgggtatacaactgtgtctttgagatcttgttttcagttcttttgagatatatacccataagtggaattgctggatcttatggtaattctnnnnnnnnnnnnnnnnnnnnnnnnnnnnnnnnnnnnnnnnnnnnnntcttaatcaagtttttccagaagagagtagctttaggaagagaataaacacatacttttaaggtattatctcagactttaggcgcattatgatcatatcagtagcacccatgtactgaataagtgaactcaaagaaaagttatgttgggcaactacctcaaagttttgttatctctgcttgcaatttttgttcagtcattgcacaagtgcttgaggggcttactgcatgtgaggctctgtagactaaagtattaatgaacttttcttttttgtccttgcagtatcaggtacagctttgatctcagttttctgccaaatgaatggttctgtgttttgtgctcattcgtttacagagatccctctgaaccaccttggaaccagaaatgtgtggtctgagaacgataaatgggctgctctctgcctctctcacagcagttctgcccctccttgggaccactcgttttctgcattcctggcccatcttctatatatctctggtccagattccagaggaaacctgtttgacttgaatagatgccattgcccttattgggccttgcctcagagttcctctgtgtatctctggtc

SEQ ID NO: 249539 - DNA, 903 bp, Homo Sapiens
  misc_feature (712)..(780): n is a, c, g, or t
gggcagcagacttttgagtggaaactcacagggcaggagagtagcatgacatatttaaagtgttgaaggaaaaaaacttatcctagaatagtatatccagtgaaaaatatcccttcagcatgaaggagaaataaaggctttcacagacaaaccaaagctgagggatttttcatcaacaccagtcctatcctacaagaaatgctaaagggagtacagaaagtaaaggacactaatgagcaatatgaaatcatctgaagtacaaaactcactggtaatagtaagcacacagaaaaacacagactattataacactgtaattgtggtgtgtaagctactcttatcttaagtagaaagactaaaagatgaatcaatcaaaaatagtaactacaacaacttttcaagacatagatagtacaatatgatgtaaatagaaacaacaaaaagttaaaaagtgagagatgaaattaaggcaagtttttattagttttctttttgcttgtttgtttatgcaaagtgttaagttgttatcagggtaaaataatgggttataatatagtattttcaggcctcatggtaacctcaaaccaaaaaacatacaacggacacacaaaaattaaaaagcaagaaactaaatcatatcaccacagaaaatcatctccactagaggaaggcaggaatgaaagaaagaaagaaggccacaaaacaaccagannnnnnnnnnnnnnnnnnnnnnnnnnnnnnnnnnnnnnnnnnnnnnnnnnnnnnnnnnnnnnnnnnnnntttgccctttgccttgacaggctctacactgccctgtggaagagctgccttgggtgtagaataaagttgaagacccttcctggattctgagaaataccacaaacttgcattcctggaatacag

SEQ ID NO: 249540 - DNA, 1533 bp, Homo Sapiens
  misc_feature (104)..(119): n is a, c, g, or t
  misc_feature (676)..(731): n is a, c, g, or t
  misc_feature (1158)..(1178): n is a, c, g, or t
  misc_feature (1294)..(1302): n is a, c, g, or t
ctgaaaccaattattaaaaagtggtcccaatttcaacaataaaaaaaattttcaataaatacgtaatgaagtacttcaatgggtcaatgtatcaacctatggannnnnnnnnnnnnnnncaaaggtatgctcagaatgaatgaatgcagggatgttttgaaaaagagtatatattatatcctatattatgattgtcatgacacaaccaaatggctgttttcagttttacttgttgcattcaaaatccactgtatatttaagcatacatgacaaagaacacaaccattcttcctaaaacaataaagatactatccttagagttcacagttctacaacaactttacattaaatgttcaaaacattgtacaaccacagatatttgtgaacagtcttgagagctgtattttggtacattaaggcagcttcagccaacattttaagagattctgaatatttgttacaacacaggacaagtttgatatttgaatacttgaggtctcaagaaatattaaatgtcacctaacaacaccacaatttgtgaaactgtgatcttacctaaaaatcaagatactcatcctatcagtataaaagatacttattttttttaaaaaaaggaatttacattgaatgtggggatataaaccctgtatttaaacaagggctttcaaacagttgnnnnnnnnnnnnnnnnnnnnnnnnnnnnnnnnnnnnnnnnnnnnnnnnnnnnnnnnatgaggttacgtgacttgctgctgcttcagcagccaaaggaagaaactgattccaagttagattttgttcttagctctgagttgtttccttgacaaactttttaaagggttaaaatataaaaactgccattcatcaaattcatttataaagcatgagaaggtagccaaatgttatgtttaccaaggtgacttataaagtcaatcaacatgaaagaaataggaaaatacatttagtgaacaacttttgatagtgatagggagaggtttgaccaagggaactcaatcaggcagatgcaaacaacatgatcatttgtaggaggcagatttaaggagaactgagagggattagaaaaaaagaaaatatagtttaaacaagtttttactattactttttttataatttaagggagaaggcacaatttagtgnnnnnnnnnnnnnnnnnnnnnagaacagtggatctctcttccactttaggaaaatgttatctgtctagaaaaatggccatttttggtagcaaaacttaaatgtgtaactgtgaaaaatgcacgtttaaattagtagnnnnnnnnntaacaatgcaattctccttggctagaatgtttttgttcctccttgaaattttaaatcaacacatcgtagcaaccctccctgcccacctcagaaaaggtcacactgtatgcactgtatgaaccttgtcaaaattctacgtattattcaaaaaagttttcatgccaggatattctccaaattcttttttcttttaggggtctggagagccaactttgatgtacaaaggggctt

SEQ ID NO: 249541 - DNA, 942 bp, Homo Sapiens
ttggtgcgagggagacgtggtgggcggtccttcctgtgacacgacccttgagtgacagttctatttgattgcctccggtactgtgaggaaaggacacgactctatggtgaggactgatggacatacattatctgagaaaagaaactaccagcctccagctctgagctttccaatccccagagtagcaaatgttgaaagaagttgcacaggtgacaaacagcatgtttggtgcttcaagaaagaagtttgtagagggggtcgacagtgactaccatgacgaaaacatgtactacagccagtcttctatgtttccacatcggtcagaaaaagatatgctggcatcaccatctacatcaggtcagctgtctcagtttggggcaagtttatacgggcaacaaagtgcactaggccttccaatgagggggatgagcaacaatacccctcagttaaatcgcagcttatcacaaggcactcagttaccgagccacgtcacgccaacaacaggggtaccaacaatgtcacttcacacgcctccatctccaagcaggggtattttgcctatgaatcctaggaatatgatgaaccactcccaggttggtcagggcattggaattcctagcaggacaaatagcatgagcagttcagggttaggtagccccaacagaagctcgccaagcataatatgtatgccaaagcagcagccttctcgacagccttttactgtgaacagtatgtctggatttggaatgaacaggaatcaggcatttggaatgaataactccttatcaagtaacatttttaatggaacagacggaagtgaaaatgtgacaggattggacctttcagatttcccaggcattagcagaccgaaacgggagggaaggaagtggtaacccaactccattattaaaccccttggctggagagctccttatgttggaa

SEQ ID NO: 249542 - DNA, 924 bp, Homo Sapiens
  misc_feature (151)..(190): n is a, c, g, or t
  misc_feature (409)..(426): n is a, c, g, or t
agccccctttgtacaaaaaagttggcttgggtatcactgatggcacctacttttgggaatctgtagctgtgctttgagaattgccatcggtcatgtgttgcaccgttctctgtatgtttacgtcctttggactggcttctcccaggattcnnnnnnnnnnnnnnnnnnnnnnnnnnnnnnnnnnnnnnnnctgtgtactgtactatattgtaaaagggattttagcagagactttagtctttggggcaagaggagaacaggaatgctgggctgtttactttaggtggagaatccatcttcagacctttggactattttctttcaactgcagtgtatattaaaaaccaaactacgacctcagagcagagtattaatgaaaagcacaaaaaaaggaactaagttcagcgannnnnnnnnnnnnnnnnnagatttttcttttgaaaaataatgactcttaggacatttgtttttcagttcaagtgctcttcagcactgtcttgtctcccaatataccaacccactggcacatttttctcttgttttctctctccgattttgctctgtctcctcagttaagtgtttccttcctttgtgccccccgctggtgaccctctgcttccctctctctttccctttggcagctgcaatacacagtgttatttttggggaaataaatctagcaaagcctcgccttccatgccgagcgtcctcttggctctgaagagggaaaggtctgtctttgggatgctctctggtcttttttccccctaagtctttctctttcccatcatacccttccctgcccaccttgttttctgttctccttttattaggaattcccaagtgaattttattaatgtgggagtggaacagatgctaaaagctatccaggattttgtttctgtttgttttaaattttgtggt

SEQ ID NO: 249543 - DNA, 966 bp, Homo Sapiens
ttggctggccggtctgcctccgggagaaccgagcgcttccggtatggaacgccgtggactccgggcactgcctgcagacctactccctgcacacagaggcagtgcgggccgcccggtgggctccctgtggccggcgcatcctcagtggtggctttgacttcgcgctgcacctaacagaccttgaaacaggaacccagctatttagtggtcgaagtgactttagaatcactaccttgaaattccatccaaaagaccacaacatctttttatgtggaggcttcagctctgaaatgaaagcttgggatataaggactggcaaggtgatgagaagctacaaggcgaccatccagcagaccttggacatcctgttcctccgggaaggctccgagttcctgagcagcacagacgcttccacccgggactcagctgaccgcaccattattgcctgggatttccggacctctgccaaaatctccaaccagattttccacgagaggttcacctgccccagcctcgccttgcacccgagagagcccgtgttcctggcacagaccaatggcaactacctggcccttttctccactgtgtggccctaccggatgagcagacggcggcgctatgaagggcacaaggtggagggctactcagtgggctgcgagtgctccccaggcggtgacttgctggtgacggggcagcgccgatggccgggtcctgatgtacagcttccgcacagccagcccgagcatgcacactgcaggggcacacacaggcctgtgtcggcaccacctaccaccccgtgctgccctccgtcctcgtcacctgctcctggggaggggacatgaagatctggcactgagctttttgtcactgaaccttcccgatgccagctgggctcttggactcccctcttcctcaagggtagatgagaggaacgagcacagaggttggctgtgggtcctgggtacc

SEQ ID NO: 249544 - DNA, 812 bp, Homo Sapiens
ttggcaccgctcatggccatcctggattttcccagtggcttcccttcctgctcgcctccctgaacaggggagaaagcttaacctctcttctcctctccaaacctttcaccttgaatgggtaatgtttggtgggggctgttccttcttggagaagccttgagtcggaccattttgagatcatggaggaaggatgaagaagtgaaaatgacaataatgactctcaagaggctggcgatgtgacatggcaaatgtagaactgacttaaattgaacaaaccctcactgagcacctctgatgttgagcacctgctgaatactgagcactgaatgggggagggggaggggagcacggggtgagtcaacctgggactcggtctcagggatatgcctaccaatagcgggtatcgtaaggcatgtacccaaacataacggatgtaaggcagaaagtgatcggagaaggaatgagaaagtgtgcgtgatgttaatgaaaagtcatatgcagctagagcagacccaggaaagctttctggaagagattgcatctgaggaaattcaggaaggatctttgtagattggggggagattctaaattgaaggggtgatagggtgaggggccagagggaagtctgctgtgttctcatgtaggatgtcagccctccctgcacttctcttttttggccaatgtcttttcactttcctgacccctttagaatcatccccagccagacgcaatcatggaagttgccttattgtcactggttaagaacttggccgagattgaagggcttttgttaatggtgttggatatttttg

SEQ ID NO: 249545 - DNA, 1225 bp, Homo Sapiens
  misc_feature (655)..(655): n is a, c, g, or t
atgcatgcttctttaatcaggccacacagccctcaacttcacagggcaggtgtatgcgagtcatctttggctttgtgcttcttacacagtcaatttcttcagtagcacatcacaaaattgaaaccataatagaattgcccaaagatcagaaattggttatgtggtcattcctgcaggtcaactcatatccttaagcaaagttgtatgtactggctgttcaataaatatttgttaaaggaaatcaagtttaaatatggtgagattcagagagtcaaatatgagcctcaattctcaagttaagaatagttgaatcagaataagggaagtagttttaagtttttctaaccaataattttctatccaataattatccaatttatatgctgacaatcttttaactaaattccatacacagagtatttctaaaatagtattccaatacaagtaagctttggtatgatgctgtttttgatcatttaagaaaattacagtgcatggaaataaaatgataaagtgcttttaagatttctgttagatctgataatggcattctagatatacaagataactaaaaggttttcatagttatatactgaagaatatagggatgaaataacatgatgcctgggaattacttttaaatactctttttttnaaaaaaaagggaaagggtaatagatgagctatggtaaaactctgattgttatttattaggcctgggtgatggtgtggggattaattatccagtccccactgttgtgtatatttgaaagttccattaagggggaaaaggaagaaaaactcattcctaaaacacctggctttataaaatattgtgtataaaaagtactagaaaaagggggacggagaattggagagttacagaattgcaacttgcagttaatgaatttttccccaaaaacaatgtattccaagagctataaaaatccaaataacagagcatttagttctgacttttgctctaaagaaaagctttaatagttataagaaattggccaattttcctagtacccccaagtctttggaaggacacttcttaaacagtctctcccttgttgtcacccattgttacaataaagcacaaagccactcagcaaagcagctgcacaatgcttacgacagctgttttctcctgcagcagcactaatttcctatcatgacggcaaccaagcggtcagcacaatggaaggataaaacgcctaca

SEQ ID NO: 249546 - DNA, 626 bp, Homo Sapiens
  misc_feature (338)..(379): n is a, c, g, or t
attgtatgatgccatttatatgaaatgttggcaatagatgaaatacacagcagattggtggtttctagggattagggagagaatgggttggaggaatggggaatgactgctaatgggtttcagggtttccttttagggtgatgaaaatgtctggaattattatgatgaatgcatttgtgatatggctctagttatgaatatgctggatataagtcttatgaatagacaccaagtataaatcttatgaatatactcacaccactgaattgtacactttagaagggtgagagctttatggtattgacttgtatctcaataaaaactttttaaaaattaannnnnnnnnnnnnnnnnnnnnnnnnnnnnnnnnnnnnnnnnncaatttctttgcagtcctgcatttcttaggattcagttctggacttggtcttcactttctctgccttctggctgcaagaaatgcaaccctcttttaccaccaaggaggccctctggctctctcacttagctttcaattgctgattgattgcatttagctttttactacttttttccccagagtcttggaaagagccacctaactgcattggtctatttacgtaccagcgccatgctgtttaagccaa

SEQ ID NO: 249547 - DNA, 1099 bp, Homo Sapiens
ttggctaaatatgctgtctaaagcgttgtcatacccaccattctcctaaccatgtcaaaaggaaataacgtgtttggcataacttattcttagtgaaaccctgctgttttctactgattgcctcttttcattgcctctaagttctcacagaccacttatttggtaaactattttagaggtgtgcagggtaggacatcaggctctgtgagtctcagaatctacctttcctcctaatctttgcccatcccaagacatcagttctttccctgtagctggatgttgcctgtgctgctgggtaaggcaaatctctaactaagaagtcattgtatgtattaggggaaccagcccctgatattttaacataggttcttttctattttccctaagtgtcggccggtctgagaaataaagggacagagtacaaaagagagaaattttaaagctgggtgtccgggggagacatcacatgtcggcaggttccatgatgccccccaagccgcaaaaaccagcaagtttttattagggattttcaaaaggggagggagtgtacgaatagggtgtgggtcacagagatcacgtgcttcacaaggtaatagaatatcacaaggcaaatggaggcagggcgagatcacaggaccggggcaaaattaaaattgctaatgaagtttcgggcaccattgtcattgataacatcttatcaggagacagggtttgtgagcagacaaccggtctgaccaaaatttattaggcgggaatttccttttcctaataatcctgggagcgcttcgggagatgggggcttatttcgtcccctattaacaaccgtaaaagacagacagtcccaaactggccattttagagacctccccttgggaacgcagtctccttctcagggatgttccttgctgagaaaaagaattcagtgatatttctcctatttgcttttgaaagaagagaaatatggctctgttctgcctggctctcaacagccagacctaatggttatctcccttgttccctgaacattgctgttatcctgttcttttttcaaggtgcccagatttcatattgtttaacaatttgtgcagttaacacaatc

SEQ ID NO: 249548 - DNA, 1096 bp, Homo Sapiens
ttgggtggctttcctgtgtctgggtggtcagggagcaagggggtgtgtgtttgaagcatgttgtctcctgccccagaggaaccgctgctgctggccgaactcaagcccgggcgcccccaccagtttgattggaagtccagctgtgaaacctggagcgtcgccttctccccagatggctcctggtttgcttggtctcaaggacactgcatcgtcaaactgatcccctggccgttggaggagcagttcatccctaaagggtttgaagccaaaagccgaagtagcaaaaatgagacgaaaggggggggcagcccaaaagagaagacgctggactgtggtcagattgtctgggggctggccttcagcccgtggccttccccacccagcaggaagctctgggcacgccaccacccccaagtgcccgatgtctcttgcctggttcttgctacgggactcaacgatgggcagatcaagatctgggaggtgcagacagggctcctgcttttgaatctttccggccaccaagatgtcgtgagagatctgagcttcacacccagtggcagtttgattttggtctccgcgtcacgggataagactcttcgcatctgggacctgaataaacacggtaaacagattcaagtgttatcgggccacctgcagtgggtttactgctgttccatctccccagactgcagcatgctgtgctctgcagctggagagaagtcggtctttctatggagcatgaggtcctacacgttaattcggaagctagagggccatcaaaagcagtgttgtctcttgtgacttctcccccgactctgccctgcttgtcacggcttcttacgataccaatgtgattatgtgggacccctacaccggcgaaaggctgaggtcactccaccacaccccaggttgaccccgcccatggatgacagtgacgtccacattagctcactgagatctgtgtgcttctctcccagaaggcttgtacctcgccacggtggcagatgacagactccctcatgatctgggccctggaactgaaaactcccattgcatttgctccctatgaccatgggctttgctgcacatttttttc

SEQ ID NO: 249549 - DNA, 1378 bp, Homo Sapiens
acaattaagccaactttgtacaaaaaagttgggagggagccggcgaaaaagagtgagaaggccggggaggcaggccctgctgtcttcctgcaggccggcagcctgctggcagtggaggaccaggccgtccaggaaaggaaggggtcaggaggtcgggcagggcctcagcaggttcagacaagtccccagaagggagctgcaggcgccctcgagtccaggccccaagcctggctccggttgtccaaagagggcctaggccaggcctctggtgcggaaactgagtcacagccagacctcagggcacggcctagacgcttacgagccaaagttaggggtagagagcagagacctccggggggtctcagggagtagggggcttcagggcctcccagtctagagccggattggcgagttagacgcttgtagatccaaggttggattggggtggggtctctgggacgttggatcgctacgcaaggattggggggattcaagtgcttagagatcgaagtctgccctgggtagggggagtcagacaattggaaagcctaggtagttatttggggaggggtctctacgccttggcgaagcgcacagctgcatctttttggcttgaggcctgaggccttgtcgagaagcttccgtgaaagggtgggccagccgggccacgagaaagaaagtgaataaatcaggaatataagtgggcggggggcccctgagaggggggtcgcaaagggtgagacatggccaccaggcgtttaaccgacgctttcttgttgttgcggaataattccatccaaaaccggcagctgttagccgagcaagatgggactgatggggacaacatgtctcttcaggagctggacgagcttgctgatgaccgtatggcactggtgtcaggcatcagcttagatccagaagcagcgattggtgtgacaaaacggccacctcctaagtgggtggatggagtggatgaaattcagtatgatgttggccggattaagcagaagatgaaagaattggccagccttcatgacaagcatttaaacagacccaccctggatgacagcagcgaagaggaacatgccattgagataactacccaagagatcactcagctcttccacaggtgccagcgtgccgtgcaggccctgccgagccgggcccgggcctgctccgagcaggaggggcggctgcttgggaacgtggtggcctcgctggcgcaggccctgcaggaactctccaccagcttccggcacgcacaatcaggctacctcaaacgcatgaagaatcgagaggaaagatcccagcattttttcgacacatcagtaccactaatggatgatggagacgataacactctttaccatcggggttt

SEQ ID NO: 249550 - DNA, 767 bp, Homo Sapiens
actttgtacaaaaaagttggcagggaaaagtgttccacgaagcggtagcgcctttccgcctcgcgttttcctccctgaccctggtcccggctcccgtccgggcgccagctggtggggcgagcgccgggagcccatctgcccccaggggcacggggcgcggggccggctcccgcccggcacatggctgcagccacctcgcgcgcaccccgaggcgccgcgcccagctcgcccgaggtccgtcggaggcgcccggccgccccggagccaagcagcagctgagcggggaagcgcccgcgtccggggatcgggatgtccctcctccttctcctcttgctagtttcctactatgttggaaccttggggactcacactgagatcaagagagtggcagaggaaaaggtcactttgccctgccaccatcaactggggcttcgataaatagatactctggatattgaatggctgctcagcgataatgaagggaaccaaaaagtggtgattacttactccatttgtcatgtctacaataacttgactgatgaacagaagggccgagtggcctttgcttccaatttcctggcaggagatgcctccttgcagattgaacctctgaagcccagtgatgagggccggtacacctgtaaggttaagaattcagggcgctacgtgtggagccatgtcatcttaaaagtcttagtgagaccatccaagccccatgtgtgagttggaaggagagctgacagaaaggaagtgacctgacttatgca

SEQ ID NO: 249551 - DNA, 970 bp, Homo Sapiens
  misc_feature (528)..(536): n is a, c, g, or t
gatttggttgcaataaaacaaataatcttagtgttttttcactcagttcctttccaaggaatagacaaagtggaaaagcttatctgtttagctgttaagctagagaataaattaaattgaatagttaacaggcttatttgtcctatgtagtagcaattatctttcagttctttcctttttctcatctcaaacactacaacatctgcccaaatctacagaatcaaaacccaaaagctagaagtaaagaagagtttctgtcactgcattcaacatgagatttttacttgtcatttcactacaggaagattctggggatttacattgttctctctttagttccttcaaacctagaacattattttatgttatgcattcactttgtattacaaaataatattgatgtcccatgaaagtataaagcgtatttactgaaagtgatcaacatttatcagaactttggggttttagtgcatttcggttataaaattggcaagccataactctttaccctagggatcacttgggttnnnnnnnnntacaaaacattattttctccataagtcactttaaaaagctaacagagaacttcttacttgcacctattcattgacagtgttaatttatgctaataataatataatctaagatggtttttaccttcatggcagcattaatatcctgcattgcagcaaaattattacccatctgaagacagaccacagctcttccttcataggctaggtagttctttggatcagtatctatggcaatggtaaagtggttccaagctttctggaattttccttgggcctgcaaattatagccaaaactaattctggcttttatgtatgctggattaatatgcagtgctttcagaaagtctttctgtgcttgcttggtggcttcatcatgaccgtattccatgtaagaatttccccgtccaacataagcatccagaaaacatggccaa

SEQ ID NO: 249552 - DNA, 1018 bp, Homo Sapiens
  misc_feature (553)..(582): n is a, c, g, or t
gaagatagcttatgaaatgtaacaatagcattgaatttcttgctcattccagcacatttctctttattaaaaaatgcccttaaaacaaagcagatgtttatttctaagtcttttctcataaaaatggaatttttccctatgccgatgttgtcctggattaccttttttgtcctgtcttatcacttcgtctcctgtctcgggtttctggctgtctgttcctatttctatttgatgttgtgctctcacttcacacccagcatgtagaatcaccttgctcttccaacttccctgtctgtgccactcaccttgttttactcagcccgttccttagttctctgtggtgaatctgtcacctaagccgtgcattcttcatcggacatgtattttggttctcttgtttccttctccatctctctctccaagcctctcgagccccattcccaagtagctttttttctgactacctttctgggctccaagctatacctgtgtctccttcctgccctgcaatacattaccccaaagtttgtcagattgatctgcttgagttctnnnnnnnnnnnnnnnnnnnnnnnnnnnnnnctctgaaactttcagcagctccctgtttgcagaacataaagacttaactcctgcctggtttttaggggtcccaataatgggattctgcccaacccatccagttctgggtacaagtactgcctgccttacaatcttcattcaggtaaggccagggctcctaagagcaggtttggggtccccagcaaagaggagtggctacaaatccatgcgtgactttgtgttggtgaaaaacctgggccccgttgccaggcccctttctggaccccacctgaatcatgtgtactgggcttcctcctgggcactgcctccaatgcagggttgtctattcctgctcatgtcatgcgacgaaaggaaatgttggacatacatttccctagcagaatccctctttccctgtcctcgattttcattgatcccatgttatttctgaacattc

SEQ ID NO: 249553 - DNA, 950 bp, Homo Sapiens
ggggtttctggagttggctgcttaataagaaaatgctaaggactctacttctaatagtacagataacactgagagtccttggcacgaactgtttagagttatgcaaaataaatgcatttgacactactgattcaccactgtgagcagcaaggagtttggtgactacataataccatatgtggagaatcaaggaacataatggggctggttggttgctcctaagttcagtggataatgtggtgaaggaaaatgatgaattcagggattctgtctcctggcttcagaagcagatactgagcctcaaatctgctaagattgccctgagtgagagtcttatctgctgtagagacagagctgaagttgtggaaaaacagacacaagctcttatcatgtaagtggctgacctgcaacaaaagttgcatacacatcctcatcaggtgtctaccattacagtcagggcactgattggaaaagaatgggaccctgcaacttggaatggggacactaagtttgtgaactctgaggaagcttttttgccagaagcaacagcttccccatctccagtagcggcaacatccccacctggacccatgctgccatcagcctttccacccttgtctgaggagataaaccctgagtggcctgaggcaacagtgatagcctcccctaaggcagttgccaggaaaaataatgttgattctcctcaggagtcaccctcaacacccctgtttgcttctagacctataactaaagtcccggcgggcccctagaagtgaggttgagagtgtgacccatgacggggtgcgctacacttgaaaagaactgttttgagttttctaatttatatcaacagaaatctggagaacagccatgggaatggatattaagagtaaggaataatagtggaaggaacatagagttggatcaagccgaatttaatgaattgccaa

SEQ ID NO: 249554 - DNA, 1008 bp, Homo Sapiens
  misc_feature (687)..(700): n is a, c, g, or t
gggagtttttcagaacaaatgtttattttaataattaagggcaaacaaaaacattaaagcataggaatacatcaactgaatacaagttgtcttgtttggtctgaaatcttgaaaaagttaatctaactacttacctgaggtagatttaggttggcactgcttcaagggaacctccgtccatcccagaagttaccttctagttttggttacaggctcccaagtggtcctctccaacctcaggttatgctatatgaataataccaacacctttttctcccatggttaaaagccttcagccttgtttcatacccccatagttctctgtttgggggatggtccatcattaatttacttaaaaactagagacaactaccagtaagatcagttgaaagaagggtcaagtcattgccctgttaatgataccaactttgaccccttctccatgttctctctaatgactaacaagtagccgtaaggactacttttcatcaccaccatgcctcacacccaatactattttaagtatactacaaatgtcaaacatatactagtgataggcatgattttcaccagagaaaaaaatacatcttgtgtgtcttatactgggcaactttttatgatacaagagctatttctaaatattacaaaaacatgtcagatcaaataaacttccaggatctttttctnnnnnnnnnnnnnntaccctagaatccttattatcactatgagctatattcactggccctaatattatcatgatcatcaaccagtcattaggatcaaagcttagagccatacacaaggtagcagtgtagcagttcgccaactccatgaatccaaatggcaatactctctgaagttcagggatctgctaggacaaatcaaaccaaaatcagaggatttggactagcaacaaagtatctattcactagtctacaaagtcccaaatactataggaatctgaagtattggtattacacgtctttgaatctcagggaagaaaaccaa

SEQ ID NO: 249555 - DNA, 1344 bp, Homo Sapiens
  misc_feature (756)..(768): n is a, c, g, or t
aaaaactaagaataacttaaagaatattaacaaagtgcatgacatgaaacaacagtggaaagattaaaacaacattgaaaaataatgacaaaaaagatgagaagagtgttgtatctgatgtacacaaaaatactaactcaagtcttaggttattcatactataagatttatctccatacatctgcatggaaaaactggttgactaaacatacaggaaaatttcccacgttattagtttcttcctccaaaagtagaagacaaaaatactctaattctcagactttcccatgggtaggcatatgatttagattcttccctgcagattgacttttgtgaggcttagctggagatgtgagcagctcaaagatgcaacttttcatggggtaggggagtatttgtttactgaaaatgtgaaggtggtggcatccatttactcatagctgacactgcagaagcttccagcatttcatccagagatcatggtgctggttcatggtagctgtgttgttttcccgtgagatgcctttacaatggtagtattatcctcggtggaatagctgtagagtatggctccctcacaattctggagcatcggtgtgcaacctaatggtattaaaaagtaaattactttttacttaaattgctgagcagattcttatttgccatgaagaactctgaataatacacatcctgaaacaattgtagtaggataatgttttgtattaatgaattattcttgatttttcaatctgtcannnnnnnnnnnnnagtaagtcatttaccctgagtagctttgaggatataatgtcatagcagaggagcagagagaaaaatgcagtcaagttttaggctttataggattatagtcctggtcctcagaagaatggaaagtaatttgagtttgagttaaagctttcctttctgtgattgtagaagttattttctaaacttcaggaaagagaaaagactaagggagactagagaagagagatctaggtggcctgggaatggggcagtaattacctagagggtttacatggacagagaaggtggagcctctactcataaatgcattctgcacagaggcaaccactttctctgctagtgcccacagatcatgcagcctccatccaaatgagaactgtgcactgtctgtactttaaaagcctagttaagtgtcccagatctcctttatttgcagccagcatgccatacaaagaccacttggcaggagtgatgctctactgtgccccatggtttgtttggtctcatcacattttcatcatattcacaacacttcagccctatgctacgaccatagttaaatccctgaataagagccaa

SEQ ID NO: 249556 - DNA, 901 bp, Homo Sapiens
  misc_feature (627)..(642): n is a, c, g, or t
  misc_feature (741)..(754): n is a, c, g, or t
ttggcccttagtgctcccactttggggtgggtggggaagtgaaatgttaggcgatgaattcctgagcaccttgtttttcttccaaggttcgtagctcctctctgcccttccaagcctgtaacctcggaggactatcttttgttctttatcctttgtcttgtttgagtgggtcagccccagaggaactgataagcaaatggcaagtttttaaaggaagagtggaaagtactgcaaataaaaatccttatttgtttttgtagactttgtaatgcatatcattagccctcactgtgatcattactgctgtggctctgaactggcacatagtacagtggatggaaggtgcccgcacaccagctgagaactggttctggcctaggtgggctctagaaccatttacacagcatgaaagaaacaggttgggttaggagcagaaagaaataaggctcacacccctccagacactaccttataagcactgcagaacctgaaacagatggcagaaggaatggaatgctacaggggctagcaggagtgactacagggaggggacagctcagtgactggagcattcaggaagaggctttccagggaacactggacattgcttagtgaccttttgttccnnnnnnnnnnnnnnnncttttactgttctgaaagactttgagtctgtggttcaccacgagcccatcagtgtttctttgaggtgattgcattagggaagttggctctgggattgcnnnnnnnnnnnnnnggtggaacatgttttccttaaaagatggaaggttttagaaaatatactaggccatctggttagaaaaaacagaccagactagaaaaagctgtgaatttgattttgtagattaaacaaagccagatgattaaaatgtgatttatttat

SEQ ID NO: 249557 - DNA, 945 bp, Homo Sapiens
  misc_feature (720)..(749): n is a, c, g, or t
aactatacatcaacttttaataatgaaaaagattattcccatatgttattttttctttaatatttatcacaaggcttctcttttacaaaaaaatttagtgaaaaatagccccaggtccccattcttaaaggtaaggtgagaagtgacagctctactgctatactgattgccccactagccatcagagctgccacttgccgcaagacatgaattcatgatctgtcacttttttccagacattgtaatgaaaagcccaaactgttttaactcagtaggggaaaaaaatctctccagtggtttaaataccagatggaatttggattttgtaagtgaaggtctggttggagataggactgagaggggaatggcatgcaaatgctaatgctgtccttctctagagagctgagtttctacagagcagctgtaaggcttacaaaaaaccagaaagcgccaaagactggcttactctttggtcacatgtatttcaatgccaaataaacaggcactagtccaaaactctcttacgaggataatcttcttctgcttattctttcttcaaacatagagataaatgtcatgcctttctactgaggtaatgatactcaacaattggggccccctaccccctctcaccatcctcattagaatggcattttaaggcattgaccaagccaggttagaagcctgcagcagcacaggaaggaaaacagagagagtgannnnnnnnnnnnnnnnnnnnnnnnnnnnnntttggaaaaaagaaaattaaaagagttctcaggcacaaatatttctaggggaaaaagcattaccagcaaccactgaatcatttcttattcacagacaccatttctagacacttggcaaacttcatttgagcttaaatggctggtataaagttcagggatgccaggaattactggaattccacccaacttttttgta

SEQ ID NO: 249558 - DNA, 1530 bp, Homo Sapiens
ccatttataaagggactttgtacaaaaaagttgggtgcggaactaaagcaaatggttatgagccttagagtttctgaactccaagtactgttgggctacgccgggagaaacaagcacggacgcaaacacgaacttctcacaaaagccctgcatttgctaaaggctggctgtagtcctgctgtgcaaatgaaaattaaggaactctataggcggcggttcccacagaaaatcatgacgcctgcagacttgtccatccccaacgtacattcaagtcctatgccagcaactttgtctccatctaccattccacaactcacttacgatggtcaccctgcatcatcgccattactccttgtttctcttctgggacctaaacatgaactggaactcccacatcttacatcagctcttcacccagtccatccggatataaaacttcaaaaattaccattttatgatttactggatgaactgataaaacccaccagtctagcatcagacaacagtcagcgctttcgagaaacctgttttgcatttgccttgacaccacaacaagtgcagcaaatcagtagttccatggatatttctgggaccaaatgtgacttcacagtacaggtccagttaaggttttgtttatcagaaaccagttgtccacaagaagatcacttcccacccaatcttttgtgtgaaagtgaatacaaaaccttgcagccttccaggttaccttccacctacaaaaaatggcgtggaaccaaagcgacccagccgaccatttaatatcacctcacttgtccgactgtccacaacagtaccaaacacgattgttgtttcttggactgcagaaattggaagaaactattccatggcagtatatcttgtaaaacagttgtcctcaacagttcttcttcagaggttacgagcaaagggaataaggaatccggatcattctagagctttaattaaagagaagttgactgcggatccagacagtgaaatagctacaaccagcctaagggtttctctactatgtccacttggtaaaatgcggctgacaattccgtgtcgggcccttacatgttctcatctacaatgttttgacgcaactctttacattcagatgaatgagaaaaaaccaacctgggtttgtcctgtctgtgataagaaggctccatatgaacaccttattattgatggcttgtttatggaaatcctaaagtactgtacagactgtgatgaaatacaatttaaggaggatggcacttgggcaccgatgagatcaaaaaaggaagtacaggaagtttctgcctcttacaatggagtcgatggatgcttgagctccacattggagcatcacgtagcgtctcaccaccagtcctcaaataaaaacaagaaagtagaagtgattgacctaaccatagacagttcatctgatgaagaggaagaagagccatctgccaagaggacctgtccttccctatctcccacatcaccactaaataataaaggcattttaagtcttccacatcaagc

SEQ ID NO: 249559 - DNA, 1204 bp, Homo Sapiens
  misc_feature (116)..(138): n is a, c, g, or t
  misc_feature (491)..(499): n is a, c, g, or t
ttggctgctctcctccatgatagtgccacctcctctttaccctcagcaagccaccagtatctcaggtaccttctttctgctatttctactatatttttgatttgccaatttagccnnnnnnnnnnnnnnnnnnnnnnngctaccaccaacgaaactcactgtgataaccattacaatgggaaatgataagggctggcaggcagtgaaaacagtaagcttttcactgaacacagcaaaactcaccacttaatagttttctattttattgaaaaagaaccctaatgatggctttgcagatacaagtaaaagctgaccttcacatatgttaaataatctgtagtttcttttttgacatttctttgttgtcagctcttaacagatgtaatcacagaatggaaataacatctgtcttttaatccaccttaaaaagttaagttattgaagtccttgtctttgttataatattgaaaattttgtttctgatgaaaggnnnnnnnnnacaagcagaaatgttacatttttatatcaaatatttttttgcatgtgtgatttgtttttaaagttactttctcttcacagaatttttgagaattcagttgcttattgtcatgttcctatttttaatggttaactctttaatatacctgagaatgttttgatgtcatgtgcagtcatacattaattttttaaatcagtctaattttggattattgtattctcccaggatgtctattcttctgccaataagaatgtaacccctttgcatactgcctaataaattacatgttcataagacatagacacccatgcccattcatgtatatgtcaaggaggggagattgctttatatgcagtatgctttatatcctatgcattctgttcatcttgattagtaagcagcgctttagaatgctttattttttcaatgcttttgtatatcctaaagaggaaataattttcttcatcttctcctattcattgaccttctccgtgtactaattatatgcgatacaaaaataaataatatgcatctctgcttccaggtagcttacagttttccaggagattcaagctctcagacagtgatttctctgactgagatgaacttaacacagggagtagaaagagatgattgattcgttctagcagagaaagaaaccatagaatttgaatctaaaattatttttatctcattttaaatttt

SEQ ID NO: 249560 - DNA, 1249 bp, Homo Sapiens
  misc_feature (615)..(634): n is a, c, g, or t
  misc_feature (892)..(1012): n is a, c, g, or t
  misc_feature (1034)..(1065): n is a, c, g, or t
gaaaaagctcacctttcttactgccacggagattgcagatgcttgaagtgtccgaggtcatcacatgctggatcagtagagatctggtaggggatgtagggtacatcagcagcctggctccaaccagcctgagtccctggaggtcctggcctatgtagagcccaactcacccagagtggccacccacggccacacagcggctggtgttgacgctccaggcgcaataggggtcccgggcgaggacacagtctgcacaggagcgatacttcatgcagtcggccacgggcagctgcaccagctgagagcgggagccggcaaagagcagcttctgcgagaaaagcggggcgcaggaggggggtcggccagggccacaccacgggaggggcggccggaccagaacgcagcatggggacagcttggactcctgcagggggcacagcacggggcgccagaaggaggaacaagggaacaaggcagagctatagtgctgaaaagggaactctaagaaccgcagaactcagagggcttacacaggccagatgcaatcctaagccccttatcgacgtgacgttattagaaagggatgatggggctgtgaggccaaaaagtataatnnnnnnnnnnnnnnnnnnnntagtgcaggaaatacatttcaaggcccatcagccctcacaacagcagcagcataacataagatgttttcctgtttcaacggtggatgccaatctgtgtgtttattcaaccacacactttctttctgccattattccatgttctaggggacaattttgagtcataatagctggtaaaaggcaaacaaatcaaagttcaggaggtgtagcaaacatgccacaagagtattgcacaaggcaactaggaacagcaggtcatnnnnnnnnnnnnnnnnnnnnnnnnnnnnnnnnnnnnnnnnnnnnnnnnnnnnnnnnnnnnnnnnnnnnnnnnnnnnnnnnnnnnnnnnnnnnnnnnnnnnnnnnnnnnnnnnnnnnnnnnnctggccaggcgcagtggctcannnnnnnnnnnnnnnnnnnnnnnnnnnnnnnntttataggcacgagctacaacgcctggccaagaactacttattttaaacagctgctctgtttacagaacatccatatggcttctacagttattactagtattccatttagaatgtaatcatgtgttaaagatataaggctacattattcaattacattccattataattataaataacagccaa

SEQ ID NO: 249561 - DNA, 849 bp, Homo Sapiens
agtataaaatatttatgaaaacaacagtatttaaaacatttacagagagtcccatagaggattctcaaatattttaaacttaggatgcagactgctattcacaatgcataaagaaaaaggtgatctctagagcaactatgtatctgcaacataaaagaaacatttacttcaatgcttttacattgaggaaaacgtcattaaacgtattttaattttagtactctcacagtaggaagataatagtctgcttttacacaggtctccagaattcctgtttttcctttagataaatttgacttcatagtcaagagtctcatggtaaagaaaaggtatcaaaatactcatatttttgttttcagctcaatttcccccaaatgttaacttcagctattctttattccacttgatgacatttttcatgtttagcaacattacatggttgtcctctttaaacatttaaaataattagaacattttagcattatctcaggtttcaagctgatgtatgtcagtttatatacctttgtatcttacaaatagtaaaacaaagtacattctatatgtctgatattaatgtaataagaaatccacttagagtaataaattagccctctttaccatttattccatgatataggaggcaaacaaaacaattccaaaacttaaatattgataaagatgacacatggccttggggtatatgtatgtgtgtgaatacatactcccaacacacatttacataggtgtatatgtatttatgcatgtatgtgtatattgctataactagaaagaccacatgcaaccataaaaaatatataataaaatcaattcgtgggatattaaatccaa

SEQ ID NO: 249562 - DNA, 1295 bp, Homo Sapiens
  misc_feature (118)..(159): n is a, c, g, or t
  misc_feature (963)..(975): n is a, c, g, or t
catttttcctcttccccaaagctgccgagtttgggcgtgcaaaatctgtatacaatataaagtcatgcccgggtcgtacagtccatgcaacctccaggtgtaggaaaacttaaaaaannnnnnnnnnnnnnnnnnnnnnnnnnnnnnnnnnnnnnnnnncaatgcccataaaacacgtgggcccaaagtctacaaaaagaagaatggaatgagcacgtggctgtgaccagtaaagaaggaatgttctgatcaaaaagaaaaacaacaaagtccattgcctagtgctgcaaaaatcaaacttgcttttgtgtcagaccattacgaaatggtccttccccttgcaaacagattttcaaaagaagtaaagaaaaactgaaacaccttgacaaagtggccctccagaaccagagccctgggacgctggggaggggcggtcagtcccagcgggtcacggcctccgggacagccgcctgctggtggggcgtgggcacgtgggcacgctgcggcacggcgggaagccgcgagggcagggcagacgccaagaggcccagtggcgtcatcagggtttccctcaaagggatataaagtgctcgcttgctgactcccagccagtgcccccaaggcctttgcaaaggaagaaaaaggctaaaggtccaaggacccacagggagaacacatgaaggaaccctccctgacgtggtcccgcctgcagacgccgaggcagatcctctgccatctgccctggacgcttgctgtggagaagagccgagtgtgtcttcaaagaaaaggctacacagtaatgctctcagcacatttgtgaagctggagtgagctgacagatgaaacgtgcctccccctgccaggcctttgcagagggggtctccatttgaatgagattagaattaagtccccccactgataacctggccactgagcagtccatgttatcccatcatctgcttnnnnnnnnnnnnngtgagatgatgcattcctccccataagccacggcggggtaagagggcaggtggcaggatccccagagggctatgcagagaatgaggccaaggaggccagaagagcctgctagctgggccctgccactgctctgtgccatgaatggggaatggaccagctcctcttgccaatctgggcttcagagcaaagagtggccaccagggaggggaaagtcaaacaagtcccaagaccgttctgcctgctctcaaaccactgtctcagagctgaccatcagcagcccagtgaccaagtgaatccaagaatctgcactcatttgccaa

SEQ ID NO: 249563 - DNA, 964 bp, Homo Sapiens
  misc_feature (337)..(350): n is a, c, g, or t
  misc_feature (504)..(514): n is a, c, g, or t
ttgggcatcatcggtgccaaggaccacgcatccatccagatgaacgtggccgaggttgacaaggtcacaggcaggtttaatggccagtttaaaacttatgctatttgcggggccattcgtaggatggtgagtgtttccctgggctttgctcatcacttcgggacatcgtggactttaccgtgcgcattggagtgtgtgatggtgcctgagcagatctgctggcagagtagtttgagccagctggactgggctggccgcctgccgcttcttgagggtggaagaggggtgctctgagaagacactcaggcagcagactctgcctctcactaggaggtgnnnnnnnnnnnnnngctccaccatagtcaggctgcaggctgccccgggagaggtggctccccttctgcgcctgtctccattcgctcagcgggggagagacgtgggctggtggcacagctgaccttctgccatctcaggcagccggagtggaaatattcttagtgtgcnnnnnnnnnnncttaagggtgagtcatatgattccattctccgattggccaaggccgatggcatcgtctcaaagtaaggttgggggctcacatttgggcagagtgagtggactaggactgctccagaggcgtggtcttaacgttgtccttttcccctggttctaggaacttttgactggagagaatcacagatgtggaatatttgtcataaataaataatgaaaacctacctgtgcaggttcattctgtgtctgtaggcccagggttgaggttttgctgtcagtgggtgacgggtggggtagggtacccagttagttgaaaggagacaagctgtgaaacatattgcaaaactgaggtttaaaggacaaatacattatccatttaaaaacagatatctaagacaaaataactcaaacattctgaggtcagatacttgcttatgcacactgacatccacccaa

SEQ ID NO: 249564 - DNA, 824 bp, Homo Sapiens
  misc_feature (417)..(474): n is a, c, g, or t
cctttttggaagaaaggtgacctattacaatttatatcagcaaaaaattaaaacattgtttagtttgcttacaattatagatataataaataatcctgcaaacacatgttcatgcaaatatttttcttttcggcagaattacttaggtttgatttacttgtagagaaccatttcctgactccagcaatgcatgagtcatcgcatcctagtctcattgttatattctcagtagtatttactatacagagaaacatcaaagatcatcaaagtattgtctctaagaaaaccccacaatgccaaagaatactatttacttcagaaacattagtgatcatttacaatgaggaaggcatgaggtatatatgaagatgaataataaatagctttgtttacaatataggagagaagatatatccnnnnnnnnnnnnnnnnnnnnnnnnnnnnnnnnnnnnnnnnnnnnnnnnnnnnnnnnnntaatccaaggtagtagcagtaccaaaataaaatactgtgcaagtacaacaggaaggtaaatatatccatcttagatcacgaaataaagccccatgaagaaaaaggccattattagataggctgaaaaggaaagataagaatgctaaattacatgttggtgtagttgtaggaagttaaaaaatgctaagttatgtttagcttgaatgttataggctgagaggaagtagtgagggagagtttttgttttacattctgctcagtaggaaatcagaagtattgaaagtttcattacaaagtggtaagaaatcttggtttaaggtactttaacccaatgatggaataggatccaa

SEQ ID NO: 249565 - DNA, 927 bp, Homo Sapiens
  misc_feature (390)..(398): n is a, c, g, or t
ttggggggaagtgaagaggaaaagaggaaaggacatccacatctctttggacctttggaccgatcagtctaaaccttatttttgtcgttgttgttttttggtacatgtcctggttgtttgttccctttgttcagttcattttgccaagtgtttacagaacacccatgctgtgctagtatcggttatcacctctgaacaaatagaataatgtttggagtgtgacttacaccttgaagtccacttccttttagagatactatctcatattctgtaaatttaagctaggaataacctcacaccagttactcggtgtttgaatctggagaaggaatagaaggcattatctgctgggaacgcttcaatattgaaatgttctttcccgaagctacnnnnnnnnnccctctcaagtcacatattactgacccacagcaaaacccgagattccaacagacaatccaatctgaagcaaagtttcttattcagatgttggacaggtactaattcagcacctacttgtgtgagatactcttccaggttttggcatagagtggtgaccaggaaagatcaagacccaagcactctgtggtgcttccatgctcatggggggaagagaaaataataagtaaatccattagaaagattatgatttcaactagtcataaatatgatgaaggaaatatacatggaaatgtaatattaatcaaggcatgggtattgcatattatgattgatcaggaatcagtttctcctacgaggtgacatttaaactcagacctttaggagatctcaactctcagtatcctcagagtcaagttgaggggaccttataagactccaacagaaggaccacacagtttcatgctgcaaagggcaaggctactctatttttaattgatggctagactttcattaagactgaaatgaata

SEQ ID NO: 249566 - DNA, 833 bp, Homo Sapiens
  misc_feature (174)..(184): n is a, c, g, or t
ttggttaaataacagatccaagagttatttctttatgcttatcccttttcgttcttccaggctatagtatattaaataggttcatctttttcattgggagctataaggttatattataatgaagacacaataactccattataagagttttgtaccacacttaaggttatgtgnnnnnnnnnnnaagccaccagaatggttttatttttgtcattgacaacatgtacaaacctgcaattgtataattgttttgtttggtttttaaaatactaagtacacattaaaagtatgttttaagaaatatgatgcattaaagaagttcactgtaaacataattctcaatgtattttcctgccttgtttcatgcataaataacaatctaagtagtcataaataaaactatcaacttttgtggcccagaagtatatacaaattttgaagtttggcagaaggtgttctgtatggttttataaattaaaacgcacagcatttgtattgattattaatgaaatgacttatcccaagtccttattgtatcccaacctgttctgtcaataataaacgttccaatgtacttggtaaagatgccacatgtttaaaaactcaatgattaaaataattctaaaaggtaatttaaatagtactcagtcttattaaaaccacttcagcttgtctgaaaaaatgcttctaaggagtgaattctgtaccattatttaaatggcatctaacaaaatctaaaatttaaggaataaatcaaatacattttagtcttgcaaaaaaacttcattgagattgttacaggaacagaatgctatcctaagttttctaaaatt

SEQ ID NO: 249567 - DNA, 860 bp, Homo Sapiens
  misc_feature (222)..(238): n is a, c, g, or t
ttggaaagcagcccaggtgaccttcctaaagacattggagaaggaagcaaagggagaggagcccgacctcgcactccccaagttcaaacagaggaagggggagtccgacggggcctatatccaccgcatgcagcaagaggcccagcatgtgctgttcctcaccaagaaccaagccatccggcagccagaggtgcaggcagctcccaaggagaagtctgagcnnnnnnnnnnnnnnnnngcgttccataagcggcgactaaataaagtccgacggaaaaaggaggaaaaggcggcagacaggctggagcaggagttgctccgagacacggtgaagtttggtgaggttgtcctgcagcccccacagctgactgccaggccccacaggaacgtaagcaaggaccagcctggcaggagatcgcagatgctgcggatgcttctgagccccggtggtgtgtcccagcctctgaccgcctccctggcccgccagcggattgtggaggaagaaagagagcgggccgtgcatgcctacatagcgttgaatcagcggcagcagcagctgcacggggagcgagccaacctcacttccctgaagaagcaagagccacagctgtgatggagagacacacggggcctggccacgctctgtggcaactggcaccaggagctgctacacctgggtaggagagaggcaggccatgccagcagtgtggggtgaggcctccagctacttgttcacacgttgggcactagtgggtccacatcttgcatggggtgagtgcccgatggactaaggacaagccctgcttgacagacagaccgtggggcccggtgtcactcacagctccatctctttgttttga

SEQ ID NO: 249568 - DNA, 746 bp, Homo Sapiens
gacccaatgtaaaatggacaataagcacttcaaaaataaaagaaaatatctaataacaataaacttatgaaaatgttatcaaaattagagaaatggatactaatttaatgtaattttccaagatgaaaaattactacacactctccagaatgtctaaaattaaaagataaaaaataccaagtattggcacgaatttgagcaactggcaatctcacatgctgctgctgtagaatacagtaatctgctacaatctgctgctgtagaatacagcaaactgctacaatcactttaaattgttttgcattatcttctatatttgactactatatatcgcataacataacaatttcacactcaagtaattattcagcacaaattcatgaacatgtacctaaagcatagatataaaaatgtttatactcccaaagcaaaagcaacccaaagtctgtcaattatagaataaataagtagtgttttagtcacacaataaatactgtaaaacaattaaaatgaacaatctacaactgtgttcaaccacatggatgaattttataaaccaaaattttagtgaaaggagccaaatacaaaacaacacatactctatgattcatttttgtatagttgaaaacagacaaaacaagtctattgtgttagaagtcagtgtagtgagtaacatttgctttggagtactggggtgctgatttggacagtgcaggaggaggtggtggtgaggctcaatttcccaa

SEQ ID NO: 249569 - DNA, 886 bp, Homo Sapiens
  misc_feature (428)..(459): n is a, c, g, or t
ttggggaagagttctagagataaagaactatatgcttggatgaagtgtgtgaagggacagcctcatgatcacaaacatttaatgccaacccaaattatacctggttctgttttgacagatcttctagatgccatgcacactcttagggaaaaatatggtattaaatcccattgtcattgtactaacaaacagaatttacaagttggaaattttcctacaatgaatggtgtatctcaagttttacagaatgttcttaatcacagtaataaaatttctctgtgcatgcctgagtctcagcagcaaaatactcctccgaagtctgagaaaaatggtggcagcagcccagagagtgatgtaggcacagataacaagttaactcctccagaatcccagtcaccactgcactggttagcagatcttgcagagcnnnnnnnnnnnnnnnnnnnnnnnnnnnnnnnngaacttacccttgaaaaccaaattaaagaagaaagagaacaagacaactctgaatctccaaatggcagaacatcacctcttgtgtcccagaataatgaacaaggctcaaccttacgggatttgctgactacaacagctggaaagctacgtgtggggtctacagatgctggcattgcctttgccccagtatattcaatgggagccccaagtagcaaaagtggacggactatgcctaacattcttgatgacataattgcttcagttgttgaaaacaaaattccaccaagtaaaacctccaagataaatgtaaaaccagagcttaaagaagagcctgaagaaagcataatatctgcagtggatgaaaataataaattatacagtgatataccacattcttggatctgtgagaagcatattttatggctta

SEQ ID NO: 249570 - DNA, 994 bp, Homo Sapiens
  misc_feature (319)..(347): n is a, c, g, or t
  misc_feature (600)..(632): n is a, c, g, or t
ctaataaaaaactttgtacaaaaaagttggataaactttgttttttagtatttaaagttagttatcttatggcttctgtgctttatattatacttgaaaagactttctaatgtagaaattatcttaaataaccttagatattcttccaatacttttttgattttatttttcacatttaaatcattgttgcccccaaggatttatttttggataaggcttaagatataaattcaactccatttctttgcctaatggtaagatttattgaatgctccagtgtttattgtgatatgcaatgccaacattatcttatgtgaannnnnnnnnnnnnnnnnnnnnnnnnnnnncttatactccttccacatttatttttggatgtcccatttttttccatttaactatctataccagcaccacagtctttaagttattgtagcttaatacattttacaaaaattggtctagtcccaccgcaatgttcttctttctcagaatctgtcattatgaattcttttatttttgtaaattttttagttgaatcacttggtttttccaaatatacaatcatattacttagaaggtatagttaatatgcctccnnnnnnnnnnnnnnnnnnnnnnnnnnnnnnnnnttgtaagactcctttgtctagtgctactataacaatactaaatgatagtaggaataagggtgatcattggcttaataagtttatggaaatgcttctggaattccctataaagcaagctgttgactttttcgtttttaggttagcaagagggcacttaccaagctaaggattgtggatccttagatcacttgactagaagatggggatggggtcatatggtacaaaccagggctgttacttcctcaacaagggaggaataaccgcctcttaagagcatgggcaggcagttgccataaaacatgtctactacatttctcactgcctggaataatttgaaaaagtttcataaatgctctggcttt

SEQ ID NO: 249571 - DNA, 900 bp, Homo Sapiens
  misc_feature (420)..(439): n is a, c, g, or t
ttttcttctgagtttttatacccatttgtaactttttatttgtggaattacgtgattaatttgttaccctggatagactccataggctccacgaaggtaataattaatttgttaccctggatagactctataagctccatgaaagtagagcaaagtgtctattctatcccatggctgtatccctatcactcagctcagtggtggtgctcaatcaataattagttaacatcgttgaaggtcttggaggtggagaatgttctaggaacagaagaggaactccctacatgggttggctggatgtggaacacagtacctataaagctgccagcgagaactgaggtccaggtgccaaacatcctcgatctcgttggcctcggctgcagtcatggtgttcagtttgcgaagctcatccttcactcnnnnnnnnnnnnnnnnnnnntggttgcgctgggtctgcagacatcaataccaggcagggtactgtctgagcagaggcaggcttggttttaagcccaaggcaggggtcacagcacgtaagaaaaagggctggcatcactgattaatgtcaagtgtcttacattctcccaacagctcttccactgtagagtggctaaacaaggactctggagccagtttgcctggcttcaaagccctactctacctcttactaggttgtgggacctagtaaggtaaatgacctaacctctgtgtccctcagtatcaccttctataaaatgggaataataatggtatctctttataggattgttggcttgtcaggagtaaatacgtggaaagcatttatactagtactagcactagttatcattaaacatctttgaccatagcctgtttcttgttcctaaaatgcatgccatgaaagtcatgggggtggtccaa

SEQ ID NO: 249572 - DNA, 633 bp, Homo Sapiens
  misc_feature (250)..(266): n is a, c, g, or t
atgagccactgcgcccagccatatcttttctttttaaagtatttaggtagatttgatgacaaggaaaaatattcacatgtattagtgaaaacaaacatatacaacatacacactatgtagtttgaagtttgaaaatatatgcatcgaaatattaacaatggttatctgtgggtggtaggaatcttgagtaattttactttcgtatatgtatatttctagatagtctaaattttgtacaatgcataagtannnnnnnnnnnnnnnnnattaagtatacgatacctgcaaaaataagcaaacactcatgtaggcttcacccaacttaaaagtattcaatgtctcctattcatcctttattgatgaaacagttcacttaccattccactgttgatagacatctgggttattttcagtttttgtttttgctattacctataattctgccttgcacattcctgtatatttctcctttggtgtatatgaacaagagttactatttctttatttactgctaagggagtgaaatttctgggtgaaggcatatgttatttttcactgtattgagtaatataaaattgtttttctaaaatgcttgtacccatttcaatgacctttaaccaattcataaatttt

SEQ ID NO: 249573 - DNA, 640 bp, Homo Sapiens
  misc_feature (176)..(199): n is a, c, g, or t
ctttgtacaaaaaagttgggatttctttcgttttggagtcaagaaaagcttttgtagaagccagtgtaaaatggcatgcatataattaatttcctcatcttttcctcataaaatcagaggtccttttatcgatggtggtttgaaagtctggggtattcagatttggcagcagaaannnnnnnnnnnnnnnnnnnnnnnnataaactaggtggattgctaattctgattgaggaattcgtaatgtttgacaccagaaccagagcacttgtgaaaagaagtctctttagtacaaaaccaaaaatttaattacagcatttgttataactatagccaataaaagtatttttaatgaaaaagaatttccgcagaagaaaatgctttctattaatgcagaaggtgttatatagaagatttaattgtaatgatattggttatgatccgttttttgttttatctttacctgtattttatattcgtataacctctaaattttacaaattacccataatacatttcttatataattaaaaaaattctgagtacagaacaggaaatatgttcaatctttattccattagagttctacttggaaagtattaatatgtaaggtttttatttctccataagaaatagacctata

SEQ ID NO: 249574 - DNA, 909 bp, Homo Sapiens
  misc_feature (256)..(287): n is a, c, g, or t
gaatagaataccctttctactttggatatttgagttccaaacattctcaggaatatcatattcaaaagaaaagatgcttttgaaataccctgtcagaaagttttgtgatttatttataactggcttaattattttgatgtttttaacagtaaacacagtttaaaagatatacatcttcccaacttgccagttaaaataaagtcattttaagacttttataaaaaatacatcagggctgggcatggtggctcatgcnnnnnnnnnnnnnnnnnnnnnnnnnnnnnnnnacatctttatgatacttaatggcattttgcttactggctgttcagaatggttagtggtgggcaggcaaccttggaaacatctactcggagccctttccaactcttcacatcactgttcttccctcccaggcagggtgggcctcccaattaacaaaggtccagccattggattaacctaaaaaccaagggaccaaaacaaaacccccttcagaccccaaaccaggcctgaccccatctgtctctcccagcgtggcagcagccatggccacctgctgtacgagaacctcagctggactgtacacactgtaactttagatcaaaagctctgtttgctgcagtgactgaggtctgggggcactttgagaggggctgctcaacaccctagccttgttactgagaagagtgaaacattttaactcttactggtttaactcatacactcaatgcctagataatatcaaacatgttaccctggacagcctgtcacttaacttttctgatctgggatcagaaatgctgaccagatgccactaagttgactaaatagaatttgtagttatttttcacatggtaaagcatcatcacttctaggcacaacaaggctgctcacataagcagccaa

SEQ ID NO: 249575 - DNA, 508 bp, Homo Sapiens
  misc_feature (234)..(281): n is a, c, g, or t
actttgtacaaaaaagttggtgaacatcatccaccgagacctcaactcccacaactgcctggtccgcgaggtgagtaccagggccccacgtggctgggtgtcaggagacagcaggagcccatccaaccccagcctcagggccttcccagaactggaggcccctccatgttgcctccatgacttcaatttgaggtgggggtggggggcagcagcccgtggggaagagcgcagggnnnnnnnnnnnnnnnnnnnnnnnnnnnnnnnnnnnnnnnnnnnnnnnncatggtggaccatcagagtcccaggctggtaggagggtctcataaatcaatgaaggagaaagtgacatgtaagctacaaaggaccaggaccgtggtcttcatagagcacagcccatggcagagtggccatgggctacaccagacagcaccagcatctgggggccacagagtgggggcataggcgtatgggctggagtggtcagggcaggcttcctgaaagaggaggc

SEQ ID NO: 249576 - DNA, 944 bp, Homo Sapiens
  misc_feature (345)..(396): n is a, c, g, or t
ttggctattttgctatctcagcatagactatgctgtctgataaatctaattcttaactctatttctccagttttttagtcctttaactttctggattgcaacgaagtctagtttagacctctaagcccttttagaagtacaagtataatgggaatttcttttcttggttcttttcaggttatgaggtttggtcagtgacaaaattttttttcataatttggttgattggttgcttcttaagttttataataaacgtttttcttcatgttctatttttgattttacataaatgattttgcctccttgtggatactgacatatattaagtgtggaagcttattaatnnnnnnnnnnnnnnnnnnnnnnnnnnnnnnnnnnnnnnnnnnnnnnnnnnnnaggaaaaaataagcactgaactgagaatgagaagaataaaagtatgagttccataccttctaattttaggctgtcagaaattcctttattctttgggatttcacaatcatttgaactatcagaagcctttacaattacttttagctgtaacatccgattctgtataagccacatagaaaaaagttgcctttctttttttatgacctggatatataagcaaatcagctaggaaatatataattgtattttatattaatgttttctaggattttggcttacagtaaatgttagcccctatggtaagtgattgttattgttggatgttatactgattattaataagaaatttggatttttgcctttttacctgggaatttttgcttacagccgtagctatgaatatatatagggtggtccccagtctctgttatggttgcgcataaattaataattttataagtatttagaaatggtataattctcttaacttcctctttcagtttttgtactaatgtttgtttttgttcgggaagaggagaatttgcttt

SEQ ID NO: 249577 - DNA, 1346 bp, Homo Sapiens
  misc_feature (97)..(160): n is a, c, g, or t
gccttggggccctcctccttcaccgcccccttcaccacctctacacgttctaggccttctgtcctggagaagaagctatagtcgttctcccttgtgnnnnnnnnnnnnnnnnnnnnnnnnnnnnnnnnnnnnnnnnnnnnnnnnnnnnnnnnnnnnnnnnggaactagccaggcctctgccggggcagcgactggcgctactggggccagcgggggcggtggccccatcaacccggcctcgctgcctcccggcgacccgcagctcatcgctctcatcgtggagcagctcaagagccggggcctttttgacagcttccgccgggactgcctggccgacgtggacaccaagccagcttaccaaaacctgaggcagaaagtggataattttgtgtcaacacatctggacaagcaggaatggaatcctacgatgaacaaaaaccagttgcgaaatggtctgaggcagagtgtggttcagtcagggatgttggaagctggagtagacaggattatttctcaggtggtggatccaaaacttaaccacatcttcaggccacaaatagaacgagcaattcatgagttcctggcggcccagaaaaaagcagctgtgccagcaccccctccagagcccgaaggccagggaccctccagctccatctcatgacacttcctaagaatacgccagacaccttttgaaagctaatttttggtgaagaaatggattcggttacataagagtgcaacttcagactgaagataggccaaggtcgtcactgatctcaagatttcaaccttgaccatgggcagtgaccagattgaaaggggagcaagttcggcagtgggagagttgaccgtgtcaccccctgcattgtgctgccatttggccagcctgtccaagggcatgacaccaagtagacactacagagagagaaacactacagcaacccagggttgtcctgaaacagacttttatacttgaacatggagactgcccatggactttatggtttgtgctgtgggataaacggaagctacagtgagaacttagccagtcccaaagacaatttcaaagaaaaatgacagtaaagattagctgggagtagtctttgacagtgcttatttgatactgtctctcagagtttgcaaaccagattgtacacgtcattaccgtcagatacctttaaagttgtgaccttcttgtacatgaatcttctagccagtttcctttcctttgtaacgaaacatgaaatcctagaatgtatgagaagttcagacattaggcataaggaaactcgtttgcaggctcactgtccagggctgcttcctgtcctggagggaccagtgagtct

SEQ ID NO: 249578 - DNA, 904 bp, Homo Sapiens
  misc_feature (159)..(244): n is a, c, g, or t
  misc_feature (306)..(319): n is a, c, g, or t
aatccccagcactttgggaggccccaagatggggggaatcacctggaggtcaggagtttgagacccagctgacccaacagggttgaaaccctgtctctactaaaaaatacaagatttagctgggcatggtggcgcatgcctgtaaaacccagctatgcnnnnnnnnnnnnnnnnnnnnnnnnnnnnnnnnnnnnnnnnnnnnnnnnnnnnnnnnnnnnnnnnnnnnnnnnnnnnnnnnnnnnnnggacaagagcgaaactccgtcctgcactctagcctgggggacaagagcgaaactccgtctcnnnnnnnnnnnnnnttgttaacattgtttattgagttttgatactcagtcttcctgattcacttaacccataatggtctgtttctcaccagttattaaactgtgtctgcactgggctggcttgcagctgagcgatgcggagttgagcccaccttggttgatgagtgattaggtctcaggcaggcagggctgctctcattagagcagagggtgctgtgtcctggcactcctgggggtggatggtggacccccaattctgcccctcctggcctcccctccctacccagagccccttcacatcccatgcacagtccctctgcctgtgacatctctgcaccgggattaagagcctggctcttggagtctgcctggggtccgctagccatcacccctgggggtgtaagcgcttgagaaggtgtctgcctagggcccaccgtggagaggaacccccagactgcttctagaagccagggctgcagcctggggggtacaggcctagcagggagccacagtgacccctcccagccaatggccctgagagaacaggcagtggagccccccgcccccacccacagtgaagccaacttttttgtacaaagt

SEQ ID NO: 249579 - DNA, 622 bp, Homo Sapiens
  misc_feature (382)..(418): n is a, c, g, or t
cataaaaagacaactttgtacaaaaaagttggcagctgtcgacttggctttcctttatcctgactttccagagttgttcaccaaacaggtaacaagattgagctttaagtctttatttcatattgattctccataaattaaattatcttatgacttatggctccatgttgtaagtaaaaagtcatttgaccaactgtttggaattcttgtcaataacaattattgagcacccatgttagtgaatttctgtgtgtgtgcactgggtggtgagaaaaggttgagagcaaataccttgggtatactttgtaaggaaccatgatcagcttgtcatgcaaacatatgacaactgtgcaaacattttttacaagagacagtcttaacnnnnnnnnnnnnnnnnnnnnnnnnnnnnnnnnnnnnngagacaatcttaaactttgtgtataagctttaattttcaaatgtagaatcagaagcattgctgtttaggcaatgttgtgatgaaacaggaatcaaatttgatcccaaatgacaaatacacaattgccaaatatctagaaaagaagaaatgctgaagtggtgtggcagtgagtaaagttgtgttgagaaagatagatacctggat

SEQ ID NO: 249580 - DNA, 928 bp, Homo Sapiens
  misc_feature (229)..(237): n is a, c, g, or t
  misc_feature (610)..(685): n is a, c, g, or t
  misc_feature (689)..(869): n is a, c, g, or t
ttggtgtttcatgtattcaacaaacgttttagtgcttagggcaagaagttcctgtcctcatgagtttatttcctagcagatagaactgtatcacttgccagtactactcagagtgtggcctgtggactgacctccagtctgtaaacttggtttgtagtgagataggaatttagaccagaatgtgtaatcaaccacattactgggcacaatgtttggtccagctggcgannnnnnnnncatagaaagcctttattgatgagggaagcaatatattgatttatattttggggtcacctttttatttcatggcacactggcactttcatgcatgctgactttgatatccatcactctgaggcattgtgctaaaatagattgattttatcgtgttgttctcaattcaagatgtaaaaatcatcaagtcagtagcagtttttgctttttatgtttcatgtcatgtacagtctacttcactggcagtaaaaaaatttaagatagtggtggtcatcctacaaactgtgaatctattaaagagaaaagtatctgttctattctaagcatgggggagggacaagattagtatgttaacatgcctactttgtttgtttgnnnnnnnnnnnnnnnnnnnnnnnnnnnnnnnnnnnnnnnnnnnnnnnnnnnnnnnnnnnnnnnnnnnnnnnnnnnngttnnnnnnnnnnnnnnnnnnnnnnnnnnnnnnnnnnnnnnnnnnnnnnnnnnnnnnnnnnnnnnnnnnnnnnnnnnnnnnnnnnnnnnnnnnnnnnnnnnnnnnnnnnnnnnnnnnnnnnnnnnnnnnnnnnnnnnnnnnnnnnnnnnnnnnnnnnnnnnnnnnnnnnnnnnnnnnnnnnnnnatgagccacccaccatgcctggcctacttggttttttatgcacactaaaaaatacctac

SEQ ID NO: 249581 - DNA, 922 bp, Homo Sapiens
  misc_feature (838)..(838): n is a, c, g, or t
ttggcttggattgctccttgggagttaagattgtcaatactcctgtgaagcaagggatttcagccatagaacaaagatttattgttgccacctgaaaagtttacaagtatttattgtgtatttgatacattgcttgaaaagatgaaatctgttaaagattcttttcgatgtccaggttaagaagaaacctccttgtattgagtgaaattatatgttaaatgtattagagaatgtaggtggtatagaaattgatttttcttggtgtagaacaactcagttcggcaaagtttaaaatttgattaaacaagagaagtggttcaggttgaagatggacttgttaggaagtgatcaagtcctttaagtacttgtttctttttcaggttgtgatgtggccattccgaattttgttgagagtttggtttataattgtctcttttgtcttgttagtaaacattcatttgcaacagttttgaaggtgctgagtggaaaaccgaaacacatggttattgcgtattggacctagaatgaaataattgcctcaatatttaacaccaagccattcttatctcaaagatttaaattcccgaatgtcccattcgcaaatcatatgcaattgaagtgagcagcatgagcatctgggtcatgagggccttcatttacgtaaatttgtcactaaaacccagtagtagctctacaaaatcttaaactgctgcagtgctcaaggagatggaatatctttgtcattggtgctgaggagagcatttcggtagaagatatttgcgcctgaagattgagtgtaaatcattcaaaccagtggttctcagtgttggttgtatancactttgtagtcactttggaatgttggaagacacatcgatgcttgggttccgtatgccaagattctgatgttggtctggaatat

SEQ ID NO: 249582 - DNA, 493 bp, Homo Sapiens
ttggctttgtattaaaaccatgggggttcagagtacttattaacttataaaatatcatcagaatgagctcatctgagctaatgtttcagaccaagcacagagtaggctgtttactattctgtacctctactgaataatggaaattgtattttttggtttagccagtttgtttttatctttcttgatctctttctcaaagcaatttctgtttgagttagtggctttaaccacttatccctaggtatatatcaagattagtaaactatggaccaccagccaaatctggccccttagagacagaggttctcaaccctggtctatattcatgattttgggggtttattgtaccttatgtacttattgtaaataaatataaattctttctgaaagtaggtaggagtagaactctaaatatacatccatcaacatatccaagttggtcagactgaaaattgaaaattacccctttttggtgtgttatgacgatttgtta

SEQ ID NO: 249583 - DNA, 1513 bp, Homo Sapiens
  misc_feature (171)..(181): n is a, c, g, or t
gagcaatgctttccttttaatgccaactttgtacaaaaaagttggctcgtttgcactgagagaggacaacagtttgaaacttacttttgtgtgtgtgtggctttggaagccagtagctacttccttagttcagttctttactgttcctcgaataatctcctgactaaggcnnnnnnnnnnngcttctcctacgagaatcagtctaacagagatgccgatgtcagcacagccctaagcagtaagtcatattggcatttccacgtgactgtgtttctatcccgtgtacagagagatccagagccctacactccacgacctgggggctcacagcacagaacctagaagcacctgctgacactcttcaactgatttttaaatgttgttgcttggagataaaaattacataagggactttttgcctgcattctagtgcaaaacatctgaagagctgtacacccacaagggtgactatttcccctgagtggccgtgttgtcccagtgccctggttcagtgtctcctgagtggatgacaggtcttcattctctatcttgaatgtattatggttactaatagttttataatggaggtctaagaattaaagttgtgtgggagtttcaggacaaaggaaggctaaaagtttgtcaagacgttgagcgtattttggttacctatgagaagggttgtgacagtgtacagtggcagctgttggccacgctgcagaaatgagctggagctcatgggttttcagctacatttttcataactttgtagtacatccatcttgagtaaattaagccacaatttggtacctaggggtctcaaactaaaatttatttttataaatgaatttttaaaagaaaaaatatcctacttcttttaaagttagaagaaaattaacctgctgacaggcaacatttttggggtgctttctgcactagttttccttgtaaatgatttgagtgagtaggtttggtttctgacgaaagtagactggagggtagcattgtatgcctcaaatgtctcagtgtgtttggctcatacgtgggctatactttattattttggtatgcttacaaatgactaaccaatcaaattgtcattaatgtttggaaaatctgttaatgcacatgcacaataatttcctgaaagccataggacatgtctgtagtcagcaccacgatagcaccgtttcatgaaaggcatggcggctgcatttcataccacatcaaaatacagtaacatttctatactaaattaacagtaatacctcaaaactgctccggtagtagtttttaatggattgaaatttacagtttagtaaaaggcttaaaattacttatacttatgaaataaactttaccagttgactaaaataatgcatgttaacagttggtctgtatttgcatgtaaaagtgggccaccagagaacccttattgattacttaagtgtttacattattttaaagactcctgtttcagagctttcagaattgtactgggtgaatctcattt

SEQ ID NO: 249584 - DNA, 1120 bp, Homo Sapiens
  misc_feature (244)..(315): n is a, c, g, or t
tacaaaaaagttggcccacaccagccgcaggtgaaaaccggcagaaagacattaagagattttcctgcagtcactgctggcagatgatagagccaggatttgaaagcaggcagcctggctccagaccctgtgctcttaactcccgttttgcatcaagaacagaatcctatgaaaggcttgtacagtgcttggtactgagtaggcactccgatagcagcatcaaggagcattgtgtacatgcagnnnnnnnnnnnnnnnnnnnnnnnnnnnnnnnnnnnnnnnnnnnnnnnnnnnnnnnnnnnnnnnnnnnnnnnncaaaacctctaaaatgcagacctccagctctagatctgtgcacctgagtgaatggcagaagaattacttcgcaattacatctggcatatgtaccggaccgaaggcagatgcataccgtgcacagatattacgcattcagtatgcatgggcaaactctgagatttcccaggtctgtgctaccaaactgttcaaaaaatatgcagagaaatattctgcaattattgattctgacaatgttgaatctgggttgaataattatgcagaaaacattttaactttggcaggatctcaacaaacagatagtgacaagtggcagtctggattgtcaataaataatgttttcaaaatgagtagtgtacagaagatgatgcaagctggcaaaaaattcaaagactctctgttggaacctgctcttgcatcagtggtaatccataaggaggccactgtctttgatcttcctaaatttagtgtttgtggtagttctcaagagagtgactcattacctaactcagctcatgatcgagaccggacccaagacttcccggagagcaatcgtttgaaactccttcagaatgcccagccacctatggtgactaacactgctaggacttgtcctacattctcagcacctgtaggtgagtcagctactgcaaaattccatgtcacaccattgtttggaaatgtcaaaaaggaaaatcacagctctgcaaaagaaaacataggacttaatgtgttcttatctaaccagtcttgttttcctgctgcctgtgaaaatccacagaggaagtctttttatggttctggc

SEQ ID NO: 249585 - DNA, 1586 bp, Homo Sapiens
ttggcttgggtcgtggcagcagtggcggcgatgtttgtcggctcgggatgggtccaggatgttactccttcttcttttgttggggtctgggcaggggccacagcaagtcggggcgggtcaaacgttcgagtacttgaaacgggagcactcgctgtcgaagccctaccagggtgtgggcacaggcagttcctcactgtggaatctgatgggcaatgccatggtgatgacccagtatatccgccttaccccagatatgcaaagtaaacagggtgccttgtggaaccgggtgccatgtttcctgagagactgggagttgcaggtgcacttcaaaatccatggacaaggaaagaagaatctgcatggggatggcttggcaatctggtacacaaaggatcggatgcagccagggcctgtgtttggaaacatggacaaatttgtggggctgggagtatttgtagacacctaccccaatgaggagaagcagcaagagcgggtattcccctacatctcagccatggtgaacaacggctccctcagctatgatcatgagcgggatgggcggcctacagagctgggaggctgcacagccattgtccgcaatcttcattacgacaccttcctggtgattcgctacgtcaagaggcatttgacgataatgatggatattgatggcaagcatgagtggagggactgcattgaagtgcccggagtccgcctgccccgcggctactacttcggcacctcctccatcactggggatctctcagataatcatgatgtcatttccttgaagttgtttgaactgacagtggagagaaccccagaagaggaaaagctccatcgagatgtgttcttgccctcagtggacaatatgaagctgcctgagagtgagcacaggggcccgcgggaaatggtcccatagttggggaggagcttgcagtgctgtacccatagctcacagggcggtctctgctctgtgttcttcttctgaagggtagggagcactttcatctgcctttccccttcaagttacagatgagcagcaggagggccgctttgtttctcagttggaaagagggggtctaagctctggcttcccagaagtaggtgtcagaaactgggggccggacagcctatagtttgatccttccctattgggtgggctccctgttttctgacttgcttctctcttgcttcctcagtgacagctccactgccgcccctgagtggcctggccctcttcctcatcgtctttttctccctggtgttttctgtatttgccatagtcattggtatcatactctacaacaaatggcaggaacagagccgaaagcgcttctactgagccctcctgctgccaccacttttgtgactgtcacccatgaggtatggaaggagcaacactggcctgagcatgcagcctgaagagtgttcttgtctctagcagctggttggggactatattctgtcactggagttttgaatgcagggaccccgcattcccatggttgtgcatggggacatctaactctggtctgggaagccacccaccccagggcaatgctgctgtgatgtgcctttccctg

SEQ ID NO: 249586 - DNA, 859 bp, Homo Sapiens
acaccttcacttttaccaagtttaattgtgttatatcagtaacataatatgatgaaccaagctttgcctctctcacttattttttattcctaccacaaacagatatattcctctctgaagtacagaaatgccaatgccatatattttatcttttaactcagtgggatacaattcaagtttcttgtcctgaaaaaacaaaggcagaatgttgctttgtgactcatcatataccaggttcaacaagtctggttttgtgactcattcttggatatgagctaccccatcagaagtggttacccaattttggacaagactacagaaaaaatgcaattttggtttatttaatcttttgcttccagtttatatttcacatcctgttcagcttcattaatatgccatgggtcacaaaactcagtgcaataaaatgtgtatgaaagaaacacccttcagaaaagatgagactctttcaagtgtaaatactctaaactaatataagtcaaaatatattttttatgcccagtgatttttaaaaattgcccagtcaaccatttcctcaataattcaaatactcaagtgtccatttatatttttggaataagcgagagtgatcgtagtactcttcacagtgaaattttaactcaaatacactgtggaaaattttgaaaccagtcattgcaattagctcaaatttagtaatcatttttcaacatgagcttgtttggttagttattacaagaaaataacagaaaataaagtctcaggtggcatccattagaaaaaaccctgaatttttgtaattgttaaaaatctcaaaaaattcatcactgctgctttttgaagactttccaattcaatgtac

SEQ ID NO: 249587 - DNA, 926 bp, Homo Sapiens
  misc_feature (411)..(419): n is a, c, g, or t
ctaaaaagcaacttttgtacaaaaaagttggcttccttaggtctgaaagccacatgctatcaatcattgaaatcaagagagaaggcatccgtagacgggcgcagcccagtctttccacatagcccagttcctccccagccactccccatgggaatgacctctgcagctgacctaagcttatcctctccttcttcctaagagtgcaacttagaagtcagagccaaatcctagaatgtatccctaaatgccatttctattttttataaacatgaaaaggttgtgctttggaaattcagtctgtttgagaactggcagtctggctggcactgtttaaaaatgtttatttgccctgcatttaaaaactgaaggtttcctatgtattaaaagccatatttccaccttcttaagggnnnnnnnnntcggacgtcataacactgggtggatgtttttatggtaacagtggtctgaggcccttggcggatgctcaccgagccactgtcactatcctgcctgcctttatctgccttgccctgcgattatttggctttgtaagcataagctacgtaagacataccacacctaagaaactaaacagcaatgaaaacccatacttctgaaaagggtgtcttttaaaaattaagtttgatcttttgggaaataaagcacatagttttcaaaatgatttaccaagatctatgctctttcaaatggagactgggatattgttgttttgagaccactgttttcctgtttcctcccaaatgttagtcacatatatgattacccttaagttggtcactatctatctatctgtcaataatttaggattaaagttttgaagtgtaattacatttgacttttacaggcatctcaaggtggacttcttatgaatacactgaacctatacaatgatctagaaacgttta

SEQ ID NO: 249588 - DNA, 958 bp, Homo Sapiens
  misc_feature (598)..(658): n is a, c, g, or t
ttggatttcagcctcctaaacagtaggaattcagctccttctttctcgtcctttgttgtggggtgtaggggagttactaaggaaagtttcagtaaggtgataccagatggtgcccaaacctgttgttatagcttgtttaagcattctagagttttcacttgtccttctgtccacttagagctactagatacatttttttcttcttgaacactgaaggaaaaggcaaaattaagttttggttggatggatttctaaagttttcttcttaggaaaataggatagtgacttttgtattctgtatgttaaattttctcagtaccattaatcctaagatgaagaggaaggctattgctgcagaggcatagttgaggacgtatagcactataccagagacaagaatgcttagctctagcaagtcttctgtcattgactaccttcataatcttcagcaggtttaggcctttcttagttcctttgtaaataatccatagagtcttagagttataattaaaggtccatggttctaaatacagaagcatatttttgccgcttaactttttctttcttaaagatgacactattaaaatagctgtttctnnnnnnnnnnnnnnnnnnnnnnnnnnnnnnnnnnnnnnnnnnnnnnnnnnnnnnnnnnnnntgagccactgtgcctggccccaagttttgcatcttttaatgccctctgaacaaatacatagagaaaactctcagaacaattaaaacctgcagagcaacagtgtcctccatgtcttaggtttcaagtttgcctctaaaattctaatccatatttttctacttctcagataatttatgtgtgtgtactcttcctagacgtacaggagactttttaatgctaaatatttggtcagttgcttaacaaaaactcaatttcacattactcatattgttttgttttattgaatgtgaattaattttt

SEQ ID NO: 249589 - DNA, 891 bp, Homo Sapiens
  misc_feature (144)..(162): n is a, c, g, or t
ttggcaaaaactttcttggtggactcttttcttcttctgggaaaagaggcaacataaatggacgcagatcacctgccacatacacatgtgcatactgatatgtcccctcgtgtgctcatgtgtacacatttttgcacatgcatnnnnnnnnnnnnnnnnnnngacatgcctgtgaagaggccaaccccagtgtgcagcagctgtgagggggctctgcccctcctctcctagaatggaacatacgttcttgtgaacatagagagtggcattttcttatgtcgatgtaatgtgaacaactcctggtcaccagcccccttgaccactgatgcctcttcatgggtcggtgagtgagggagacacagccatttattcctggcatcttgaattaaacttgaaattactgcccactagaaataaggcctggggcatagagtcttattattaaaatcttttgtggaaagtcacagggctccaatcaccccaaaaacattgtgtctatgggaaaatgcaccttgagttccatcttacaaatggatttgtaacagtttaggtttcatgtaagctgttcacagtatcctagtgatacatgtttatggtaaaaaatcttggagggtaaagaacaaacactgcccataattttttactgtatacacttttttttcttataaaaatgttactctattgcacatagtgttttgaatcatgccaatttttatttggcaattatataaaggcagaactttaaatatcacccccaacattctgtgcctatgcctcagagcctatgctttaaaagagcaatcatattcatgactacgtatttaatgcaacattagaaaactaatgcagtcataactcacaagcgttttccatgccaatgacctttttgcc

SEQ ID NO: 249590 - DNA, 865 bp, Homo Sapiens
  misc_feature (361)..(386): n is a, c, g, or t
  misc_feature (404)..(446): n is a, c, g, or t
ttggcatccctacccccctttttaaacataaaactaaatgtaaatacacttatttctaaatgcacatttcagtgaaagtcagatgcaaccccccatccctcccctacacattcagtaatgagacttcagagagctacttcggagcgtgtggtctgtggaaaggttcacgcaatcgccgctgctgggtgcagtggtctttatgctcgttggcacacaggctctcccatgattaatgcatttgttccttgatattcagcccctgcaggacagagaatcaatttagcactcacaggcccagattatcaccagtaccaaagacatttctgcaccaggggcttccccattcaaaacgaaaagatannnnnnnnnnnnnnnnnnnnnnnnnnctgagactttgtctcagnnnnnnnnnnnnnnnnnnnnnnnnnnnnnnnnnnnnnnnnnnntaaggaaatgtggtattttttgtactctctgtgctggtgaatggtcattgattggctacattctgtctggtctttgcacgtttcaggaggtcccatcacaaatgaaatccatgctgctccactttgacaggtttgatgttgtgtcatgagcatgctcagtggacaaccttgtgtgaccctaaggaccaaagaattacctaacacttataatccatattctacattcttaatacagaaggatttcttattgcattgcaaagtctaggtcagacgaaagcagcatgttgaacttgttccaggtaatatgtttcttagtggctgagcagcctgcacacatgaaggtaggatatacagagagcaagaagcagaaacaagtgggtgaaacaatggttttggattgtgaaattatgttaaacttt

SEQ ID NO: 249591 - DNA, 773 bp, Homo Sapiens
  misc_feature (221)..(250): n is a, c, g, or t
ttggcttttggactcctggaagtctcaatgcttcaatgtcccagtgcaaaaagtaaagaaatatagtctcaataacttagtaggacttcagtaagtcacttaaatgacaagacaggattctgaaaactccccgtttaactgattatggaatagttctttctcctgcttctccgtttatctaccaagagcgcagacttgcatcctgtcactaccactcgttnnnnnnnnnnnnnnnnnnnnnnnnnnnnnntgggtgggctggaagaatgtcctagaatgtgttattgcccctgttcatgaggtacgcaatgaaaattaaattgcaccccaaatatggctggaatgccacttcccttttcttctcaagccccgggctagcttttgaaatggcataaagactgaggtgaccttcaggaagcactgcagatattaattttccatagatctggatctggccctgctgcttctcagacagcattggatttcctaaaggtgctcaggatgatggttgtgtagtcatggaggacccctggatccttgccattcccctcagctaatgacggagtgctccttctccagttccgggtgaaaaagttctgaattctgtggaggagaagaaaagtgattcagtgatttcagatagactactgaaaacctttaaagggggaaaaggaaagcatatgtcagttgtttaaaacccaatatctattttttaactgattgtataactctaagatctgatggagtatattttttattgcccttttgtcctt

SEQ ID NO: 249592 - DNA, 906 bp, Homo Sapiens
  misc_feature (57)..(137): n is a, c, g, or t
  misc_feature (415)..(431): n is a, c, g, or t
tttctgtatccctcaaaggctgtctcccaagttctttgtaagggcagccctagctcnnnnnnnnnnnnnnnnnnnnnnnnnnnnnnnnnnnnnnnnnnnnnnnnnnnnnnnnnnnnnnnnnnnnnnnnnnnnnnnnntcctatcaaatgatgagctcaattccagccttgctaggtgcacttgactcccagcctcaggcagatgagggctccgcttgagtgtttattatacatgggcaacgtccttacgaagagatgaagtaacagagaaggctttcatgaagatggaggggcgcaccctgtgaatcaagaagttgctaattatttaaggattggcaagttgaatttcctaaaagtgatgcacgtttatggctcagagaccacacaagggtgaggcggctgctttgtttggatannnnnnnnnnnnnnnnnattgaatttcataaataccaaccaaattcaaacaaaactgatttagatttcacctcgtcacttaaaatatattttgtcgagtacagtctgtgcagtaatcctctgctatactttaatttggttttaattttataggccctgttttaactgcatatttccagacctttatttctctcacagctcttagcaaaatggtagctcataaacacaagctctgctgtatagactttgcatttcatcccaaagtatttccttttttatagccgtggtctttccatcttagtgctgtgagcttgggtcacaaatctctctgctattccagtgtgtgacatcttcgctcgtttgccgctgctcattaacaaacaatactgctgtgaaattggtttaatgacaaagtaataaaattgctattctgctcacagattgcctgaggcactttgagctcctacaaggcttactgtgggtgccaagccaa

SEQ ID NO: 249593 - DNA, 801 bp, Homo Sapiens
  misc_feature (610)..(621): n is a, c, g, or t
aatttttctctggctggttaaaggatatgatagtcagagatgtgaagtatgagaagaatctaatgtatcattgttattttgaaaatggggaagaacaggatcctgctgtgtagttagtgtttcataaatactagctggttgactgatacagctttgtaccctctattctggtatgttattagtacatcaaagaccagaaaaatcattaggtttatgtatttgtttgtgtccctcacatgacctcaactctatgctttctaaagtggcccacttaatcttgtggttggaagacacctttaaagatcttatccagtgcaactggaggccgttatcctaggcgaactaagtcaggaacagaaaactaaatactgcatgttttcacttataaatgggagctaaaaactgggtactcagggatataaagatggtaacaatagaaactggggactactagaggggtaaggaagatgggggcaagggttgaaaaactattgggtgctatgctcagtacctgggtgataggatcattcataccccaattctcagcatcatgcaatatacccaggaaagaaacctgcatatatacctcctgaatttaaaataaaattgnnnnnnnnnnnngattttatccagctatgtacttgataatttaaccccatctgtaaaagtcacatcagaaggttatccagcccacacttgaccatttacagtgatgtggtccctctcccatttgtgcacaagtcagactactaactcagaccgagttgaaatctaccttgttttacctttaaatccacccaa

SEQ ID NO: 249594 - DNA, 879 bp, Homo Sapiens
gagtctggtgagaccatgctaacattactaaacagtgaactattacaaaaatttcctggtttatctttgtaatccacatgggtaaaaggaggagaacattttcttaaagggaggtaagaggtaaacaatactggttatgcttcagtgttatccttaccacactttttttccttcttagggagaatggactgatgacgacctggtagaatctctctaaccatttgaagttgatttctcaatgctaactaatcaagagaagtaggaagcatatcaaacgtttaactttatttaaaaagtataatgtgaaaacataaaatatattaaaacttttctattgttttctttccctttcacagtaactttatgtaaaataaaccatcttcaaaagagctagaatagcacctgttttgaatattcttattccatcgtgactaatatcaaattaaagctgcaactcatttgcctaattttttaagcaaaatatgataggcaaacctatgcttttttttaaaaaaggcaccacaaaaaacaaaacttagtagccagctttaaaagtgttaaggaatgtgttttgccctctagaaacctttataaatggctttttgaatgccatcctgatatatttagctatttgtccattactattaaactgcagaaggtatttcaactgttacatggtactgaaagccagtcgtctgggtaatgaatattatttttctttagttacccgaaaacatttccaaatgggtttttaaaaaaaaccagatatatgattttgaatagctgtctacatcaaactcttacgctagtatagataagtaggtagcagcaagattgtatattcagccaacttttttgtacaaagtttttctttatagt

SEQ ID NO: 249595 - DNA, 329 bp, Homo Sapiens
cagcttatcatgacaagcgtctatgagaaataaaatgcattgtgcacatgacagatgatgaactacccgaaatatttcgtgagaagctttggcaggaacagcagggtgtctggattcttaagcacaacacattcagcagccagacccagaaactcaaaggcagcgttgggaagccactgcacgtttgtaaggagtcaggttgtccacacaatggcgctattttgggattccggcttctctgcctgtgacctgctgaaaccattcatgccggcatcattcaatgggtggaaactctttgccaacttttttgtacaaagttgttttttatg

SEQ ID NO: 249596 - DNA, 545 bp, Homo Sapiens
  misc_feature (164)..(183): n is a, c, g, or t
tgtacaaaaaagttggattttatttccttttcttgtattattgcactagctaagacttctaatatgatgttgagaaacagtggtgagaggaaacatcctgattcctgatcttactggaaagtttagagtttctcattgttaagtaaaatgttaggtgcatgtcnnnnnnnnnnnnnnnnnnnnaatcaagttgaggaagtttccctctcttcccagttaccaaaagtttttttgataaacaggtgttgataaacaggagtcaaattctttttttgtatctacttataggatcatgtgatttttcttcattagcttgtggatatgatagattatactaattgatttacaaatgttgaaccagctttgcatacctgagattaatcccacttggttgtaatgtatagtcctttttatacattgtcagtcaaatttgatttgttaatattttttgaaaaattttgcatctgtatctgtgagagttgttggcctgtagtttcttttttgtaatgtcattgtctggtaggcaattaaaaagatcagaattt

SEQ ID NO: 249597 - DNA, 117 bp, Homo Sapiens
tggagcttgtctgttaactggatattttaagaaaatcattcttggaatattttttgtcaagtgaagtaatgagttaactaaagaacccaacttttttgtacaaagttggtttttatg

SEQ ID NO: 249598 - DNA, 1082 bp, Homo Sapiens
  misc_feature (125)..(199): n is a, c, g, or t
  misc_feature (204)..(230): n is a, c, g, or t
  misc_feature (232)..(510): n is a, c, g, or t
  misc_feature (1005)..(1035): n is a, c, g, or t
tacctggcctaaacttgtgttgttttaaatcactgaggtggcggtgacctatcccagcagcaactggaacctaacacagatggccttttccagctggggacttccctttctgttccttgggttgnnnnnnnnnnnnnnnnnnnnnnnnnnnnnnnnnnnnnnnnnnnnnnnnnnnnnnnnnnnnnnnnnnnnnnnnnnngtggnnnnnnnnnnnnnnnnnnnnnnnnnnngnnnnnnnnnnnnnnnnnnnnnnnnnnnnnnnnnnnnnnnnnnnnnnnnnnnnnnnnnnnnnnnnnnnnnnnnnnnnnnnnnnnnnnnnnnnnnnnnnnnnnnnnnnnnnnnnnnnnnnnnnnnnnnnnnnnnnnnnnnnnnnnnnnnnnnnnnnnnnnnnnnnnnnnnnnnnnnnnnnnnnnnnnnnnnnnnnnnnnnnnnnnnnnnnnnnnnnnnnnnnnnnnnnnnnnnnnnnnnnnnnnnnnnnnnnnnnnnnnnnnnnnnnnnnnnnnnnnnnnnctgtttttctattaatgtggcttatgacgttaagtgcttcgtagatgtttaagcaacctcactttgctgtgatacacccacgtggtcttggtgtatgatgttgccgagtttgggttgctaatattttgttaaggatctttatgtctgtattcatgatggacattgttctgtggggtgggggcgcggattatgatgcctttcgctgcctttagcctcttagactcagatgggcgtgtctcatcctccacattctgaagattgtgaatggttggtgttattgacagtatacagtggcagccacgtgggcacaggctttctgtaggaagactcaggacttttcattactataatttcttgttataggtctatttagattttctattaaatttctcagatttctgagccaatttaagtgatttgtgtccctctaggagtttgtcagtttcacctaatttgttggtacagagttttcctagtattccaagtcctgttcannnnnnnnnnnnnnnnnnnnnnnnnnnnnnngagacggagtcttgccaacttttttgtacaaagttggcttttatagg

SEQ ID NO: 249599 - DNA, 1294 bp, Homo Sapiens
ttggcaggcaaggaagtctaggtccctggggggtgacccccaaggaaaaggcagcctccctgcgcacccggttgcccggagccctctccagggccggctgggctgggggttgccctggccagcaggggcccgggggcgatgccacccggtgccgactgaggccaccgcaccatggcccgctcgctgacctggcgctgctgcccctggtgcctgacggaggatgagaaggccgccgcccgggtggaccaggagatcaacaggatcctcttggagcagaagaagcaggaccgcggggagctgaagctgctgcttttgggcccaggcgagagcgggaagagcaccttcatcaagcagatgcggatcatccacggcgccggctactcggaggaggagcgcaagggcttccggcccctggtctaccagaacatcttcgtgtccatgcgggccatgatcgaggccatggagcggctgcagattccattcagcaggcccgagagcaagcaccacgctagcctggtcatgagccaggacccctataaagtgaccacgtttgagaagcgctacgctgcggccatgcagtggctgtggagggatgccggcatccgggcctgctatgagcgtcggcgggaattccacctgctcgattcagccgtgtactacctgtcccacctggagcgcatcaccgaggagggctacgtccccacagctcaggacgtgctccgcagccgcatgcccaccactggcatcaacgagtactgcttctccgtgcagaaaaccaacctgcggatcgtggacgtcgggggccagaagtcagagcgtaagaaatggatccattgtttcgagaacgtgatcgccctcatctacctggcctcactgagtgaatacgaccagtgcctggaggagaacaaccaggagaaccgcatgaaggagagcctcgcattgtttgggactatcctggaactaccctggttcaaaagcacatccgtcatcctctttctcaacaaaaccgacatcctggaggagaaaatccccacctcccacctggctacctatttccccagtttccagggccctaagcaggatgctgaggcagccaagaggttcatcctggacatgtacacgaggatgtacaccgggtgcgtggacggccccgagggcagcaagaagggcgcacgatcccgacgccttttcagccactacacatgtgccacagacacacagaacatcccgcaaggtcttcaaggacgtgcgggactcggtgctcgcccgctacctggacgagatcaacctgctg

SEQ ID NO: 249600 - DNA, 777 bp, Homo Sapiens
ttggctattcacagaggtgtcctatacctgttcttcagagtttatcttgaatgtcattttctcagggaaaccgtccttggcttcctcaataagtcatgtttgttatgattgtccccataggcttggaaatcaacactaattttaaggagatactctgtaatataacagggtgttatgttaaataattcgagggtctttctttcccattgtaaatttctatgatatagtacgtactcttcaaaaaacatcattttgtaaaatatcttacttattaagactattgtattttaataaattacattataaatgtattgaatgggatctagtagcatttaaattctcagaaagacttctttaaataaagttaagtattgccatacacacagtacctcacctacaattattttcaaattcagtatattgattaggtagtcagtagtataaagactagagaagtaatacagagtcaatccattcctcaagaaacataagatttatttagtgagataaaacttgcatacagaagacgagatattggccattttttaaaagataacagaatgcattttaaagtgtttattccttaagtcctgcacttgcaattctgagagtaggaaggattaggaaacgttgggtagttacaccagccactccagtttaagttagagaagggaccccagagatagaggtatctaattagggtaggttagtttattatctagagcagctagaagtaacaggaaggaaaggataagtacaaggaattgcccacaggac

SEQ ID NO: 249601 - DNA, 842 bp, Homo Sapiens
  misc_feature (73)..(241): n is a, c, g, or t
  misc_feature (398)..(409): n is a, c, g, or t
  misc_feature (748)..(757): n is a, c, g, or t
agccacaggaaagttttatgtaagcaggggagtgatctgttttatcatttagaagatacacacctcttcttcnnnnnnnnnnnnnnnnnnnnnnnnnnnnnnnnnnnnnnnnnnnnnnnnnnnnnnnnnnnnnnnnnnnnnnnnnnnnnnnnnnnnnnnnnnnnnnnnnnnnnnnnnnnnnnnnnnnnnnnnnnnnnnnnnnnnnnnnnnnnnnnnnnnnnnnnnnnnnnnnnnnnnnnnntaaaccagacctcatttgtccatctcccccatcccccgccccaccccacggactgtcctataatgcccatacaacaggtcactgtttagaaagtgctacaaagttacaaacacagtcccttctgagcctcccaccaatgttggtgggtacaaggtcnnnnnnnnnnnntctcatctatctaaggggcataggagactttttagttagagggcccaattatagtcctcctgaaaagatgccaaaagtccccttcaacacttagcaaagattcaagaaagatgaatctcacattctttgtatgggaaatgaggaacttgacatcttcaatataatggattccactaaaataagatgacgatcaataggaaccaactaaaaaaatacttgactagctgttattgaaaggctgaaattcagctgacataagcagtattaatattgagctagaaaataattcgcattgaattcagcccaacttttgttttctgatttgggtctcttctaaannnnnnnnnncttctggacattgagaacaatccaatttgaaggcctcaatgcccaaatctacactcttgttttattctatatccttggtttcttc

SEQ ID NO: 249602 - DNA, 962 bp, Homo Sapiens
  misc_feature (576)..(584): n is a, c, g, or t
ttggcctattttgaagctggaatagaatcaaaaaagatttctgattcatattaaaacaaattatcttgccaaaataccctataaaagtgtatggcaacattgagtcctacagctgtttccaataaaaatgaccaaaccctccatgacaaggcaactgttcattggcatctgaagtgtgatgtccgtactggtctgctttggtcagatgattttccatctggctggctgagcgctcaccttgttttgacagcaaggaaaactgccagtgattgagaatccgttttcgttggaaggaaggaaggaagcaataaatagaaaacagaatgagtggatgccttcaaactctgatactccattctgaggtttacttggtcccctaagtcagtacacgctaaagtactttcacatgctggctgtgaccatcagtgcacagcctgtctgcagttatttggttttaaactgactggttttcaacttgtagcctagccttaggactttttaaaaaattgtgtgagtaagtagaggcaaagcaattcgaatgtaagagaacagggtccgaccccaactcattggtgnnnnnnnnnatagcccctctgcctgggaggctctgaggaacccacagggaagggagttctgcccagcacctagtgagatttgagcatctgtttctcaatccccgagttgtcattattgttctttaacagcatctggaaggaaaagagctgtttacaaaaaaatcatgcatggcctttgagcattcatttgacagtcacttcctgagcatctgctttgtgtcaggcattgtgtcctctcatgtctgggggtacagctgtgagtaaaggtgacagtgcccttccaccataaatgacccccacagggtagtcgcagtgacaggcttcttgccctttaatttcatgtttagggccactgttcactatgcaggaaaccattaaacctccaat

SEQ ID NO: 249603 - DNA, 872 bp, Homo Sapiens
  misc_feature (526)..(540): n is a, c, g, or t
  misc_feature (811)..(829): n is a, c, g, or t
gtacaaaaagttggctacagtcatggctgccgccgtcgctgctgccggtgcaggggaaccccagtccccggacgaattgctcccgaaaggcgacgcggagaagcctgaggaggagctggaggaggacgacgatgaggagctagatgagaccctgtcggagagactatggggcctgacggagatgtttccggagagggtccggtccgcggccggagccacttttgatctttccctctttgtggctcagaaaatgtacaggttttccagggcagccttgtggattgggaccacttcctttatgatcctggttcttcccgttgtctttgagacggagaagttgcaaatggagcaacagcagcaactgcagcagcggcagatacttctaggacctaacacagggctctcaggaggaatgccaggggctctaccctcacttcctggaaagatctagattgttattgctgtttgagctgtctcagtgggataagtttgaaattcaagtgtttgaactgctgataatttggannnnnnnnnnnnnnnaactttggcacattgatctatctaaacctggtggggagaattatccccacattgtctcatggaaagactcaacttgcaactgtgccctccacactatccttacttctgtctccactctgataccagagtgcagccatgcagatggttattccagctctggtcacccgactcctttcaccaaattgctcctaactgggaagatctcactttccccttgtggggtaggaaccgatgccagtgggagggatgtgccccctgaccattaacgacnnnnnnnnnnnnnnnnnnnaaagatggagttgttggggcaggacatgcacacaatgtgaaac

SEQ ID NO: 249604 - DNA, 1076 bp, Homo Sapiens
  misc_feature (52)..(63): n is a, c, g, or t
  misc_feature (115)..(141): n is a, c, g, or t
  misc_feature (184)..(208): n is a, c, g, or t
  misc_feature (980)..(1006): n is a, c, g, or t
gagcaatgcttttacataataaaaacaactttgtacaaaaaagttgggttgnnnnnnnnnnnngagatggaggtttgcactctagcctgggcaacaagagtgaaattctgtctcnnnnnnnnnnnnnnnnnnnnnnnnnnntaagccatattgattaggaggtgtagggtgacagataccttgnnnnnnnnnnnnnnnnnnnnnnnnngctagagctacagattttatactttggcctaggaagactcctaaaatataaaggaaaaagtaatacagattttaaagttgtgccattgtaatgtcagaaaactaaataacattcaaattttgaacatgtaatgctactattagtaaaaataagtgtaattaatgtaaagttgtgtaaagattactaaacttgtatacttgaaatgattgaatagttcatagaagtcatttgtttctcttttatttaaaatgtagcaagtttctaattttaaacacatacatattaagagatgcatttacatttttttagttttagttattatggatacataatagttgtacatatttatggggtacatgtagtattttgatagaagcatacaatgtgtgatgatcaaatcagggtaattcagagatccgtcacttcaaacatttatcatttatttgtgttaggaacattttaatttcattcttttagttattctgaattatataataaattatagtcaccctattgtgctgttggacactagaatttattctatctaactgtgtttttgtacctgttaacctttccctctttgtccctccctccctgctccccttcccagcctcttaaccatcattgagagagatgcctatgtaaatcttaagattttcaaaaggagcacacacatttggtaaagcactctaactgtaatgcacggtacacacaatgcgcattttctctttccttgctgtaacctctggtctctcagtccctgcagaccttnnnnnnnnnnnnnnnnnnnnnnnnnnncctttccagatacatataaacacacatgccaccctttaaaaacacaaacggtagcttattttatacactg

SEQ ID NO: 249605 - DNA, 908 bp, Homo Sapiens
aaggcaactttgtacaaaaaagttggctataaatcttctataaaaagtgtacatatatttcttaaatattgcaattgcctaaatgttgtatattttaaggctgttttctcttgctcttaatgttgaggaaaactataaattgatctataatgcatctactgttaatggttttggttagtttgatattcattgtttttaaacactttccaatatggaaactttaacactttttatacaattctctactattcaagatattctttaaaatatctcaccagaaacttacaattttatactttgtaatttttagtttctgtaatttgaggaagtgactttttttgtttgggttaagtaaaaagcctttgattgattaccagcatgagaattcaccttggtttctattttatgcatttgtaaatttttcccctaattatatggaagctattggaacttttgtattcagtgctaaatactaagtcaaggggagtatattaggtaagttttttcagtgactgtgcctttagcattcagtcattataagaaaatgatcagaacaaaatcattacattataaacatgtaattcttttatatagtgattatcatgtactgcattgttactttaaaataagctattaaactagtttttatggttcaagtaatgcaatacaaagtttcatgcttcaagtaatgcaatacaaaaacataacccatttaatgatgaattacttgaatgtatattatctgtggtttaagaaaatttggattgtctttgaagagactcagttttcaagttctggatttttgaccattatctctttctaattcataaacatatccagtacctaccctatgccaggtattatgctaggtgatcgtttaaatgagcggcctattttcccccctttta

SEQ ID NO: 249606 - DNA, 1506 bp, Homo Sapiens
  misc_feature (769)..(789): n is a, c, g, or t
ttgggaagatttattaaaccttgatgttgccaagccaacataatctaaaggagcaccaacttcctattgttttagaagcaattctgacctccttttctgtttaaaaaatctaggtctaaaagtcgttttggtcaagggcgtcctgcataaagtaccttaaaatataagtaaaaagagagaaggcactcttctggacatctgaaattgctcacttcttgaagatcttcagaacaatgacttccaactgttttatgttattattattttaatccacataaatcataattctaaaagaaatacatagttaggttttatgaaaatctaattgtaaatatgaaactttttaaatctgattttcttctaatatcattctaggctatgtagaaagcaattatttacaaatttgcatagttgagactcccagtgttttcctttatttatttgaaaaagaaaggcctaaactgtcaggtagccaagtttttttaagaccttaaaagttaggggaacacaactggtagtgttaccatgcatggcactgattgtagtatgtctttggagctgtaaatcttgagatagcattgagaactgcaggttgtgtgacgaaattcccaatgatgctaattttaagtctgcatgaatattaaggagtgacaggtctcaagactgcattaaatgaagtttcagggtaaggtatttcagtactgtgttgggcagaagggttaattttttttcagcattatatcgtggaaagtacaatgttaatccaacnnnnnnnnnnnnnnnnnnnnnaatgcttatctattgatcatctgagctggaaattactgattattactctgtcctctgtgaaactagtggcattctgaatttgggtaaaaataaccattgatagttttaggatagtaaatcatttctgttatatgagacacccactgtacagttctcagggctctaaaacccaaccatatttctgtaaccattcaaataactccttgaaacagttatacttgctagttcggtctaaaattttccaaatacattagataggtgaaaatttgcatatattcaagaaaaatcaaaataaaattctattttataaatcatgtttaaatttttctagccaggcagaaagagtgctcagggaaaatttgttccaaactataaccatataataaattatgtgtttgtaaattatatgtaggtctctgaaaaactttaagatgcactgtttctatttttttaagtcttaatttgccttataactgacatttcttcaaattattcagagaacagactttaataatgtgtgacaaaagagcaatttccattgaaatattgaagtgttacactcagtttacacgtacagaaatcattctttttagtgagtcttttagttgataaatgaagctagatgttatttgataactggctttgccaagtttttgaactgctgtttaaaaattttgttcccatttatatttgtttcaattgtttgatactgtggaa

SEQ ID NO: 249607 - DNA, 554 bp, Homo Sapiens
tcagccccatttttaaggagacttggctcaaagaggttaacttgcatgaggtcacataggaaacagagggctccagctttgggtgggaggtgtggggtgctgtttgacagccatccctgctacttaagtgggtatgtgtatccctagaatacatgcctgaaggatgcccatggcaagtctttctggagaatatttgtgtttatagcaaagccgacttggaaatatgcaatggaatgcaaaatccacatggacttctaaggtaaataaaaaatattagaaaaagaaaagttttgctttgggcaagctgctgctgggacggccatgggtgacttttctcagcgatgaggggcactttggtgggggcctgagggactccaggacagccagaaaagtttgtggtgtagggtgggtaaggcattaagagaggtcgtggccctcacgcctcacgatgagccgggccagggggcgatcgtggtggctctcacagccgtaggtgccctggtcggccagtatgacaccatggctgaagaggcgggggaggtgcccttccccaa

SEQ ID NO: 249608 - DNA, 974 bp, Homo Sapiens
  misc_feature (554)..(570): n is a, c, g, or t
ttggctacagtactgcttcatctcattctggtggtccacctcagccttctgccttttctgagtcatttcccagttcagtagctggatatggagacatttacctcaatgctggtcccatgttgtttagtggagacaaggaccatagatttgaatatagccatggtcctattgcagtcctggcaaacagcagtgacccttccacggggccagagagtactcatcctttgccagcaaagatgcacaactataactatggtggtaacttacaggaaaatccgagtggccccagcctcatgcatggacagacctggacttctcctgcccaaggacctggatattcacaaggatacaggggacatattagcacatcaactggcagaggcagaggcagagggttaccatactgagtatctgtttttcctcaggcacatcatttttatctggaaagacttttctagctgcaatttaaggcagcaatccaagagacttgaataataataattcaacaacagctttatttttatgtggagaagggtcttgcatacaatagtttnnnnnnnnnnnnnnnnncctttgcttaaattcatgctgttctaaaaactagatcgattgtacatcttcacaaattctagttaacaattttattttgtattcttgcagttttaagtggatgctaattttaggggcataagccttttatggccctcttgcagatcttctgaactatgcacatttgtgctttttttgtaagtttggaccaacttttatgtaacaaacagcccctccccacctccagttttacaacaatcagaaagggcactgatttatttggtattttttctttttacaaagctacctttagtcaaaggtcactgtcagtctttgcacctgctttcagtgttattgtgaaaggtgtactttgtgctcatttcagaaaataaaacacaacctttctcttgatgcaacagttttat

SEQ ID NO: 249609 - DNA, 960 bp, Homo Sapiens
  misc_feature (463)..(481): n is a, c, g, or t
taaaaagaaatattcactgaacaacgccctccaaactgaaaaagaatgcagtgttctggcatcaggttatagtcactgcatctggttttcatcactacatattctacacacactgggaagctctgacaacttattcccgtgctattatcaactaaagatcaccctttccactgctgtctctggagcaggagctggcaaactatggcctgctgtctgtttttgtacagttttactgaaacacagccgtgcccatttgtttactcattgtctatggttgctttcatgccctcacagcaaaggcgagtagttgtgatggatcaaatggcccacaaagcctgaaatatttactctttgaccctttacagaaaaaaaccttgttgacccctgctttagagaatgagaagccatgcagggatcagtgatgccagaggaagggaaggaactgcttccagctattgtgacnnnnnnnnnnnnnnnnnnnttgggtctttgactagaacgtgtaacatttccaggtgttctcacttgtgcttcccatgtttatcttacggaaggtcattccatcaagcttatggtcactgtcccttcatggcagttggtcctttcgttctccctttagctctaagagttggggagtacccacaggtgagctgtgatctcagctcagagagagagcatgaggtcttttttaactgtcaggaaacagagctgtgcccaattccactcaacttttggcacaactgttaatctgggccttcacctaccttaaactgagtttctgcaagcatagcattttagacaccctggaataaccttttgggaatgatgccacagaataaagttcactcttaacttttcaatttccttggtgagctgtcctccgtaagtgaataagcctgttgaaagactcagagaaagtactatgtcttgtcatttgttctgagattaagctcaaaaaac

SEQ ID NO: 249610 - DNA, 879 bp, Homo Sapiens
  misc_feature (189)..(198): n is a, c, g, or t
gggggatttttttctcctcccttcccgtaagagggggggaattttggattcccccagtttccttggacctattgatgggagatagttttatgtagggggaaaatggatactttttataccttttttggcaggtcagatgggggtaaattttaaaaatttgtataggtatttcataaccaaaatatgtannnnnnnnnngttattttatcttgaaaacggtacatatttttgtatttgtgcaggaaaacaagtcctaaagtatttgtttttatttgtaccatccacttgtgccttactgtatcctgtgtcatgtccaatcagttgtaaacaatggcatttttgaacagtgtgatgagaataggaatgtggtgttttaaagcagtgttgcattttaatcagtaatttacctggtggatttgtttttaaccaaaaagatgaattatcaatgatttgtaattatatcggttgattttttttgaaaagatgaaccaaaggatttgactgctaatattttattccttacactttttttctgaataagtttttcataatgagtgcagtgtcagactgtgcctactttgatggtatgtgccctttgtaaaataaaatagggccgaaaaacccaaaaagggaaccctggttcagacattcagtgggcaagtaaattatggactgcaaaataatgattttttttcaagaaagctttaaaagttttatttcccgatttacaaccccaataaagcaaaataacctactttcaaaatagaaatgttgctatctttataagtgcaatttaatttgtaaatagagtttgaatctaagtatcacaaaatacagcttcaagatttaattttaaatcttctaaattaaaggatattg

SEQ ID NO: 249611 - DNA, 1187 bp, Homo Sapiens
  misc_feature (362)..(395): n is a, c, g, or t
ttggttttaatacctttaaaccactttaaaattttttcatgtttaattatagttttaagaaaaactattttgaacaaccccaaatatagtgcatctagaaactaatgtatatttgattagacatcatttatagtggaacagtagactgtagtacatggtaatttttcttttactattaagatacaataaaacatgactaattttgctgtcaaaaatgtaaagaataatgataaatggagtttttatattttacttttaagattgcctgtctttaataagacaaagccttaagccttatgttataattttggttctaaaaaccatcatttcagtataaggaataagtatatttcgtcctcctnnnnnnnnnnnnnnnnnnnnnnnnnnnnnnnnnngaaaaatttctacaccttctttgaattccttgtatgaatttttgtttcttagaagttaatttgtgtgaaatgagattcttcaaaacgatgaaacctcatagctctgagaaaaggttttagggttttaaattctaagcaaagcgtgactatggctgacagactacacatttaattatacagcttctctttcttaaccacaggcagattaacctcattgtggattgtccttcagaccttagtcctcaggcatggtttctggtgcccactcctggaagccgctgttccctttctaccttcttaccagagcccaagggcaggcctggtcccggggaagcagcagcttgctgacataagtcagctgcaaaggctgaggagtgtgctctcagagaagcaccgccccccagtcttgtgccagcgcctagagccgcagctctcagggatgctcctttcctggaggcagcccaggagagggactctgggcagcgttcttcagatttgtggccactgtttctcatttgctggttgactgtttttatttcttaggcttttgctagttttagaaaatagggaagcagcccctgatttgtggattaaagcaacatttgagcgatgatgcacaacagtccaggaaatgggcggtggacacttgatgctgacgatgggagttgacatgatcagggagagggaggtgcgcgctgcttatctgtgatgttgctcacctgaatgtggctgatgtgtactcccagcagttaccaattttaaaaatatacttttaaacttattttatatttt

SEQ ID NO: 249612 - DNA, 1050 bp, Homo Sapiens
  misc_feature (771)..(788): n is a, c, g, or t
ttggtctctatttaaggagaaatcatcatgctatgataaaacacagaagcatgagtggcaagtggcggggtatttattttgcacaaactatttgcagtctctgtgtatttaaaaagtaaagaaagttgcatccagaagggttttgttagaatgaatacatttatattaggactgacaacttcagctcttttgtttaggttttcaattatttttggtaagagtatgtagccttatgatctggatatattttgcattcattttccaacgcctacatttaattcctggtaagagcagtgctcgtcaagtttctggtttttctctgctctcatttaacccgtcaaacacaatctttgtaaagctagattggtggtgttttatacaacttatttactcagcttacctttttgagaaacgattgttagaaattgacgatgtgtttgttccagtgatactgaaagtagtgggggcaagaattgagtttcacagtggaattggctttggatctggcctatagattagtgacataaaatattttctctattttcccctgttctttttgtgttatgcacttaattttatgactgccgggggggtcagctggagtgctgcttaacaagtatctctcctactctcagtggtcagaggctgtgttggacccatagtagaattttccaggtcacagacccaagcttccatgggttgttactgtgctgtaccacttggtgggtctgattctgaacctgatgtgtgtgttaattatattttaagcannnnnnnnnnnnnnnnnngcctcatgtaatggacttttataacaaaagaaaaaatttggatttctaatttacaaatggcaaattatttatccctctctggatgcaccaaagaccagtaaagttttatagcttttccatctatatttataaagcaatactgtattataaacatcaatatttttatcacatgcttgaaatttttattttgttgttttaaaatgtgcactctaaccatatcagaaccttatttcttcctatgaacttaagctgccctgcgcac

SEQ ID NO: 249613 - DNA, 975 bp, Homo Sapiens
ttggggcggagttggacatcgggcagcactgccaggtggagcattgccggcagcgagattttcttccatttgtgtgtgatgattgttcaggaatattttgccttgaacacagaagcagggagtctcatggttgtcctgaggtgactgtaatcaatgagagactgaagacagatcaacatacatcttacccatgctctttcaaagactgtgctgagagagaacttgtggcagttatatgtccttattgtgagaagaatttttgcctgagacaccgtcatcagtcagatcatgagtgtgaaaaactggaaatcccaaagcctcgaatggctgccactcagaaacttgttaaagacattattgattccaagacaggagaaacagcaagtaaacgatggaaaggtgccaaaaatagtgaaacagctgcaaaggttgcattgatgaaattaaagatgcatgctgatggcgataagtcattaccacagacagaaagaatttactttcaggttttcttacctaaagggagcaaagagaagagcaaaccaatgttcttttgccaccgatggagcattggaaaggccatagactttgccgcttctctagccaggcttaaaaatgacaataacaaatttacagctaagaaattaaggctgtgtcacattacttcaggagaagccttacccttggatcatactttggaaacctggattgctaaggaggattgtcctttatataatggtggaaatataatcttggaatatcttaatgatgaagaacaattctgtaaaaatgttgaatctttacttggaatagtcattcaaagattcaagtcagaaatcacagggaaaattctattacatgtttaagtccatttattttactaccaatactaatttttgtaatttttaaagttgctttttaacttatttcccttagtcacattttaaattatgaggttttctataaagtttttggttt

SEQ ID NO: 249614 - DNA, 752 bp, Homo Sapiens
  misc_feature (573)..(598): n is a, c, g, or t
tgagccaccgcacccagcctatttttctttctaaaggacatttgcttttcactttcacatgtgcagtaaaaaagcttctgtacttattattctcattatatttgggtgtatttctcactgcattttggcgttttgccaagtgtttattatgagcaacggaaagagggttatgtatttaacgtctcaaagagacaatagtaactctgatttccatttttttaggctctggaaaatcttataccatgatgggcacagctgaccaacctggattaatcccaagactttgcagtggactctttgaacgaactcagaaagaggaaaatgaagaacagagttttaaagtagaagtgtcctacatggaaatttataatgaaaaagttcgagaccttcttgatcccaaagggtaaaggactttgagactttagtgtttcagcattgtgaactgaaacagacttaaattggcttaagtgcaaatctttttaattttttcagagggtctcgctctgtcacataggcttcagtgcagtggcacaatcatagcttacttcagccttgaactcctgggctcaagannnnnnnnnnnnnnnnnnnnnnnnnnaaacccaaagaaatttcaggtggaattcagctctttgtgggctgtgaggtgagggagaggcataatcagagagatgaaacctagtctttaggacagtgagtttttaaagattctcatgaacaaaaacaagtgcccatgatttcatggcacagac

SEQ ID NO: 249615 - DNA, 847 bp, Homo Sapiens
  misc_feature (517)..(556): n is a, c, g, or t
ccaaagattttacggtttcctgggagacatccagtattttgccaaagctccacctgctgcagtaactcaagtcaatcctgccacgttaagtatctcttctatgacttggtgactctcatgttctgaaaggacttcatatagtctcaacatggaattgctgcatcactgtaaaatttacaggaatggttgttgtacgttttcatctgtaactagggtcaggacaccctactgccctttgcttctggtaacagaagtcatgactttggcaaaattaatttgcctgaaaattagcctggaggatgtccctttgctttgtcttccacatgcctgcattttctttcactgtcttctacatggtcacgtagaattggggtgcttggaagggcatccaggtatcactgaacccttcccttccttgaaggtggaaagtagccccactccagacagtaggccaggcagggagttgggatgggagtattcagcatttaggacatctaccgggtcagtgagggagagnnnnnnnnnnnnnnnnnnnnnnnnnnnnnnnnnnnnnnnngttaatcatttgcccatggctcatagagagtaggtgcattactctggatggaagccaggtctttgggcatcgggaacaaggttctttccatttcatcgcatagcctttcaattctagtcataataatggtgattaagataaaaacaaatggttggtcacagaaggccaacaaaaataaccgtgtgattgagcacttcctgagctcccactctgtgcctgagctcatcacttcatctcatttttccttgaaacaaccctgtaagatacatgctgctattctcattttgttta

SEQ ID NO: 249616 - DNA, 939 bp, Homo Sapiens
  misc_feature (692)..(701): n is a, c, g, or t
ttggccacacaaagcgaagttttcaaccaagtaacactaaaatatggtatggaaaaaaagaattacttttatttttcaggccacttgccatgtctattaaattaaaagtagtttctgggccaagaattaaagtggtttgagataggaataatgaatacatggaggtatgactagcaaaacagaacaaagaagcttcaaagatttccgtcttagtgaaaatatgttttccatgataagtatggaatattgcaaccattcttcccagcccctttcccctaataccaaaagtagtaggattattcttcatatgtgtgtttgtacgtgtaagtattcctagaatcaggaactcatatttattctactgaaaatataagcaataatgttatctcttctaaaataattccaaaactacactaaaaagtaaaggaataactttggcctcagaattaatcttcagtaaactcattttatctcatttcatataccttatgaatactgacttgtatcagtatctgggaaaaaccaaaaaaaggcactggattcatttactcaatagccagatgcgcctaattgcaaaaatccatctgaaggtctaatataccatcatatttcctgtgagtatatgaacaaggagtatatttgtgtatgaataaaaacttggtttgtgtactgaagcttataagattactaannnnnnnnnncatattttagattcaggggatacatgtgcaggtttgttacctgggtatattgtgtgatgttgaagtctggggtacaaatgatcccatcacccaggtactaagcatagtacccaatagtttttcaacccttgccccgtccctccatcccccatctagtagactccagtttctattgttgccatctttatgtccataattatccaatgtttaccccccacttataggtaagaacatgtgg

SEQ ID NO: 249617 - DNA, 833 bp, Homo Sapiens
  misc_feature (376)..(419): n is a, c, g, or t
ttgggtgtcgtgtgtgtttggggcccgcgcgggttgcgcgccctccgccttcgcgcctcctgcccccgaggccctactgctgcccctgtgcccctcgccccgccgggagtcgcgggccaacatgggccaggaagaggagctgctgaggatcgccaaaaagctggagaagatggtggccaggaagaacacggaaggggccctggaccttctgaagaagctgcacagctgccagatgtccatccagctactacagacaaccaggattggagttgctgttaatggggtccgcaagcactgctcagacaaggaggtggtgtccttggccaaagtccttatcaaaaactggaagcggctgctagactcccctggacccccnnnnnnnnnnnnnnnnnnnnnnnnnnnnnnnnnnnnnnnnnnnnaaaaagggcttgagtgttcagactggaagccagaagcaggcctttctccaccaaggaaaaaacgagaagaccccaaaaccaggagagactctgtggactccaagtcttctgcctcctcctctccaaaaagaccatcggtggaaagatcaaacagcagcaaatcaaaagcggagagccccaaaacacctagcagccccttgacccccacgtttgcctcttccatgtgtctcctggccccctgctatctcacaggggactctgtccgggacaagtgtgtggagatgctgtcagcagctctgaaggcggacgatgattacaaggactatggagtcaactgtgacaagatggcatcgaaaatcgaagatcatatctacccagagctcaagagcacggacatgaaagtaccggaaccgc

SEQ ID NO: 249618 - DNA, 909 bp, Homo Sapiens
  misc_feature (186)..(199): n is a, c, g, or t
  misc_feature (406)..(418): n is a, c, g, or t
tcaagttggcctaaaattccagttttctaaagatttatgccaggccttttaaaaaccatatttcaaacactgggaaaaaatatctgtgttctactaaagacaattccaaactctgttttcctagctttccttgttgtctcccaaaaactcacaaaatcctatttgttggctttctcttcctttccnnnnnnnnnnnnnnccaaaatcatgatgtatctgtgactgtagctgtgtaggagagaagagtctgcctggaaagtagtgatttctcttgatactgatatcttcccagagggtgatcctcatctactaggaaatggaaatgaggtgggggcagaacaggatttctgccaacctaacatttagctcatgagtgtttcctacaaaacgaaacaaaaaaacaccnnnnnnnnnnnnnctggtgagtaagggaaaagtgttttatttcctaggaattgcataagggctgtcactcaattaagatgagaaactgaaaaaggactgtcttgggtataaactttaaatacatcagaagtagagtctgcatccactctaaactccacgtagctcataatgctgaccagtccatgattacctggctttttctaatgcaatgtgctcatactctccataagcaaaactcgggaaagaggatctgcttaccttcattttctttggagtaggtgagcccatgaggatgataactataagctcttgaagcattattttttacatgtacataaatgaagtctccagtctctgctttaatcattggacctaaaaatcccaaccaggatggtttttcaatgatcctttgaaatgtattatcagtatcaatattgaaaatacaaagcctttttaaaaacaaagctcttcctcgcttgacctccttgtagaaattctagccaa

SEQ ID NO: 249619 - DNA, 853 bp, Homo Sapiens
  misc_feature (264)..(273): n is a, c, g, or t
  misc_feature (422)..(432): n is a, c, g, or t
  misc_feature (532)..(541): n is a, c, g, or t
gcaattttatttttataaagctttgtaaagttacgaacatggaaaccctaagaatcacctaagctttttacataagtaaatttcaagttgacagtctgtccattttgaactatttataattaacaggacacttaacacagtaatattttagacaaggaagagggcattaattttgcaggcaggtagcaatgaaaatgccaaacctgaacaatcagtcactatttccttatacagtttgagtaaaagaggtagactacagaaagnnnnnnnnnngtgaatataaaatgtatcttccccaaatacaactctacttcaataagtcttgaagattaccgatgacatcaacaaaaatgaatgaactcagggaattagttctttctccccatcaaagaaaaaaacagcatgtgtaattttaaatttgnnnnnnnnnnngaatggcaatttgcaagcaaaagaaaaccagattcacattctactatttacatttgttctattcacaggtcaaaaataaaatatttcattagataatttnnnnnnnnnncacttttttaaaacaaatgtattttactccatcaatagtgcaaggaagataactgaatttagaaatgctctctctctacagcaaagttaacttaacttttcggggcccaactggcctatcatttagatctttaatagcagccatagcttcattatagtttatcatagcaacaatggcttcccctgtaggtaagccttgctcattatactgtatcgaaactgaatcaggtatgattctgtaaccatggaaaaagtctaaaatttcattcacattagctttaaatggaagattcattatcttaataggagccaa

SEQ ID NO: 249620 - DNA, 652 bp, Homo Sapiens
gaaaattagatagtttatttatagtttaatcacaagaacaactttcttgttcttcaagatgtaaatacatactagaataaactctgtagaatatacaaaaaatacatattttcccatgaaaaatttctttataataaatagaagggaacacgtgtgtggctgatccggataatgctccgtgtctgcttaggttttcagactgttgatttatttttaatctcttgaaagaatgggggagttccttctcccctaaaaggtcgaaataaataatacatgaggcaatcctccctcctgatttttcccttttcctccacatttttccttttgatagagagttcagcctaaatttccacgcttgcattcaatcattacaaagcctacaaattatacaatgacttctaacctgcccctctaacaaaacaagtttttttccccttataaatcataagagacagatggcaaaatggggaagaaaaaggaaagagaaggacaggacaataggcattgtgacgaatctgggaaacagaacaaagtgcacatcagagagggaagtttggtttgacaggtgaaattcccacagcctgcagacagcaatgggaataaagcagatgccagccattgcaaatctgtggataatattattaccagccaa

SEQ ID NO: 249621 - DNA, 1271 bp, Homo Sapiens
  misc_feature (441)..(534): n is a, c, g, or t
  misc_feature (686)..(698): n is a, c, g, or t
ccgtaagtaagcttgtttatccacatggtgcaggaaggaagaggctcagagaggggcattcatagctcaaggtcacacagcagaactgagatgagaacttcacttgtcccactgcaaaacccaggacgtgcccttgccaccctctgtaaataccccaaaagccaggctcagggctgtcaagattataaagtgtagtttctaaagggtattatggtggatagtggcttggttcataggtgcttatttccatcaccaccttcaccaaccaaactagaggagttcgaggggatgcaatctgttgggcccacaatcctgtgcctggagacctctttcccttggttctttccaagaagcagagtggtgtagaggtgatagcatgggcttctaaatcaggtgggtgtaatcagaaatcttggtcaacatgaccttggacaagtcaannnnnnnnnnnnnnnnnnnnnnnnnnnnnnnnnnnnnnnnnnnnnnnnnnnnnnnnnnnnnnnnnnnnnnnnnnnnnnnnnnnnnnnnnnnnnnccctggaactcacagtccagtgggaaagttaggaattatttctctgtcactgcacagtatgcttgttaagaagtttgacaagtgacacaaataatttaaacctatttattccacaaacagcacctcccctaagcatacattcttagcttacnnnnnnnnnnnnnttcaccaaacatgaatatccagtcatgataaggaatgcataattgggagaaaagattctgtgatgacttaattttatgaagggcacagagatgtccattgttgagttgtggcagagggaggtggggagttttgcatctgcaacaatccctcaatgctaccctgactgacagtttactgtccctggagatattctgtcactgtgccagttctggctatatctgaacagacctcttgcccatccaaaaggcagtctaacatagaaacaagcctttggagtcgggtggcccccaaccctgtggcttcccgcctctgtgatcttggggaagtgattcaccctcttgaagagctttgcttgcctcatctgcagaacaacagataacagcttctttacacgatgcgtgtcaaagtttaagaaaacaaaacaagcagagtttgcaaactggcccccagatataactcaatttgcccatagaagatttttcttgaattatgaatttgttttaagatttgaggaaattggaaaataccatataaaaattaacatgtctggcttttctttctcttttctccaa

SEQ ID NO: 249622 - DNA, 355 bp, Homo Sapiens
tccaacaccaaaggcgcagaagccggctggccgtggtgggggcagcgtaggcgtagcatccctctcctctcacttagcctgttggctcttgttattatcatagatattcacaaaacgccgcatgtttaaaaagtcatagatgtcatcttctctctgcccccagggaggaaagccaccttctcttgccccttggcccctttgtcaggggccaggggtctgccgggtgggggtgccaacaggcctggccctttcctcccctgcatccagccatgggggcctctgcgattgccggaaggttgcatggctggtcccagggccagcacaggcccgaggccgggctgcctggttttatttt

SEQ ID NO: 249623 - DNA, 1125 bp, Homo Sapiens
  misc_feature (42)..(63): n is a, c, g, or t
  misc_feature (883)..(905): n is a, c, g, or t
ttggcagctctcacctaataatttatttcttttgtacttttnnnnnnnnnnnnnnnnnnnnnngtattttggtgtcttaaatatttacagctgctcacgatgagctcttgcccaaagcttttaaatatatttagaacttcttaaagtagtggtggtttttgttgttgttaagtacattttactttttccacagaattcttataataattctcaagcaccatcgcctggcttgggaagcaaagctgtggggatgccttcccctgtttctccaaagctgtcaccaggcaattcaggaaattattcatctggggccagtagtgcttctgcaagtggttcttcagtgaccattccacagaagatccaccagatggcagccagctatgttcaggtcacatccaacttcctctatgccaccgaaatttgggaccaagctgaacagctttccaaagagcaaaaagaattctttgctgaactggataaagtaatgggccctctcatctttaatgcaagcatcatgacagatctagttcgttatacccggcagggactgcactggcttcgccaggatgccaagttgatatcttgaactgaacacattctcgttgcctctgattttctccacaacactgtgtcacatcacgaaggaaaactgccataacataccacctagtcgacactaagaatgaggaatagttttctcctcgttggttcatgtgttgttgtttttgataatccaaagcgatcatgtcagttggccctttaatatttccaatgtgaaagattatttaaatgcttttaaatctgcagcacattgataagatggtttccgtgagctatgataagattgaaattccagttgcaattcataactaatgaattgaannnnnnnnnnnnnnnnnnnnnnnaagttcccagattggggctagtttaagacttagttatttctgcctataaatttactctgttgaatatttagcataaatttaatgtagacatttttatttatataccttgggagctttattacctaatatctttttgtggtagctgttctaagagtaagaattgggttcatctaaaatagacatattctttctacacctgctacctgactgatatttgaaa

SEQ ID NO: 249624 - DNA, 971 bp, Homo Sapiens
ctttgtacaaaaaagttggggcaggtctacaatcaaagaatggaagggctcgcagtgggtgattcagggtgccaatgacctccccgcgaacgggaacgcccgcactagacaaccagccccagaccggcattcccagagccgcaggcgggagggacgcagggactccgggacagcaaatccccgggggagaagggaagggggaaggcgggacaggggaggcccaccctccttgggctccgctagcgaccagccagcgccccttcagacgcagccttcctggctccggaccccggctttctgctccggtcctcgtcccaatgccccccaaggtccccagcagaggcattcaggttcctcctcgccccgcccagacgcagcttctttgggtatgggtgacagcactcctgagcgtcgctgtccctattcgctgccgttgccagctccgattccgcgaaacctctccggcaccacctcggaagccccgcccagggcgatggtccgggcctaaccctgccgggccccgcccaccccggcccttggtctccctgaggcccgcccagcagactcgaggaacgcttgacaaagtggcgaaggagccctacgggagtcccggattggaccctgctccttcggtccctcagcctcggcaagccgcggtctcctggcccttggcctgggtcaccttaggaggcaggaggagatgtggtcagtgtgggagcttggaggggccatgcacttccggagaagaccaccgactcatggctttggtggaggggcgccggcagatttagttaagctctcccccatccctgacacacccagccggggcgggagcggggcttgtgaccactccggagagctttgagggcccctgctttgggactccgcacggacagtcactgtctcagagtgcattctccataggccactctcttggggacactgtaggggtcacagggcaggtgggcagc

SEQ ID NO: 249625 - DNA, 1511 bp, Homo Sapiens
ttggcataaacaccaggaacaacggggagagagcctcctgtgaaagtgacgtcctgcatttcacctccaccaccacgtcgaagaatcgcatcatcataacctggcaccggtaccggccccctgactacagggatctcatcagcttcaccgtttactacaaggaagcaccctttaagaatgtcacagagtatgatgggcaggatgcctgcggctccaacagctggaacatggtggacgtggacctcccgcccaacaaggacgtggagcccggcatcttactacatgggctgaagccctggactcagtacgccgtttacgtcaaggctgtgaccctcaccatggtggagaacgaccatatccgtggggccaagagtgagatcttgtacattcgcaccaatgcttcagttccttccattcccttggacgttctttcagcatcgaactcctcttctcagttaatcgtgaagtggaaccctccctctctgcccaacggcaacctgagttactacattgtgcgctggcagcggcagcctcaggacggctacctttaccggcacaattactgctccaaagacaaaatccccatcaggaagtatgccgacggcaccatcgacattgaggaggtcacagagaaccccaagactgaggtgtgtggtggggagaaagggccttgctgcgcctgccccaaaactgaagccgagaagcaggccgagaaggaggaggctgaataccgcaaagtctttgagaatttcctgcacaactccatcttcgtgcccagacctgaaaggaagcggagagatgtcatgcaagtggccaacaccaccatgtccagccgaagcaggaacaccacggccgcagacacctacaacatcaccgacccggaagagctggagacagagtaccctttctttgagagcagagtggataacaaggagagaactgtcatttctaaccttcggcctttcacattgtaccgcatcgatatccacagctgcaaccacgaggctgagaagctgggctgcagcgcctccaacttcgtctttgcaaggactatgcccgcagaaggagcagatgacattcctgggccagtgacctgggagccaaggcctgaaaactccatctttttaaagtggccggaacctgagaatcccaatggattgattctaatgtatgaaataaaatacggatcacaagttgaggatcagcgagaatgtgtgtccagacaggaatacaggaagtatggaggggccaagctaaaccggctaaacccggggaactacacagcccggattcaggccacatctctctctgggaatgggtcgtggacagatcctgtgttcttctatgtccaggccaaaacaggatatgaaaacttcatccatctgatcatcgctctgcccgtcgctgtcctgttgatcgtgggaggttggtgattatgctgtacgtcttccatagaaagagaaataacagcaggctggggaatggagtgctgtatgcctctggtgaacccg

SEQ ID NO: 249626 - DNA, 942 bp, Homo Sapiens
  misc_feature (61)..(90): n is a, c, g, or t
cagtgtttcctccaagctgcccatgagacaggcaggacaaggattcttttatatatttatnnnnnnnnnnnnnnnnnnnnnnnnnnnnnngcacgtttatatatatttttggtagagatgggatcttgccatgttgcctggactagcctcaaactgggctcgagtgatcctcccacatctgcctctaggtagctgggactgcaggctcacaccaccacaccgggctaattgttaaaaattttttttgtagagacagggtctccctatgttgcccaggctggtattgaactcctggcccctagggattctcccatctaagcttcccaaagtgtcgggattacaggtgtggccactgcacagggccaggacaaggattcttaatcccactccaggatgggaaacccatggccgagtgggaagaaaccagctgaggtcacatcaccagaggagggagagtgtggcccctgactcagtccatcagcttgtgtagctgaggtctgggccaggtctaaccaggctccccactcctcccaacctgagcctgccctctgatctctgcctgttcctctgtcccacagggggcaggggctacgggtcagagagcggggaggaggactttgctgcctttcgagcctggctgcgctgctatggcatgccaggcatgagctccctgcaggaccggcatggccgtaccatctggttccagggggatcctggaccgttggcacccaaagggcgcaagtcccgcaaaaagaaatccaaggccacacagctgagtcctgaggacagagtggagggacccgtgtctcctctatccaggacgctttgcctccaagcaaggccccttccaggacacgaaagggcaaagagagaccttcctaagaggactgcaacccagcggcctgaggggaccagcctccagcatacccagaagctcccaca

SEQ ID NO: 249627 - DNA, 1196 bp, Homo Sapiens
ttggcaccaacaagcccaaaataacttggcaggctttaaacctgccagtcattacccagatcagccaggctttacctaccactgaggtaaccaatactcaggcttcttcagtcactgctcagcctaagaaagccaacaagatgaagagagttactgccaaggcagcccaaggctcccaatccccaactggccatgagggtggcactatacagctgaagtcacccttgcaggtcctaaagctaccagtcatctcacagaatattcacgctccaattgccaatgagtcagccagttcccaagccttgataacctctatcaagcctaagaaagcttccaaggctaagaaggctgcaaataaggccatagctagtgccaccgaggtctcgctggctgcaactgccacccatacagctaccacccaaggccaaattaccaatgagacagccagtatccacaccacagcagcctccatccgaaccaagaaagcctccaaagccaggaagacaattgctaaggtcataaatactgacactgagcatatagaggctctaaatgtcactgacgcagctaccaggcagattgaggcctcagtagtggctatcaggcccaaaaaatccaagggcaagaaggctgccagcaggggcccaaattctgtctctgagatctctgaggccccacttgccactcagatagtcacaaaccaagccctggcagccaccctgcgggtcaagagagggtctagggctcggaaggctgccactaaggctcgggcaactgaaagccagactccaaatgctgaccaaggggcccaggccaagatagcctctgctcagaccaacgtaagtgcccttgagactcaggttgctgctgctgtccaggccctggcagatgactatctggctcagttgagcctggagcccacaaccaggacccggggcaaaagaaaccgaaaggtgagatctctgacattgccatccttaactttgtgcttcttttccatttctacccttctagtttgttcatttcttctataaaagttttactttgagctagtccctgtgttcagatagggctgtggaagatgctgagaagaagtgatatagtttctgctccctagcagttcacagattggtgaggaaataagacatccatacactcagctacaacctgtatgtaatactacttgtatttaaata

SEQ ID NO: 249628 - DNA, 1000 bp, Homo Sapiens
  misc_feature (586)..(636): n is a, c, g, or t
gatggactggaagaggaagaggatgatgccctcggggcacttgtctgtgatgtatcggtagccatagccgatggtggccccgtctcgatgaagaagaggaaggcagaagggaagttatagacattggccacgcaagggcgtgtagttaccgacgtgggctttgttcaggtcgccccggagtgtaggcgatcacccaccacattggacgccatgaaaaagccaggccacggtgtaggtgagaatgaagatgaagaggttccagcgccacttgaggtccaccagcgtggtgaagaggtccgagaggtagcggcttgtctcgctgcccaggttgccgtgctgtacattgcaccggccgttcttgtccacgaaccgctgccgcttcttcttgggcacaagctgctgctgagggtcctggcctggcccctggggctgcaagcccgagccgctggacgatgtggtcactacctgataatcgtccccaaatttccttcggagtgcagacataatacgaaggggcgagccagattcaaacgcgaagcgaaggcgcaggagctgggcgctgcaaactagcaccaataaggaggtnnnnnnnnnnnnnnnnnnnnnnnnnnnnnnnnnnnnnnnnnnnnnnnnnnncacccggcaggtagctgcggtctctgccccctgcagacgcctctccttctcccctgggacggaggccttctttccaaggtgagtctttaaaaagtgttctcccgcactcaagccaggagggatgcaaggaacaggaacccaagcgcaattttgcctccaagcttccagaggctcctcttttctttccccaccaccggcatcccgggtcacctcttgactccccacggccctcctgattatcctgcagtacccccaaactgactgcttaaaattaatgagttgacaagcgagtcccaacccacctgccaactcgctggctgcctaagaagctgcctttacctgcctggaccagaccctcccccaa

SEQ ID NO: 249629 - DNA, 649 bp, Homo Sapiens
  misc_feature (111)..(151): n is a, c, g, or t
ttttacaaaccaatgacagctagtagaagatgctttaggaaaccttagctaagccacataatcaatcagacctatacaagtacagaaaaatctaaacatgcttcagaactnnnnnnnnnnnnnnnnnnnnnnnnnnnnnnnnnnnnnnnnnccaagttgtacgtcctgagggcatacaacttaatttctacaaaaacatactttttcaaaagggctatgagagtatcaattgacaaaagcagaacaagtagcatgattagacagagaagtcttaattgcttaacacaagataaactcagcagttttaaagtgtctgtatccattttaaatgattagtccaggggtagaaaagatgaggatggtttcatcatactttgaaaaggaaactcgcactggagctaaaacaaacttacagtccaggttataagaatccaagttacatagtaaattattaactattattttcataccaagttcatgcttaggcaataagaaaatcctgtttgcagcattaattacatgtaattcagtttccaggcacatagttagaggtcacacacaggcagagaaagaacaaatgccagcccagtcatctcactgcctcagtccagcagccagtggcccaggacttcatgtacactgtctccaa

SEQ ID NO: 249630 - DNA, 657 bp, Homo Sapiens
  misc_feature (465)..(474): n is a, c, g, or t
tagagatggacatatatgtttctgataagtaatctaccacacattgcataaaccaaagcatacaaacagccagtaaagctgtgctctacctgctactcatgctgggctggacagtggaacaccatcttggtaggagagattttgacaggaagaaactgcagagtccctacctaacccagagaaccttaccaactggtttatacacaaaggattttcagcaaacatgcaaacacactaacatgctataggaatatgttttagtctatttctagcacacagcatacattcataggtgcccagtaaaataggaatgaatgtcaatgtagaaagcatttttgccttcacagtactaacaaacacctaaaaagcacacagcatataatactttgatctttaagtggataatcatggaagttccaagatcacatccactaggttagcctgagtattcatctataaaaatannnnnnnnnncaaaaataatgcttaaaagagacttctagaaacagtgggactacatcaggaccagaagacagtgacacaaggactgcaaatgttaagactaggagtagcttttcacatggagcttttatgtagaggacgtctccttctgttgattcctacagccgagacaagatgtgatcacaggagacccaa

SEQ ID NO: 249631 - DNA, 787 bp, Homo Sapiens
  misc_feature (516)..(526): n is a, c, g, or t
tgtacaaaaaagttggtgacaacctagccttcagaaaatgtgccgcataaatgaggatcagaaggtggccctggatcttgacccctatgttaagaagctacttaatgcccggcgacgcgttgtcttggttaacaacattctacagaatgctcaggaacgactgagacggctaaaccacagtgttgccaaggaaacagcccgcaggagagcaatgctggattcgggaatttacccccctggctccccaggcaaataacagatgagcctatggactcagtagcacaagtactgttccccagctgccttgtttcaacagacatgcaaagatcctagtagacagtccccatagaccttcagacattataaagggagccgtacagtttgtttgaagcacttcttcttacccatttatgtaggggccccaggaaacctacgcacagccagaatgaggttccctaaggacttacattaattatggctcttgcttcctttcacaaatgagctgaggcctctacnnnnnnnnnnnaagctgcatacttgaggcttaccttcttcaggactagttaaccagaggggcttcctttgtatgttacatgcctgggttacatgggcctggacagcatgtcctctacctgtgacttctcattttcctgtttacactggggatttggagggggcaggcaaagtcaaagtgaatgacctctgtccacccacttttttattgcactggcttgaatacagtaccactgttgatagaatcattttattcaataaatacttaaaatga

SEQ ID NO: 249632 - DNA, 1445 bp, Homo Sapiens
  misc_feature (160)..(484): n is a, c, g, or t
  misc_feature (652)..(718): n is a, c, g, or t
  misc_feature (1247)..(1343): n is a, c, g, or t
ctccttaatgccaactttgtacaaaaaagttggctcacagctcgcagcaaagctgctggactcagcctaagtagtgacaagagggaccttgggactcaggactggtcagaggaggacagtgggttttacatacaaaaaaagctctcaataacaagaatcnnnnnnnnnnnnnnnnnnnnnnnnnnnnnnnnnnnnnnnnnnnnnnnnnnnnnnnnnnnnnnnnnnnnnnnnnnnnnnnnnnnnnnnnnnnnnnnnnnnnnnnnnnnnnnnnnnnnnnnnnnnnnnnnnnnnnnnnnnnnnnnnnnnnnnnnnnnnnnnnnnnnnnnnnnnnnnnnnnnnnnnnnnnnnnnnnnnnnnnnnnnnnnnnnnnnnnnnnnnnnnnnnnnnnnnnnnnnnnnnnnnnnnnnnnnnnnnnnnnnnnnnnnnnnnnnnnnnnnnnnnnnnnnnnnnnnnnnnnnnnnnnnnnnnnnnnnnnnnnnnnnnnctaggttctagttatcagaattagaacacaaggtgcaaatcataactgggaaccatgtgtagctgagtctgcccccgacactaaaaaccattttcttcttcccccagagtaatagaattatagttgagtgcatacatatccaatataaatagatgtgtaatatatacnnnnnnnnnnnnnnnnnnnnnnnnnnnnnnnnnnnnnnnnnnnnnnnnnnnnnnnnnnnnnnnnnnnttgaaaaagatcaagtatttactgagatcctatcatagaccaggcactaggctcaattcaagagggagaaaagtgaaaaagaaatgagtcttgcacaccatgtgctcaatagctattaagacgaagatacttatggtagaagattataatatgacaagttatctaggaggcatatcagatgctgatggagttcagaggaagctgtgctgaaattttcccatgatctcaggagcaggctttcctaacagtgaggcctgtatgccagggccctgggatgatgctgtatctgctgatggacagcaagtgttcttggctatgagaagaggtcttcaggacccaggcacatgctgatgaggtccaggtaataattctgcaattggtgtctggatctggacccctggcatagacgccagctccagtgccttccagaatgagctgcaagatctgtggtaactcatttaggagagctctggcatccgacccgggtcccccaatgccactgcacagctattcaccaagcagaagaaannnnnnnnnnnnnnnnnnnnnnnnnnnnnnnnnnnnnnnnnnnnnnnnnnnnnnnnnnnnnnnnnnnnnnnnnnnnnnnnnnnnnnnnnnnnnnnnnattagataattcatgaaaagtgcttagcagagtttccaacacatggtaatcactcagaaaacatttgttagtattatgattattacatacaagtaaattagg

SEQ ID NO: 249633 - DNA, 1208 bp, Homo Sapiens
ttggggaaaggaaatgagaggaaacaagaggggtgggtcctgatttcgggagaggaggaaggaccgtggagatggctgagtgggccttaccgagagtctggggaaatgggagaaaacgctgaaaacgcacaagcactttggttggttaaattagggttccgccaagagccggagcggtgtgccaagtgaaaactacatttcccacggggcagcgggtcacgtcacagaggaacgactacgcatgcgtgcaaggtcctccgcgcgcgactacgctcataaaaggaaaaaaagcgtgtgcggttctcgacgtgccgccaatcttcgaacgcaggtctgtgatcatccgcagactccgaaaaagggttcgaggaacgcgcctgctcccctcgtcgcagtttccagcccgacgagcttgttttgtcccggactcggtgcccctgtagacaatggccctcgtgtctgccgattcccgcattgcagaacttctcacagagctccatcagctgatcaaacaaacccaggaagagcgttcgcggagcgaacacaacttagtgaacatccagaagacccatgagcggatgcagacagagaacaagatttctccctattaccggacaaagctgcgtggcctctacacaaccgccaaggccgatgcagaggctgagtgcaacatccttcggaaagctctggacaagatcgcggaaatcaagtctctgttggaagagaggcggattgcggccaagattgccggtctctacaatgactcggagccacccccggaagaccatgcgcagaggggtgctgatgaccctgctgcagcagtcggccatgaccctgcccctgtggatcgggaagcctggtgacaagcccccacccctctgtggggccatccctgcctcaggagactacgtggccagacctggagacaaggtggctgcccgggtgaaggccgtggatggggacgagcagtggatcctggccgaggtggtcagttacagccatgccaccaacaagtatgaggtagatgacatcgatgaagaacgcaaagagagacacaccctgagccggcgccgtgtcatcccgctgccccagtggaacggccaacccggagacggaccctgaggccttgttccagaaggagcagctcgtgctgggccctgtatccccagactacctgcttctaccgcgaccctgatccatgcgccccc

SEQ ID NO: 249634 - DNA, 755 bp, Homo Sapiens
  misc_feature (487)..(495): n is a, c, g, or t
  misc_feature (629)..(646): n is a, c, g, or t
atttcctgaaaggtttttactctcttttccctccaggtctctccaagacaatcttctactttttcttaatttctgcttatcctttagacttcaattcaaatgttagttccttggagtagccttccctgatgatttccctgatataccatcccctctcctctcaacctaggtttagtgcacctgttttgtgctccctgtttttttccctatgcaatatttgatgcatttgattgtactatgtagttgtttgtcctgtcttttgcatatgtaaactcagtagataaggacagtgtttgatgttcctgaccattgagtctcctgtgctaatgcaatgcctgacacatatttggcacttaaatatttgttgaattaatctatattcttttctctccttcagcttccacttaaaactcagtcactatcatgcaactaaaacttctcttagtaaaaatttttaataattttcctaataattaaattcagaggnnnnnnnnnccagctcaatggattcaccaggatgtctcacaagtatttccagcctaacatgttttattttgaactctttgtctgccctcactgctttcccatgcccagtatccctttcccatacccaacatccctttctcccnnnnnnnnnnnnnnnnnnctcttctctggcatttatgactcttaagaaatgttggataagacgctcctaatacatttgcacactcattcctacacagtcatgtattcatttgttaataagttctgac

SEQ ID NO: 249635 - DNA, 984 bp, Homo Sapiens
acaaaaaagttggcaggagatgcgccgcatgatagaaagatacctgccctcaacgcctacatgaagagcctgctcagcctgccggtctgggtgctgatggatgaggacgtccggatcttcttttaccagtcgccctatgactcagagcaggtgccccaggcactccgccggctccgcccgcgcacccggaaagtcaagagcgtgtccccacagggcaacagcgttgaccgcatggcagctccgagagcagaggctctatttgacttcactggaaacagcaaactggagctgaatttcaaagctggagatgtgatcttcctcctcagtcggatcaacaaagactggctggagggcactgtccggggagccacgggcatcttccctctctccttcgtgaagatcctcaaagacttccctgaggaggacgaccccaccaactggctgcgttgctactactacgaagacaccatcagcaccatcaagtctgtggcctgggagggaggggcctgtccagccttcctgccatccctacgaccaccgcccctcacatcaccttctcatgggtccctctcccactccaaagcccccagtggctcccagatgagccacaaatgctgtaacaagccatcaacgtccagggtggcctggccagcctcattcccctttcccccaccccacaccccacttccagcctgatgcctccttactccagcctgtcacccccttagggacatcgcggtggaggaagatctcagcagcactcccctattgaaagacctgctggagctcaccaaggcgggagttcccagagagaggacatagctctgaattaccgggacgctgagggggatctggttcggctgctgtcggatgaggacgtcgcgctcatggtgcggcaggctcgtggcctcccctcccagaagcgcctcttcccctggaagctgcacatcacgcagaaggacaactacatggtctacgacatga

SEQ ID NO: 249636 - DNA, 1018 bp, Homo Sapiens
  misc_feature (121)..(132): n is a, c, g, or t
  misc_feature (155)..(396): n is a, c, g, or t
  misc_feature (704)..(714): n is a, c, g, or t
acaaaaaagttggccttttccttgtccataaaaaataccgaatggcatttcacactgaagccaatcaaccacttctagaaattatcttttacttaggctgctgtcagcaacccctaattcnnnnnnnnnnnnagagatggagttttgctcttttnnnnnnnnnnnnnnnnnnnnnnnnnnnnnnnnnnnnnnnnnnnnnnnnnnnnnnnnnnnnnnnnnnnnnnnnnnnnnnnnnnnnnnnnnnnnnnnnnnnnnnnnnnnnnnnnnnnnnnnnnnnnnnnnnnnnnnnnnnnnnnnnnnnnnnnnnnnnnnnnnnnnnnnnnnnnnnnnnnnnnnnnnnnnnnnnnnnnnnnnnnnnnnnnnnnnnnnnnnnnnnnnnnnnnnnnnnnnnnnnnnttgagccattgcacccagccccctaattattcttactctatactaagttctttttttcccctacctttgtaaatgtaggcattcccccaaagttcataattcatttaatgcaggtaaagtaacacagacttcggtgtcacaaaaacagtgggtttggattctacctttaccacttccggagtgaccttaggcaagaagctttgtgaacttcaacttcttatctgtagataacactgtatttcatcagatttattagaggaaaaagaaaatacatgtaagaacatattttgtggactataaagcactannnnnnnnnnncttactttcccttggtgattgcatttccattcacctctcccacactaaagaagagttagtgtttctaactactaactagacatctccatctgtaatttccagtttgttaatgacaccaccatctttttagtccactcttgagttccttctttcctttgcccatcatttgcaatatactgctagactttgattgtacttctacattacggtgtgcaactcttccttttcctttcccataaatataaactctgacttggttgcctaaaataaatcctgtggcctcctaaaccaagcctcagctttt

SEQ ID NO: 249637 - DNA, 874 bp, Homo Sapiens
  misc_feature (212)..(270): n is a, c, g, or t
  misc_feature (751)..(759): n is a, c, g, or t
aaaggagagatttattttattattaactttttaaagtctttaatatgccttctaagaagggttctggctcagaaaatgcagaagaaaatcgagtagagaactagatttacagaaacctaagaaatacttttactgagctttcttcacacaagaaaatgcacggaaatgaattatacatggataccaatttgtgatttttaaaaatttgtaannnnnnnnnnnnnnnnnnnnnnnnnnnnnnnnnnnnnnnnnnnnnnnnnnnnnnnnnnncctcaccctttactaagctgttagcttggtctgttgcgcttactgctatatcctcagcatctagtacagttcctgacacatatatgcacttaataagtatttgtcaaatgaatattattgagtaaataagatgaaggtcaattcagaaattcagcactatcaggctatatacataatacagactattataaaaaactagaatggagcagttccttttaacgacggagaaatgtcagtaacatactttgagcacaatatagctaatttcacaactggtctttaaatataacatacctataatcaatttaatgtttttctttgttaccagagttgttcaaaacgtgcgttttacctatcaaagctcaactaaatgaggtttaagaaatctgcacatttgaatgtacttaattttaaaagattctggttttggattaactctggatttcaccctatgggaaattttgtaaatatttccaacttnnnnnnnnnctgtgaagccccagcgctaagagtaaacgatgcattggaatttcaacaggatttctgtaactctgaaataatctttagcatttcttcttccccccatcccctcagtgtaggccaa

SEQ ID NO: 249638 - DNA, 1152 bp, Homo Sapiens
  misc_feature (216)..(272): n is a, c, g, or t
ttggaatttgtctatgtattgctgttttcccttcagcagctgaggcactgattgcaactaaaactatatgatctacaaatcataaaatatttagtagcaggatctttacaaaaaagttcgttgacctttggtctagagcagtttctcttactatctgtgttgaaagatcagttttttgtttctaatttccaatacattgtcactaatacattcatnnnnnnnnnnnnnnnnnnnnnnnnnnnnnnnnnnnnnnnnnnnnnnnnnnnnnnnnngccgtattttgaaatatatattaaaagatataaaactactctgtcaaattgctttttaaaagcttgtaaatgattactttcaatttctatacctattgaggaccagcaacatgttgcaggccagcacttgcctgtggacagctctttgagtgctctaggttataggaatgaactactcgcattttttatagcagttctcctaatctggctttggacagtttgtttagtcacatgacaatgaaacctaggaattataaatgtttccaaagggtaggatgccatcactctggaaagatacttcttttaagaagttcagctgatattttacttaccactgtctcctcacaactgctagtttccatctgccttgttatttcagaaatgtgtgcagccaccactgctactttgcattaagtagtgcttaccaaaattactcctgagccctcaattttaaatatagtatctatgctctcattgctgaagggacagaaccaccaaaaagagatcactctgcatgcagggagaactcactaaattcttctatctaattgacatgcagagcaaatgctagactctagaaaagaaaaagttaacaaaaacacacttttccaacttcccctagaaaaattatttgtagtctaggaaaataagcctccaacttctccttattagctggtctcatgttgctaggcaacagctggcctgtatccacagccaggcttttaagagtcacgcttgtcttgtaagtccccaagagtcctcaactctgacttgctctgtcttctgccttctgtttatttgctgtgtagagactctgcctaattctgggatcctggcaagatctctaacctacaacctaatagagctatgtccttttgga

SEQ ID NO: 249639 - DNA, 158 bp, Homo Sapiens
tctctatatatagatgtgggtctcaaaaacaggactgcctcttaggtggtaaacactgtccccaggtctgctttctagtctgatgactttacaacaacactctatttggcatctcaatgcaatatttatctgtagaaatacagtctttctggggagtt

SEQ ID NO: 249640 - DNA, 1942 bp, Homo Sapiens
  misc_feature (73)..(263): n is a, c, g, or t
  misc_feature (984)..(1033): n is a, c, g, or t
gagacggcgttttattcttaccaggtgggagtgcagtgcagtagcacattcacagctcactgcagctttgacnnnnnnnnnnnnnnnnnnnnnnnnnnnnnnnnnnnnnnnnnnnnnnnnnnnnnnnnnnnnnnnnnnnnnnnnnnnnnnnnnnnnnnnnnnnnnnnnnnnnnnnnnnnnnnnnnnnnnnnnnnnnnnnnnnnnnnnnnnnnnnnnnnnnnnnnnnnnnnnnnnnnnnnnnnnnnnnnnnnnnnnnnnnnnnnatgatccactgtgcctggcaagtatgtttgtagccagtggggaattattttaactaggcaataatttgatctattttgggaagcctcttgtaatcaaatcatatatcaacattaatcacatggtgagtcctccatggttttcattcctagagattctaggatgtttgacatttctctgcttagcttatagcagaaaggtattggatatcaagaatgtttgaacagtttctcctttttgggaatgaagatgaaattgggctagaatgagatgtgtgattgagagaatgtccctgaggcctgagcagtgtgtccttttgggtatgggcattggaagcatgtagtgaattcttataattttatgttgcctcggcatccatcttgagtataagtttaactttgttataccagaagcaaggcttactcacttttgcacagtttccagttctacacctccttctcgttcctcagtgtgattggtccagatagctgccttatccaactgcctcctttggaccacttcatcatgggacagcttgatgcaatctacttgacaagaccctggaaccccacacccctcatgggaccagtgtccacctcccagtcacagtgtgaccccagggaactcttgcctgcttgctttaaacccaccacttaaaagtctccacagaaaacctgtttgaatagtacccttgacccaataagggcattggcccctgggtgnnnnnnnnnnnnnnnnnnnnnnnnnnnnnnnnnnnnnnnnnnnnnnnnnngctccctgacctctgcgtgtggactccaggcatgccatatacccctcaggacctgaagcaaaagaatgaattaaagaaaactccagagaatgagctgacaacctactccctggtcagtggctctccatgcctacctgtggtctcttggacacccttgcataagatgacttcctgggaactcttctgggagtgaatgttatcagcaaattcccaaaacaacaccccttagacaaaaagcctcctcacctatgcattgcctagaccacccactaaaggtgatggccacaaagaggtggatttgttgagttggtgccattccttctactgccagcttcaccaaaacaatgacacagtcttccttccgcatggagactcttctctttcctgtgttgcagtggatgcctcctgcagataagaaatgcttaactgagaaatgctcatgttgggatatcatcgatgagactttaatttgggcatggtgactgtttcccttgctgccacttgactcaatcccaggagcctcagtagaggatataatattacacaagatgctcaaaatggtggaattgctcagtgctcccataaatatacatttataattttcatttgccacatggtaaactgaaaaatacagactatattaaaaagaaactgcatgattttttttcaaaaattcaaaagcatatttaaataatatataaattaaatgccctcctctcttccaattctgtccctatagttttcctctattaggtgaactacatgcattcttttagtggatagatgcacacaaacacacaaggccattatggggaagggatcccacgtgtgtgggcctattgtacacatttttctgcaaatcaccttctttcatttaacagccctttattcaatggcttttttcttttt

SEQ ID NO: 249641 - DNA, 1000 bp, Homo Sapiens
  misc_feature (49)..(76): n is a, c, g, or t
tcaataaattttgatttctacagtttatcattagtcttctcattttatnnnnnnnnnnnnnnnnnnnnnnnnnnnntgtgctgaaggaagtgctctgatgtacaaaaacttcttcaaactagtgtagaatgaatgatagcaatgattcttttgcctctttgagcatgtctttcctatcttatcttgcccactaagcagaacgttacgatatttctgtttttgcattggatgctatctgcccaaacagcttttcctaattgaaaatgcagtcctgtttaaaacctttgatttacgactacttgtacatgcttgctcattacaattttgacattttttacatagtgaagaccccaaacatatcagtgaaacatgacaagatcataaagaacagtatcatattattatttagtcgcttttacagtggcaagccaattttgaaatatctcatttaaaactcagacccaattcactgagttatacttttaatagcttcctcagcacactatttcccatgcattaaatatgataaaataatctatcactgcccatcggtcttgtaaaaaggaagtctgaatacagagcccacaacactaaaattgtttttctagctacaaagtatagcatcatcaacacagacacgatttggactccctgacaggtggattggaaaacggtgtttaaagagaagagaacattttaacataaatgtcattaagaatcccaaaggccttatttgtactacacaaacttcagatgatagaagcagcaaaaaggctgcagaacgtacatgggactctcaattaaatacaaggttcacataaacactctgaaatatacagtaatatgcatttttctttgtacccatttctgaaaaatgttctacattaaaagtctcacttttggctagtttctaaatgaccaatcaacccaagaatcatattttgtcaattcttactttatacattataataatctattttgacattttgaataaggccaa

SEQ ID NO: 249642 - DNA, 863 bp, Homo Sapiens
taatgccaactttgtacaaaaaagttggccaggatccgactgtggcgggtacccgcagagggcctggaagaggtgctcaccacgccagagactgtgctcacaggccacacggagaagatctgctccctgcgcttccacccactggcagccaatgtgctggcctcgtcctcctatgacctcactgttcgcatctgggaccttcaggctggagctgatcggctgaagctgcagggccaccaagaccagatcttcagcctggcctggagtcctgatgggcagcagctggccactgtctgcaaggatgggcgtgtgcgggtctacaggccccggagtggccctgagcccctgcaggaaggcccagggcccaagggaggacgcggagctcgcattgtctgggtatgtgatggtcgctgtctgctggtgtctggctttgacagccaaagtgagcgccagctgctcctatatgaagctgaggccctggccggcggacccttggcagtgttgggcctggacgtggctccctcaaccctgctgcccagctacgacccagacactggcctggtgctcctgaccggcaagggcgacacccgtgtattcctgtacgagctgctccccgagtcccctttcttcctggagtgcaacagcttcacgtcgcctgacccccacaagggcctcgtcctcctgcctaagacggagtgcgacgtgcgggaagtggagctgatgcggtgcctgcggctgcgtcagtcctccctggagcctgtggcccttccggctgccccgagtccggaaagagttcttccaggatgacgtgttcccaaacacggctgtgatctgggagccagtgctcaatgccgaggcctggc

SEQ ID NO: 249643 - DNA, 944 bp, Homo Sapiens
ttgggtcaaacctccgtgcttctcagacagtgccttttcaccatgagtgggtgcccatttttaggaaacaactttggatatacttttaaaaaactccccgtagaaggcagcgaagaagacaaatcacaaactggtgtgaatagagccagcaaaggaggtcttatctatgggaactacctgcatttggaaaaagttttgaatgcacaagaactgcaaagtgaaacaaaaggaaataaaatccatgatgaacatctttttatcataactcatcaagcttatgaactctggtttaagcaaatcctctgggagttggattctgttcgagagatctttcagaatggccatgtcagagatgaaaggaacatgcttaaggttgtttctcggatgcaccgagtgtcagtgatcctgaaactgctggtgcagcagttttccattctggagacgatgacagccttggacttcaatgacttcagagagtacttatctccagcatcaggcttccagagtttgcaattccgactattagaaaacaagataggtgttcttcagaacatgagagtcccttataacagaagacattatcgtgataacttcaaaggagaagaaaatgaactgctacttaaatctgagcaggaaaagacacttctggaattagtggaggcatggctggaaagaactccaggtttagagccacatggatttaacttctggggaaagcttgaaaaaaatatcaccagaggcctggaagaggaattcataaggatttcatgctaaagaagagtctgaagaaaaagaggaacaggtggctgaatttcagaagcaaaaagaggtgctactgtccttatttgatgagaaacgtcatgaacatctcccttagtaaagtgaaaggacggctgtcatacagagcacttcagggagcattgatgatatatttttacagggaa

SEQ ID NO: 249644 - DNA, 978 bp, Homo Sapiens
  misc_feature (581)..(606): n is a, c, g, or t
ttggctcttgcacacccagggcgaccccggtgaagacggaaagccgggcgacaccgggccacaaggcttccccgggactccaggggacgtaggtcccaagggcgacaagggagaccctggggttggagagagagggcccccaggaccccaagggcctccagggcccccaggaccctccttcagacacgacaagctgaccttcattgacatggagggatctggcttcgggggcgatctggaggccctgcggggtcctcgaggcttccctggacctcccggaccccccggtgtcccaggcctgcccggcgagccaggccgctttggggtgaacagctccgacgtcccaggacccgccggccttcctggtgtgcctgggcgcgagggtccccccgggtttcctggcctcccgggacccccaggccctccgggaagagaggggcccccaggaaggactgggcagaaaggcagcctgggtgaagcaggcgccccaggacataaggggagcaagggagcccccggtcctgctggtgctcgtggggagagcggcctggcaggagcccccggacctgctggaccaccannnnnnnnnnnnnnnnnnnnnnnnnnaggaccaggactccccgctggatttgatgacatggaaggctccggggggcccttctggtcaacagcccgaagcgctgatgggccacagggacctcccggcctgccgggacttaagggagaagttggagcagatggagtccccgggttccccggcctccctggcagagagggcattgctgggccccaggggccaaagggagacagaggcagccggggagaaaagggagatccagggatggacggagtctgggcagccgggcctccctggcccccccggacccccgggacctgtggtctacgtgtcggaagcaagacggatccgtcctgagcgtgccgggaacctgagggccggccgggtttcgcaggctttcc

SEQ ID NO: 249645 - DNA, 808 bp, Homo Sapiens
ttgggtaaataagctattatcttttagaagttgtaaagagcactgattaactctatattagagaccccgcccctgccttggctgcgcgggcccccgccaaagggcccatggtcggcgcagccgagctggcgagggcagcgcgggtcccccggaacgccccccgaggcgagcgctaacgaggtccggcaccatgtgctaggtcactcccagtgcaaggccacacttgggccatccgagcaacccctcctcacgtcaggggtcaccctccccaccacccattgccccaccatggccggagaccggctcccgaggaagatgatggacgccaagaagctggccagcctgctgcggggcgggcctagggtgcctggtcatctacagccgctccttcctggagtacaacagctggcatgtgctcagctccgtcaacatctgctgctccaagctggtgaagtgccggctgcagaagggcaaggtgaccattgcagagttcatctggctggccacacgcagccaaatggaggccactgagccacaggatatggtggtctatgaccagagcacacgggacgccagtgtgctggccgcagaccgcttcctctccatcctgctgagcaagctggacagctgcttcgacagcgtggccatcctcacggggggcttcgccaccttctcctcctgcttccccagcctctgccagggcaagcctgctgccctgctacccatgagcctctcccagccctgccctgcccgtgcctagcgtgagcctgaccctcatcctgcctcacctctacctgggctcgcagaa

SEQ ID NO: 249646 - DNA, 640 bp, Homo Sapiens
ttgggtaaaataggtcttcttttatactgtaaaaaaagatataccaaaaagtcttataataggaatttaactttagaaacccacttattgataccttaccatctaaaatgtgtgatttttatagtctcgttttaggaatttcacagatctaaattatgtaactgaaataaggtgcttactcaaagagtgtccactattgattgtattatgctgctcactgatccttctgcatatttaaaataaaatgtcgtaaagggttagtagacaaaatgttagtcttttgtatattaggccaagtgcaattgacttcccttttttactgtttcatgaccacccattgattgtattataaccacttatagttgcttatattttttgttgtaacttttgtttttgaacatttagaatattacattttgtattatacagtagctttctcagacattttgtagaattcatttcggcagctcactaggattttgctgaacattagaaagtgtgatagcgatattattgcccatcaaatggaaaaaaggtatttcttattaaacaagacacaacgtttttatacaacatactccacaatattaaggagttttcttaattttgtttcctattaagtattattctttgggcaaga

SEQ ID NO: 249647 - DNA, 385 bp, Homo Sapiens
tgagccaccgcacccagcccactttttttacatatttaaaaaaaagagagacattaaggttagccaataacaaatcttccccaaaaaacactttagtcaataaaaatataaattttggtattatttcacccatcattaaagaataggtattcctctcccccagctttgtacagatgacattttcaaggtaagtgtgaaaaagaattccatttattcaagactaatatacaatggaccaaacattttcagagacttctctgtattaagtgtcattacttcacactttagaatgaacctaactaaatgactactaaaaagcgaagttgaaaaaataatcttcgtgataaatgaaacccaacttttttgtacaaagttgctattatgg

SEQ ID NO: 249648 - DNA, 414 bp, Homo Sapiens
aaaaaagttgggattgttttcttcttagagaaaagaggatgtccccggagcttgtgtgcgatacagagagcacctcggaagctgaggcagctggtacttgacagagaggatggcgctgtcgaccatagtctcccagaggaagcagataaggcggaaggctccccgtggctttctaaagcgagtcttcaagcgaaagaagcctcaacttcgtctggagaaaagtggtgacttattggtccatctgaactgtttactgtttgttcatcgattagcagaagagtccaggacaaacgcttgtgcgagtaaatgtatagtcattaacaaggagcatgtactggccgcagctaaggtaattctaaagaagagcacaccctacaagtcaaacaacatattcttgaaagttatgatgcattc

SEQ ID NO: 249649 - DNA, 825 bp, Homo Sapiens
  misc_feature (653)..(663): n is a, c, g, or t
aagggaactttgtacaaaaaagttggcttcttcattttcttgaaaagttgttctggaaactacaaaactgggccacaggcctccatgcctgctctcctgggactaccgacttgtttcatctctgagtcttgcttctcccaaaggaaactagaaaccctgggctctgatcagggaatgcaggggtgggggaagggggcaacctgcttcacattgatctcaccccagaaccgggtggctggctgacgccgctgatcagaattcatgtggtcggaggatttgtaggtcagcatgagatcttttaatacaccagagaataatctccctaaagctctagcctcctggcgggtgctccacacacaattctgagacagcatccagggaatgggttgggattgactccgaccagaacttgagaggctggcacggctctgttcccaggccccaccctggagccacagggcagggagctcactacattggagacattttatggcaccacccgtacccctcacccggagccgatccagagacctgtagtttgggattgagcaggttaaattccctggtggcttctgggaaaatgcttgatcagactctgtgcactgctgtctttactgagctctctcaaagttcatcacccccaagacactccnnnnnnnnnnnctacgcctgaaacatcaacatactcttctctgctttgcctggaatccttgccaggggattttccagttagcagaaaaactgcatccagtttccgacctattcactgagggggtaggtgactgggaggcgagggttatttgccctctagtgcttttcctcttg

SEQ ID NO: 249650 - DNA, 928 bp, Homo Sapiens
  misc_feature (369)..(370): n is a, c, g, or t
  misc_feature (730)..(745): n is a, c, g, or t
aacataaaagcaaactttgtacaaaaaagttggattcttactgatcatatagttagacttgtacagtgtggcaaggaatactgtcatacagttgtgccgaaaacaagcccatttacttatttttttaaaaattaattatatataattcttataaaataacaaattccatttatttcctcttgatctctgtcatcagagacatttgaaggtcggaggtgggttcaattgaaagacataatgcacttgacaagttgttgtatgtgtgcattgtgaataggccttaacagtgcattcatttgttttattttttcccatttatacagacttttgttctgctcttagataaaatactaataaacaggaagttgnnaaaaaaatgtggtgcaattgttctgaatgttgtttttcttgcaaggctttatgggctacaccacaccatcctattcaaagcagtccctgtaggtggtggtgttaataaagaaatgaggctgcccagggccgcctgcctgagcctctctgcagctgctcacctcctgctgaggcctctgccttcagagctagtggggcctgctcacacattccagtagtttcctctttatttgtcctgaaccaagttgtagaatttaaaggaggtgaagtaaggcgatttctatggaaaatatatttttcttctttactcctcatgctgagtgcataagaatttattatttcccctgaatgttcaaagtgnnnnnnnnnnnnnnnnaaaagaaccaggagcaaacaatcttaataggaatgtgcgatcttgtgtttatctttagcacacttaattagctacaacccgggactgttgccatttgaacaagttgttaagaaatctgccatgttttgctcttttttaaaaggaatgactttaataacccatagcaacacttactcagttttg

SEQ ID NO: 249651 - DNA, 934 bp, Homo Sapiens
  misc_feature (402)..(428): n is a, c, g, or t
gcaataaaggcaactttgtacaaaaaagttggacagaagtttccttggaaggacttttggaaaagctctttaaaatgggatagacttttaaagagcttgacctttaaaggtcataaagggatggcttgaccctttgccagttcctcagtgtcagaggtggagcagtcatacgatgactatgagttggcaaacatatgtccagtgtaacgtttgaggaagaaggagcctgggtccttgctggcctatggagctgttaggctagtcctggactgactcctctatttttttaagccactgtttagtagctgaatgtaattaactgatgtactgaagaatttcacatatttaaactataaaagaatccttcagaaaggctctggtatacatctaataggagttctnnnnnnnnnnnnnnnnnnnnnnnnnnnaataatatctgaaaaaataatagctgaacattttctagaagtgaagacaaaatgagtgtttagatgtggcaatgtgtttattaagtaaaatgtgatacactcgggataagaggatagagacatcaaataatcttaaaatttattaggaaaatttaacaatagccactaaaattagaggaggaaaagagaatatagaagactttgtaacgctaacataaggcaagaaagaattgagaaaaaggagcaaaatcacatgttaaattttcacaaattatagtgatagtaataaatccgaatatatcagtaatcataatgattgtgatagtcagatgttattttaaatactatttgctgttcataagagacataattaaaacttactcttagaatgttgaaggtgaaatgatgaaagaatatatactcatcaaatagcaatccaaaagaaaacctggtgtggttatattaatagcatatgagacatttatatgaaagtttatgtgcaacaa

SEQ ID NO: 249652 - DNA, 315 bp, Homo Sapiens
cgcacaatagcagagccacttacacgctggggagggggcggtgcgggggtcctcctcccgcccgggattcagagtcgggggtgggggccagccgggcgggtgagatgcgcagagaggaagggacagggcggataaaggcacgaggtggggctccggccaggccaggaagggacccaacttttttgtacaaagttggggcaccgccccctccccagggtgcatttggctctgctattgggcgtccctggaagtggggacccccttgtccctccgccctaccctgttatcgggccttcttttaccccaccttgactg

SEQ ID NO: 249653 - DNA, 877 bp, Homo Sapiens
  misc_feature (104)..(137): n is a, c, g, or t
  misc_feature (348)..(409): n is a, c, g, or t
ccgggccgggcagcaacggcggcggatcccccgcccagcccgcaccgcctggccagccacagctcggggctgctccgcgcccgccgggctaagcagctgccatnnnnnnnnnnnnnnnnnnnnnnnnnnnnnnnnnncctctccggcgccctctccccccgagggcacgccgctgcccggcggcggctcgctcctcctcggcgcctccgtggccgcgccgctcgccctctgcagagtttagagtacaaggggtggggaagccgggtgagcgggaagggacggagcttccttttcttggccggctgacaagtcggctcgcaaacctgcgccgcggtgcagctcaagggnnnnnnnnnnnnnnnnnnnnnnnnnnnnnnnnnnnnnnnnnnnnnnnnnnnnnnnnnnnnnnagctccttccgtcccggccgctctgggaggggccaggaagggcgccccctgggtgcggagctacctggcgcgcaccttacgagcgggctggctccccaggcggcgtcccggaacagcagcagcggcagccgaaaggaccctcctccctcttaggcggcagctcgccttcatcgggtggatttcctcctccttgcctggcctcgtttctctttcgatcgcctccgccgcgtggtcccggcgccagcctcgtcgttccttgcagacgctctccctctccaccaccagcttctggccacccactcgtagcggcaccgagggtcagggccagcccccaaggagggcgctgctaggaagctcgagcccggactgaactgaccgcgctgcggccctgggaccccagccctcctctgagtgctgcgcgtggcatagggtcccagtcttcacccacccggcccccacctacgccaa

SEQ ID NO: 249654 - DNA, 1460 bp, Homo Sapiens
  misc_feature (77)..(121): n is a, c, g, or t
gatgagcaatgctttttcataaaaagaaacaactttgtacaaaaaagttggctagtaaatctcccatggcctaaaannnnnnnnnnnnnnnnnnnnnnnnnnnnnnnnnnnnnnnnnnnnntatcatctagaaatatttgagcatagaaagcactcagtgaaattgctttaggaatattatgtgggattgtgtggagcagattggaagagagagtgatgagagtcagcatgtctactttatgaacacattacataaattaatccatgaggccatcccaagttatcccacacagtgttatcactgttttgacttctcttagctctgtcacctgacttaatctgttttattccctctgtgtccatgttgaatatgaagaacctgtctgttttcaacaacttagtctccctttttttgccctctttgtctcctttcccaagttttaaagaccatgatgatgaggttttcagagctgttgtctttgggcattttatctatgtttattcttttgtttctattttggcagtttcctttctccaaataaatgaagattttttaatatattttttatttcagaatgggaaactaaagcccaagcatgtactccagtggaggatatgtctaaactcacaaaggaagaaacccataccatcaaattagaagactcatatgactacgatgatagactagagaggcgaggaaaaggtggcttctggaaaattcacactgatgaaagaggtttcagtttgaagtcagtcctttcacaagaatatgatcctacagaaggatgtcttagtaaatatgatatatatagaaataattttgaaaagcattccaacctaattgtacagtttgatacccaattagataataaaacttctgtgtataatgaaggcagggcaaccttcaatcatgtctcatatggtattgtacataggaaaatacttcctggagagaagccttacaagtgtaatgtgtgtgggaaaaaatttaggaaatacccatccctcctgaaacaccaaagtacccatgccaaagagaaatcgtatgaatgtgaagaatgtgggaaagagtttaggcatatctcatcccttattgcacatcagagaatgcacactggagaaaaaccatatgaatgccaccagtgtggtaaagccttcagccagcgtgcacaccttactatacatcagagaattcatactggagagaaaccctataagtgtgatgactgtgggaaagacttcagtcagcgtgcacaccttaccatccatcaaaggacacatactggagagaaaccatataaatgcttggaatgtggtaaaaccttcagtcatagttcatcactgattaatcatcagagagttcatactggagaaaaacttatatatgcaatgaatgtgggaagactttcagtcagagtacacaaccttcttcagcatcaaaaaatacatactgggagaaa

SEQ ID NO: 249655 - DNA, 1369 bp, Homo Sapiens
  misc_feature (441)..(454): n is a, c, g, or t
  misc_feature (881)..(939): n is a, c, g, or t
ttggcttaaaacagatataacgttaactttaaaagaatttttttggtatgaaatgtgggaaagtgttcaaacattttcctttaatatgtttaaattggacataccccttttccctgaaggaaaatgtcttaatgtttaccgaataataaatatgatatatttggaaaatccaacataattgcacactcagaaataactgttattgtgattattctcccaggcattaaatatatgatataatatgcatgtgtgttatttttgtaagtggattcttagaaaatataatgttctgtttctggtttttcacttaacagtattgtaggtaccttttctgccttaatgcgtacaaatctgctctaccccctccctgcataagcattctgatacatgactcttgtaattttaatgtagctttctgttggtagatctatatattttccnnnnnnnnnnnnnngttaggaaaatatattgtgatagcgtgggggtaagttgcatgttacatactatgtttttgaacacttacaaagtttctaaaagtaaattcctagaaatgttatagctctttctggggagcaagcagggattcagaataatccccatatttcattttgttcgtttgttttaatttgttatcatacagtgttatcggcaattgaaatacaaatattgtgtgaactttgaagaaaatatttttatttgttcattccccttagcagagttgctgagtctcattcctaatttgaggcctagacttttgggaaaacacagaggacgtccaccttttagagaacagtgataacttacccatgggggtttgccggttgggagttattctggtatgcataatgcatacaggccacttgaaggtagaaggcaactannnnnnnnnnnnnnnnnnnnnnnnnnnnnnnnnnnnnnnnnnnnnnnnnnnnnnnnnnnaagatttgggggaagttatgccaggaggtagggggcagaacttggaaaaagaaatgaacttttgaaaaaatgtgacactgggttactgagtccaaaatgtcttagagttgacatcctaggccaagtcattatctctgtaacaggaaacattgtaagcttgattgcctgttcctgaagtgacttgcaatgaacccctcaatatcagggatcagagtgcctctcttcatgggtagtgagaaaggcagtgccctattctgcagcctaggctgctgggcaaaggggagaatttggtggtggtgaagggaatcaaggagggtttctgtcataagaaaccagtgtggtttacctttgccaggcgtctgagttcctgatgatgttcctgcagttatccttttccttatgatttaaaagtctttagcagctgagcacg

SEQ ID NO: 249656 - DNA, 1640 bp, Homo Sapiens
  misc_feature (62)..(145): n is a, c, g, or t
  misc_feature (298)..(309): n is a, c, g, or t
  misc_feature (361)..(585): n is a, c, g, or t
  misc_feature (699)..(707): n is a, c, g, or t
ttggattttaatatgttattcatacatttgaagaattatgttctttctgtaggcagctgaannnnnnnnnnnnnnnnnnnnnnnnnnnnnnnnnnnnnnnnnnnnnnnnnnnnnnnnnnnnnnnnnnnnnnnnnnnnnnnnnnnngaaaagaatatatgcatgagcaaaagaacataaaacatccgtaataataacccagtaaccattgttggcatatatctttggtatacatcctttcaaattcttttctgtacatataaaaatatgccattttttccccaaaaatgaagttatacnnnnnnnnnnnncttaaatggagtctagctctgtcactcaggctggcatgcagtggccagtgannnnnnnnnnnnnnnnnnnnnnnnnnnnnnnnnnnnnnnnnnnnnnnnnnnnnnnnnnnnnnnnnnnnnnnnnnnnnnnnnnnnnnnnnnnnnnnnnnnnnnnnnnnnnnnnnnnnnnnnnnnnnnnnnnnnnnnnnnnnnnnnnnnnnnnnnnnnnnnnnnnnnnnnnnnnnnnnnnnnnnnnnnnnnnnnnnnnnnnnnnnnnnnnnnnnnnnnnnnnnnnnntgctgccagccggcagttgaattttaagactgtggagctggctgaggcagtagatgaaacaagatttcttgatgttccttccaggtttattacgcatgtatctttagagatgannnnnnnnnaaagactgtgtttattgtatttcagatgctgagatgaatcgtcacctgtgtgtttggctttttagacatccatctcttaatggttacctccagtgtcacatccagctccattctcatcaatttagacagatacatcttgatacaaggctgcaagtttttagacaaaacaggaattgcattcttcatctgttaagtaagaattggtccaggagatattgccatcaagacaccaagatgctctggaagcataaagcactacagaaatatatggagaacctgagtaaggagtaccaaacacttgagcaatgtctgcagcatatccctgtgaatgaagaaaaccgaaggtccttgaacagaaggcatgctgagttggcacctcttgcagccatttaccaagaaattcaggagactgaacaagcaattgaagaattagaatcaatgtgtaaaagcctaaataaacaagatgaaaagcagttacaagaacttgcactggaagaaaggcaaaccattgatcaaaaaatcaacatgttgtacaatgagcttttccagagccttgtgccaaaggagaaatatgacaaaaatgatgttattttagaggtgacagctggaaggactactggaggtgacatctgccaacaatttacccgagaaatatttgacatgtaccagaattattcgtgctataaacactggcaatttgaacttctgaattatacaccagcagattatggtggactacatcatgcagccgcccgaatttccggtgacggtgtctataagcatttgaagtatgagggtgggattcaccgagttcagcgcatccccgaggtgggcctgtcctcaggatgcagcgcattcacacaggaacgatgtcggttattgtccttcctcagccagatgaagtggatgtgaaattggaccccaaggatttgc

SEQ ID NO: 249657 - DNA, 1571 bp, Homo Sapiens
  misc_feature (47)..(99): n is a, c, g, or t
  misc_feature (101)..(516): n is a, c, g, or t
  misc_feature (524)..(532): n is a, c, g, or t
  misc_feature (771)..(838): n is a, c, g, or t
tggtacctcaaaagctgtgtcctctgaggggatgaacactgtgtgtnnnnnnnnnnnnnnnnnnnnnnnnnnnnnnnnnnnnnnnnnnnnnnnnnnnnngnnnnnnnnnnnnnnnnnnnnnnnnnnnnnnnnnnnnnnnnnnnnnnnnnnnnnnnnnnnnnnnnnnnnnnnnnnnnnnnnnnnnnnnnnnnnnnnnnnnnnnnnnnnnnnnnnnnnnnnnnnnnnnnnnnnnnnnnnnnnnnnnnnnnnnnnnnnnnnnnnnnnnnnnnnnnnnnnnnnnnnnnnnnnnnnnnnnnnnnnnnnnnnnnnnnnnnnnnnnnnnnnnnnnnnnnnnnnnnnnnnnnnnnnnnnnnnnnnnnnnnnnnnnnnnnnnnnnnnnnnnnnnnnnnnnnnnnnnnnnnnnnnnnnnnnnnnnnnnnnnnnnnnnnnnnnnnnnnnnnnnnnnnnnnnnnnnnnnnnnnnnnnnnnnnnnnnnnnnnnnnnnnnnnnnnnnnnnnnnnnnnnnnnnnnnnnnnncccccccnnnnnnnnntcccgtttagattaagttttatgtttatgaatatatgtatatgcatacatgtgcatgcagaaaattataacagaaagatagagtattacatatgtaaatatgtatttttttatatgtactgatttgtagaataacaattataagtgatataaggtgaaagaagcaatttgttcataagtatgtagtatgattccatttcagtaaaaattaacaaaaacatgcttgtatgtgcatgggcnnnnnnnnnnnnnnnnnnnnnnnnnnnnnnnnnnnnnnnnnnnnnnnnnnnnnnnnnnnnnnnnnnnntggaagcaatatgttttgtgatgatacacacccttgcaataacatgaactacctcagggagtactatagatgacagagacaatgggggaagaggagcaatgttaccttaaaaaaaactttgcatcctattactggttacaagaggcatataaaattatttttaaaattttaaataaatatgttagcaacctttgtatggatggaaaattttaaatatgtatgaaaatactgattgcgtataccttttgaaattctactgatagggatttatcctacatatttacatatacaaacatttatgacattcatagcactattgttttaaaggtgagatgttggaaacatcctagctatttaactataggggaatggctaaataagtttggctcactcaaaggataccatggaagagcaaggctttgcatcgtatttcgatatgaaactgttagaagcacctttattttgaatagcctctaagaaaaagttggatagaaagagtctaaatgaaatattctgattaataacagaacctatactataagatggtgaatttctgatcagaaaggtgaaaagttcatctacagcttaagtggacaaatttaattttctataacattcatatctgatagattaaataaacaggtacaatttccttaagaaacatgctttataagttttatggtcactacattctttaaagttaagggttacattcctgggagattaaatccaa

SEQ ID NO: 249658 - DNA, 1096 bp, Homo Sapiens
  misc_feature (631)..(681): n is a, c, g, or t
ttgggtttgctagttataaattaaataactattagttatccagtttttagttttgtatgctactctcttccctcatcatatgatattttaaaaatctagttcagtgtttctgatatatgatccaaatagtattaatattattaatgtgttgaaataaacacactaatacaccttagcacacagtatacacactaaaagtattaatattgttagtgtgtatatttctataaacactaataatatagaaatatacacactaataatattaatattattttattatttttgcctcttcattttttgttgatcatcaactcatccttagttacctccaccatcatcacaaatcttttaatattactaaacccttaccttccttggttataaattaaaattaaacacaacttttgtctctagagatgcagatatagtctgtgaagctgctttgatggcagtgattgtgaaattcctctgattggttcaggtttgggtaaatttctttcagtttttttactctagttcctactaccaatttatagttagcttaggacttggacaccagaatctaagttctatgagaaatggactgagtctgtcctgttcacagctagatcttgaacacccaagaatnnnnnnnnnnnnnnnnnnnnnnnnnnnnnnnnnnnnnnnnnnnnnnnnnnnaaatgtccaaatcaaagaaaccacagtctgatgcccatatattcctatatacaaaattgtacattatacttaatatacagaagtgtatattaaacctaaatgttctaatactatttttacatctacaacataaaaaagaataatgtaggctcaaatatcagataaatctaggttgagattgtggcctcatcatttacttaaagtgtgttcttgggcatattagtaggcattctaaagtttcagttccctcttctcttgattatataataattactacatggaattgctatgggagattaatacaaataaagctcatagtactgtggctgtctaactttttagctgtcattattctaacagttattactatcctattctcaactgtttttaaatagtatcttgctgtttttaactt

SEQ ID NO: 249659 - DNA, 983 bp, Homo Sapiens
  misc_feature (518)..(550): n is a, c, g, or t
gctttaaaaagccaactttgtacaaaaaagttggttttaaatattagttgcctttgtaaacagtttcccctcccccacccctttttcgataattttagtaggtacaaaaaggttgatagtaacctgtatttatttcaaagatgctaatttgtatgtgaattgattatgtatgtagtagctttttaccttttagaacttaagacattagatgtgtggctatgtcaacaataataatcaaagctaacacattttgagctagacagtattctaggccctttatgattgttgagcattaatcctcaaaatgaccctgtaaaatagttaatattatccccatttgacagacgaaaaaatagaggcacagtgaagtaacttgcctaagaccacacaggagtaagtagcagtgctggtatttgaaccaggcatcctggctccagagcccattcttttaatcagagagacagagaataatgctggactacctgggtaaaatttgccacacacccagcctgaagttnnnnnnnnnnnnnnnnnnnnnnnnnnnnnnnnnctgtatatacaacacagtttaatctctctgcttcatatttcacatctgaaaagtggcgttggaaataatacctctttcactaggtgagaattaaatgacttaatgtgtattaaagggcttacatgggtattagctaatgcagtagtatgattgttttattagcatatgcattatccatatagctttggtttatattttccatagagcctaaactttatagatcactatctaaaatgaaaatttacatcaaactagtgttttaatatgacagttctagtgttgtttaagtctaagtgaagatttagggcatcttcctgggttttgggatttgtgcagtgtggcttctgaccagctgcatagacatggctccaggtaacagtccctggggactgagccagtggcccatgtttggctgttggagctttcttttccc

SEQ ID NO: 249660 - DNA, 570 bp, Homo Sapiens
  misc_feature (264)..(272): n is a, c, g, or t
aaagttggggcttttccacagggaaggattatcaagacagttcatttacttatccatggacaagagtgatttgcatttccctcagttctacacaactaagagttgctgaagggcagtgaaaggctagaatcatataacctagaaggatgtgttccaaagcttagagtataaatctaaatattgcagtttcccattggaaacatcccatggtcttttttaaaatttgtttacagaatgtgagagtttataatactattgtctcgnnnnnnnnncttccataacatatttaaaattcttgcttaaaaatgtttttgatggggatagggggttgtgaattaaattcctaacatgtcctaatagttacatgttatgcctaatctgttagtgtacttgggtgatatgacacttattttaagcctgatgcacttagaagcatgttctactttggatatctgttctgaggatggtagctacaaaatgaacttgtgccctttcgcaaattgttggacttgtggtggttgtcttgtgtccctagtatctgatttggaagactcaattaagggtttaaaa

SEQ ID NO: 249661 - DNA, 910 bp, Homo Sapiens
  misc_feature (689)..(703): n is a, c, g, or t
tcagtgtaggtctctgtttttatccctcttgaatttgattgagttttttgaatgcgtagattcatatctttatgaaatttggagagttttcagccattattgttttcaaatattccttctgttcctttctttctttcttctcgtgctgggactcctattttatatatatatattagtatacttggtggtgttccataggcttcttaggctctgttaatttttctttatcttttacgtttttctttctgctcctcagactaaataacttcaatgaactaatcttcaagtgaccctttcttttgcctgctcaaatttgcagttgaaaatctttagtgagttatttagtttttcggttattatacttctcagatccagaatttctatttggtttctttttaaaattcccgtctctattggtattctctatttgattattcatttttctccaggtttccttagctctttgtccatagtgtccactacctctttgagtatatatcaggcagttaacttaaagcttttgcctagtaagcccaatatctgtgctccctatgaaacagtctgttaatttcttccataaataggctatatcctcttgtttctttgtatgctaatttttgataggaaactggacattttgaatactataatgtgggaattgaaattcagatttttctcttcctaaaggnnnnnnnnnnnnnnncggttgttactgtttgtttgtttgttccttactgtgggctgtagctatttgtttagtaacttttagaaacaatttttataatatccatattctttattatttgtagtctctgcagtctctgtatcccagctaatgttcagttagcgttttcacataaatttccttaaatggaaaaaaggaggagaaaaaagagagagaaggagccaa

SEQ ID NO: 249662 - DNA, 1203 bp, Homo Sapiens
ttgggttgggatgggctggactgtgctgctgaccaacctgagaacctggcagaaggtaccctggttattgtggtattgatgccacctgaacaactgctccaggatgctcgcagcttcttgcgggcactgggtaccctgctccacaccaacctgcgcattaagcgggactcccagggggaactcatggtgtacccctattatggtgagaagtcagctgctatgaagaaacagaggatgacacgcagatcccttcctggtgaacaagaacaggaggtggctggctctaaagtctttctggaaattgacaaccgccagtgtgttcaagactcagaccactgcttcaagaacacggatgcagcagcagctctcctggcctctcacgccatacaggggaccctgtcataccctcttgtgtctgtcgtcagtgaatccctgactccagaacgcactcagctcctctatctccttgctgttgctgttgtcatcattctgtttattattctgctgggggtaatcatggcaaaacgaaagcgtaagcatggctctctctggctgcctgaaggtttcactcttcgccgagatgcaagcaatcacaagcgtcgtgagccagtgggacaggatgctgtggggctgaaaaatctctcagtgcaagtctcagaagctaacctaattggtactggaacaagtgaacactgggtcgatgatgaagggccccagccaaagaaagtaaaggctgaagatgaggccttactctcagaagaagatgaccccattgatcgacggccatggacacagcagcaccttgaagctgcagacatccgtaggacaccatcgctggctctcacccctcctcaggcagagcaggaggtggatgtgttagatgtgaatgtccgtggcccagatggctgcaccccattgatgttggcttctctccgaggaggcagctcagatttgagtgatgaagatgaagatgcagaggactcttctgctaacatcatcacagacttggtctaccagggtgccagcctccaggcccagacagaccggactggtgagatggccctgcaccttgcagcccgctactcacgggctgatgctgccaagcgtctcctggatgcagtgcagatgccaatgcccaggacaacatgggccgctgtccactccatgctgcagtggcagctgatgcccaagtgtcttccagat

SEQ ID NO: 249663 - DNA, 962 bp, Homo Sapiens
  misc_feature (292)..(304): n is a, c, g, or t
ttgggaaaacatttttacttagtggtctaaatatgtattattttgtatcaagatgatccaacataaagaagattcatttgaggagctagagatagcctttcggcctgatttttctatatgtgactttatgacagatattgtcctttctaagatctaaaataatctttatcttcaaataccagtaaatcttaaggatgtagtaataatcacaaatttaccccatgagtagagtttatatacgtattttctttttattggctcttaaaccagcatgtttggtttgtgagtgtgnnnnnnnnnnnnngaaaaaacctttgcagttcaccttttaagggagataactcaacccgaaagagagaaggcgaggaatgtccatcagtctaactccctgaagttctcagcacatttggaagactcaacatgttgtcagtggaatgtctgtcctttgcaaagccagtttgctctaaacagactaacctaggcagaacttgctcgaatctgccatttttaacatcagtattaaatggggctgttcgcctgaatggaaaacagtttgtggggagggtctttgccttttgggaaattattaatagttgctcaatccatgaaatgtaaaatgtatctgttttgtactctttgacaaggcagtttttccgcctctagactaggccttgtagacatcttagcaaagtcctttactttgcttgataatgatgcgatattgatatcttctttggattctcttatttgaaacttggggcagatcccattccaataaatgtgtagatgatgtatctttcagaaggagattcttcctatggattgggttttctgattggttgtcaaagcttttcttgtttccacttaagtagacatttgcttctacattaactatactgaatactgccctgtcatgttggctagtcatcttttggcattactgcatccattatttgggcttt

SEQ ID NO: 249664 - DNA, 1200 bp, Homo Sapiens
  misc_feature (650)..(659): n is a, c, g, or t
  misc_feature (691)..(700): n is a, c, g, or t
  misc_feature (1130)..(1139): n is a, c, g, or t
aatcaagtgctagtttagtagaagtttattttatgaattagaaaattactgcagtgtctaacacagccctattataaagctaaactaattctagtactgaatgcattctggataacactgaagcaaatctgtatgaaaaaaatggttacctcaagatagaattcacattagaaattcaacatataactaagatttactgaaaataacaaaaggtgttgtagagatatatcaaacgtaattataaccacaacattttccttgtgaaaaatacaactatcagtgaaataaaatgtacaattgaaaattttccaaaggaaaaaacagtataaacgaaaatacttttctttgcgatagggaaaatagtatgtcattgtttttttatcacaatataatttgacacaaaaagcagtcagagaattgcaccaattccacatccagtttcctgaacatgttaagagtaaaaggagtctgtaaagcagaatagtttccaaattttatattttaaattgatgatattcttatacaggatgtcacaccacaccagacctctttacataatgtacagtatttctggttttgtggccagatgtgagtacaaacatatggtttctgccacttctctgtcattctggtgtttagccggagtcagnnnnnnnnnntcgttactttaagtgttacttctctagcaatnnnnnnnnnnttatacttagtgcatgcttcatcatttgtcaaaaaatgtttctgaaaatatgactcaagttacccaatggtttacaaaatagaaaaatcattcattagggtaaaaatgtggtgggatttaggtccatttccagaggactaacttcgttcctaaaggccgcaccactgtccttcagcagaggtggtaatgacagttccatgatggaagcggccggcctgcagaaggccactacttgacatctgattatctttgaccaccccatatctgccatttcattagtgctataaaaagatgggatttttgtggaaaagtcaggaacatttctgctgtacatgatttagaagttctccaaatttttcaaagaggtcctccacccattttacatttttcatacaaagttgaacaatttcctcctgtcctaaatcttcannnnnnnnnnctgcaccgaagaaatctcatccttacatatcagataaacatggtacttataatgatgccaa

SEQ ID NO: 249665 - DNA, 970 bp, Homo Sapiens
  misc_feature (318)..(356): n is a, c, g, or t
  misc_feature (833)..(848): n is a, c, g, or t
catgcccggctttcttcctcttcttataaggacaccagtccctattggattagggccccacccttataacctcatttaaccttaatcaccttcttaaaggccctatctccaaacaaagtcacctattgaggttctgaaggctggggcttcaacacatgaaatttgtggtagacaatttaacccataacagaaggactaaccaagattatggttagtgacagcactgaggctgaagacggacagcccctagtgcctccttgacccccaagaaggaggccctcagcggaaggatgtgttttctcaagtccacagcttctnnnnnnnnnnnnnnnnnnnnnnnnnnnnnnnnnnnnnnncccaggggttctaactgcaatctcctctcagtgcaatatatacattttcccttccctaaatgtaatgactggggcccagagtcagcaaatgattcacctgcgattacacagtgacttggttgcagagggagggctagaacccaggtctcctgtctccaaatctagggctctcttcaccactcccaggtgggcctcctgccctcattgctaaaatcagagaagagggagcaaatctgtgagtctgggagtcagcaccgactcatttcctcttacaggatatttgtatttaaatctgtgtgccaggctaacgaagagaaatcgaagccatgtgtgtgcagtgggctctcagcagcctggagggctggggaggtcatggacctgaggccgtgagacagggtcacactggggagggctgattcatttggcctcctgactttcctatcctcccacccgacttcattttgtgatgctgcgatnnnnnnnnnnnnnnnncgtgcatgcacacaagcacacacatgcagaaaaatttgaaagaattgggatgaggttttctgcaacactaagctaaactaactagtgtctgcaaactaacatgtgagttttccagcctcaaa

SEQ ID NO: 249666 - DNA, 1027 bp, Homo Sapiens
cccaggggacaggtaccagccgctcacggtgagcactttcaggggctttagtcaccgttctggggtgcaggggacacagtggctgttccagggtccctagcaggatgtacttgggtggtgtgcagtcggtggggtccatctccaagtctttctgctcctgccgtctctcaggccactgtcagtgaagacgctcaggaaggacaaggagctgcatcagctgggtccaggctcgtgagcagtctcaaatgtggcactcatcaccgtgggccttgtgcattgtgcagggctcttccaccacgtggagcagcaagcccgcctgcagccctgccatgctgcgcagctctgagacgtggtccagtgtgctgccacccaggtgcagtgagaagtgatgtggtgacatgggtattcatggtccatgaacagctggtggatctccagcaccatctcctgcgggaacacctgccagggagaaggcccggaccagcccggtcagaggccacatggtagggagcaaggacataccccttccccagcccaaaacacctgggtcctgagaataagtgtctcaaatactcagtttcccacttttgggcttttacattccaggccctgtccatatacagcatgcccattggcacctgtgtgcctaagtgcaggacagagcctggccccactgactcttcctgcagcctaagagcaacccccgagccaaggagagggagatggaagaaagtggggagggggaacggcaggcttgctcttgcccttgcctagtgccaagggctgagtgccccagggcaaatggccttttccttcctgaaggggtgctccagggcccaagcctgtgagtagagaggacatgagagggtcttgccaggctccccaccaagttaccagcttgcaagtcctccgggtttgctctgtccttggagaacacccaataccaccctccaggccccggtgacagatggtaaggccatggcccatagagaggtgacttgcctgagggcacagagccaagagccaa

SEQ ID NO: 249667 - DNA, 1734 bp, Homo Sapiens
  misc_feature (968)..(984): n is a, c, g, or t
  misc_feature (1388)..(1396): n is a, c, g, or t
gccttagttaaactatcaaaaacattagtgacagcagcagtatagggctttacacaccagtgtataaatctatcagcaaggcccaacttaccaaactagtttactcccaaacaattcacttatttggtggagagagagccttacagataaaaatcatttctacacatctaaactaattaaaatctaaatgaaataagtcctgccaacacctacaggtttatttcttaaaatcttaggcattaaaaagtctgtaattctgacaacccacattaattttcagaggaggaaggaacgtagacaactattacataaaccaaaattaaggtatttcaatttttcaaaagaggtagaaaagtatttataggggaaaaaaagctttattgtaaaattagataaacttaggtattaaattggcaatgaataagaaacatacatagcccagtatcgaacacagttcacacagttacccttggcataacttactgggttctgtgataagggtctaaaatacttctagattaaatttaattttttctttatctttagagggctaaatgctggtccactgccatcaaaatgaggggaaataaatgttaatgtgtgtttagtttccatctaaacttcctattaaacagctctaaaattgtaaatgccctgccttatttctaaaaggattttttatattaaaatttaaaataaagtctttacaaaagatctaaatggaactttcatttacaaatttgtttaaaagtgtcaggattacaaaactgatattgtcaactactgatatcagttattctaggtagatgacacatattctcccttcttttaaagatgaaaacaaaatggccacatcagtttttctattgtaaaaaagctgtgaacttggtaacaatcgtgctatagtctcttaataccatgtttggtccttaaatcttacttgcctatgtataaaatctattatcttnnnnnnnnnnnnnnnnncagatccagtgggagaaagaatgtttaataaatggtattgagacaaatagctatctgtttggaataaaaataaaattagatccttaaatcttgtaccatatagaaaaatacatattactgatggatccaagagttaaaaaataaaaatgtaaatatccaaaattctacatacaattttagggggtacacagattctctgaagcccacccatggatcccagattattatctataagaggaactgttaattataacctctattaaaatctcaatgccaaatactagctgtatttaagtcacatgcaacaaatgaaaatgaacacattaactcattgttataactttataaaatctccaaactggactagaaacagaggcatgtcaatacaaatggacagtgacttnnnnnnnnntacaccaatttaaataagtttgaatgcatactgtacacgtgtatccatgtctgttagcctttcagaaatataaaatcagttaaatctgtagtacttaaaattcaacatatgtaacgttattctcaaacttcattaaaataataaatatacaagttatgtttaatatgagtaactgcaacatacttaaacatctaaacatataataggaattctatattaaaatgcaatactttcacctgcattaatctcttacacaatgaaaaaatacttgcagataattagcattaagaatgcaaatatatttttactgtggaagaaaaattccagtaataagccaa

SEQ ID NO: 249668 - DNA, 816 bp, Homo Sapiens
ctaaagaaaactttgtacaaaaaagttggcaaacacacatggccggagaggtcagagtgcatcaacaagtttgcttcagtcttcgggaccatgcctctcaaggtggtggaacaccgagctgaccctgtcctgtacaaagatgactttcctgagaagctgaagagcttccccaacattggcagcttatgaaacgtgtcattggtggaggtctgaatgtgaggctgggacagagggagagaacaaggcctcccagcactctgatgtcagagtagtaggttaagggtggaaggttgacctacttggatcttggcatgcacccacctaacccactttctcaagaacaagaacctataatgaatatccaagcacctcgagctatgcaacctctgttcttgtatttcttatgatctctgatgggttcttctcgaaaatgccaagtggaagactttgtggcatgctccagatttaaatccagctgaggctccctttgttttcagttccatgtaacaatctggaaggaaacttcacggacaggaagactgctggagaagagaagcgtgttagcccatttgaggtctggggaatcatgtaaagggtacccagacctcacttttagttatttacatcaatgagttctttccagggaaccaaaccctgaattcggtgcaaaagccaatcatctttggtgggatttgataaatgcccttgggacctggagtgctgggcttgtgcacaggaataacaccctctttcttattcaggatcctgtcagttccatgagctattcctcttcgctttggctttctgatatgatta

SEQ ID NO: 249669 - DNA, 452 bp, Homo Sapiens
tcactgcactccaccagtttctgaactcttaaaaagcataagaatgagaaccaacaccttctgctagatgtcaccttgtctggatgtgatgcatggaactgtggtaaccatcttgcatctataatgtgtgctggccaaaagacaaggcagacatgttcaagctggcagagcagaagggcgaaaagaagaggggtcctgactgatgtcactaaaccacagatttaaaccaaccctagactgaggcgtcttgttacttgtaaggatatattttccttagtttgaattactttgaattggattttctattacttgaagtctacagcatcctaataatgcatacagtcatgtttgagatgcaaattagacaattaagtagagttgtccaatagccaactggatagaagcacctgatcaaaggaaaagtcaacactatagctacatatttaggccaa

SEQ ID NO: 249670 - DNA, 908 bp, Homo Sapiens
  misc_feature (217)..(261): n is a, c, g, or t
ttttctacttgtcatgcagaataacgcttacctgtttatatatttgttttcctttctaaactatggtctccttgaaatacaagtctatgtattacttatatttgtatcacctacacttagcatagacaatgacacataaaagtccagcatgcatgtcttttcaattgaatggaagtgagaatttattaatcacatattacgaatcaaaaaaatatgnnnnnnnnnnnnnnnnnnnnnnnnnnnnnnnnnnnnnnnnnnnnntagtaaaatggaaatttcgttaccattttaaaacgtaaaaaaaactgaggctgaaaaccatgcaaagtccattccataatcttctggatgaactaagtttccaacctgtgctcattaataagaatatgaattatagaaaactaatagctatatatctctcctttttataactatggcctacaaataaccattgtaattgataaagaccattctgaattctgtgagcatgcctagacttgttgattagccagaaaagagaacaatcattcatcagattttgtgacacaaaaagtctgatcattctaaactgcattggaggagctgtccctgagacattagagaaaataaatgtaagtatacaagctctatctgagaaatcaaaaagctagtcatgtcctttatctattggagaagagcagtagttaatcaatatgagctaggagctacaggatcaaggcttaccgataaaataatggtacccctggtagttgagttaagaataaaccatggggtagtaaaagataaggaagacatattcagataattataattataaatgacttttagcctcagcaaaattaattgagaatctcttgatagatggttaagactgagccctaaatgacattgactgtgagatatgccaa

SEQ ID NO: 249671 - DNA, 841 bp, Homo Sapiens
  misc_feature (318)..(342): n is a, c, g, or t
ttggcgcgggattctttttggatagggttgacgttcgtggatagactcatatctgtgaccagtgtccgcccccgcggatggcaagagacctgatcggaccggccctgccgcccggcttcaaggcccgcggaacagcggaggacgaagagcgggacccgagccctgttgcaggaccagctctgccccctaattataaaagcagtagttcagattcatcagacagcgatgaagacagtagttctttgtacgaagaaggaaatcaagaatctgaagaagatgacagtggtccatctgcaagaaaacagaggaaaaatcagnnnnnnnnnnnnnnnnnnnnnnnnnggttttttggaccagcccttcctcctggatttaaaaagcaggatgattctcctccaaggcccataataggtcctgcattgccacctggtttcattaaatctacacagaaaagtgacaagggcagagatgatccaggacaacaggaaacagacagcagtgaagatgaggatattattggaccaatgcctgcaaaaggaccagttaactataatgtaacgacagagtttgaaaaaagggcccagagaattgaaagaaaaactgaccaaaggagatgatgattcatctaaacccatttgtaagagagtcatggatgactgaacttcctccagaaatgaaagactttggtcttgggccaaggaacttttaagagaagagctgatgacacatctggagatcgatcaatctggacagatactcccagctgatagggaaagggaaagctaagggaacacaagaagcaaagaagtcatcctgtaagaaaagatgaagaacatatatt

SEQ ID NO: 249672 - DNA, 900 bp, Homo Sapiens
ttggatgctatgtgcccccaatataattttccatctcgggatgcctttattgagcccgatctcctctccttttgatgctctgcctacacatgtcatttcgattacactccaaaacgctgcctcttcagagctgttctgaaagtagcttaatgagaaatccacaagtactgaagacattatgaatgcattccaaattctctcatcatgttggttacctgaaaatctttatgttttgtgtgtgtgtgcttttttttccataatttgttatatttttctggtgtctgactggagaatttaccattatgtatttcctgttgtcagatggttatgcaggtctgaggaacactcagtgacctccacaatcatggtctataaaattcaagtgtctcaacaaagcatcttatttgaaacgttacctatttaattctaatattatcaaaggcagggactatattttgttcaaaatctgtggcaggtgtctgtgtggcacttgcttaaggggttgtccattctttattcagtaagtctgcatttattgtgtactgtatgcaagaggatgaacaatttatatagagtgattggaatttaaaaggaatatttggattaacccttctagaagtttataatcagctggaagtttacaatataatagtctcctatgagaccgttggaaacagtaaagtttgagacactcactggaattatcacatcatgacatccatatgacttgaatggctcactttagaatgagaagtaataaatcaatagcacaactattccgaagactaagtggtgggcactttattttattaaatattaggttagaatgacattttcctacttaagcaccttggcaatgcactggtatgcttaaatattgtatcgaggaaacactgatgg

SEQ ID NO: 249673 - DNA, 967 bp, Homo Sapiens
  misc_feature (478)..(490): n is a, c, g, or t
ttggcaaaactattgccgttttggttacattcattcttaatgttgattaggtgtgggatgctcttccgtgaaactttgtcctgttttgtaaggaaagtcattttgagtttgaaatgctcttaaactatagtttataattggaacacttaatcattctggggaattctttcctggctaataatctctcaagatggttgagaagtggaaaaaccataagacttaggcctaactcattattttgatggtggtggttcacgtggaagcctgtagcttcccttggttgtttgtgtggaatccatgtacattccccaaggtggttctgtgctgtctagttattgctcctgcttggtattgtgtgtctcctatgtgtgtgttattaataacattgattaaaacatataatggctttcttgtgaataagcacagtcaaatctaaaattgtaaaccatttgaagattttcatgggattaagcatttnnnnnnnnnnnnncagtgtaagtacacttcagtttcacatcgttttaactgagtttatgtgtgaaagatttatgctcctgaggcatgtggaacttttttatctttgggaaaccctcccaattaccccttcaaggtgaaacgtttgggaattacctgtggtcaggggatgcaccaaactgggtggctgttgggtgattggtgttacggagtcaaagctcaaaatactaaattttaagaaaaatctctgatttgagagaaaatacgaggcatcttcattttgcaagagaatgtatattacattgtcttttaacaataaagatgactttattttctgaagatattttccagtggggccgtttgagtaatgtgaattaaaatttttacttttggttggctaatggtgctgtcttaatgtttatatagtagtcccaatattcactctcttaaaagagttcggttttacgttttgtgctgttaccttttggaattt

SEQ ID NO: 249674 - DNA, 861 bp, Homo Sapiens
ccctataaaagccaactttgtacaaaaaagttggcgggaggcgccgaggccagcgatgggcgtgcagccccccaacttctcctgggtgcttccgggccggctggcgggactggcgctgccgcggctccccgcccactaccagttcctgttggacctgggcgtgcggcacctggtgtccctgacggagcgcgggccccctcacagcgacagctgccccggcctcaccctgcaccgcctgcgcatccccgacttctgcccgccggcccccgaccagatcgaccgcttcgtgcagatcgtggacgaggccaacgcacggggagaggtcagcgggcggggtcagcgcagggagggaggggcctggaaggtcagcgggggacacgggcggagctggggagaccgggcctgggataacttaactgggctcggggaggcagacagtagggccgggagactgggaagccagtgcgggggagggaagcgctaaacggaaggaactaaagagagggcgaagcagtgcgaactgggcttgaggagaggcagtgaaaaccagctaatactgtgagttgtgaaggagaagggtgtggacagacacctgggagaggtgggggttgaagtcaggtggaggctgtttaccattttctagagtaaagctgtccaaatataatggaacctaagtggctccatgtaatgttaatttttctagcaacggcattcttaaaaagcagggaagcagataaaattaactttggtgatcttaatgagatattttcattcttttttctactacctcttcataccctgttgcgtttttcacactacatctcaatttggactagccacatttcgagtacagtagccaca

SEQ ID NO: 249675 - DNA, 1063 bp, Homo Sapiens
  misc_feature (85)..(93): n is a, c, g, or t
  misc_feature (327)..(335): n is a, c, g, or t
ctaaaaaaaactttgtacaaaaaagttggaagacttcgaatttctgatttacgtttaaatatatttcaccaacattgtttaattnnnnnnnnntcccatctaagagaaggttcctataggaaattggccctttaactcatacacagattaccctcggcactttcagaaaacaacacagtgaccagtatattctgtctttttgatacagccagaagcaccctgaaagctgagacctaactgtgcttttggaaaataagcttttaggagttgaatgaccttgtctacttcttttagtcagaataatgttggcatgtctattttaggttnnnnnnnnntacaaattctataaagtgactttaaaggcccactttgaaagccttagcatttaaactaacattagatttaaaagaagggcttttctcccccattataggccagctgtgtaaaatcatgtgtgaggttgtgagggtcaaatggaagtctaagataaagttctgccaattactggtgtctttaagcttccaccagcagccaagcacagtgcagatcatgagtccttcaaaatacggggtggttttaatgctctaagttggtatgattactttttctaaagagctcaaagtgctttggtgccatagtatgaatttcattacccattgtgagacacaaagggggttagcaatgattctgtttgcaccctggaagccaaaggcaggttactcacccacttagttccctactacaagaccttgaaagaaactggaaccccaggtctcccagcccagagattttgttggaagtttccatttgcaggaaatgactgcagggcacatgtgggaagtgacaggaaatttgaggaactaacattttagttttcctcatttctttttaaatctgagcaattgttcattgatcgataatctatgttcttacattcagataaataaaaacaccaactggctattttgttcttacttaattttatgtgtatgtccaggcatttgccactgctcctaaatagctctccctgaagtcttctggtcatgagataggtttcttatcc

SEQ ID NO: 249676 - DNA, 784 bp, Homo Sapiens
  misc_feature (706)..(725): n is a, c, g, or t
gttttgtggtgggttgttgaaccaggaacgcactggcactggggctgagtcttttgggtatggtgaggagctctatccacaatcttgccagaggaccagatatgtgttgtggaaaaagcacatcagagagggatggaccccaacctctttgctgctgtggccctctaagctctgggtgaaggcaggttgacagcagggctttaacaagggcattatggtttctaatctttttgcatgatccctggctcgagttaattcttcaagatgactttgtctttttaactcttacagatcaaactctgatccttttggttagaagatgaaagcattccaaagaaaccaagctgtaaggatcttcagatgcactcattttctcccttcgtagttgaaacaccgccgaacctcattgttgaatctaggatgccagtgtaaaatacacaggttcaaagttaaagggtgccacttttaaaaataagaactggcaaatgagttttatttccaactcagataaattggtagtaacggcctgagtgctttggggaggggaattctgcacctggggaagggtatggcccattaattatggctgccaaggtgtgaggccaaggacataacgggacctggaatattagataaggtgggacagcctatagctaataaaaaggggcaagataaattaaaagtttggaagagaagaccggaactnnnnnnnnnnnnnnnnnnnncccaactttttggggcaaagttgtgcgccaacttttttgtacaaagtccctttaatatg

SEQ ID NO: 249677 - DNA, 969 bp, Homo Sapiens
  misc_feature (202)..(210): n is a, c, g, or t
aactttaaaaagccaactttgtacaaaaaagttggctccgaagacgctggagcagctgcggcggctgatttgtcaaagatgaaagtgaccttatcagctttggatacttctgagagttctttcacacctttggtggtcatagaacttgctcaggatgtcaaagaagaaaccaaagaatggctgaaaaacagaattatagctnnnnnnnnngatggaggtgcccagttgttgtttagaccattgttaaataaatatgaacaagaaacactagaaaatcagaacttatatcttgttggtgcctccaagattagaatgttactaggggcagaagcagtgggattggtaaaagagtgcaatgataacaccatgagagccttcacatacagaaccagacagaacttcaaaggttttgatgataacaatgatgatttcctgacaatggcagaatgtcaattcattatcaaacatgaacttgaaaatcttagagctaaagatgaaaaaatgatccctggttaccctcaggcaaagttgtatccaggaaaatcattgttgagaagattgctcacgtctggcatcgtgattcaggtgtttccactgcatgacagtgaagccctgaagaagcttgaggacacctggtacactcggtttgctttgaagtatcagcccatagacagtattcgtggctactttggggaaacaattgctctgtactttggatttttggagtatttcacttttgcattaatccccatggctgtcattgggttaccttactacttgtttgtgtgggaagactatgacaagtacgtgatctttgcctcgttcaacctcatctggtccacggtgattctggaactgtggaagcgtggctgtgccaacatgacctacaggtgggggacactgctcatgaagagaaagtttgaggagccccggccaggatttcatggtgtcttgggtatcaatttcatc

SEQ ID NO: 249678 - DNA, 1010 bp, Homo Sapiens
  misc_feature (128)..(209): n is a, c, g, or t
  misc_feature (408)..(440): n is a, c, g, or t
  misc_feature (555)..(567): n is a, c, g, or t
ttggctttctttaacatatcattcagaatgtgcaaagcagtatgtacaggctgagacacagcccagagactgaacggcaatctttccacactgtggaacaatgcatttgtgcctaaacttcttttggnnnnnnnnnnnnnnnnnnnnnnnnnnnnnnnnnnnnnnnnnnnnnnnnnnnnnnnnnnnnnnnnnnnnnnnnnnnnnnnnnngtgtacttctgaagaaaactacatgaacgtttttgttggtattcaagtcagctagtgtttataattactggatattgaattaggggaagctcggctgccctagtaacaaaaccagcaaacgtcctgatgacaacgaagtgatgacattagccattccttagggtaggaggaacagatggatcttatagacctatgacannnnnnnnnnnnnnnnnnnnnnnnnnnnnnnnntaaaaatttagtgactatggtaagcttttgttcatttgtttcagacttttttctcctgtaaaaaaatagtactgattaacttttttaaaagaaagattttactgtaaatatggannnnnnnnnnnnnggtcttatttctgtccctttccctggtttgttatcgtaacctgtagtgccaactctgcttccagaggggtagtgcaggatgaaatgctgaccctgatgttgcttctcattcataaataagtagaaagttgtttctccagtcttttgggaacacaggacttaaaagtcacatcatgtgtagatattacaagcagcattaccaagacatggcaaaaagagtttgtctgaattgtaatgttgcgtttgtgaacctattctgggattttcagaggtacaaggttagaatgctacaatgttaccactgtgccttccaatgtttatatcatcggaaacataacataatcaaagtggctgtgatttaacaaaatgattaaagtgttacctacctgtgtagccgaagtagtgtgcagtgaggcgtttctgaatacatggtcagatttttgg

SEQ ID NO: 249679 - DNA, 976 bp, Homo Sapiens
aaaaccaactttgtacaaaaaagttgggtattgggagactttgatgcccagtgcccgcgttggactacagttgttcctttaccattcttagcagtacctcatatgacttgcggtatggaaggcttttcaaagtcatatgtgtcccactgggattagtgcaactgcttaagccctggctgtccccatcttttctctgcttgttcacatggttaattatggattcatcaaatgttagagctgggaaaaagatcttggagatcatctggtgctattgtctcattttcagtccagagaaacaacgcttttccagccaagtgtaaccccagtcgttagtgcaagggcttagtctagactttgattcgttctgtaactacattaagggggatgagaagagagctcacgttcactctgcacaaggacaaataaaaaaaggccctgccatcccttgaggaactcacagtacagcgaagtgacagtccggtgagcagataattatctttaattcttagcccattgcttgctcccctgtactggtatgcctttggtatatactgtttcagcttcttatccatccacatggttgtaaagtggggagcttttgtttttgatgcctgtctctccatgtatccattcatttatttttctatctataagtcattcatcaaaaaccacttaggaatgcctgagctatgctgcacaacagagtcacttaaatgctacataccagtggagaaaaatcatggttcttgccttccagtaatttatagtctagttgaaggatacaagcatataaagaacaaggtacaaacatgtgttaaaggaactgtaatataaacatgacaaggtacatggcagacacagtttcatcctgcctaaatcctcctgagttgttcataggtatttcatgtgttagttattcgaaggaactttacaatgcacctccttctttggggcatttacattttaagtaggttgg

SEQ ID NO: 249680 - DNA, 510 bp, Homo Sapiens
tacctgggtgaaatggatcacttatatctattcggggtatgcaagatcagaactgactatgggtacctcagcgtgtgaatgtgactgaggtgtggggccacatgtatctcagggtatggctctgcctgagggcaccgagctgtgggtgtctgacatgcagcatctcccagagtccttttgacatggtctgcctaaggttgtgcctgggtgaagttggcaggttacctgtgaccaggagacctgcctgaagggaaccgcctaggactatctaactatgcatctgtgtggatctgcccagggctatgtcagggtcctgtttctttctgagtgtatctgaccagttagtctcagtataaaatttgagcagatatcactgaaggtatgtgacttattctatgtgactaggtgtatttcagtgtgtgcaacagacctggggcctctgaccagctgtaactcactaggtcttcctaacaacgggttaagttgctatgtgacccaacttttttgtac

SEQ ID NO: 249681 - DNA, 982 bp, Homo Sapiens
  misc_feature (346)..(356): n is a, c, g, or t
gggaataaatgggcatagcttagaaacccttacaaagtttaagtagactagaggtaagattatttgtgacaagatacaaagatctgtttctatgtcccaaaatattggcttacctcattttagttaatagaagtattcccaaaaagttgtgcaaatagggctttttataactggacgcttattttaagtatactagaggccatggttgtaaagaaacccctgtagtcactcctctaataaactgaagaactctaagtgattagcccctgtcttacatctgcacagtggacggcatactccaggcactcataagtgtttgttgaatgcatgaattcgctctgacagnnnnnnnnnnncccctacaggactttcttaaagtgaggcacatgctaactgaaatggttctgcccgctgttactgcagaaagatggaatccagctcacagtttaactgatgccattacaaaatatcagataatttcagagtgttttcaatcaaaataaaatttccataagtatgagtgtatgtatttttgaggaatgttgatctatgattggcagaagcttttattgttaactcactcactgaaaacaactgcttgagctgaattctatttcaattaacaaccaaggcaagtaaagcactttacctaacttcagaaataccaccagaaaccattccacttctgtaacagcttcttcccctcactccagcacaaatatttaaatgctgtccttaccttagtccacaaaagcaaaacatgaattacaaagctaagattaaattagaaagctgccgacttaaatatgacaaagtttttttagccttaaaataagaactaagtcaaatacattcaacaaaagtaactcttaaaggcaaatttttttcttatttggtgttttcttcccttcccatttaaatttaagactcaatttttaataatattcaccaacttttttgtacaaagttggcttttataagt

SEQ ID NO: 249682 - DNA, 1417 bp, Homo Sapiens
  misc_feature (420)..(466): n is a, c, g, or t
aaattgatagagcaatgctttttcataataagcaaactttgtacaaaaaagttggcaccaaataattctagctttggtgtggacacgtgtagcaagatgaaatcatttgtactttgcagaatgatattttataaaaatcagctgctttgcatccctgtgaggtataagtgtgacattcatgacctaagtatagggccgaacttagagagtccacaggagtcaaactgttgcactagccacaggcatcccagatttgcttgaaccaatccaaatgtaccacagaaggtttcacaagcaggcagattttgatacaaatcaacaaatctgccttcttggatttttagacaaaggccatagatatatgcctaaaatgttaaagtcagcatggagaaatctttttaagtattaactaataactcnnnnnnnnnnnnnnnnnnnnnnnnnnnnnnnnnnnnnnnnnnnnnnnctggctagctcatcagagttgtaacaagctcaattaaagtgcaaggaatcctgtcttatgcctgtgtcatactcttctattttgggttgatatccctgaaagtacttaatagcatcgtgctgttggggaaatcgtgccagtatgtgaaggaagccaaaatggaagagaagctgtcgaatcctcccgcaacctgcactccaggcaagccgtccagtaaatcacagaacaaatgtaaaccctctcaaggcctttccacagaagaaaacctgtctgcctccatcaccaaacaacctattcatcaaaaggaaaatatcataccattacttgtgacaagcaattctgatcagtttttgacaactccagatggtgacgagaaggacataacgcaggacaattctgaattaaaacacagatcctcaaagaaagatttgttagagatagacaggttcacaatttgtggaaaccgaattgactgaatctgtggcttcatgcgctgaagaagctgggtcctggggcaacaagtgctgtgttgccaggacaaatagatgctaaacatggcacttaaatatttatttaaaaacttaaattattattggcaagcaaatcttagtatctttcttccagtaatatggcctggctgagggtcagaccacaggacaggagcgacctccggccttgactgtctgggaagcttgatggattataaaacttcctcctgcctggccaagcagcagcatcatttccaggacccaacaaagcaacatcaaaatctgttttgctttgtcagtctgggcttccagaatgttgaatttgcctcaaggcctcttcagtataaagaaatacctggaaaactgtgaaacttttaccacgacgtaatctttccagtctcatactattttcacaaacagttttcaaacgttacttcatctgccaaagcattaaaaaattaaa

SEQ ID NO: 249683 - DNA, 967 bp, Homo Sapiens
  misc_feature (277)..(288): n is a, c, g, or t
ctaaaagcaaactttgtacaaaaaagttgggtgtccatcattacaatatcattcagaatatttttactaccctgaaaatcctctgtactttgcctatttatttttcccttcctaactcctgacaatcactgaatgttttactgtctctatggttttgtcttttccagaatatcatatagttgaaatcatatagtatgtagcctcttcagattggcttctttcacttaattatatgcatgtaagttttctccatgtatttgcatggcttgttagctcnnnnnnnnnnnncaatcaaaatcacagcctcagctcatttattttttctactgaacaatattctgttttctaaatgcatcacaatttatttattcattcacctactgaaggacttcttgcttgcttcaaagctttggaaattataaataaaactgctttcaatatcagtgtacatgtttttgtatggactgttttcaatgcctttggatatatattaaggtacattattgctggatcgtatggtaaggacatgcttcattttttcagaaactgccaaattgtcttccaaagtggctgtaccattttgcatttttgccagcaatgaatgaaagtttctggtgctccacatcctctccagcatttggtgtagccagtcttttgaatatcgactattctaataaatgtgtagtggcatcttgttttattagcatttccttgattacctatgatgtgaaacatctttctatataattatttgccatctgtaaatagtttttctctgatttcataaatatttaagacttcttaaaactttaaaaaatttttaattttgatgggtacataatagttgtacatatttattgagtacatgtgatatttttgatacatgcatagattgtgttgtgatcaatctggatattgggattatctatcacctcaagcattatcattctttctggggtataattct

SEQ ID NO: 249684 - DNA, 941 bp, Homo Sapiens
  misc_feature (497)..(553): n is a, c, g, or t
ttggagctcacttggctgtgcctcgggagaggtccagaatggctttcttggacttgaacgagctcagaagcattggcactttctcgtttacactggccttgattttgggtagagactgagcaggccgaagtcccctctctgaagccatcatgggatgatggtaaaaggcatctgcaatgttccagctctagcagggtcacaactgcactgagatgaacacaagggggcagcctttcccacagattttcatcaaatcacagagaaacagagtgcaatttcaatgtcagcgcatgcatgagcctgtgctctgtccacaccagtgcccatgtgtaaaacgtgtagcctgtaactgtttataaagggccttagggttaacggcatatgaatgctcagtagattttgtgctttactgtgctacagtttcgttaacacaacccaggacttctcattgtaggttatagactatatccccctgcctagcccagagtcttacacannnnnnnnnnnnnnnnnnnnnnnnnnnnnnnnnnnnnnnnnnnnnnnnnnnnnnnnnctttttattactggaggcttagagatgactgaatcattaatatagaggagttgaaattgatttagcctgctgtttcaacctgaagaatgacttcaaagcaggcatttaaatttattttggccctttttttcattctcttgcccctcctacccctcttccaactactaaaggcattgtttcaactgtatatattttctctatttttgttttctcttcatcttgggaaattgagttatgacacctttggttgtttctagttggaaaaaagcattattatgaaaatatatgctgtttagtgagcaatgaagcagaatataaaatatcactaatatcctgaacccccatgcaattagaagcacattgtcactagttttgttttatgtttccc

SEQ ID NO: 249685 - DNA, 1013 bp, Homo Sapiens
ttgggttgcgtttccacgtctcggaggcctgcgcgctgggttgctccttcttcgggagcgagctgttctcagcgatcccactctcagccggggctccccacacacactgggctgcgtgcgtgtggagtgggacccgcgcacacgcgtgtctctggacagctacggcgccgaaagaactaaaattccagatggcaaactcaatgaatggcagaaaccctggtggtcgaggaggaaatccccgaaaaggtcgaattttgggtattattgatgctattcaggatgcagttggaccccctaagcaagctgccgcagatcgcaggaccgtggagaagacttggaagctcatggacaaagtggtaagactgtgccaaaatcccaaacttcagttgaaaaatagcccaccatatatacttgatattttgcctgatacatatcagcatttacgacttatattgagtaaatatgatgacaaccagaaacttgcccaactcagtgagaatgagtactttaaaatctacattgatagccttatgaaaaagtcaaaacgggcaataagactctttaaagaaggcaaggagagaatgtatgaagaacagtcacaggacagacgaaatctcacaaaactgtcccttatcttcagtcacatgctggcagaaatcaaagcaatctttcccaatggtcaattccagggagataactttcgtatcacaaaagcagatgctgctgaattctggagaaagttttttggagacaaaactatcgtaccatggaaagtattcagacagtgccttcatgaggtccaccagattagctctggcctggaagcaatggctctaaaatcaacaattgatttaacttgcaatgattacatttcagtttttgaatttgatatttttaccaggctgtttcagccttggggctctattttgcggaattggaatttcttagctgtgacacatccaggttacatggcatttctcacatatgatgaagttaaagcacgactacagaaa

SEQ ID NO: 249686 - DNA, 1161 bp, Homo Sapiens
caacggatagattttgatgtaaaaaagaccgaaattatcaaggtatcttagttgaaggacttgggaaatactatcaaaattaatttcttaggaaaaaatttaaaagtatatttaagtactctggatagactgaaacgtttccatgttatttctgcagttgtagacttaggcttatttgtaaagaagcatgctccattgactgccatctctagtcttgcagtgggtggtattaacccatagaaagcaagcagttgtgtatcacatagacaatggttatgatgtaaacagattcagttgttttgttgttcattcgtcatatgtttgtgatagggatgttgggagcacagctctattctgcctgctcagacttaagttagacccttatcttttatattatgtcatgaaaaaagtctcctaaaattgtgaaactagttcttgatgagtgatgtgatcatcagcaataaagatataataactctgttttcttagcctgtatagaggagaggaacttgcttggctttaaaatatatttatttgccatttaagtataaatatgaaatctgtttcttattgggaagatagaatatatatattttcctttaaactttttaaggtcacttttaaataaccaaatttgatttatggtttttaacaaaggactaaagagctgaaaccaacctagttttgtttttgtgatataaactttaagtgtcgagggaccatgccagcaactaccaaaaatctcttaaatcttcaggtacagctggcattttggcagatgcatagagacatctgagaccctcagaaaggaaggataatccaagaatataggaaatctgtgttctcttcctttcattttatcccttatatttctaaagactaattataagtaatctgacattttaatgtagctactcttatttattttttctttctgaggtattaaaatatctggactgagttttgccaaatgttaaagggagaagagttactgaagactttgaacacttgctttttgtgattgcttatgtcattagtgcctcatgactgtgtttgatgtcccttattgatacaaagtgagcctgtgccttcattatcttgcccatttttatacaaatggaaacctggtggtttgaaaatctctgaactgtgtgggtttgg

SEQ ID NO: 249687 - DNA, 1139 bp, Homo Sapiens
aaaaatttttattctttgtgtatctgatttccgaaacacagaaatctctctcccactcgttaaacctgccactgggctaagagagtattgtacagaatatgcactcactgacttaacagaattagaacatccaggcactcactgagattttgcttccacaaccgctcaaagtctagtcattagttcatgagttaacaccacacttgaccttcaaattttggaaatgctgacggtagacagggacttgttttgggaaaggaagtacacagtagacattgttacccattatccaaccaccaccacctttcctttaaagtaccccactcttcctttaaggttgcagagtctcagaaagtgggaagaaaggaagtttttgcattttcaggtcaaaacgacagtacatttgtgcaaccgcataatgcctatgcaaatgtttgttgaaatctaaacagaagacagaagtagttctagtaccttcactacataagtaaggtaagtaaacttttccttaatatacactttcagcagcattgacacctaaaagtggttgactttactactgtactaaattaaattacattcattttgtcaatatgtgttccaaattcttactgctctttgtctccaaggggttcctgctgaatattgagacagttgaagattactaggggaaaaaattcttaataattgaagtaagggtcatctaaggataatatgccacatatacagacacagtcatattttcagctttacaaaagttcagttgtcaaagttgtacagcaaacactatcctaagcttggcgtcttcaggcatttgctttataatcactttaaagaaaagtcagttacaaaatgccacattttgtatgattctatttatatgaaatgtccaggataggcaaatctacagagacagaaattagatcagaggtcgccaggatcaacggtgggggagacgagtatacagagtgactgctaatgggcatggggtttctttctggggagaagaaaaggttctgaaattaggtagtggtaatggctgcataactctgaatatactaaaaaccaccaaactgtacacttcaaagagtgagacttatcatataaaagccaacttttttgtacaaagttggctatta

SEQ ID NO: 249688 - DNA, 737 bp, Homo Sapiens
gggctcccctactccacagcctccacgaggggcggaggtctggaaacgtgggcgggggtgggcccgcggtgagaaaggtggaagaatgtctgcaactcaggcggaaaataaacaaaccgcactccgggcgacgggcagtggctggatgcacgtttttcctgcaccgacctggcagagcctgagacagggcctctgcatctccagcggggaaactgaggccccaagaggcccaacccctcatccagaacagctcacctcctgtcctatcctgttgcctccaggcccaagccccatcccttcccctactccgggcctcagtttcctctccaggcaaggaggaatctggactgtgcctgtgcctttgctgtgtcccctaccaccacgcgttcccgttgcccgctctctcccggaagcagaggacggtgctggtcgtgtgtggcccggagcagaacggggcagtggggctggtctgtgcccggcacctgcgggtgtttgagtatgaacccagcatcttctactccacacgctcgctggacctgctgcatcgggacctgaccacccagtgcgagaagatggacatccccttcctgagctacctgcccactgaggtgcagctcattaacgaagcctatgggctggtggtggatgccgtactgggccccggcgtggatccgggcgaggtcgggggcccctgcacccgcgcgctggccacgctcaagctgctgtccttccccctc

SEQ ID NO: 249689 - DNA, 1082 bp, Homo Sapiens
cacgggcggctgctggcggtgacccatgggctgagggcatacgatggcttgtctctgcctgaggacatagagaccgtcacagcaagccaaatgcgctggacacattcgtacctttctgatgatgaggacatgctggctgacagcatctcaggagacgacctgggcagtggggacctgggcagcggggacttccagatggtttatttccgagccctggtgaatttcactcgctccatcgagtacagccctcaggtgactccggcagactcgggcgagtacgtgtgtcacgtcagtaacggtgcaggctcccgggagacctcgctcatcgtcaccatccagggcagcggttcctcccacgtgcccagcgtctccccaccgatcaggatcgagtcgtcttcccccacggtggtggaagggcagaccttggatctgaactgcgtggtcgccaggcagccccaggctatcatcacatggtacaagcgtgggggcagccttccctcccgacaccagacccatggctcccacctgcggttgcaccaaatgtctgtggctgactcgggcgagtatgtgtgccgggccaacaacaacatcgatgccctggaggcctccatcgtcatctccgtctcccctagcgccggcagcccctccgcccctggcagctccatgcccatcagaattgagtcatcctcctcgcacgtggcggaaggggagaccctggatctgaactgcgtggtgcccgggcagtcccatgcccaggtcacttggcacaagcgtgggggcagcctccctgtccggcaccagacccacggctccctgctgagactctaccaagcgtcccccgccgactcgggcgagtacgtgtgccgagtgttgggcagctccgtgcctctagaggcctctgtcctggtcaccattgagcctgcgggctcagtgcctgcacttggggtcacccccacggtccggatcgagtcatcgtcttcgcaagtggccgaggggcagaccctgggacctgaactgcctcgttgctggtcaggcccatgcccaggtcacgtggcacaaagcgcgggggcagcctcccggcc

SEQ ID NO: 249690 - DNA, 834 bp, Homo Sapiens
  misc_feature (657)..(680): n is a, c, g, or t
tgtatttttccatattgctttcaaagaagtcattgagaaaaaaggtaaagtgctcattatttgaagcacttgtttgtttggagcgagaaaagaaaaaggggggtggtatggactagtagaaaaaaaggtgttttatattttattagattcattcctgccagattggacttatgacatcgacccattaaaatgtattagacatacacctagaagcattatttaacaatgtttaaatgttttattacctgaaaataatgggattctgtactgtattggtggttggataggctcaaacccccctccaatagcttaattagaagcttctctaaaatgcatgatcatatgattcctgttttgggaaggtgttgggtagagtccctccccagcttgagggaagctaaatgaagttgggaatactgtggacgttaaagagccatgtattgacaaagttgacatggggttggccaaaatggatcagtgatctctaaattccagcgtgctccatgaagaagttttcatgggtccttaataaaatggggaggagtgggaagtagtataatgtagtgaatttttcacaaaggtaaatgtattcaattaaaagaattttcttttatggattgtatgttgtttcttttacgaagtgatgatattgatacnnnnnnnnnnnnnnnnnnnnnnnnaatgtcttcatctgacaaaagtaagcaaccttgtcaggttctacttattttatttaattggcttgagaagtccagtagttgggaggtactgttagattaggctggttatttgtgaaccaacttttttgtacaaagttggctattataggaaaag

SEQ ID NO: 249691 - DNA, 909 bp, Homo Sapiens
  misc_feature (494)..(507): n is a, c, g, or t
agcaatgcttttttctaataaaccaactttgtacaaaaaagttggatgagtgccttcactgagactggcccctgccacccagtggccaggatgacaagcaaggtaagctgtcatcagttggaggtaagcggaagacagtagagagtacagagccctggactgtgactcagaggatgagcaccagatccagtttgctgtgccacagtgtggatttttatctgagatctacaacttatgaagaatacaaatgatgtatattcttttctactcttcatgtatggactagaggggcttgcacagtagatgctaacggtagcatatgagtcacagacagaacattggcacctttgtttaagaaactgaatgttaatgtcacatctgcctttggagattacaaatgaaatggctacctttctactggaaccctgaccagaagtctgccagttagtaagctggcttaagagatcaatctaaaatttacataaggcttttgnnnnnnnnnnnnnngcagaagaaatgaagatagcaaacaacacagtagtgacagaatttatcctccttggtctgactcagtctcaagatattcagctcttggtctttgtgctgatcttaattttctaccttatcatcctccctggaaattttctcattattttcaccataaggtcagaccctgggctcacagcccccctctatttctttctgggcaacttggccttcctggatgcatcctactccttcattgtggctcccaggatgttggtggacttcttctctgagaagaaagtaatctcctacagaggctgcatcactcagctctttttcttgcacttccttggaggaggggagggattactccttgttctgatggactttgaccgctacatcgccatctgccggcctctgcac

SEQ ID NO: 249692 - DNA, 914 bp, Homo Sapiens
  misc_feature (227)..(235): n is a, c, g, or t
ttggtgtttattgagtacttctatatgccaggtatttggtacattatttacatgcattatatcaattctcacaataattctgtgaggtaagtactagtatctcgtttttcagttgcaggacttgagccttagagagcttaagtaatttgttgatgatcataaactgaagatgctgagtttgaacccaggtcgagctggaagtcctaaacgtgtaattttatggcttnnnnnnnnntaggcctacatactgtttttctacaaaatgtaattgagtattaattcaatttaaagctgaataagataattgattacaatgggtctttagttaacatgaccttgtttaaaaagtagcgtctttagatatcactttgttcagttttttaaattttacaaatgagagaaccaaatcccagagaggtgtcacgtcctaaggttatgcaattagtgaaagaaactggacagttctgcagggccaaggaggaaaaaataaacttttatttcttctcttgactctggattatatgggcaactttgagcctctcttcacacatccgatgatgttctaatatctgcaagctgcaaaaacttttattctgaataaacaatgtgagtgctgaaataattgaaaccagtttttttaagtccattacatactgatgaattaaaaatttcagttttatcttgttaatacagcatcatgtgaaataatttttgtgcattgttagagaaagtatagatttgatgggcatgtaaagagttttgtagatatttagtagttttttagcaatgtccccccatcccgctacataatggattttgttggctattcaaagaagggtgaatattttgtactttttcttttcagatttcactggtggggaataagtgtgatctgtctctctcaggtggagaaa

SEQ ID NO: 249693 - DNA, 952 bp, Homo Sapiens
  misc_feature (60)..(72): n is a, c, g, or t
ttggacttctttctctttcatgtgtgctacttcatcaattttttaaaagaaattctagtnnnnnnnnnnnnntacctcatgacgattttctttttaaaatcatttgcttactaactaaatcaaatgttctatcccatttaaaacaaacaaaaaaaccatctttagatcagctttctctctccaactactgcccatctttctgctgtcctttatagcaaaactcttcaagaggcgtctgcacttgctgtctccactctcacttctctcccattctctttttcattcaagtatgtattcccaatactcaaactaaaccacttttgttaataatctataataataatattgtagtgcctactatgtagctgacagcgttctaagccttttacctttattaaatcctcacaacaatcttaggaagtaggtgctgttatcatgtcttttactgatgacactgaagcataggttaagtaactcatccaaggtcattacagctagcaagtggtagagccatgatttgaatctagacagtctcccagagcctgtgcttttagatcgtactgcccattttgctaaatccccttgtcagttctctgtacttatttaccttactttacttcccagcaaagcactttcttcacttgacttctcagaaactacagtctcctgtctcactagctattccttgtccactcctttactggttcttcctcctccccccaaacttttaagtgttagagtgttccaggatttaatcttctgccctcttgtctcctctagttgtattattcctaaacctattatgtgaaatactgtctttatgctatctcccagccataaactttcccttgaactgcagactctcgtccacctctctactgaattctcccatatctaatgattagctctaacctaacagaacagccctgcatctctgatcttaataaatggt

SEQ ID NO: 249694 - DNA, 895 bp, Homo Sapiens
  misc_feature (361)..(369): n is a, c, g, or t
ttggaaacaagagaaatatcctctggctcttttccacccacagctgtgcctgctcaacagattttagtctttcctgagcagacaaacaccaaagactggacagtggcacctgagctcctcttgcctcagtcccagttgagctgtgctttccagcagtgtagggctacctgagcatgaccttatctgcctttccctgctgcccaagacccacactgcccagcatgtgccctgaggcatgttagccccagaggttctaccctggacaattaggcttggcccagagggaactgggtacctcctaggctgtttgctgatcccttggctccttttcttctgccttcgcccccgtgggcccccgccnnnnnnnnncttaaatcgtattctgttaatttctttagcacctggcctaccatgcagttcatacgcagttaggctgcttctgcagtggcaagttcagagctgaagtccattctcttctttagagcttgttgacatttgaagaagtggccatatatttttctcaggaagaattggagttactggattacactcagaaggccctctacaatgatgtaatgcaggaaaactgtaagactgtcatttgtctaggtaaagattctcccttctttttgtgtagaagttgagcaatctgttctcagtttactgagaatgaacctctgtgagagggtctcagtgttccaggagctggttgattctcaactagatagtgtagcggagggtgtaggtggtgtatccagatcacctggggagcttttccagatgtacgtgctcattccttgtcctacgtggagatcttgatcccttccctttccctttccccaaaccttctccatcatgtttttcccatctcagtaaagggcatcagcattatcca

SEQ ID NO: 249695 - DNA, 881 bp, Homo Sapiens
  misc_feature (717)..(739): n is a, c, g, or t
cccaagctccatttgcataaactgttctctgatgagatttagggcgcttaacggtgggtatggctgtagactaactgttctcaggaaacagacccatgacccacccagttgccaagtcagaaacaggatgtatactcttgactttgtctctctcctctacacagcaaaacaatcccaagacatgtcaattctatctcctgagcaacccataaaacgatttctcttctttccatcttccattaccctaattctggtgttcattctctctccctgggatggctgtaaaagcctctgatttctcccctttccaaaccagtctccacactgcaaccatagtgatctaaggcacaattctcaccttttcagtcttaggcttaaagttcaacatccctctggatacagtctaaatctttaacacggctgaaaaggcccagcaagagctggaccaagcccacctctccagcttcacctttcctcatttctcctttgcaccctctgcctctgaacaagttacagtcttccaaagttgtcatgtttcttgacctttgctgtctcctctgcccagaatgcaatttccctgtctggctaactcctgtccagcatttggcctcagcatggacatctgttcctctaggacgcttcccctgattcaccaagaccagcttaactgcccctactggctgttcctatagcaattctttaccacagactactgannnnnnnnnnnnnnnnnnnnnnngcagtctgacataactttatactaatgcagcttctagccctgtcccccactccttcctgatcagtatcccaatgtccctcctatatggagccaccactaccccacaggatcctgtaccacccttctcccagaacttatccaa

SEQ ID NO: 249696 - DNA, 925 bp, Homo Sapiens
  misc_feature (529)..(592): n is a, c, g, or t
  misc_feature (674)..(745): n is a, c, g, or t
gggttggtcacttgccagaggtcccagtcagtggggctgagctgaggctgaccaggcttcctggatttcttctcaagctcctgtgggcacttcaggacctgtccattccacaaacatctgctgggcaacatccctttgttcactccagatgccaggccagtgtggttcctgttctgggtacctggaaggaagacaggccccaaaccagaccccctcccatgtgaaggcccactcagataactcagcctgggtctaggaaggcttcctggagtaggtggagtccagatgagtctggccggaggaggaagagttggcctggcattaaggaggcttgtgcttgagtttcacagagcattgggagcaagcatggccacccccaggtggtcgcagtctggtggggaagcggggctagaagggctgtgcacaggaaaaaacacatagccagtatgacccaattaccttccttggaaagtgatcccccttccaagaaacttggaggccctgggggactcaagcccactccaaatcnnnnnnnnnnnnnnnnnnnnnnnnnnnnnnnnnnnnnnnnnnnnnnnnnnnnnnnnnnnnnnnngttgctctacctgctcatggcaggtaccaaaaaacagatgcagagctgagagggcctttgtgcatgtcccaaatgtaaacannnnnnnnnnnnnnnnnnnnnnnnnnnnnnnnnnnnnnnnnnnnnnnnnnnnnnnnnnnnnnnnnnnnnnnngcttacactcagctcctccttcctctctcctctagtcttctttgccccctcatccttcaactaccaccccaaggagcttggccctcactgtgcttcctacagatttcctgggtgcttgctcaagtccatgtcaatcttgagaactcggggatgaatgcccataatggtaataatggccaa

SEQ ID NO: 249697 - DNA, 951 bp, Homo Sapiens
  misc_feature (492)..(538): n is a, c, g, or t
cccaaatggaagtaaatgtatcagatgttgagtctttgccctctccaccttgaacaccccatccacacaacacaacatgacaggctttggaatgaaaccagcagtgtacactcagccaaagtgactgatgttgctttccgggtatttgtagctgaaggtatgcctactccttttcccatacaaacagaggaactcagctggcatcaagactcagcctcaaagcatcccagccaagcagaaggcctacctggctgctgcacacgccctgcaaaatggcacacaggtgctatcatccagctagcagcttcagccgtgtaaccaactccagagtgttgacagctgcagtaaaactcacttggagttcaacataattaagcaaaatgattagtaccgaagagaagctggcaacaaagaactttggtttctgaggcaaaattataggatcccaggatattagagctggaaggaggtcttacagatcacagccagccnnnnnnnnnnnnnnnnnnnnnnnnnnnnnnnnnnnnnnnnnnnnnnnagggctgaggatgacagaagaagctacacagtatcagggtaagagtgaggactctgagatcggtcacactggggtttgcaacccaagtttggaactcactgacttcaggacagcaccttggtctctctaagcctcagtttcctttctgaagtttgtgttgctatgaggattaattgaaggttattgcagggcctgttgcccatggccagtatataacgttactatggagagtcagaacacggggtccatggccttgcttcaccatgtatgagctgtgtttccctgggtctcagttcttgtacttatgaaatggaaataaagatgctagtacctgccctaattatttgccaggataggtggaagggttgtgggtgagagttgtgtacacttgtaagcaagtttttgttatccaa

SEQ ID NO: 249698 - DNA, 1805 bp, Homo Sapiens
cggagccggaagtgaggcaccctcgggctcgagacagcggcgacgtttaaagctgagcgacccagtgccactggagacggtcagcttctccactcaggctcctccagcccgagccagaagaccccctcccccagaattctgggggccgatggaagggagccgagtcagatcgcgaggtacccagagccgacagaccggagcgacagggagttgccagaagccccgcccctaggagtgatcggaaagcctcacccatccgggtgaggaacccggaggaccgcctccgggcgagccccgaccatggctacgcccctggtggcgggtcccgcagctctacgcttcgccgccgcggctagctggcaggttgtgcgcggacgctgcgtggaacattttccgcgagtactggagtttctgcgatctctgcgcgctgttgcccctggcttggttcgctaccggcaccacgaacgcctttgtatgggcctaaaggccaaggtggtggtggagctgatcctgcagggccggccttgggcccaagtcctgaaagccctgaatcaccattttccagaatctggacctatagtgcgggatcccaaggctacaaagcaggatctgaggaagattttggaggcacaggaaactttttaccagcaggtgaagcagctgtcagaggctcctgtggatttggcctcgaagctgcaggaacttgaacaagagtatggggaaccctttctggctgccatggaaaagctgctttttgagtacttgtgtcagctggagaaagcactgcctacaccgcaggcacagcagcttcaggatgtgctgagttggatgcagcctggagtctctatcacctcttctcttgcctggagacaatatggtgtggacatggggtggctgcttccagagtgctctgttactgactcagtgaacctggctgagcccatggaacagaatcctcctcagcaacaaagactagcactccacaatcccctgccaaaagccaagcctggcacacatcttcctcagggaccatcttcaaggacgcacccagaacctctagctggccgacacttcaatctggcccctctaggccgacgaagagttcagtcccaatgggcctccactaggggaggccataaggagcgccccacagtcatgctgtttccctttaggaatctcggctcaccaacccaggtcatatctaagcctgagagcaaggaagaacatgcgatatacacagcagacctagccatgggcacaagagcagcctccactgggaagtctaagagtccatgccagaccctggggggaagggctctgaaggagaacccagttgacttgcctgccacagagcaaaaggagaattgcttggattgctacatggaccccctgagactattcattattacctcctagggccaggaagccagtgtgtcctccgtctctgtgcagatccgtcattaccataggggacttggttttagactctgatgaggaagtccctgctcccttctctacaggaatctctggaaaactatcagaagacaaagtttgacaccttgatacccactctctgtgaatacctacccccttctggccacggtgccatacctgtttcttcctgtgactgtagagacagttctagacctttgtgatagaactaaaatgctctctgtactctagtctcctgcctcctcagctctgcaagtagtttagtaggaatgaagtggaagtccaggcttggattgcctaactacactgctaaaaatatttgtaatccttaataattaaactttggatttgtt

SEQ ID NO: 249699 - DNA, 1695 bp, Homo Sapiens
  misc_feature (53)..(53): n is a, c, g, or t
  misc_feature (1625)..(1625): n is a, c, g, or t
  misc_feature (1634)..(1634): n is a, c, g, or t
actcaacccccccgccctccggacgtctccccccgctctctcccaggccgtantttgtgagccgctgtagtcgactctagggcgccctagaactagtggatcccccgagctgcaggaatcggcacgagggagattgtgcgatctctgcgcgctggggcccctggattgtttcgctaccggcgcggaggaacgccgtgcatgggcctaaaggccacggaggtggaggagcagaacctgcagggccgaccttgagcccaagtactgaaagccctgaatcaccactgtccagaatctggacctatagagcgggatcccaaggctacaaagcaggagctgaggaagattttgcaggcacaggaaactttttaccagcaggtgaagcagctgccagaggctcctgcggattaggcctagaagctgcaggaacttgaacaagaggatggagaaccctttctggctgccatggaaaagcggctatttgagtacttgagtcagatggagaaagcactgcctacaccgcaagcacagcagctacacgatgtgctgagatggaagcaaactggagtctctatcacctcttctcttgcctggagacaatatgaggtggacatggggtggatgcttccagagagaaatgtaactgactcagagaacctggcttgagcccatggaacagaaaccccctcagcaacaaagactagcactccacaaacccctgccaaaacccatagcttcccgacacatcaatctggcccctctaggccgaccaacagtaaggacgcacccagaacctctagctggccgacacttcaatctggccccactaggccgacgaagagctcaggcccaatgggcctccactaggggaggccataaggagcgccccacagtcatgctgtttccctttaggaatctcggctcaccaacccaggtcatatctaagcctgagagcaaggaagaacatgcgatatacacagcagacctagccatgggcacaagagcagcctccactgggaagtctaagagtccatgccagaccctggggggaagggctctgaaggagaacccagttgacttgcctgccacagagcaaaaggagtgagtggaacagagttgcttcttactaggagcacattctttgcctgccttcccttcatcctatcctctttgcttgctctcacctcaggaattgcttggattgctacatggaccccctgagactatcattattacctcctagggccaggaagccaggtaggtagtctgagtcaggattggatcaacagcctcctctcttggggactctcaagagcctgtgttcatctagaagtagtagtttgattctggtttccctcctacagtgtgtcctccgtctctgtgcagctccgtcattaccataggggacttggttttagactctgatgaggaagaaaatggccagggggaaggaaaggtgagtgggaaggagcagaaagctgggaaaggggatgggtagaacaagactgagaaatccacatgcttcagaattcagagggttcagggaatggtttcggatagtaggctctccctgctcccttctctacaggaatctctggaaaactatcagaagacaaagtttgacaccnttgataccncactctctggtgaataccctacccccccttctgggccacgggtggccataccctgttttcc

SEQ ID NO: 249700 - DNA, 1183 bp, Homo Sapiens
  misc_feature (971)..(998): n is a, c, g, or t
ggggggcctgttactagtttgcggcatcctgtggtataggggaagcgctccgggcctggaatccctacgcgtccctttgggtttagcacgatgagctcaatcggcactgggtatgacctgtcagcctctacattctctcctgacggaagagtttttcaagttgaatatgctatgaaggctgtggaaaatagtagtacagctattggaatcagatgcaaagatggtgttgtctttggggtagaaaaattagtcctttctaaactttatgaagaaggttccaacaaaagactttttaatgttgatcggcatgttggaatggcagtagcaggtttgttggcagatgctcgttctttagcagacatagcaagagaagaagcttccaacttcagatctaactttggctacaacattccactaaaacatcttgcagacagagtggccatgtatgtgcatgcatatacactctacagtgctgttagaccttttggctgcagtttcatgttagggtcttacagtgtgaatgacggtgcgcaactctacatgattgacccatcaggtgtttcatacggttattggggctgtgccatcggcaaagccaggcaagctgcaaagacggaaatagagaagcttcagatgaaagaaatgacctgccgtgatatcgttaaagaagttgcaaaaataatttacatagtacatgacgaagttaaggataaagcttttgaactagaactcagctgggttggtgaattaactaatggaagacatgaaattgttccaaaagatataagagaagaagcagagaaatatgctaaggaatctctgaaggaagaagatgaatcagatgatgataatatgtaacatttactccagcatctattgtattttaaatttctactccagtccaatgtaactatttagccctggattatacatactgtccaattttcattaaatttttgtcttattacctnnnnnnnnnnnnnnnnnnnnnnnnnnnnttccttggcggggcgcccctcggcccttcaaaaaagttttctaaaaaccatttcgttttgggccgcgccgggccccccgcaaaggtaaaggtgggaaactggggcgtattaccttgttttcccctaaggaaaaatcccgggggcccaagaaaacaaagggggtttgggaaatctcctcccccaat

SEQ ID NO: 249701 - DNA, 403 bp, Homo Sapiens
  misc_feature (72)..(72): n is a, c, g, or t
gaaactgttcattcagttacaagtagaggaatttaaccacttaattcaggttgttgtagcttaacttgcccnacaggtgtggcatataacaattttaaaaatcaattttaaacacctgtattctcttaacaggaatctctgaaggaagaagatgaatcagatgatgataatatgtaacatttactccagcatctattgtattttaaatttctactccagtccaatgtaactatttagccctggattatacatactgtccaattttcattaaatttttgtcttataactattgaagtttggttaatatctgctttacaaaattggtgggggtaaatgaggacatttactcagtattaaaatatagatttatgactactgaaaaattccctggttaaaatgctgc

SEQ ID NO: 249702 - DNA, 550 bp, Homo Sapiens
  misc_feature (380)..(380): n is a, c, g, or t
  misc_feature (435)..(435): n is a, c, g, or t
acacccaagagtgtctataaacaacaacaaaaactgcaaaccaaaaactagtttacaatactgaagttataggaaacaagcacaaaaggccattgggtcggggctggatggagcatcgatctggtccttaaagtatgcagatcgcctaggaggcccagcctatggagattggaaggagagggagatgctggtgactggagatggtgagagcctgggctggggtagtttttagtcatgggcttatggaccctcccctcttctccagctagctcaggcctttaagaggcaggcccaagaagggaaccccaggaagccctagaagctccccagcgcctccatcccatggacccggatcccctgcaggaggggggaaagttgangcagtggcccaaagaaaaagtcgtcctcctggcttggggctggggttaccagggntcccaaggggctggcctggaaccagaggttctcataggacttggggctgggggtgaggcccgccaagaggggctgagtggagtcacagcggagatagtgccctggccctgggctt

SEQ ID NO: 249703 - DNA, 411 bp, Homo Sapiens
agccctgccatgagaaagaagggggattcccccctcagtagaaatagtccagaagggaatccacagaccttgttttgagcccagtcacgggtaaagtgggggtaggcctaaaatgttaagctcagaatctaaaccttagactggggaatggctaactttttccataaagaagcaaacggtaatatcttaggcttttggtctagataacctctgttgcagtgacgcagtggtgccatcatagcctaaaagcatatgtagacaatgcataaatgaatggacctggttttattccagtaaaacttaatttatacaaacagtcagaggccagatttggcccttggtctatagtttgccaaccctgtttagaccagtcacaatttattccctggggctgggccaattttttctata

SEQ ID NO: 249704 - DNA, 1233 bp, Homo Sapiens
  misc_feature (81)..(90): n is a, c, g, or t
caagtcttacaaagctaaaactttttggctcattcctttttgcatggttgtctagggtttctggacaatgtgctgttgcannnnnnnnnncctagccttgctaaaatctttcccttctcaaaactttgagcagttaaaagtgctcttttgaagttgtctgtgggtgatgttactgtagtggtctcagggaaaggattgtccagttactttagggggtttttggtggggtttttccccctgtgaaaacttactttgcccctagtctggctgctgctaggacttctgaggagcaatgggacatgagtgtccctgtatctgcgccactgccgcaagggaagcctcaggaaccagcacctggaggccaggatagccaagccctgggtgagcgagaggctggagaacacaggagctcacccagggctgctgcccaaccatgggccactgtgaacagacttcagtcctctgtttttgtttcataagccgttgagacatctgatggacttggcttaggccctgctgggacatcccacgtgtgatccctttcactccatcaggacaccaggactgtccttaggaaaatgtccttgagatggcagcaggagtcatattttctgtgtgtgtgtttcggaaagccgctgtgtcctgcctcagcacaaagacccagtgtcatttgctcctcctgttcctgtgccactccagaacctcagcagatctgagccaccgcctgccagtgtgagaggcggccactttcatggcagcttatcaggcgcagggccccagacagcttcccagcaggccctagagcccggcctgggccaatgatggagggcggccgccagcccagggcctgcccatccagaagggactccccagggcctgggggaggagacccttggaaaagtcctctcttcccagctcctgattctggatctgagattctcagatcacaggcccctgtgctccaggccgaggctgggctaccctcagggagatccagagactcatgcccatggccatccatgcgtggacgctgtgtggagagtccaggatgacgggatcccgcacaagctcccttcagtccttcagggctgggccatgtggttgatttttctaaagctggagaaaggaagaattgtgccttgcatattacttgagcttaaactgacaacctggatgtaaataggagcctttctactggtttatttaataaagttctatgtgattttttaaaaa

SEQ ID NO: 249705 - DNA, 1548 bp, Homo Sapiens
  misc_feature (1430)..(1483): n is a, c, g, or t
  misc_feature (1522)..(1522): n is a, c, g, or t
ggacggaggagacagtgaagcagtgtctgtacctctacctggccctcctgcctcagaaccacaagctgatccacgaactggcggccgtgtacactgaagccatcgccgacatcaagcggacggtgctgagggtcattgagcagccgatccgaggaatgggcatgaactccccggagctgctcctgctggtggcagacaaagtcccaccctccccagagctggtgaagcgggtccgggatctctaccacaagcgactgccagacgtccgcttcctcatcccggtgctcaatgggctggagaagaaagaggtgatccaggccctgcctaaactcatcaaactcaaccccatcgtggtgaaggaagtcttcaaccgcctgctggggcacccagcatggtgagggaaactcagccttgtccccgctgaaccctggagagctcctgatcgcattacacaacattgactccgtgaagtgcgacatgaaatccatcatcaaagccaccaacctgtgctttgcggagcggaacgtgtacacgtcagaggtgctggccgtggtgatgcagcagctgatggagcagagccccctgcccatgctgctcatgaggaccgtcatccagtccctgaccatgtacccccgcctggggggcttcgtcatgaacatcctgtcccgcctcatcatgaagcaggtgtggaagtaccccaaggtgtgggagggcttcatcaagtgctgccagcgcacaaagccccagagcttccaggtcatcctgcagctgccgccccagcagctgggagccgtctttgacaagtgcccagagctccgggagcccctgctggcccatgtccgctccttcaccccccaccagcaagctcacatccctaactccatcatgaccatcttggaggccagcggcaagcaggagccagaggccaaggaggcgcctgcggggcccttggaggaggatgatctggagcccctgaccttggcgccggccccagcaccccggccccctcaggacctcatcggcctgcgactggcccaggagaaggccttaaagcggcagctggaggaggaacagaagctgaagccgggaggagtgggagccccctcctcttcctccccctctccctctccgtcggcccggccaggcccgcccccgtctgaggaagccatggatttccgggaggaggggcctgagtgcgagaccccgggcatcttcatcagcatggatgacgactcggggctgaccgaggccgcgctgttggactctagtctcgagggccccctacccaaggagacggcagcgggcgggctgaccttgaaggaggagcggagcccccagaccctcgcacctgttggagaagatgctatgaagactcccagcccggctgccgaggacgccagggaacccgaggccaaggggaacagctgacnnnnnnnnnnnnnnnnnnnnnnnnnnnnnnnnnnnnnnnnnnnnnnnnnnnnnnggggcttgacctgcgggtgctttgccttaaaaagaaatnaaagatgtgaacttgggcaagttaca

SEQ ID NO: 249706 - DNA, 728 bp, Homo Sapiens
aaggagcgaggcctgggtggcgaattcggcacgaggctcaggtgtcaggagggtgctcggaggccacaggagggggctcctggctggcctgaggctggccggaggggaaggggctagcaggtgtgtaaacagagggttccatcaggctggggcagggtggccgccttccgcacacttgaggaaccctcccctctccctcggtgacatcttgcccgcccctcagcaccctgccttgtctccaggaggtccgaagctctgtgggacctcttgggggcaaggtggggtgaggccggggagtagggaggtcaggcgggtctgagcccacagagcaggagagctgccaggtctgcccatcgaccaggttgcttgggccccggagcccacgggtctggtgatgccatagcagccaccaccgcggcgcctagggctgcggcagggactcggcctctgggaggtttacctcgcccccacttgtgcccccagctcagcccccctgcacgcagcccgactagcagtctagaggcctgaggcttctgggtcctggtgacggggctggcatgaccccgggggtcgtccatgccagtccgcctcagtcgcagagggtccctcggcaagcgccctgtgagtgggccatttcggaacattggacagaagcccaaagagccaaattgttcacaattgtggaacccacatttgggcctgagatccaaaacgcttcgaggcacccc

SEQ ID NO: 249707 - DNA, 1470 bp, Homo Sapiens
  misc_feature (47)..(47): n is a, c, g, or t
ttttttacccctccttagctttatgcgctcagaaaccaaattaaacnccccccccatgtaacaggggggcagtgacaaaagcaagaacgcacgaagccagcctggagaccaccacgtcctgccccccgccatttatcgccctgattggattttgtttttcatctgtccctgttgcttgggttgagttgagggtggagcctcctggggggcactggccactgagcccccttggagaagtcagaggggagtggagaaggccactgtccggcctggcttctggggacagtggctggtccccagaagtcctgagggcggaggggggggttgggcagggtctcctcaggtgtcaggagggtgctcggaggccacaggagggggctcctggctggcctgaggctggccggaggggaaggggctagcaggtgtgtaaacagagggttccatcaggctggggcagggtggccgccttccgcacacttgaggaaccctcccctctccctcggtgacatcttgcccgcccctcagcaccctgccttgtctccaggaggtccgaagctctgtgggacctcttgggggcaaggtggggtgaggccggggagtagggaggtcaggcgggtctgagcccacagagcaggagagctgccaggtctgcccatcgaccaggttgcttgggccccggagcccacgggtctggtgatgccatagcagccaccaccgcggcgcctagggctgcggcagggactcggcctctgggaggtttacctcgcccccacttgtgcccccagctcagcccccctgcacgcagcccgactagcagtctagaggcctgaggcttctgggtcctggtgacggggctggcatgaccccgggggtcgtccatgccagtccgcctcagtcgcagagggtccctcggcaagcgccctgtgagtgggccattcggaacattggacagaagcccaaagagccaaattgtcacaattgtggaacccacattggcctgagatccaaaacgcttcgaggcaccccaaattacctgcccattcgtcaggacacccacccacccagtgttatattctgcctcgccggagtgggtgttcccgggggcacttgccgaccagccccttgcgtccccaggtttgcagctctcccctgggccactaaccatcctggcccgggctgcctgtctgacctccgtgcctagtcgtggctctccatcttgtctcctccccgtgtccccaatgtcttcagtggggggccccctcttgggtcccctcctctgccatcacctgaagacccccacgccaaacactgaatgtcacctgtgcctgccgcctcggtccaccttgcggcccgtgtttgactcaactcagctcctttaacgctaatatttccggcaaaatcccatgcttgggttttgtctttaaccttgtaacgcttgcaatcccaataaagcattaaaagtcatgaaaa

SEQ ID NO: 249708 - DNA, 1055 bp, Homo Sapiens
  misc_feature (357)..(357): n is a, c, g, or t
  misc_feature (369)..(369): n is a, c, g, or t
  misc_feature (371)..(371): n is a, c, g, or t
aaggtagcgaggcctgggtggcgaattcggcacgagggtaaacagagggttccatcaggctggggcagggtggccgccttccgcacacttgaggaaccctcccctctccctcggtgacatcttgcccgcccctcagcaccctgccttgtctccaggaggtccgaagctctgtgggacctcttgggggcaaggtggggtgaggccggggagtagggaggtcaggcgggtctgagcccacagagcaggagagctgccaggtctgcccatcgaccaggttgcttgggccccggagcccacgggtctggtgatgccatagcagccaccaccgcggcggcctagggctgcggcagggactcngcctctgggagngnttacctcgcccccacttgtgcccccagctcagcccccctgcacgcagcccgactagcggtctagaggcctgaggcttctgggtcctggtgacggggttggcatggaccctgggggcttccaggcggggcgtggccgcgccggttcgggccgtaatgaaggacgcaggtgcgccgcggccgaaggacagaggaaagcattcgcccggcgacctcccgtggctcccgggacagccggtatatcacatgagatgagtggtgcgcgagcgcgttaccctgcaacctcgggatttaagggcgaaggctcgccctggtggcgagcggacgccccgcaccgcgtgatgacggataacctttgccgggggcggcgctttgttgtcacgcggtgtgcgcgggatcgcgccggagctctatgtcagggtggcaggctagtcggccccactgtattcgtatcgcgaggcgtctgtcctcgcgacggataacgtctagagatggcacaacgtgggtagtaccacgctggaagatcgggcgctgaattagtgcatagaaggcgtgggcgtctacactacattaagaggtcgccgccgcggttcgctaagcgcagtattctggctcgctgttggagactctgacgatcgtcgcattcgcgccaacgccacgcacgtatgagctcaaaggtggagtcgg

SEQ ID NO: 249709 - DNA, 1355 bp, Homo Sapiens
  misc_feature (151)..(165): n is a, c, g, or t
  misc_feature (247)..(304): n is a, c, g, or t
  misc_feature (379)..(379): n is a, c, g, or t
  misc_feature (445)..(445): n is a, c, g, or t
  misc_feature (502)..(515): n is a, c, g, or t
  misc_feature (628)..(688): n is a, c, g, or t
  misc_feature (743)..(775): n is a, c, g, or t
aggcgtagggggcggtgccccgtggagcggctgggcaacagaaatgcgcgtgccgcgggtgaacagggacgggcgcacgccacagtagtcgcgccgcgcgacaccaggcggctgcgcctaaatcaacggggggtgcgcggcacacagatcnnnnnnnnnnnnnnnacaactgcggggcgcgtgaggtcgggtcggtgacgtaggggcggggcgggtgagaaatcgtgtgtgtgcctattcacccgcnnnnnnnnnnnnnnnnnnnnnnnnnnnnnnnnnnnnnnnnnnnnnnnnnnnnnnnnnngggcgcggcgtggccggaaaccagacttcctcgcgcgcgccgttcgcccagtgggcggtggcggtgggggaaaanatataggtgcggggggcgctgcgttaaggtaccagcacgcggtggagggggggaggtcagtcatangggccgcgggggcgagcgaacaaaacagcgggcggcccggggagctataacaaggcnnnnnnnnnnnnnnagacactctggtgggagaggcgcagtctctgtcggggggtcttattaaaggggggcgcgccgaaaagatggggggcggtggtacagacaggaggtggggggtcgccaaatttnnnnnnnnnnnnnnnnnnnnnnnnnnnnnnnnnnnnnnnnnnnnnnnnnnnnnnnnnnnnngcgactaccggggagggcggaatctggggcgggaaggaggcggcgttcatataannnnnnnnnnnnnnnnnnnnnnnnnnnnnnnnncaccccgcggggaggcagggcccaaccccgggtcaaccagggccccaggaagcctcgaggcataataggctggctagtcggggctcccggcaggggggttaagcctgggggcacaagtgggggcgaggtaaacctcccagaggcggagtccctgccgcagccctaggcgccgcggtggtggctgctatggcatcaccagacccgtgggctccggggcccaagcaacctggtcgatgggcagacctggcagctctcctgctctgtgggctcagacccgcctgacctccctactccccggcctcaccccaccttgcccccaagaggtcccacagagcttcggacctcctggagacaaggcagggtgctgaggggcgggcaagatgtcaccgagggagaggggagggttcctcaagtgtgcggaaggcggccaccctgccccagcctgatggaaccctctgtttacacacctgctagccccttcccctccggccagcctcaggccagccaggagccccctcctgtggcctccgagcaccctcctgaccctcgtgccgaattcgccaccgcaagggtagggtga

SEQ ID NO: 249710 - DNA, 415 bp, Homo Sapiens
  misc_feature (21)..(21): n is a, c, g, or t
  misc_feature (38)..(38): n is a, c, g, or t
acccaacccaagtgttaaaantctgccttggcgggaantggttttttcccggggggaacttgcggacaagccccttgcgtccccccaggtttgaagctctcccccgggccaactaaccatccctggcccgggctgccctgtctgaacctccgtgccctagtcgtggctctcccatcttgtctcctccccgtgtcccccaatgtcttcagtggggggcccctcttgggtcccctcctctgccatcacctgaagacccccacgccaaacactgaatgtcacctgtgcctgccgcctcggtccacttgcggcccgtgtttgactcaactcagctcctttaacgctaatatttccggcaaaatcccatgcttgggttttgtctttaaccttgtaacgcttgcaatcccaataaagcatt

SEQ ID NO: 249711 - DNA, 817 bp, Homo Sapiens
  misc_feature (42)..(42): n is a, c, g, or t
  misc_feature (58)..(58): n is a, c, g, or t
  misc_feature (66)..(66): n is a, c, g, or t
tcaatttcaattcaaacacgggcccacaagttggacccaagncggccaggcacaggtnacattcantgtttggcgtgggggtcttcaggtgatggcagaggaggggacccaagagggggcccccactgaagacattggggacacggggaggagacaagatggagagccacgactaggcacggaggtcagacaggcagcccgggccaggatggttagtggcccaggggagagctgcaaacctggggacgcaaggggctggtcggcaagtgcccccgggaacacccactccggcgaggcagaatataacactgggtgggtgggtgtcctgacgaatgggcaggtaatttggggtgcctcgaagcgttttggatctcaggccaatgtgggttccacaattgtgacaatttggctctttgggcttctgtccaatgttccgaatggcccactcacagggcgcttgccgagggaccctctgcgactgaggcggactggcatggacgacccccgggtcatgccagccccgtcaccaggacccagaagcctcaggcctctagactgctagtcgggctgcatgcaggggggctgagctgggggcacaagtgggggcgaggtaaacctcccagaggccgagtccctgccgcagccctaggcgccgcggtggttggctgctatggcatcaccagacccgtgggcttccggggccaagccaacctggtcgatgggcagacctggcagctcttctgctctgtgggcttagaacccgcctgaacttcctaattgccccggctcaccccaaccttgtccccaagaggttccc

SEQ ID NO: 249712 - DNA, 439 bp, Homo Sapiens
cacgagctggaagaatttggaacgttataaataaataaaaccacgacccccattgatcacctgcccacatgaatcccaggaggagcatttaccccacagccacagctctgcagagttggtgactccttgatgcagtcagtcacagggatccaaatgtggcgttggggagaggtaggaatgggctcctgcggctcccctacagccagcaacacttacctgtggtcagcacacatccaccctcccctcctctgccatcacctgaaagacccccacgccaaacactgaatgtcacctgtgcctgccgcctcggtccacttgcggcccgtgtttgactcaactcagctcctttaacgctaatatttccggcaaaatcccatgcttgggttttgtctttaaccttgtaacgcttgcaatcccaataaagcattaaaagtcaaaa

SEQ ID NO: 249713 - DNA, 1065 bp, Homo Sapiens
gggaacgtcaccgagcggcgccgaggccccgggttgagcgggaggcgcgatcggtccggtcggtggctccccgcggcggggccgggcccgatctcgggcgggaaccgagcgcagagccggtagcgggaaggatgaccacgctcacacgacaagacctcaactttggccaagtggtggccgatgtgctctgcgagttcctggaggtggctgtgcatctcatcctctacgtgcgcgaggtctaccccgtgggcatcttccagaaacgcaagaagtacaacgtgccggtccagatgtcctgccacccggagctgaatcagtatatccaggacacgctgcactgcgtcaagccactcctggagaagaatgatgtggagaaagtggtggtggtgattttggataaagagcaccgcccagtggagaaattcgtctttgagatcacccagcctccactgctgtccatcagctcagactcgctgttgtctcatgtggagcagctgctccgggccttcatcctgaagatcagcgtgtgcgatgccgtcctggaccacaaccccccaggctgtaccttcacagtcctggtgcacacgagagaagccgccactcgcaacatggagaagatccagggccatcaaggattttcccctggatcctgggcggatgagcaggatgtccacatgcatgacccccggctgataccactaaaaaccatgacgtcggacattttaaagatgcagctttacgtggaagagcgcgctcataaaggcagctgagggggcacctgccaccccactgatgcccaaactgtcagactttgggggatccccgcctagggcagtgctgcatggctgccctgattccaagtgctcttatcgcctctgtgtgtggatcgccccccccagcccggggccgctcaggtctgcttggaggatgcctcccccaggagggcagtgagggatgccgcaacctcgacttctcagcctcctggggttccgccggccaacactgtctgtctcaaatactgtgctgtgagttggtttcaataaaggggcccccagggctgggttg

SEQ ID NO: 249714 - DNA, 599 bp, Homo Sapiens
  misc_feature (29)..(29): n is a, c, g, or t
  misc_feature (50)..(50): n is a, c, g, or t
  misc_feature (117)..(117): n is a, c, g, or t
cccacaaggattgcctcagccaaaatcgnacgagacttgtccgtgaagcnttcttctaaaggaatctcttgctggcttcttaccgtggcatgaagcttttcaggcttcaggcttttnatgtgtcctctctctggaaaggaggaagtgagcctatggcatcttccccaacgaaaagcacatccaggcaatggcctaaacttcagagggggcgaagggatcagccctgcccttcagcatcctcagttcctgcagcagagcctggaagacaccctaatgtggcagctgtctcaaacctccaaaagccctgagtttcaagtatccttgttgacacggccatgaccactttccccgtgggccatggcaatttttacacaaacctgaaaagatgttgtgtcttgtgtttttgtcttatttttgttggagccactctgttcctggctcagcctcaaatgcagtatttttgttgtgttctgttgtttttatagcagggttggggtggtttttgagccatgcgtgggtggggagggaggtgtttaacggcactgtggccttggtctaacttttgtgtgaaataataaacaacattgtctgatagcaaa

SEQ ID NO: 249715 - DNA, 342 bp, Homo Sapiens
cccctaatggggccagctgtcctcaaaccctccaaaaagcccctgagtttccaagtaccccttgttgacacggcccatgacccactttcccccgtgggccatggcaatttttacacaaacctgaaaagatgttgtgtcttgtgtttttgtcttatttttgttggagcccactctgttccctggctcagcctcaaatgcagtatttttgttgtgttctgttgtttttatagcagggttggggtggtttttgagccatgcgtgggtggggagggaggtgtttaacggcactgtggccttggtctaacttttgtgtgaaataataaacaacattgtctgataaaa

SEQ ID NO: 249716 - DNA, 1149 bp, Homo Sapiens
gagttgggaccctggccctagactctgtggttctaagaacttatttgagccccaatggtattgactgggacctgatcccactaaatggatcctagatccctgccaaggttggtagagacaaagcagcaggtctgagagtccagacgaggtgctctggctggtccactctctaaggctggagaagggagaccagggatggtacttgaacgtcccaggggatgctgtcccatcccttccttcctcactcctactctttgaccctgatggccaaagccagagacgcaggccctaaaggtaaaaacgtcctctctgtattctctggcttttactccctagtgtctctgcataagtccctttgaggctgttagcctacccctccatctcttccattgacaaggaggatatgaatgatcttgacactgcttatatgagggcggcaaaagccctgctctcaactgcatgtgagaaaaaaacatctcacttaattcttccctcgccccttggtccctggctgtggacatgttaaacatttgtgaaaactttggccacgtccccatgagtggcaaggcagggtaaatggctatgccaagtgaaagaagaccaaagacaaaaagaccatgtcattcagcagcttaaaacccctcaacagcttcacattgcccagagtaaggatcaacatacatgtaataggttctcaaaagccctacatcatctgggtacaagctccccctccaaccccactctgtactatctccccctacccccaaccccagctgggcactccagctctactggctgtatgtctctctcctaattttcctacttaccacagggcctttgcacacgctgttccctctgcctggtagacttatccatgctccttagggaagcctttcgtggtcctcctcccccaggttaggccccctggttatttacacttgggcatcatgtgccttccctttgctgcatcatttgacattcatttgtgtgattattcatgtctttcccttcccttcccttccccttactcggctggagtcctactggggcagcgacagtgtctcttcttccttgctgttggatctcaggattaagcacagtgcctggcatacagcaggtgctcaataaatacttatcaaattggaaaaa

SEQ ID NO: 249717 - DNA, 1595 bp, Homo Sapiens
  misc_feature (13)..(14): n is a, c, g, or t
  misc_feature (58)..(58): n is a, c, g, or t
  misc_feature (66)..(66): n is a, c, g, or t
  misc_feature (85)..(85): n is a, c, g, or t
  misc_feature (104)..(104): n is a, c, g, or t
  misc_feature (183)..(183): n is a, c, g, or t
  misc_feature (200)..(200): n is a, c, g, or t
  misc_feature (261)..(261): n is a, c, g, or t
  misc_feature (263)..(263): n is a, c, g, or t
  misc_feature (269)..(269): n is a, c, g, or t
  misc_feature (277)..(277): n is a, c, g, or t
  misc_feature (289)..(289): n is a, c, g, or t
  misc_feature (329)..(329): n is a, c, g, or t
  misc_feature (343)..(343): n is a, c, g, or t
  misc_feature (346)..(346): n is a, c, g, or t
  misc_feature (380)..(380): n is a, c, g, or t
  misc_feature (428)..(428): n is a, c, g, or t
  misc_feature (447)..(447): n is a, c, g, or t
  misc_feature (467)..(468): n is a, c, g, or t
  misc_feature (486)..(486): n is a, c, g, or t
  misc_feature (498)..(498): n is a, c, g, or t
  misc_feature (500)..(500): n is a, c, g, or t
  misc_feature (525)..(525): n is a, c, g, or t
ggatgagagcgcnngcagcccggtgcagccctggctttcccctcgctgcgcgcccgcncccctttngcgtccgcaaccagaagcncagtgcggcgccaggtgcnggacccgcgcccgcaccgctcccgggaccgcgaccccggccgcccagagatgaccgcgaccgaagccctcctgcgcgtnctcttgctcctgctggntttcggccacagcacctatggggctgaatgcttcccggcctgcaacccccaaaatggattntncgaggntgacaatntttgcaggtgcnagcctggctggcagggtcccctttgtgaccagtgcgtganctctcccggctgcnttnacggactctgtggagaacccgggcagtgcatttncaccgacggctgggacggggagctctgtgatagagatgttcgggcctnctcctcggccccctgtgcnaacaacgggacctgcgtganntggacgatggcctctatnaatgctcctgtncncccgggtactcgggaaaggactgcnagaaaaaggacgggccctgtgtgatcaacggctccccctgccagcacggaggcacctgcgtggatgatgagggccgggcctcccatgcctcctgcctgtgcccccctggcttctcaggcaatttctgcgagatcgtggccaacagctgcacccccaacccatgcgagaacgacggcgtctgcactgacatcgggggcgacttccgctgccggtgcccagccggcttcatcgacaagacctgcagccgcccggtgaccaactgcgccagcagcccgtgccagaacgggggcacctgcctgcagcacacccaggtgagctacgagtgtctgtgcaagcccgagttcacaggtctcacctgtgtcaagaagcgcgcgctgagcccccagcaggtcacccgtctgcccagcggctatgggctggcctaccgcctgacccctggggtgcacgagctgccggtgcagcagccggagcaccgcatcctgaaggtgtccatgaaagagctcaacaagaaaacccctctcctcaccgagggccaggccatctgcttcaccatcctgggcgtgctcaccagcctggtggtgctgggcactgtgggtatcgtcttcctcaacaagtgcgagacctgggtgtccaacctgcgctacaaccacatgctgcggaagaagaagaacctgctgcttcagtacaacagcggggaggacctggccgtcaacatcatcttccccgagaagatcgacatgaccaccttcagcaaggaggccggcgacgaggagatctaagcagcgttcccacagccccctctagattcttggagttcctcagagcttactatacgcggtctgtcctaatctttgtggtgttcgctatctcttgtgtcaaatctggtgaacctacgcttacatatattgtctttgtgctgctgtgtgacaaacgcaatgcaaaaacaatcctctttctctctcttaatgcatgatacagaataataataagaatttcatctttaaatgagtaagagaaataagtatgttattctaaaatctaaactcaaatgaaatttcaaaaaagaccaa

SEQ ID NO: 249718 - DNA, 1028 bp, Homo Sapiens
  misc_feature (897)..(897): n is a, c, g, or t
  misc_feature (912)..(912): n is a, c, g, or t
  misc_feature (915)..(915): n is a, c, g, or t
  misc_feature (919)..(919): n is a, c, g, or t
  misc_feature (938)..(938): n is a, c, g, or t
  misc_feature (940)..(940): n is a, c, g, or t
  misc_feature (945)..(946): n is a, c, g, or t
  misc_feature (948)..(948): n is a, c, g, or t
  misc_feature (952)..(952): n is a, c, g, or t
  misc_feature (977)..(979): n is a, c, g, or t
  misc_feature (981)..(981): n is a, c, g, or t
  misc_feature (984)..(984): n is a, c, g, or t
  misc_feature (994)..(994): n is a, c, g, or t
  misc_feature (1002)..(1003): n is a, c, g, or t
  misc_feature (1007)..(1007): n is a, c, g, or t
  misc_feature (1028)..(1028): n is a, c, g, or t
tcccgggatgcggcggtggagagcgccgcgcagcccggtgcagccctggctttcccctcgctgcgcgcccgcgccccctttcgcgtccgcaaccagaagcccagtgcggcgccaggagccggacccgcgcccgcaccgctcccgggaccgcgaccccggccgcccagagatgaccgcgaccgaagccctcctgcgcgtcctcttgctcctgctggctttcggccacagcacctatggggctgaatgcttcccggcctgcaacccccaaaatggattctgcgaggatgacaatgtttgcaggtgccagcctggctggcagggtcccctttgtgaccagtgcgtgacctctcccggctgccttcacggactctgtggagaacccgggcagtgcatttgcaccgacggctgggacggggagctctgtgatagagatgttcgggcctgctcctcggccccctgtgccaacaacgggacctgcgtgagcctggacgatggcctctatgaatgctcctgtgcccccgggtactcgggaaaggactgccagaaaaaggacgggccctgtgtgatcaacggctccccctgccagcacggaggcacctgcgtggatgatgagggccgggcctcccatgcctcctgcctgtgcccccctggcttctcaggcaatttctgcgagatcgtggccaacagctgcacccccaacccatgcgagaacgacggcgtctgcactgacatcgggggcgacttccgctgccggtgcccagccggcttcatcgacaagacctgcagccgcccggtgaccaactgcgccaggccccgtgccagaacgggggcacctgcctgcagcacacccaggtgagctacgagtgtctgtgcaagcccgagttcacaggtctcacntgtgtcaagaagcgnggntgangccccagcaggtcaccgtntncccanngntatnggctggcttacgcttgaccctgggnnnangantgccgttganagccgganncgcntctgaagtttcatgaaaaatn

SEQ ID NO: 249719 - DNA, 663 bp, Homo Sapiens
gacgccgatacggttcctccagcgaggcccatgcgaagctttccactatggcttccagcactgtcccggtgagcgctgctggctcggctaatgaaactcccgaaataccggacaacgtgggagattggcttcggggcgtctaccgctttgccactgataggaatgacttccggaggaacttgatactaaatttgggactctttgctgcgggagtttggctggccaggaacttgagtgacattgacctcatggcacctcagccaggggtgtagccaagtagttctaatgccacctgtcgtcttatcatctgattgcagacaaatggaatcctgtgctgaacccgaatcttccaaaaaacagcctacaatctgtgaccaccacaagatgtgccctgatggcagctgaagtttgattcagatgggcacttttcttccccttccctgcctagtttccttttgttccttgagtccacgcagaattccattctctggtcagcagacaggcttaagctaaagtattgcctctattctgtaaagttctgtacatagttcccaagcttctgcagggggtgatttttgctcttgtcctgagaaataacagtgctgttttaaaaaacatttgaaataaataccgcacacaaaggcaaaaaatttataatataca

SEQ ID NO: 249720 - DNA, 809 bp, Homo Sapiens
gggtcctccaccgaggcccatgcgaagctttccactatggcttccagcactgtcccggtgagcgctgctggctcggctaatgaaactcccgaaataccggacaacgtgggagattggcttcggggcgtctaccgctttgccactgataggaatgacttccggaggaacttgatactaaatttgggactctttgctgcgggagtttggctggccaggaacttgagtgacattgacctcatggcacctcagccaggggtgtagccaagtagacaaatggaatcctgtgctgaacccgaatcttccaaaaaacagcctacaatctgtgaccaccacaagatgtgccctgatggcagctgaagtttgattcagatgggcacttttcttccccttccctgcctagtttccttttgttccttgagtccacgcagaattccattctctggtcagcagacaggcttaagctaaagtattgcctctattctgtaaagttctgtacatagttcccaagcttctgcagggggtgatttttgctcttgtcctgagaaataacagtgctgttttaaaaaacatttgaaataaataccgcacacaaaggcggaacaagagaaaagcgacaataaagaaaaactctgtcgggccgccttcggcccccaaaaaaactttctagaaccctttcgtttgggcgccgcgggccccattagggcaggggaaacagggcccatacccggctctccgagggaaatcccggcgcccaggaactgagcggctggggtactcccgaacagacacgaaaacccccccgcgcccct

SEQ ID NO: 249721 - DNA, 413 bp, Homo Sapiens
  misc_feature (398)..(398): n is a, c, g, or t
cacaaccacgtatcaacgcctcgggaaggtggtgatggaagcctttccccccagtacatttcgttaactgtacaactgactcagtgaccacagggttaataaaacacattgtttttccaggaacttgatactaaatttgggactctttgctgcgggagtttggctggccagggaacttgagtgacattgacctcatggcacctcagccaggggtgtagccaagtaggtaagcactgaactacacccatgcgtgtcttaggagacctagagactgggtgaagcaatgttttctgtcaagtattcatgaaatgtacaaaagaatgtgatgttaaaacccttaactatttcctagttaaaatgtgtttttcagatgttggaaaggggttttaagtatcttntttaccagttttccc

SEQ ID NO: 249722 - DNA, 150 bp, Homo Sapiens
cggcacgagcacagaatgctggagagatgcgtcctggtgaacgtggggcagcccctcccacgacccccaccagactgccttaggttttgtcagccccactcctttccttccccctctgcctccacccactctgggtcacataagatagct

SEQ ID NO: 249723 - DNA, 744 bp, Homo Sapiens; identical to SEQ ID NO: 7001
  misc_feature (425)..(520): n is a, c, g, or t
  misc_feature (594)..(595): n is a, c, g, or t
  misc_feature (607)..(622): n is a, c, g, or t

SEQ ID NO: 249724 - DNA, 1299 bp, Homo Sapiens
cggcagtaactcctaacggtttaaggtagcgaggcctgggtggcggtagccgccagctctcttctggttgggcctttgaaaggctcagcctcccattgtgcagtgcttgggtttggagcttatttgaatggaagaggtcagtttgttcctggctctccatttctggcctcagttgtctacaggacagtggtcagggatgcctggaggcatatatccagctgccaccaaggggcactgtttgttcccacttatgtgagtgaccccatccatccatgaccagaggattattttcctgccttggcagaggaggaggagtcaagggagcagggcagctctaccaggcaaggtgtttccccagcataggcgcagacagttgggacgaaacttcagagcccaggcagtccctgaatgaccaggccagtgttgtcactgagtggtcccctgctggttgggagtgaagagaatccaggctggcagagctggagccagttggggagcacggttctgggagctctgcaaaatcagtagcaagtgctggaaaaggcacatgccgaagatactcaagagctcccaagatttgcttgaggctagcccagtgaagaaaaaccagagactcatgtttccaggggtcagtctgtcaggcaggaaggacccaggatttgaacccagcttcagtgtgcaggctctgaggctgcccaggacgggaaagtccaaggaaggggcctggtggtgctccacttgcagttctttaaagaatgctgctttttattctcctaaccctttcaagtgggtgcagacttctcgttagcagctggaagacattcctcccacacttttcccttcctggcccaagagagcatccagaaaggcagtaaggacctggtttttcaggtactggggagcccgggggctcactgcttgcactgtgccttagggtagggatggtaaatatcctccctgcatggctttatcctccctctcatcccaaagcaggtatcttctggttgtcacagagtttcattgagtccagctgcagccacgtggccatctggagctggtgctataggtgaccatctggtacattgaggggacctgtttgcctcctccactctataagcagtcatcttgggagaccgggaggagaaggtggtgggctagtcctgtgtcctcctccacttcccatgcctctatgttacccatctgtgtctcctgtgcagaaggagaggaaggggcattaagagatgaagggtgattatgtattacttatccatttctgaataaacatttgttattcctaaa

SEQ ID NO: 249725 - DNA, 357 bp, Homo Sapiens
accccattccggggtaactctgccaacaggggacaggttccattctattccgacttgtgttgctacatatgtccatgtaacaatacagaaagtggctccactagctaatacagcattaccgtatttgtcatgaaaatcaggtgtacgtttctggtggctctgccttgccattgtttgctgaatgcttcgaactgtagtcccagctactcaggaggctgtggccggacgatcacttgagtccaggagttagaggatgcagtgagctatgatcacaccactacactccgaccaagggaaacatcgtgaaggtgaagctagaactgcggcaatacagctgctgctttggtgccaattcgc

SEQ ID NO: 249726 - DNA, 711 bp, Homo Sapiens
  misc_feature (235)..(284): n is a, c, g, or t
agtgtgcttaattagaaggataaacagatgttgaacaaatgtttgatcagaggagcttttggaggtgaaatgttccttagtgatacagagaatataaaatactctggcagttacttaggtagttgtggttgagggaatcagtgtattgagtgggtagtatagaaatgtgaagtataaatttgaattaaataaaatttaaaaattcatttccttggtgatactagtcatattccannnnnnnnnnnnnnnnnnnnnnnnnnnnnnnnnnnnnnnnnnnnnnnnnnatctagaacatttccttcagctcaagaagttctattgaacaacaggactgctctagaaaattaggacagcaatcaggtttggcctatatggagggtattagatcccaggtgagtttctgtgtatttttaacctatagaacagaatatctgtcattttcaagaaatagtctccgagagagtgtactctggtttaaacacgtaactgacagcattttaattcttacaggtagcaacacaagtcggaatagaatggaacctgtcccctgttggcagagttaccccaaaggaatggaggaatcagtaatcatcccagctggtgtaataatgaattgtttaaaaaacagctcataattgatgccaaattaaagcactgtgtacccattaagatatggcattattgaagaaataaagtacatttgaaaccttc

SEQ ID NO: 249727 - DNA, 654 bp, Homo Sapiens; identical to SEQ ID NO: 80586
  misc_feature (470)..(471): n is a, c, g, or t
  misc_feature (474)..(475): n is a, c, g, or t
  misc_feature (477)..(479): n is a, c, g, or t
  misc_feature (481)..(482): n is a, c, g, or t
  misc_feature (489)..(492): n is a, c, g, or t
  misc_feature (541)..(541): n is a, c, g, or t

SEQ ID NO: 249728 - DNA, 1412 bp, Homo Sapiens
ggccggggactgcggtgaaagccgaggcagcgggcagacgagcagggggcgggcggacatcttgggatccggagagtggccgggccggcagagcagggggccgaggacaccaggtctgttctcagagcgatgggccgcggagactgatctgccgccatgattggaggcttattcatctataatcacaagggggaggtgctcatctcccgagtctaccgagatgacatcgggaggaacgcagtggatgcctttcgggtcaatgttatccatgcccggcagcaggtgcgcagccccgtcaccaacattgctcgcaccagcttcttccacgttaagcggtccaacatttggctggcagcagtcaccaagcagaatgtcaacgctgccatggtcttcgaattcctctataagatgtgtgacgtgatggctgcctactttggcaagatcagcgaggaaaacatcaagaacaattttgtgctcatatatgagctgctggatgagattctagactttggctacccacagaattccgagacaggcgcgctgaaaaccttcatcacgcagcagggcatcaagagtcagcatcagacaaaagaagagcagtcacagatcaccagccaggtaactgggcagattggctggcggcgagagggtatcaagtatcgtcggaatgagctcttcctggatgtgctggagagtgtgaacctgctcatgtccccacaagggcaggtgctgagtgcccatgtgtcgggccgggtggtgatgaagagctacctgagtggcatgcctgaatgcaagtttgggatgaatgacaagattgttattgaaaagcagggcaaaggcacagctgatgaaacaagcaagagcgggaagcaatcaattgccattgatgactgcaccttccaccagtgtgtgcgactcagcaagtttgactctgaacgcagcatcagctttatcccgccagatggagagtttgagcttatgaggtatcgcacaaccaaggacatcatccttcccttccgggtgatcccgctagtgcgagaagtgggacgcaccaaactggaggtcaaggtggtcatcaagtccaactttaaaccctcactgctggctcacgaagatcgaggtgaggatcccaaacccactggaacacaagcgggggctgcaggtgattctgcaatgaaagggggacggcacagctacacaggccagcgcagaatgcccatcgatgtggaacgagcaagccgcatggcaggcatagaaaggactcgcagaatcagcgcagaagatagagcttcggggctaaccaccgcacagacggaaaggcggatcaacccacactccagcacctgcgaggggccatgacgacctcgggcaacaggcgcgcgagggcgaggcggttgaaccgaaccgacaca

SEQ ID NO: 249729 - DNA, 2171 bp, Homo Sapiens
  misc_feature (1311)..(1335): n is a, c, g, or t
  misc_feature (1879)..(1879): n is a, c, g, or t
  misc_feature (1943)..(1943): n is a, c, g, or t
  misc_feature (2056)..(2056): n is a, c, g, or t
agggagcgaggcctgggtggcgaattcggcacgagggagctcttcctggatgtgctggagagtgtgaacctgctcatgtccccacaagggcaggtgctgagtgcccatgtgtcgggccgggtggtgatgaagagctacctgagtggcatgcctgaatgcaagtttgggatgaatgacaagattgttattgaaaagcagggcaaaggcacagctgatgaaacaagcaagagcgggaagcaatcaattgccattgatgactgcaccttccaccagtgtgtgcgactcagcaagtttgactctgaacgcagcatcagctttatcccgccagatggagagtttgagcttatgaggtatcgcacaaccaaggacatcatccttcccttccgggtgatcccgctagtgcgagaagtgggacgcaccaaactggaggtcaaggtggtcatcaagtccaactttaaaccctcactgctggctcagaagatcgaggtgaggatcccaaccccactgaacacaagcggggtgcaggtgatctgcatgaaggggaaggccaagtacaaggccagcgagaatgccatcgtgtggaagatcaagcgcatggcaggcatgaaggaatcgcagatcagcgcagagattgagcttctgcctaccaacgacaagaagaaatgggctcgaccccccatttccatgaactttgaggtgccattcgcgccctctggcctcaaggtgcgctacttgaaggtgtttgaaccgaagctgaactacagcgaccatgatgtcatcaaatgggtgcgctacattggccgcagtggcatttatgaaactcgctgctagctgccactaggcagctagcccacctccccagccaccctcctccacaggtccaggtgccgctccctcccccaccacacatcagtgtctcctccctcctgctttgctgccttccctttgcaccagcccgagtctaggtctgggccaagcacattacaagtgggaccggtggagcagcccctgggctccctgggcaggggagttctgaggctcctgctctcccatccacctgtctgtcctggcctaatgccaggctctgagttctgtgaccaaagccaggtgggttccctttccttcccacccctgtggccacagctctggagtgggagggttggttgcccctcacctcagagctcccccaaaggccagtaatggatccccggcctcagtccctactctgctttgggatagtgtgagcttcattttgtacacgtgtgacttcgtccagttacaaacccaataaactctgtagagtgcaacccnnnnnnnnnnnnnnnnnnnnnnnnncttggtcggccgccctcggccctctcgagaaagcttttctggacccattcctcttgggccgcccggcccccccgtatgctaagtggaacatgtgccataacctcgttttcccagggacaatctcccggtccctggacctacgtgtctttggcaccccatctcccagcttaaaccacccccgccccccgggcgcgtcatcccgcgcaccccgcccttcctggaaaacacaatatcacccccccattgggtatggtcccctcagcaggcgctctcaccaacctcattgtcattccctcgcccccagaactcatagatggtgcgctcccacagagcgcgcatatctctcacctgattgtgtattctacacctagcgttataccgtcgtatcaactaatgctgcgttgttggcgcccactctcttgtgttgatgtacgcccagacacacgcgctggcagacaccaatactttcagaatacactactatgccgatgagatgaatctgcgaacgatattagcctctctactacgcaaagatatgcgcacnacgacgcgctcagcctacgccggcgtcgcactgtcgtaactcgacgtcgtggcgcgcgcgacancaccacactgctcgacccacgtatactgcacttcacctctctatctacattacgagcacctcctgctagcgcgcgcgtgatgcgatgagtcgtgtcactcgcacataccccgnttgatcacgctccaatgagtctccgatctcgctcccacacggtttctagccacatcctcattcttatgtcacacaccatagttgaactgatcggcgatcgagcgtcatctctgcg

SEQ ID NO: 249730 - DNA, 613 bp, Homo Sapiens
  misc_feature (40)..(40): n is a, c, g, or t
  misc_feature (49)..(49): n is a, c, g, or t
tttacctttcatttcatcttgcccttcattattacagccntagcagcantccacttcttattcttgcacgaaacgggatcaaacaaccccctaggaatcacctcccattccgataaaatcaccttccacccttactacacaatcaaagacgccctcggcttacttctcttccttctctccttaatgacattaacactattctcaccagacctcctaggcgacccagacaattataccctagccaaccccttaaacacccctccccacatcaagcccgaatgatatttcctattcgcctacacaattctccgatccgtccctaacaaactaggaggcgtccttgccctattactatccatcctcatcctagcaataatccccatcctccatatatccaaacaacaaagcataatatttcgcccactaagccaatcactttattgactcctagccgcagacctcctcattctaacctgaatcggaggacaaccagtaagctacccttttaccatcattggacaagtagcatccgtactatacttcacaacaatcctaatcctaataccaactatctccctaattgaaaacaaaatactcaaatgagcctaaaaaa

SEQ ID NO: 249731 - DNA, 1500 bp, Homo Sapiens
  misc_feature (257)..(318): n is a, c, g, or t
gattaactgcttaaaagcggctggtccggtcggaattctcgggatatcgtcgaccacgcgtcgctcctaactccctcgacctctcctctcgcccggccgagtgtgaggagaagggcccggccggcctgcgtcgtgtgtgaggaggaccccgggcgggcccacgggccgtgtggggcctggtccggcccgccgggtgtgtgaagaccggggcccggtgctgcccggccggagggcgagcggaggggaggggcctggtnnnnnnnnnnnnnnnnnnnnnnnnnnnnnnnnnnnnnnnnnnnnnnnnnnnnnnnnnnnnnngatggcccagcagcagatgaccagctcgcagaaggccctgatgctcgagctgaaatccctgcaggaggaaccggtggagggcttccggatcaccctggtggacgagtccgacctctacaactgggaggtggccatcttcggaccccccaacaccctctacgaaggcggctacttcaaggcgcatattaaatttcctattgactacccctattcaccacctaccttcagattcttgaccaaaatgtggcaccccaacatttatgagaatggagatgtatgcatttcgattcttcatccgcctgtagatgacccacagagtggagaactgccttctgaaaggtggaatcctactcagaatgtgaggactatcctattaagtgtaatctcactgcttaatgagcccaacaccttctccccagccaatgtcgatgcttcagttatgttcaggaaatggagagacagtaaaggaaaagacaaagaatatgctgaaattattaggaaacaagtttcagccactaaggccgaagcagaaaaggatggagtgaaggtccccacaaccctggcggaatactgcatcaaaactaaagtgccttccaatgacaacagctcagatttgctttacgacgacttgtatgatgacgacattgatgatgaagatgaggaggaggaagatgccgactgttatgatgatgatgattctgggaatgaggagtcgtgacgtgctccttcagtgcccctgtactgccctgccatctcaggccaaagggaggggagcaagtggggacctggccatggcccctcagcaaaaacctattcacagcgggtggggaaacacacacagctcctgctgactccccttatggatctcagtttgctcctttttatggacctttaatggagagagagtaaccctccacagaatgtctgaattcttgcattctttacccttccatcactatattgattctttttttaaaaaatatgaacccaaactcccgcctcacttcgtctctacagaatgttcacagcaaaacacgtttggtctgtttttagattcttgaagaattcaatagtctttcaagatgtttaatgtgtttaaagctgggaacctgttgggagttcacaagtgctgcatatactgggtagcaaaagaaaatggaaaaaacccacaaaacaaacttt

SEQ ID NO: 249732 - DNA, 505 bp, Homo Sapiens
  misc_feature (430)..(430): n is a, c, g, or t
  misc_feature (437)..(437): n is a, c, g, or t
  misc_feature (468)..(468): n is a, c, g, or t
  misc_feature (477)..(477): n is a, c, g, or t
  misc_feature (491)..(491): n is a, c, g, or t
ggcacgagttcaaggcgcatattaaatttcctattgactacccctattcaccacctaccttcagattcttgaccaaaatgtggcaccccaacatttatgagaatggagatgtatgcatttcgattcttcatccgcctgtagatgacccacagagtgaggaactgccttctgaaaggtggaatcctactcagaatgtgaggaaacaagtttcagccactaaggccgaagcagaaaaggatgggagtgaaggtccccacaaccctgggcgggaatactgcatcaaaacttaaagtgcctttccaattgacaaacagcttcaggattttgcttttacggacggactttgttatggattgacggacattggatggatggaaggatggagggagggagggaggatgccccacttgtttatggatggattgattgnattcttnggggatttagggagttcgttgacgttgcttnctttcagtngccccttgttattngcccttgccatttt

SEQ ID NO: 249733 - DNA, 795 bp, Homo Sapiens
  misc_feature (652)..(677): n is a, c, g, or t
  misc_feature (735)..(735): n is a, c, g, or t
gggaggcgagggcgccgcacccacaccgcgctgcgcagttttgttctgctccagctgttcgaaggtgatccagacgcaagatggctgtcctctctaaggaatatggttttgtgcttctaactggtgctgccagctttataatggtggcccacctagccatcaatgtttccaaggcccgcaagaagtacaaagtggagtatcctatcatgtacagcacggaccctgaaaatgggcacatcttcaactgcattcagcgagcccaccagaacacgttggaagtgtatcctcccttcttattttttctagctgttggaggtgtttaccacccgcgtatagcttctggcctgggcttggcctggattgttggacgagttctttatgcttatggctattacacgggagaacccagcaagcgtagtcgaggagccctggggtccatcgccctcctgggcttggtgggcacaactgtgtgctctgctttccagcatcttggttgggttaaaagtggcttgggcagtggacccaaatgctgccattaaagaattataggggtttaaaaactctcattcattttaaatgacttacctttatttccagttacattttttttctaaatataataaaaacttacctggcatcagcctcatacctnnnnnnnnnnnnnnnnnnnnnnnnnnaaaacatggtcgggccgccttcgggccctcgagaaggcttttctagaccaatttcgtnttgggcggcgccggggcccaggtaagggtaaggggaaaccatggggtcactagcctggtt

SEQ ID NO: 249734 - DNA, 895 bp, Homo Sapiens
  misc_feature (271)..(398): n is a, c, g, or t
  misc_feature (545)..(569): n is a, c, g, or t
  misc_feature (610)..(644): n is a, c, g, or t
ggatggctattacacgggagaacccagcaagcgtagtcgaggagccctggggtccatcgccctcctgggcttggtgggcacaactgtgtgctctgctttccagcatcttggttgggttaaaagtggcttgggcagtggacccaaatgctgccattaaagaattataggggtttaaaaactctcattcattttaaatgacttacctttatttccagttacattttttttctaaatataataaaaacttacctggcatcagcctcatacctannnnnnnnnnnnnnnnnnnnnnnnnnnnnnnnnnnnnnnnnnnnnnnnnnnnnnnnnnnnnnnnnnnnnnnnnnnnnnnnnnnnnnnnnnnnnnnnnnnnnnnnnnnnnnnnnnnnnnnnnnnnnnnntgtggggcccccccccgcccccccaaaaattttttctaaaaccatttctttttgggcggcggggccccccaaaagggaaaggaaacagggggccaaaacgggttttccaaagaaaacccggggcaaagaaaaagaggtgttggattnnnnnnnnnnnnnnnnnnnnnnnnnggggggaacaccggaagggttttgtgaaacaaaatcccaannnnnnnnnnnnnnnnnnnnnnnnnnnnnnnnnnntctcttatcacacgggaggggtccccgggggggaggccccaaaaatataaaaattaagccccccgcgccgctggccatttttttgggagaagattggggggaaaattttttaaaaacattcttcgcgccccaagggggaaccctctcccaaacggcgggggggagaactctgaatccccccgggggattaaaaccccttggggccccttgtggaaataaatattttccccccgtggaaaaaaacggggggg

SEQ ID NO: 249735 - DNA, 497 bp, Homo Sapiens
  misc_feature (14)..(14): n is a, c, g, or t
  misc_feature (65)..(65): n is a, c, g, or t
agcatttgggtccnactgcccaaagcccacttttaaaccccaacccaagatgctggaaaaacaanagcaacacagttgtgccccacccaaaacccaggagggccgaagggaacccccagggctccctcgaactaacgccttgcctgggttcctccccgtgtaaatagcccataaagcataaagaactcgtcccaacaatcccaggccaagccccaggccagaagctatacgcgggtggtaaacacctccaacagctagaaaaaataagaagggaggatacacttccaacgtgttctggtgggctcgctgaatgcagttgaagatgtgcccattttcagggtccgtgctgtacatgataggatactccactttgtacttcttgcgggccttggaaacattgatggctaggtgggccaccattataaagctggcagcaccagttagaagcacaaaaccatattccttagagaggacagccatcttgcgtctggatcacc

SEQ ID NO: 249736 - DNA, 729 bp, Homo Sapiens
atgaactcaaagccaaagtgttcctgctcaaggaggaactggcctacttccagcgggagctgctcacagaccaccgggtccccggccttctgctcgaggccatgaaggtggctgtccggaagcagcggaagaagatcaaggccaagatgttagggacaccagaggaagcagagagcagtgaggatgaggctggcccatggatcctgctctccgatgacaagggagaccatcccccacccccggagtccaaaatacagagtttctttggcctatggtatcggggtaaagctgaatcctctgaggatgagaccagcagccctgcacccagcaagctagggggagaagaggaggcccaaccacagtctccagctcctgatccgccctgttctgccctccacgaacacctttgtctgggggcctcagccgccccagaggcctgacttaggggtctggctgtggaaggatgtgtggcctcaaatgaggacagggctcccgccttcacagccctcgccaggggtctgccccaatcctggcctgcatcagggcaggacggggtctcagcccgcctccctctctacgtctctgtaccgagcctctggggccagatataagagtgcctctctgagtctcagtttccccatccatgaaatgagagctgactgcctagctcccagggctttgtgcagacggcctgagctcatgtaataaagaactgcccgtaattttcaa

SEQ ID NO: 249737 - DNA, 977 bp, Homo Sapiens
  misc_feature (7)..(7): n is a, c, g, or t
  misc_feature (40)..(40): n is a, c, g, or t
  misc_feature (42)..(43): n is a, c, g, or t
  misc_feature (51)..(51): n is a, c, g, or t
  misc_feature (58)..(58): n is a, c, g, or t
  misc_feature (61)..(61): n is a, c, g, or t
  misc_feature (67)..(69): n is a, c, g, or t
  misc_feature (75)..(75): n is a, c, g, or t
  misc_feature (80)..(80): n is a, c, g, or t
  misc_feature (97)..(97): n is a, c, g, or t
  misc_feature (174)..(174): n is a, c, g, or t
  misc_feature (184)..(184): n is a, c, g, or t
  misc_feature (195)..(195): n is a, c, g, or t
  misc_feature (207)..(207): n is a, c, g, or t
  misc_feature (215)..(215): n is a, c, g, or t
  misc_feature (237)..(237): n is a, c, g, or t
  misc_feature (244)..(246): n is a, c, g, or t
  misc_feature (304)..(304): n is a, c, g, or t
ccaattnactttccaacatccttaaataccacattttttntnnaatcctgnttagcgnagncatcgnnnccctgntgcgnctaaagtctctccaagntgacaagctgtaagtcagcttgaaaaacaatgtgttgagtgtcaacaaggagcctgttgccgagcctgacatcatgnccacaaatgncgtgttccatntcatcaccaatnttctgcancctccagccaacagacctcagnaaagagnnnatgtacttgcagactctgcgcttgagatcttcaaacaagcatcagcgattcccagggnaacccagaggcctgtgcgactagcccctgtctatcaaaagttattagagaggatgaagcattagcttgaagcactacaggaggaatgcaccacggcagctctccgccaatttctctcagatttccacagagactgtttgaatgttttcaaaaccaagtatcacactttaatgtacatgggccgcaccataatgagatgtgagccttgtgcatgtgggggaggagggagagagatgtactttttaaatcatgttccccctaaacatggctgttaacccactgcatgcagaaacttggatgtcactgcctgacattcacttccagagaggacctatcccaaatgtggaattgactgcctatgccaagtccctggaaaaggagcttcagtattgtggggctcataaaacatgaatcaagcaatccagcctcatgggaagtcctggcacagtttttgtaaagcccttgcacagctggagaaatggcatcattataagctatgagttgaaatgttctgtcaaatgtgtctcacatctacacgtggcttggaggcttttatggggccctgtccaggtagaaaagaaatggtatgtagagcttagatttccctattgtgacagagccatggtgtgtttgtaataataaaaccaaagaaacatacgtcctgtgtgcatgga

SEQ ID NO: 249738 - DNA, 1722 bp, Homo Sapiens
attaagaccccccggcgcccaaaatggaaattgttgtaaaaaaaggttttttaagggggccaaaggggggccacgccagttggaatggcggcgactggcgttattttacttacgaaggggtgttggttggggttgtattatgttgcaaagcacccccctggctgctgtccccaatgagggaccatgttaagctttttacatacccatttctttttttacctggaacagggcccccataaaaggccttccaaggccaagtgtaggatgtggagacacatttgacaggaccatttcaactcatagcttataatgatgccatttctcccagctgtgcaaggcttttacaaaaactgtgccaggatttccccatgaggctggattgcttgattcatgttttatgagccccacaatactgaagctccttttccagggacttggcataggcagtcaattccacatttgggataggtcctctctggaagtgaatgtcaggcagtgacatcccaagtttctgcatgcagtgggttaacagccatgtttagggggaacatgatttaaaaagtacatctctctccctcctcccccacatgcacaaggctcacatctcattatggtgcggcccatgtacattaaagtgtgatacttggttttgaaaacattcaaacagtctctgtggaaatctgagagaaattggcggagagctgccgtggtgcattcctcctgtagtgcttcaagctaatgcttcatcctctctaataacttttgatagacaggggctagtcgcacagacctctgggaagccctggaaaacgctgatgcttgtttgaagatctcaagcgcagagtctgcaagttcatcccctctttcctgaggtctgttggctggaggctgcagaacattggtgatgacatggaccacgccatttgtggccatgatgtcaggctcggcaacaggctccttgttgacactcaccacattgtttttcaagctgacttccagcttgtcaccttggagagactttagccgcaccagggccccgatgcctccgctaaccaggatttcatcaccaatgtggtatttcaggatgttggcaagttccttggcatctcccaagagtctgctccgttctcttggtggcagggctcggaaggcttcatttgtgggagcaaagactgtgtagactccttcccggttgagggtctccgtcagtcctgcagactggatggcagctaccagcatgctaaagcgattgtctcccttcaggacatccatgacagtccccattgggggggtcagcacccggtccatcgtgaacagggtcccgtacctccccctcttgtcgtgggccgcgatgcagctgttctcaatgcagaggctattacgataaacaaaaactctcagttttttgccgcccagagtttccagggtctgtccatggtacagatacttagaggccagctggtctttaattatgtggttccgaagcaaattccttgtatgggcatcaattggaggggttccatctacaagaaagggtgatggttaggtccagagagatgtgctcctttgaatacagaattcaggggagccaggagggtcaaccgctcacttccagagagatgattgccgaggccggcttgtctgaaaaggtcaatggctgtggacacatcagactctgcagccaattcaaatagtgtcttggctacaaggaaggagaaagtg

SEQ ID NO: 249739 - DNA, 606 bp, Homo Sapiens
gttgacactcaccacattgtttttcaagctgacttccagcttgtcaccttggagagactttagccgcaccagggccccgatgcctccgctaaccaggatttcatcaccaatgtggtatttcaggatgttggcaagttccttggcatctcccaagagtctgctccgttctcttggtggcagggctcggaaggcttcatttgtgggagcgaagactgtgtagactccttcccggttgagggtctccgtcagtcctgcagactggatggcagctaccagcatgctaaagcgattgtctcccttcaggacatccatgacagtccccattgggggggtcagcacccggtccatcgtgaacagggtcccgtacctccccctcttgtcgtgggccgcgatgcagctgttctcaatgcaaaggctctgcacagaagagggacagagaaagaaaggactggttatactcccacgaggggcctcctgatttgttcagagcatgtagcagggtcattatccatgaagatgaaggagtatacactgggatgggttattaaggctgggataaaatgatgtattttctccaggaaataaaacaataaatggtggagcggc

SEQ ID NO: 249740 - DNA, 1574 bp, Homo Sapiens
  misc_feature (1473)..(1473): n is a, c, g, or t
  misc_feature (1502)..(1502): n is a, c, g, or t
  misc_feature (1510)..(1522): n is a, c, g, or t
  misc_feature (1531)..(1531): n is a, c, g, or t
  misc_feature (1538)..(1538): n is a, c, g, or t
  misc_feature (1544)..(1544): n is a, c, g, or t
tagcgaggcctgggtggcgaattcggcacgaggcccgcttgcccgtcggtcgctagctcgctcggtgcgcgtcgtcccgctccatggcgctcttcgtgcggctgctggctctcgccctggctctggccctgggccccgccgcgaccctggcgggtcccgccaagtcgccctaccagctggtgctgcagcacagcaggctccggggccgccagcacggccccaacgtgtgtgctgtgcagaaggttattggcactaataggaagtacttcaccaactgcaagcagtggtaccaaaggaaaatctgtggcaaatcaacagtcatcagctacgagtgctgtcctggatatgaaaaggtccctggggagaagggctgtccagcagccctaccactctcaaacctttacgagaccctgggagtcgttggatccaccaccactcagctgtacacggaccgcacggagaagctgaggcctgagatggaggggcccggcagcttcaccatcttcgcccctagcaacgaggcctgggcctccttgccagctgaagtgctggactccctggtcagcaatgtcaacattgagctgctcaatgccctccgctaccatatggtgggcaggcgagtcctgactgatgagctgaaacacggcatgaccctcacctctatgtaccagaattccaacatccagatccaccactatcctaatgggattgtaactgtgaactgtgcccggctgctgaaagccgaccaccatgcaaccaacggggtggtgcacctcatcgataaggtcatctccaccatcaccaacaacatccagcagatcattgagatcgaggacacctttgagacccttcgggctgctgtggctgcatcagggctcaacacgatgcttgaaggtaacggccagtacacgcttttggccccgaccaatgaggccttcgagaagatccctagtgagactttgaaccgtatcctgggcgaccaagaagccctgagagacctgctgaacaaccacatcttgaagtcagctatgtgtgctgaagccatcgttgcggggctgtctgtagagaccctggagggcacgacactggaggtgggctgcagcggggacatgctcactatcaacgggaaggcgatcatctccaataaagacatcctagccaccaacggggtgatccactacattgatgagctactcatcccagactcagccaagacactatttgaattggctgcagagtctgatgtgtccacagccattgaccttttcagacaagccggcctcggaaatcatctctctgggaagtgagcggttgaccctcctgggcttcccctggaatttcttgttatttcaaagatgggaacccctcccaatttgatggcccattacaaggaattttgctttcgggaaccacataatttaaaaggaccagctgggcctcttaagttatcttgttaccatggggacaggaccngggggaaattttgggggcgggcaaaaaantggaggannnnnnnnnnnnnattcgttanttaggcntcttgncattttgagggaacaggttggcattggggg

SEQ ID NO: 249741 - DNA, 969 bp, Homo Sapiens
taggtagcgaggcctgggtggcgaattcggacgaggaccgatgcttgaaggtaacggccagtacacgcttttggccccgaccaatgaggccttcgagaagatccctagtgagactttgaaccgtatcctgggcgacccagaagccctgagagacctgctgaacaaccacatcttgaagtcagctatgtgtgctgaagccatcgttgcggggctgtctgtagagaccctggagggcacgacactggaggtgggctgcagcggggacatgctcactatcaacgggaaggcgatcatctccaataaagacatcctagccaccaacggggtgatccactacattgatgagctactcatcccagactcagccaagacactatttgaattggctgcagagtctgatgtgtccacagccattgaccttttcagacaagccggcctcggcaatcatctctctggaagtgagcggttgaccctcctggctcccctgaattctgtattcaaagatggaacccctccaattgatgcccatacaaggaatttgcttcggaaccacataattaaagaccagctggcctctaagtatctgtaccatggacagaccctggaaactctgggcggcaaaaaactgagagtttttgtttatcgtaatagcctctgcattgagaacagctgcatcgcggcccacgacaagagggggaggtacgggaccctgttcacgatgggaccgggtgctgacccccccaatggggactgtcatggatgtcctggaggggagacaatcgctttagcatgctggtagctgccatccagtctgcaggactgacgggagaccctcaaccggggaaagaatctacacaggtctttgctcccacaaatgaaagccttcccagaccctgccaccaaaagaaccggagcagaactcctggggagatgcccaagaaacttgcccacatcctgaaataccccctt

SEQ ID NO: 249742 - DNA, 931 bp, Homo Sapiens
gagcgaggcctgggtggcgaattcggcacgaggcgacaagagggggaggtacgggaccctgttcacgatggaccgggtgctgacccccccaatggggactgtcatggatgtcctgaagggagacaatcgctttagcatgctggtagctgccatccagtctgcaggactgacggagaccctcaaccgggaaggagtctacacagtctttgctcccacaaatgaagccttccgagccctgccaccaagagaacggagcagactcttgggagatgccaaggaacttgccaacatcctgaaataccacattggtgatgaaatcctggttagcggaggcatcggggccctggtgcggctaaagtctctccaaggtgacaagctggaagtcagcttgaaaaacaatgtggtgagtgtcaacaaggagcctgttgccgagcctgacatcatggccacaaatggcgtggtccatgtcatcaccaatgttctgcagcctccagccaacagacctcaggaaagaggggatgaacttgcagactctgcgcttgagatcttcaaacaagcatcagcgttttccagggcttcccagaggtctgtgcgactagcccctgtctatcaaaagttattagagaggatgaagcattagcttgaagcactacaggaggagggagagagatgtactttttaaatcatgttccccctaaacatggctgttaacccactgcatgcagaaacttggatgtcactgcctgacattcacttccagagaggacctatcccaaatgtggaattgactgcctatgccaagtccctggaaaaggagcttcagtattgtgggggctcataaaacatgaatcaagcaatcccaccctcatgggaaagtccctgggcacagttttttgtaaagccccttggcacaggctgggaggaaatggga

SEQ ID NO: 249743 - DNA, 1668 bp, Homo Sapiens
  misc_feature (824)..(824): n is a, c, g, or t
agcactggagtccactccgacctttttctttgaacatgcatgctgctggaatatgtataaatcagaactagcagaagtagcagagtgatgggagcaaaataggcactgaattcgtcaactcttttttgtgagcctacttgtgaatattacctcagatacctgttgtcactcttcacaggttatttaagtttttgaagctgggaggaaaaagatggagtagcttggaaagattccagcactgagccgtgggccggtcatgagccacgataaaaaatgccagtttggcaaactcagcactcctgttccctgctcaggtatatgcgatctctactgagaagcaagcacaaaagtagacaaaagtattaatgagtatttcctttctccataagtgcaggactgttactcactactaaactctaccaagaatggaaacaaagaatattttctgaagatttttttgaagattaatttataccctataaaataaaacttgttagcttcgatgaagtcacttcatcttctctcctaccttatttttttaaataagtttttaggtcctgacactgacatcaaatacatgcacaccagaaaggcatttccaccaccgtccccactcattagcgtccagagtgcctttctctctcggctttttttcccccctgagctctagttttaaactttctcctgttaaaaaaattgtacttttatttcatgtaaactgcccctctggaggatttggggcatattttttgggaaggtgcctaatgcttaggatagtctctagggtgatgcactgcacctgcttccttcccttcagtgcggcncgacccatttctgttgaacagatgtctcctgtgtgatgcccctgactcttacatttatctttctaaatcattttctgaagctgacttgctctagggtgcttcatcaccacttccatcttgcatcaccttataactgttctgtcttgttctctcccagcaatttattttaaaacaagggctagcttcaagcatgactgttaatggctcctctgtgacaaaacacaagttggaccaaggagaaagccctttggagaaactggaccctagttcagtttagatctcaaatataggctgaaatctcttaccaaagtgcgttccagataaaaatgagacttagaagacagactggtctaatatgctcactggtcatcacattcagcttattcttacgtgccagtgaggccctaaggtctcagtgcatagcatacctgccactctggatgttttcctgggcttcatatctgtatggcaaggagggagctgtccttcagcagacaaagtcaagcagctttaagtacaaggcagcttgaaacctctctgatgaaagtgaaaaatgtgggtagcttatactttcaaactaatgccagtgactagagagaggtttcattcatgatgtgtatttccaatttggtcttcaattcaagagatgcttcataaaacacttatagccttaaaccattcaagggctaattaaaaaaatagttatgaaatctttagccacaaaaaataaatcaggtaaacattttaacctgtcgttaagtgttgtaacttcaaaaaaccaaaatgcttattttaatgtgatttttctaaaactattgaaaaattaatatttctataatctatt

SEQ ID NO: 249744 - DNA, 925 bp, Homo Sapiens
gacttcctctctcggtttgtctgggtcatcttgtctgcccgccgctggcctggccccgtctgtctctctcagcagctgtctttctcgcgcccactggccggtctctcctcttccccgcagttgcctccttctctgcctgcctgggtggccgccatgggccggaagcggctcatcactgattcctacccggttgtgaagaggagggaggggcccgctgggcacagcaagggggagctggcacccgagctaggggaggagccccagccccgcgacgaggaggaagcggagctggagctgctgaggcagtttgacctggcctggcagtacgggccctgcaccgggatcacacggctgcagcgctggtgtcgggccaagcagatgggcttggagcctcccccagaggtgtggcaggtgctgaagacccaccccggagacccccgcttccagtgcagtctctggcatctctatcccctatgaggcaccacgtaagacctcctgcccttagctctcttgctcaccacccaagaacctcaggacagaagcgagagcccattgctcctgctcagctcagcccggctgcggaggaacccttggcaggcagaacctggaggtgtcagaggctcaactcctccatctaaccagcaggctcccagagtccccggaagagcctgcgcagctgaagcagagtgcttctagatggagagtggtcactggggaaaaggacctggccatcaccttccaatacctgctgcctgtctccctgacccatgatctggcaagttaggcacagtcagacatggacagttgatccatgaggaaaagatgctctcccacctaaggccaggaatctgagagcaggactggctgagctcccagggcaaggggttcactaatggcttatcaataaagaatattgagcctggta

SEQ ID NO: 249745 - DNA, 1890 bp, Homo Sapiens
  misc_feature (681)..(692): n is a, c, g, or t
gtataggtgtaaaaacagagggcttgtgcgacaggtggtgggtgcccaaggagggagccaagagaccaagttccggccaaagggtcagcgccatacagctattctggttacacagttgtcactggccaacagaaaatgcagccacaacaggttcaaacagcaaagctataagtgagctggctctcactgagaactgaacaggttcgcagctgttactcctcagggatttggaatggtgcgaagattcccttggtcacgaaatgaactcagatgtgtttggagatagctgtgccgtttttgccttctttccctcttgtagggaaaccttcgcttattcccccaagttgctggcaggtgtgctgaaaatttggcaatggactcaaggctgagctaaaagaggaatttctcatttttgtggttgacaattagggggtggaaaagcaaggcaaaccatctgcagctggcaggagaaggaagctgtgggttcctcccctgtcctcagggtttagggttggtagagagtgaggaggggctcacagtacagcatggcctagcagggcagtaactaggtctatttagctgagttccccccaccccctgactggcctttgggtctttctcaaggtgaattcaggacccatcagtgcattaatcatttcagtaacaaatgcagcttaaggnnnnnnnnnnnnctttaaaaaaaataggaatacaaggatttacaaaaaaacctcacacagtgcaataataaaggaaagcagacactagtggaacccctagggccactgcatcttgttcatgggcaaaaggaggaagggaggtgaggtctgggtagagtgcttttcccagtcccctgctggcacttctccatgatgacaaggaagtctctgccatcctggccacagtgctgggctccctgcatgacagtgaaaacagtgacaatgttccagcaaagccaccagacaaagttcttaaggtcacaggagagaagggagcccaggatggaaggcacagcagagccatgagtcctggggcagagagtgctgggctgagtcgtattgctttgctagacttccataggaatgggcttcttgcggcgagaaaagggtgccccaccctctacttggactacactactctgaaaccttgtggcagaggcagagaaaaatctgctttatcgtgagtggtcagactgtgcttcagtttcaacaggctgccccaaaagagggcacaaggtgatcaatgggttctctgcagatatgaggacttggtgggcagagggaaaggaaagagtggcctatgaggcagatggtgatgcaaaaatgtcaagttgccattcaacttgttgtttgctaactctgaagtaagaaagatgagggaaatgtaaagattgccgtctcccaccactctggaagttgcgccggaaaggagagaggcgggaaagaagagaatctgttgtatcaagatattactgtagccttttgaggagcttcaataggggaaggaggggagtggcccaatggagttgggtgaccttccttctccatttattgtcaaagagcaaacccaggaaacatttatgtcaacagggcacaaacaagctacacattaaacaacaaaaagtacaccttccagggggaagttgggcaggaaaaaccagactttgtgtgtacagctgaatattttctctaacttcatcctatgaaaataaaaaattattaaaaaccgatcttcttttaaattaggataataccgcggtttaaaaaatagccttgtcataagtgcttctccctatgaagtgcttctcatagaaaaatatacaaaatatatttacatttataaaaccttaaatagtaaactgtaaacagaacagagtaaaatccaatgagt

SEQ ID NO: 249746 - DNA, 1411 bp, Homo Sapiens
  misc_feature (47)..(47): n is a, c, g, or t
  misc_feature (56)..(56): n is a, c, g, or t
  misc_feature (68)..(68): n is a, c, g, or t
  misc_feature (80)..(80): n is a, c, g, or t
  misc_feature (91)..(91): n is a, c, g, or t
  misc_feature (113)..(152): n is a, c, g, or t
  misc_feature (161)..(161): n is a, c, g, or t
  misc_feature (190)..(190): n is a, c, g, or t
  misc_feature (368)..(368): n is a, c, g, or t
  misc_feature (390)..(390): n is a, c, g, or t
  misc_feature (457)..(457): n is a, c, g, or t
  misc_feature (474)..(474): n is a, c, g, or t
  misc_feature (545)..(545): n is a, c, g, or t
  misc_feature (693)..(727): n is a, c, g, or t
  misc_feature (885)..(894): n is a, c, g, or t
cccgcacgtgcgttggcgagaggtgtcgggcccccccgccggccccncatacccanggcgaatcatangaggcggccgtntgtgtatttcntattacgtatcatcggctaaannnnnnnnnnnnnnnnnnnnnnnnnnnnnnnnnnnnnnnngttttgtcntccgccacggccctggcgagcgcgcggcncacacaggacaggtaggatgtgttggtgacagagggagaggtgacgaaggagaggaggggggagtgctggctgctcggtgagcggccgagcgcgcgcggggctcagagttgttggggcgagggggtttatgttagttgacctgaacccgcaccacccatttggcgtgccatagctccncgcctctcggtcccacctgcanccgcgcctgggcgggggacagagtgtggggccgagcacaaacacaacagagaggtgtgtcgcccacncccccccaccttttgtntgcgctcgtagtaataaaaaacgaagatagtatagagtaggcgctacgcgggggttgcgcccttttttggntctgtcctaaccaggtgtgcgagggggctcctcctgccttgcgaccaacgtcttcctcgtcttttgttttaaatatttccgcgcgtgagggagggggcgctgtggaaaaaataccccacccatcgggagtgtttgtttttgagagacnnnnnnnnnnnnnnnnnnnnnnnnnnnnnnnnnnnttttcagctcagcgcaaggatttccaaaaccactgaggcggtgtttacccggaggttccccctggggaaaacagtgttgtacggacgccggggggttgcgccagctgggccggccgcgcgccccaaaggagggggttatataaaatttttggagggtnnnnnnnnnncgccggcgagatggtggggttgcgctgtgggtttgggggagtgcgcccttgttgtcttgtggcggggggccgatttggtgtgcgactgggggtgggtggtgggcgtctgtccgttttgggtttttgtgcaatgaagtcaggtttaattttgagattcctgtgccctcactcacgcaaggaggaagtcacctggctccagtgaacacgtgtggaacagaaatcagggccactgaaaagccaccacccacttgagagggcttgttctcaacaaacctgactcagatgggcccactttgggcctttagtcagatttagagaaaacccccggctcatccaatcaatgtgcaatcaatttctacaccatggcagaggtaggaaaagccagtcacatgtccaaatgatgagtgaaaatcaaggcatcgtggagccacctcctccagagggggagccacaatctcaggaccccgaaggagcagacattttcaagtggctcctttacattaagcaaaatgtggtc

SEQ ID NO: 249747 - DNA, 627 bp, Homo Sapiens
  misc_feature (117)..(118): n is a, c, g, or t
  misc_feature (143)..(143): n is a, c, g, or t
ggaacggaacccgctggaatggttacacacccctggttgggaagggttctcgccccggcatgaatcctggcggtgcggttgctggcaaacaccttcgtgttaatcaaaggagatgcnngaaaaaagaatagccggatatccantgtgttcaattcctcatcgtctttggcttggatgtaatcaaaggccacttcgcagacagcttctttcaacctcacagggacctcgctgtggtaggaaattccagaagcagcagtctgtgcatctctgtagaaacccatttcttggttatttatgacacaataaacattgtgccaggacctgcttgaggctttcttattgtgggcctcccactcgtgtttccgattgaggaagccttccatctgggccgaaggtgtctcctgggttctggctggtaaggtggcggcactctgggctgggagggcagtcttggctttacgatcagaggtcggggaggggatggggctggactctttagagctcgtcctttgttctgtagcgccgttgaccatttcgcttgtgtccaccgtttctgccatccgtggagatccctgttcagctggcaaaccggggaaacttgttctccttttgaagtatcccactgct

SEQ ID NO: 249748 - DNA, 1980 bp, Homo Sapiens
  misc_feature (274)..(274): n is a, c, g, or t
  misc_feature (297)..(297): n is a, c, g, or t
  misc_feature (326)..(326): n is a, c, g, or t
  misc_feature (1281)..(1294): n is a, c, g, or t
  misc_feature (1314)..(1314): n is a, c, g, or t
  misc_feature (1783)..(1796): n is a, c, g, or t
gggcgagaaaacactatgcatctgaggagatcaaggaaaaattactgcagttgacggaaaagaggaaagaaatgatcgacaagtgggaagaccgatgggaatggttaagactgattctggaggtccatcagttctcaagagacgccagtgtggccgaggccgggctgcttggacaggagccgtacctatccagccgagagataggccagagcgtggacgaggtggagaagctcatcaagcgccacgaggcatttgaaaagtctgcagcaacctngggatgagaggttctctgccctnggaaaggcttgactacattggagttactnggaagttgcgcagacagcaagaggaagaggagaggaagaggcggccgccttctcccgagccgagcacgaaggtttcagaggaagccgagtcccagcagcagtgggatacttcaaaaggagaacaagtttcccaaaacggtttgccagctgaacagggatctccacggatggcagaaacggtggacacaagcgaaatggtcaacggcgctacagaacaaaggacgagctctaaagagtccagccccatcccctccccgacctctgatcgtaaagccaagactgccctcccagcccagagtgccgccaccttaccagccagaacccaggagacaccttcggcccagatggaaggcttcctcaatcggaaacacgagtgggaggcccacaataagaaagcctcaagcaggtcctggcacaatgtttattgtgtcataaataaccaagaaatgggtttctacaaagatgcaaagactgctgcttctggaattccctaccacagcgaggtccctgtgagtttgaaagaagctgtctgcgaagtggcccttgattacaaaaagaagaaacacgtattcaagctaagactaaatgatggcaatgagtacctcttccaagccaaagacgatgaggaaatgaacacatggatccaggctatctcttccgccatctcctctgataaacacgaggtgtctgccagcacccagagcacgccagcatccagccgcgcgcagaccctccccaccagcgtcgtcaccatcaccagcgagtccagtcccggcaagcgggaaaaggacaaagagaaagacaaagagaagcggttcagcctttttggcaaaaagaaatgaactcctttccttcacctcctgcccttctcttaccttttcagtgaaattccagcatgcaagctcagaaccaacacattactctctgtgcctaatgttcctcaatgtggttgagnnnnnnnnnnnnnnaatttatagagcatttcggngggggtgggggaaacacacctaaacactttatctccaagttacaaaagtttgaggtgcacagggaaggccagataattttattaatgaaattatatagattagatctcagtatttaaactgttcctcaattttgtgaggctgtgttggaaataacccgcctctagtgctgttggtatgcaaggcagcggtgcttaatcaatatttcctgtgctcaccagaggccctgactcttgactcttagaagtgcccgagatggggctaaactttattaaacagatcgcatattatgagcttgctgtagacacagtgcagctccacattaactctacagaccaaaccatttgtatctggcatcacttactatacacacgacatgcggcttttctgcatcaactgctatgacggttaagaatgtcagtatacaagaaggaatagctgatactgttttaaataatctgtaatttcaannnnnnnnnnnnnngctgaaatacattatattgtacgtttgagataattctagtacaaagtataataactgaagcatttactggacgtaatgttactctaatggttacttgctcgtgcgttgccacactgtgttataatttgcttcatttccttgctatttgatacatagtgtgcatttctctgtcactgtctattgt

SEQ ID NO: 249749 - DNA, 605 bp, Homo Sapiens
  misc_feature (396)..(396): n is a, c, g, or t
  misc_feature (446)..(446): n is a, c, g, or t
agcagtgggatacttcggagaacaagtttccccaagcgaaatggtcaacggcgctacagaacaaaggacgagctctaaagagtccagccccatcccctccccgacctctgatcgtaaagccaagactgccctcccagcccagagtgccgccaccttaccagccagaacccaggagacaccttcggcccagatggaaggcttcctcaatcggaaacacgagtgggaggcccacaataagaaagcctcaagcaggtcctggcacaatgtttattgtgtcataaataaccaagaaatgggtttctacaaagatgcaaagactgctgcttctggaattccctaccacagcgaggtccctgtgagtttgaaagagctgtctgcgaagtgcccttgttacanaaagaagaacacgttttcagctaagactaaatgatggcaatgagtacgtnttgcaagccaaagacgatgaggaaatgaacacatggatgcagggtatctgtttacgcaatctctgtgatcacaagtggtttgcaacacccataggacgccaggattaacccgggcgagaccctccccaccaggggcggaccaggcagggaggtcgttcc

SEQ ID NO: 249750 - DNA, 619 bp, Homo Sapiens
  misc_feature (54)..(54): n is a, c, g, or t
  misc_feature (107)..(107): n is a, c, g, or t
gcgggactggactccctggtgatggtgacgacgctggtgggaagggtctgcgcncagcttgaatgctggcgtgctctgggtcctggcagacacctcgtgatcagagnagatgccgaaagagatagccggaatccatgtgttcatttcctcatcgtctttggcttgaatgtaatcaagggccacttcgcagacagcttctttcaaactcacagggacctcgctgtggtagggaattccagaagcagcagtctttgcatctttgtagaaacccatttcttggttatttatgacacaataaacattgtgccaggacctgcttgaggctttcttattgtgggcctcccactcgtgtttccgattgaggaagccttccatctgggccgaaggtgtctcctgggttctggctggtaaggtggcggcactctgggctggaagggcagtcttggctttacgatcagaggtcggggaggggatggggctggactctttagagctcgtcctttgttctgtagcgccgttgaccatttcgcttgtgtccaccgtttctgccatccgtggagatccctgttcagctggcaaaccggggaaacttgttctccttttgaagtatcccactgct

SEQ ID NO: 249751 - DNA, 549 bp, Homo Sapiens
  misc_feature (114)..(126): n is a, c, g, or t
agcaagctccacattaactttacagcctgcatcaactgctatgacggttaaaaatgccagtatccaagaaggaatagaaacctgatactgttttaaataatctgtaatttcaannnnnnnnnnnnntgttgaaatacattatattgtacgtttgagataattctagtacaaagtataataaaactagatgtataataaaccctttaaatcattggtaagtgtacaagtggtggaactgaagcatttactggacaaagtaatgttactctaatggttacttgctcgtgcgttgccacactgtgttataatttgcttcatttccttgctatttgatacatagtgtgcatttctctgtcactgtaactattgtaatgacaaattttcatcttactgcacaatcaaaatgacattgataggaatgaactccagaggctgggcctgaacagggaggtggtcgctcaggcctggtgctcagtcgtacgacctgtacctctcaacttttgccctatctgttaaatatatgctatgtcattaaatgcttttaaatct

SEQ ID NO: 249752 - DNA, 417 bp, Homo Sapiens
gctgaaatacattatattgtactagaattatctcaaacgtacaataaaactagatgtataataaaccctttaaatcattggtaagtgtacaagtggtggaactgaagcatttactggacaaagtaatgttactctaatggttacttgctcgtgcgttgccacactgtgttataatttgcttcatttccttgctatttgatacatagtgtgcatttctctgtcactgtaactattgtaatgacaaattttcatcttactgcacaatcaaaatgacattgataggaatgaactccagaggctgggcctgaacagggaggtggtcgctcaggcctggtgctcagtcgtacgacctgtacctctcaacttttgccctatctgttaaatatatgctatgtcattaaatgcttttaaatcgaa

SEQ ID NO: 249753 - DNA, 1046 bp, Homo Sapiens
  misc_feature (417)..(431): n is a, c, g, or t
  misc_feature (874)..(883): n is a, c, g, or t
  misc_feature (977)..(991): n is a, c, g, or t
aaaagcatttaatgacatagcatatatttaacagatagggcaaaagttgagaggtacaggtcgtacgactgagcaccaggcctgagcgaccacctccctgttcaggcccagcctctggagttcattcctatcaatgtcattttgattgtgcagtaagatgaaaatttgtcattacaatagttacagtgacagagaaatgcacactatgtatcaaatagcaaggaaatgaagcaaattataacacagtgtggcaacgcacgagcaagtaaccattagagtaacattactttgtccagtaaatgcttcagttccaccacttgtacacttaccaatgatttaaagggtttattatacatctagttttattatactttgtactagaattatctcaaacgtacaatataatgtatttcagcnnnnnnnnnnnnnnnttgaaattacagattatttaaaacagtatcagttttctattccttcttgtatactgacattcttaaccgtcatagcagttgatgcagaaaagccgcatgtcgtgtgttagtaagtgatgccagatacaaatggtttggtctgtagagttaatgtggagctgcactgtggctgcagcaagatcataatatgcgatctgtttaataaaggttagccccatctcgggcacttctaagagtcaagagtcagggtaaccaccagaagtaaatggagagagaatggtgtcaggatattggtacattttgcctctggtgagcacaggaaatattgattaagcaccgctgccttgcataccaacagcactagaggcgggttatttccaacacagcctcacaaaattgaggaacagtttaaatactgagatctaatctatataatttcattnnnnnnnnnntctggccttccctctgcacctcaaacttttgtaacttggagataaagtgtttaggtgtgtttcccccaccccccacgaaatgctctataaattnnnnnnnnnnnnnnntcaaccacattgaggaacattaggcacagagagtaatgtgttggttctgagattg

SEQ ID NO: 249754 - DNA, 439 bp, Homo Sapiens
ggccggaaaataccattatattggtaccgtttgaagataaattcctagtacaaagtataaataaaacctagatgtataaataaacccctttaaatcattgggtaagtgtacaagtggtggaactgaagcatttactggacaaagtaatgttactctaatggttacttgctcgtgcgttgaccacactgtgttataatttgcttcatttccttgctatttgatacatagtgtgcatttctctgtcactgtaactattgtaatgacaaattttcatcttactgcacaatcaaaatgacattgataggaatgaactccagaggctgggcctgaacagggaggtggtcgctcaggcctggtgctcagtcgtacgacctgtacctctcaacttttgccctatctgttaaatatatgctatgtcattaaatgcttttaaatctaa

SEQ ID NO: 249755 - DNA, 2529 bp, Homo Sapiens
  misc_feature (187)..(219): n is a, c, g, or t
  misc_feature (1301)..(1301): n is a, c, g, or t
  misc_feature (1307)..(1307): n is a, c, g, or t
gggggaatcagtgcactgagctgtaaactcggcagaaagtgggattctgcatacgccatctctgagagccatggagggagccacacccctggtgacttcatggtgctggatgggagacgctagcggcatccttcagggccaagtttgataaataccaccgccatcattctgctcatcctcctcctgnnnnnnnnnnnnnnnnnnnnnnnnnnnnnnnnncctgtttatacattagaacaagataagatttgaaatacttccttgcaaataatgtgcaactcccaaggtgaaactcaaatagaaaaagtcatctctctggtagaaaggatggctttcctgtaatgactatagagtaagagtggcagcaatctttccatgcccttttcagcagaaggcacagaacagtagcgggactgccatctctggcaagatttcaggtaaagaatctcttcttaatttctaccttcctgtttctctgaatcagcccataggtgttgatgagtggccactcttaaagagtcactcagtatcagggatctactgtctttgttcaaaggtcaaataaaaacctagtctccttttattctactttctattcttagctagaatgaaactcagcatatatacacttctggacataataatattgaatagtaattacctttactagatgaaagaaattttcattacaaacttaaatcatgtaaaactcaacaactcagattcctggacctggtgtcctggttgggtccaaggtgattttacagaagaaaaaaacaactcaagcattctggtggcaacatagagattgtaggctgcttctaagaaagttattaacaatttggaaattcctaagtaggatgagagttagtaactggatacgagtgaagtttatatccaagttcagactcaaaggcattattatgatttgcttcttcccatgtcttccatgtcctgcttctcaaagtttttctcatccatcacactcctgccttaactgctctgagtatgcatttgttttcaattcatctttatttcaatctgtttaacttttgaatcgcatgggaatacgcacattaagttcctttctaaaataaggttttatgaagctgagtttcacgataagtgtcttgctattttttgagatgttttatggacaaagaaaactttacagatttatatgtattttgctgcaccagtaaatggaccattaactagggcccacctttaacagagcacccctttgaaagttttataggtatgaaatatatgtagatatttgtaaagggttttaatttttntttttngatggggtgctgtgtaaatcttgtatttataaatgtaatgaaggtattgacagaaaaaaatatatacaacttttataaaggattgtgtactgactgaatacatttaaaagaaaatatattttgaaacctgttctgctatgaacagagataacatatctttttactatgctattggtttttaggttaagcttcctaatgcataataaatttacagtggttacttttatcacccacacacacaaacaacacaaaccctacctccctcccacccaacatagaacacaaaaacatggctaccacaacccacgagaaagacctaaccttgcatgcccataaaccccaaccacacgacatggggggggccccctggccccaacaaaaatccatccaaaaccctcttttggcgccgcccgccccccacaggcgccccggaacctggcggtatattgtttttccccaggaaaaaccctgggcgatatcgcaagggggctgggggtattcccccccacaaaaacaacgcccccccgggggggcaaaccaagggtgtttctccacaaaccaacccccaaagcaggcaccctctccgaggggtcattatgggcgggcgcccattacctcagcgcgggcgctgcctcaaccgccgagactcctcccatcatctatacagtctgaaccgccgcgccggcggtccgcggagcaatcgatgatatggagtacaacggaggccgctgctgagcgacccacctcttcttttctgcataagaaggttctggcttacgcagcccgccacggagccgtggtagcaccctcccccctctgaatactggggcggccgtggcgttaattcacgaggacaaaccgtgtcgcgggatatatcgcgtcccgatgacgcgcagtatacctacacaaaccctcgcccgcgggatggagtcccatgattggtgggagcgaacgaagagatcaaacagtcgtgcgcggcccccgacggtggtgtgagacacatacagtgcccggggtggcaggatctaaatcacaaagaaatgcctcgcgggcgcccacgataccttcgggggcgcgcacactatcgcctcttttctataaccccccgcactccgctgccgggtccgcgtgaggccccaccccccgcccacgatctagggtacgtgtgctgggctggtggcgcccagcacacgccccgagggcttcttaccccctgcggtct

SEQ ID NO: 249756 - DNA, 792 bp, Homo Sapiens
gatgaactctgtcctggctgaactgtcctggaactactccggagacctcggggcgcgagtggccctgcatgaactctacaagtacatcaacaagtactatgaccagatcatcactgccctggaggaggatggcacggcccagaagatgcagctgggctatcggctccagcagattgcagctgctgtggagcctggcctgggcagccctggaagctcggaggagaggccaccttcttaggtgcctgtagtgactgacaagcagagttagtggaaggtgactcccagtctcctggtggctctggcatcggccctgctggatccacctcctagacccggggcctcaaggctcatggggtagtacccagcctgctccccgagtccagcgaccctgtgacaccggtctgcagggagttggggactaagggcttccagagagtggctggaagagactccaggcccctggggaaaactgtactgttcctgaacaactggccttggccacactgggattcggagaggaaggaggagagccccatgcttcctgtctgcctcctccaccatccctgacctcagttgagctgcctctggccttgttgctgctgccacatcctaggtctaagagttgaacgcctctcctaggccactacaaactgacccctcagcagggctggctgccacagggctgccctgcctcataggtagccatggtgagggctatctgctgcaggggggtcttggggagagtggtgactccattgacccagcttttcattaaaggataacacactgaaa

SEQ ID NO: 249757 - DNA, 643 bp, Homo Sapiens
ggcacgagagaaggagagcctgcagacagaggcctccagcttggtctgtctccccacctctaccagcatctgctgagctatgagccaaaccagggatttacagggaggaaaagctttcggactgctgaaggcccagcaggaagagaggctggatgagatcaacaagcaattcctagacgatcccaaatatagcagtgatgaggatctgccctccaaactggaaggcttcaaagagaaatacatggagtttgaccttaatggaaatggcgatattgatatcatgtccctgaaacgaatgctggagaaacttggagtccccaagactcacctagagctaaagaaattaattggagaggtgtccagtggctccggggagacgttcagctaccctgactttctcaggatgatgctgggcaagagatctgccatcctaaaaatgatcctgatgtatgaggaaaaagcgagagaaaaggaaaagccaacaggccccccagccaagaaagctatctctgagttgccctgatttgaagggaaaagggatgatgggattgaaggggcttctaatgacccagatatggaaacagaagacaaaattgtaagccagagtcaacaaattaaataaattaccccctcctccagatca

SEQ ID NO: 249758 - DNA, 335 bp, Homo Sapiens
gaaacccctgctattagaccaccccctcatggcacaactgcccctcacaagaattcagcttcagtgcaaaattcatctgttgcagtcctcagtgtcaatcacattaaaagacctcacagtgttccctcttctgtccagctaccttcgaccttaagtacacaaagtgcttgtcagaattcagtacatccagcaaataagcctattgctcccaatttcagtggcccccttaccatttgggggccctttaggcacattgttttggaaaacagccctacttctggcttcatggccttctgggggagggatctgtttgttttcaacttcaggtcaaccaa

SEQ ID NO: 249759 - DNA, 718 bp, Homo Sapiens
aaagatttctcatccatgggaggcttccttgggctgccaggctgtagaaacttcttcactgtgggcaggttgctgatctggttttcaagggccttcagcagagggaagctggagataagactggagtcaagctcctcgacgtagtagagaagttccaccagatgaatgtcagcctcaaaggcagggaagtagcgattttttattttctctttgatcaaggcaagcttggcatctttttcctcaggtggacatacgggcagaaggaggatcatttcacccaaatctgctataccttctatatacatatcaatcagggctctctcctttatgtctttcccatagaggttgtatttgctggcaatgtagttgagaatggctctggtctgcaccagcttcatcccatcaatctcaaccattggcacttgctggaacatcaaatatccatcatttcttaacttgtccaaatcttctgcagattttataaatttctcttcaaactctactccagctgcagccaggagccaccgggtggactccattctgccccgtgcattgaagtagtggagcttgggcttctctgccatgatagcagtctcctggaggtttctctaagctttgttaaacgctgtcaccgtcctggctcgacaactgaattccaggtcctaatgtatttataagctctttgttcctctcaatagctccctcccactgaaagaag

SEQ ID NO: 249760 - DNA, 1098 bp, Homo Sapiens
gtgctttttccctaacttgacccttctttcagtgggagggaactattgagaggaacaaagagcttataaatacattaggacctggaattcggttgtcgagccaggacggtgacagcgtttaacaaagcttagagaaacctccaggagactgctatcatggcagagaagcccaagctccactacttcaatgcacggggcagaatggagtccacccggtggctcctggctgcagctggagtagagtttgaagagaaatttataaaatctgcagaagatttggacaagttaagaaatgatggatatttgatgttccagcaagtgccaatggttgagattgatgggatgaagctggtgcagaccagagccattctcaactacattgccagcaaatacaacctctatgggaaagacataaaggagagagccctgattgatatgtatatagaaggtatagcagatttgggtgaaatgatcctccttctgcccgtatgtccacctgaggaaaaagatgccaagcttgccttgatcaaagagaaaataaaaaatcgctacttccctgcctttgaaaaagtcttaaagagccatggacaagactaccttgttggcaacaagctgagccgggctgacattcatctggtggaacttctctactacgtcgaggagcttgactccagtcttatctccagcttccctctgctgaaggccctgaaaaccagaatcagcaacctgcccacagtgaagaagtttctacagcctggcagcccaaggaagcctcccatggatgagaaatctttagaagaagcaaggaagattttcaggttttaataacgcagtcatggaggccaagaacttgcaataccaatgttctaaagttttgcaacaataaagtactttacctaagtgttgattgtgcctgttgtgaagctaatgaactctttcaaattatatgctaattaaataatacaactcctattcgctgacttagttaaaattgatttgttttcattaggatctgatgtgaattcagatttccaatcttctcctagccaaccattttcctggaattaaaaattcagtaaaaatggaaactataaatta

SEQ ID NO: 249761 - DNA, 745 bp, Homo Sapiens
cgctgacagcgtttaacaaagcttagagaaacctccaggagactgctatcatggcagagaagcccaagctccactacttcaatgcacggggcagaatggagtccacccggtggctcctggctgcagctggagtagagtttgaagagaaatttataaaatctgcagaagatttggacaagttaagaaatgatggatatttgatgttccagcaagtgccaatggttgagattgatgggatgaagctggtgcagaccagagccattctcaactacattgccagcaaatacaacctctatgggaaagacataaaggagagagccctgattgatatgtatatagaaggtatagcagatttgggtgaaatgatcctccttctgcccgtatgtccacctgaggaaaaagatgccaagcttgccttgatcaaagagaaaataaaaaatcgctacttccctgcctttgagtcttaaagagccatggacaagactaccttgttggcaacaagctgagccgggctgacattcatctggtggaacttctctactacgtcgaggagcttgactccagtcttatctccagctttcctctgctgaaggccctgccaaggaagccttccatggatgagaaatctttagaagaagcacggaagattttcaggttgtaataacgcagtcatggaggccaagaacttgcataccaatgttctaaagttttgcacaatgactcacctgagtgttgtgcctgtgtg

SEQ ID NO: 249762 - DNA, 337 bp, Homo Sapiens
  misc_feature (252)..(252): n is a, c, g, or t
gatgttaccaagtttgccctctatacctgggattcatcccagggcaccttcacctccaagggcaacttctactccgggaaatattccttggagtttaggagatgataacccaccttcatctagttttcctggaccctctcaacctcgtgtttctttccatccgggaaatccttttgttgaagaagaaggtcatagactagatccagtctagagaaaggagaagagaaattcttcctgctcctgtaccgtcanactctatcgatcagtatatacagtacactcacacgatgcacgtatactatcagcatatcagacttactgagagctctagaaccag

SEQ ID NO: 249763 - DNA, 1313 bp, Homo Sapiens
tgagggcagattcaagctatccccagggctctgctctggtcggagccagccccttctccctctctgccttccccgccccattcctgatgctgaactgttctggacccctggccctgagtctctcaggaccaaagtgggcacgggaacagctgtagtgtgtgcccccccggctttggccacaggtctccctctcgaggtgtggttgtgactgcgacccttcccttgccgtgatgccttcctcccccggggcttggtccagctccttcactctctagcagctgctggggcccacctcccatgccgaggaccagcaggggaaacctccagggagcatctgcaggctctgcttctgcccggctgctggcttgctctccctggtggctctccagcggccagcttcctcacccacccggcactccgctttgctctgtctcctgaggtgggcctgaccaacctccccttctctgcctcagtccctgggctccagggctcagctccacagccctctgcctagcaggctggttctccctgccaagcccatacctgtggtcacctggccctcctgtggtctgagtaccactcccctgccccaggagccactcccactccagctgcctgtttccagcaggttcccagtgcccccgacaagcccctgctggtgtctccatctcctgccaagcatcctccagtgcctcctcctgtgggcctggcctcagggctatggacagactcctgtcccatcccagagacccctcgtgatcgtgccctggcacgtgggccgtggcccggctgggtcggctgaagaactgcggatggaagctgcggaagaggccctgatggggcccaccatcccggacccaagtcttcttcctggcgggcctctcgtctccttcctggtttgggcggaagccatcaacctggatgcctacgtgggaagggacctcgaatgtgggaccccagcccctctccagctcgaaatccctccacagccacggggacaccctgcacctattcccacgggacaggctggacccagagactctggacccggggcctccccttgagtagagacccgccctctgactgatggacgccgctgacctggggtcagacccgtgggctggacccctgcccaccccgcaggaaccctgaggcctaggggagctgttgagccttcagtgtctgcatgtgggaagtgggctccttcacctacctcacagggctgttgtgaggggcgctgtgatgcggttccaaagcacagggcttggcgcaccccactgtgctctcaataaatgtgtttcctgtcttaacaa

SEQ ID NO: 249764 - DNA, 1006 bp, Homo Sapiens
  misc_feature (691)..(746): n is a, c, g, or t
  misc_feature (748)..(798): n is a, c, g, or t
  misc_feature (931)..(931): n is a, c, g, or t
  misc_feature (942)..(942): n is a, c, g, or t
  misc_feature (948)..(948): n is a, c, g, or t
  misc_feature (961)..(962): n is a, c, g, or t
  misc_feature (971)..(971): n is a, c, g, or t
  misc_feature (979)..(979): n is a, c, g, or t
  misc_feature (988)..(989): n is a, c, g, or t
  misc_feature (992)..(992): n is a, c, g, or t
  misc_feature (1001)..(1001): n is a, c, g, or t
gatagggagcgcgccttggctcgctggccttggcggcggctcctcaggagagctggggcgcccacgagaggatccctcacccgggtctctcctcagggatgacatcatccgtccacctccttgtcttcaaggaccacctcctctccatgctgagctgctgccaaggggcctgctgcccatctacacctcacgagggcactaggagcacggtttcctggatcccaccaacatacaaagcagccactcactgacccccaggaccaggatggcaaaggatgaagaggaccggaactgaccagccagctgtccctcttacctaaagacttaaaccaatgccctagtgagggggcattgggcattaagccctgacctttgctatgctcatactttgactctatgagtactttcctataagtctttgcttgtgttcacctgctagcaaactggagtgtttccctccccaagggggtgtcagtctttgtcgactgactctgtcatcacccttatgatgtcctgaatggaaggatccctttgggaaattctcaggagggggacctgggccaagggcttggccagcatcctgctggcaactccaaggccctgggtgggcttctggaatgagcatgctactgaatcaccaaaggcacgccccacctctctgaagatcttcctatccttttctgggggaatnnnnnnnnnnnnnnnnnnnnnnnnnnnnnnnnnnnnnnnnnnnnnnnnnnnnnnnngnnnnnnnnnnnnnnnnnnnnnnnnnnnnnnnnnnnnnnnnnnnnnnnnnnnaaggtttgacaggtcagtcccttcccacccctcttgcttgtcttacttgtcttatttattctccaacagcactccaaggcagcccttgtccacgggctccccttgcatcagggctaatctcgggcttgtcgangaagaggctgngacgtnatgaggtagctgnngattcagtntcgtcganaaggtcctnnttntctggaagnaaaaa

SEQ ID NO: 249765 - DNA, 1138 bp, Homo Sapiens
tgtctttaatgtctttgtttagttattctcttctcctgtctctcctgcacgctcctccctttccacttctttcttctctcttcggtcctccccgtggaacctaatgtatacgaaaatctagtggtgcctccagttgtattttcccatgaatgctttattgactttgcttcaagcctttcaaatggcatctggtgcttacctgtgagacatcccacctgacctgccagataaagacgattaaccctattttgaaactgagataaacctggcttggaaaagtttacctaccccaaggtctcagcactaagtaatttaactaggactcgaacccgaggcagcgactcctgactgcttaagacggcatggtaagaagcaggtccagaagtcgagagacctgggtgtgcaagttcctaggggatgctaagaacgagagaagggggagcaagtgtctctgtgaagggagtgtaaagacacagaagtgaaccggagacgcagagccctgtgagagaaggcatgaaaatgtgtccttgtgtccatgagccgaaaacatgacaaggattaagccacagaaaagtctttacctttgtgagcgtgcttccacggagtagagcgagtcaggaagcagtgggttgaagaggaaattggaggtgaggaaggaagacagcaagtgtagacaggcctttcaagaagcttggctgtgaaaggaaagacagagactgtagtggctagaaaagatgacagcagggacctgggaggctccaggctgccggcacagcaaagtcagaaatgcagagggaggccttctggaggtggccgggactgagacaggtacaattcttcctctagaactcagggaacaggggttcaatgatccagtggggcccaatctgtggagcctcttgacagcctctgtttccctgggagtggcagtggccggtcctggctcaggacagggagttgtgaggatcaaatgaatggacggttgcaaaaagtgacagaaacattcactaccattactcactgggagcaggactctcgattttacagcccactcgaatctcactggggcctggattttcactgaccataaattattcgtcctgaacattaaggatgtaaaaaccactggtaaaagctc

SEQ ID NO: 249766 - DNA, 423 bp, Homo Sapiens
acacccccaggtctcctcgaccttcctggaccctgccttccttacccatgcccgtccttaagcagttcaggagtcgcctgccctgggttccgagtccctagttaaattaccttagtgcctgagaccttggggtaggtaaacttttcccaagccccggtttatcctcagtttcaaaatagggttaatcgtctttatctggcaggtcaggtgggatgtctcacaggtaagcacccagatgccatttgaaaggcttgaagcaaagtcaataaagcattcatgggaaaatacaactggaggcaccactagattttcgtatacattaggttccacggggaggaccgaagagagaagaaagaagtggaaagggaggagcgtgcaggagagacaggagaagagaataactaaacaaagacattaaagaca

SEQ ID NO: 249767 - DNA, 654 bp, Homo Sapiens
gtaggaaagggagacttagaaaatattaaaagccaccaaaaacacatccaaagacggtttccccttacgttagttgggctaaaagaaagcaaatgggaagaaggttttaaattgattatcccagtgacaaatcccaggaagctttcacatcaaatcaccctattctgggtttttaactccttccatcgagtttaacctctttacctcccacatcctggtaaaccctgccccctccctaccgccccctttgctggtgattaaatcctgaaggtacacgaagtatttcagtgaatgaatggctaacagaaaagggcctcccctcccccttaccctggcggtgtttttcagttttattccactttccgcccttttcccttaatgaacacagggttaatctcggggccttgttcgaagggaagaggctgcagacgttaatgaggttagctgctggattccagtattcgtcgcataaggatccttctttgtctgcgagggaaaaacacactgattatcataatgaggtgaattggccaccgccgggccggggcgaatgtgggttcttaagcacacttctaattttggtgatggagccgacatttctttggcttctcatttaagtcttgcctctgtccagtgcgaagtccattcagcggg

SEQ ID NO: 249768 - DNA, 1128 bp, Homo Sapiens
  misc_feature (697)..(752): n is a, c, g, or t
  misc_feature (754)..(804): n is a, c, g, or t
  misc_feature (1002)..(1002): n is a, c, g, or t
  misc_feature (1005)..(1005): n is a, c, g, or t
  misc_feature (1026)..(1027): n is a, c, g, or t
  misc_feature (1031)..(1031): n is a, c, g, or t
  misc_feature (1036)..(1036): n is a, c, g, or t
  misc_feature (1068)..(1068): n is a, c, g, or t
  misc_feature (1086)..(1086): n is a, c, g, or t
  misc_feature (1111)..(1111): n is a, c, g, or t
cggagagcagagagggagcgcgccttggctcgctggccttggcggcggctcctcaggagagctggggcgcccacgagaggatccctcacccgggtctctcctcagggatgacatcatccgtccacctccttgtcttcaaggaccacctcctctccatgctgagctgctgccaaggggcctgctgcccatctacacctcacgagggcactaggagcacggtttcctggatcccaccaacatacaaagcagccactcactgacccccaggaccaggatggcaaaggatgaagaggaccggaactgaccagccagctgtccctcttacctaaagacttccaatgccctagtgagggggcattgggcattaagccctgacctttgctatgctcatactttgactctatgagtactttcctataagtctttgcttgtgttcacctgctagcaaactggagtgtttccctccccaagggggtgtcagtctttgtcgactgactctgtcatcacccttatgatgtcctgaatggaaggatccctttgggaaattctcaggagggggacctgggccaagggcttggccagcatcctgctggcaactccaaggccctgggtgggcttctggaatgagcatgctactgaatcaccaaaggcacgccccacctctctgaagatcttcctatccttttctgggggaatnnnnnnnnnnnnnnnnnnnnnnnnnnnnnnnnnnnnnnnnnnnnnnnnnnnnnnnngnnnnnnnnnnnnnnnnnnnnnnnnnnnnnnnnnnnnnnnnnnnnnnnnnnnaaggtttgacaggtcagtcccttcccacccctcttgcttgtcttacttgtcttatttattctccaacagcactccaggcagcccttgtccacggggctctccttgcatcagggctaatctcgggccttgtcgaaggaagaggctgcagacgttaatgaggttagctgctggattcagtattcggtcgcataaggatcntcntttgtctgcgaggaaaaacanntggntatcntaatgagggcgtggggcgtggccggctgggtnggtgaagactgcggtggnagctgcggagaggcctcgtggggcnccatccggcccagtctt

SEQ ID NO: 249769 - DNA, 1561 bp, Homo Sapiens
  misc_feature (25)..(25): n is a, c, g, or t
  misc_feature (56)..(56): n is a, c, g, or t
  misc_feature (986)..(987): n is a, c, g, or t
  misc_feature (997)..(997): n is a, c, g, or t
  misc_feature (1006)..(1006): n is a, c, g, or t
  misc_feature (1009)..(1009): n is a, c, g, or t
  misc_feature (1012)..(1012): n is a, c, g, or t
  misc_feature (1022)..(1022): n is a, c, g, or t
  misc_feature (1061)..(1061): n is a, c, g, or t
  misc_feature (1124)..(1124): n is a, c, g, or t
  misc_feature (1134)..(1134): n is a, c, g, or t
  misc_feature (1160)..(1160): n is a, c, g, or t
  misc_feature (1173)..(1173): n is a, c, g, or t
  misc_feature (1186)..(1186): n is a, c, g, or t
  misc_feature (1191)..(1191): n is a, c, g, or t
  misc_feature (1214)..(1214): n is a, c, g, or t
  misc_feature (1229)..(1229): n is a, c, g, or t
  misc_feature (1236)..(1236): n is a, c, g, or t
  misc_feature (1245)..(1245): n is a, c, g, or t
  misc_feature (1247)..(1247): n is a, c, g, or t
  misc_feature (1253)..(1253): n is a, c, g, or t
  misc_feature (1256)..(1256): n is a, c, g, or t
  misc_feature (1263)..(1263): n is a, c, g, or t
  misc_feature (1276)..(1276): n is a, c, g, or t
  misc_feature (1281)..(1282): n is a, c, g, or t
  misc_feature (1285)..(1286): n is a, c, g, or t
  misc_feature (1297)..(1297): n is a, c, g, or t
  misc_feature (1301)..(1301): n is a, c, g, or t
  misc_feature (1310)..(1310): n is a, c, g, or t
  misc_feature (1336)..(1336): n is a, c, g, or t
  misc_feature (1343)..(1343): n is a, c, g, or t
  misc_feature (1345)..(1345): n is a, c, g, or t
  misc_feature (1354)..(1354): n is a, c, g, or t
  misc_feature (1389)..(1389): n is a, c, g, or t
  misc_feature (1462)..(1462): n is a, c, g, or t
  misc_feature (1464)..(1464): n is a, c, g, or t
  misc_feature (1548)..(1548): n is a, c, g, or t
aacagcaggacctggaaggctcccngctgccggcacagcaaattcagaaatgccanagggaggccttctggaggtggccgggaactgaagacaggtaacaatacttcctctagaactcagggaaacaggggttcaatgatccagtggggcccaatctgtggagcctcttgacagcctctgtttccctgggatttcaaacagactgtcccattgtcaaacatttggtttgaaataaaaggactcttagtataactctgggccagaggggaagaaggggtgagggcagctagcgtggcaccctgggtccaactccaaccccttctgttgccagcaatgtgaccaaatacttacacctcccagcaagtttctgtttctttaatgtaaatgtaagccctaccccatgggacagagagttcagtcctcacgggtcctctctccctttcagcttctttaaattacaaaaatcaacactaccaaatgcatccctcaccctggaaatgaggctgccctcgtttacatacacatattacataaaaatcacatgttcatatcacataggaaagtgctctgggaaatggccacatgcataattcgtgttcttactcaagtcagcccgtcgatggtctctgcaaagcccctacctggatgcaaggagagcccgtggacaagggctgcctggagtgctgttggagaataaataagacaagtaagacaagcaagaggggtgggaagggactgacctgtcaaaccttttcaacaaacatttgctgatcacctcctctatgccagatcctgcctgaggcctcttttatctcatttaattctcacaacaaccctaggaggtggctctcatcgaccccattcccccagaaaaggataggaagatcttcagagaggtggggcgtgcctttggtgattcagtagcatgctcattccagaagcccacccagggccttggagttgccagcaggatgctggccaagccnntggcccaggnccccctccnganaangtcccaaagngatccttccattcagaacatcataagggtgataacatantcagtcaacaaaaactaacacccccttggggagggaaacactccagtttgctagcaggtgaanacaagcaaanacttataggaaagaaataatagagtnaaagtatgagtanagcaaaggtcagngtttnatgcccaatgcccccttactagngcattggtttaaatnggaaaanaaaatgaanancgagcnggncagttcnggtcctcttcatnctttnnaannctgttcttttnggtnagttagtgnctgctttgtatgttggtgggatccangaaaccntnctcctagtnccctcgtgaggtgtagatgggcagcaggccccttngcagcagctcagcatggagaggaggtggtccttgaagacaaggaggtggacggatgatgtcatcctcttgagnanagacccgggtgagggatcctctcgtgggcgccccagttctcctgaggagccgccgccaaggccagcgagccaaggcgcgctccntctctgctctccg

SEQ ID NO: 249770 - DNA, 814 bp, Homo Sapiens
  misc_feature (154)..(209): n is a, c, g, or t
  misc_feature (211)..(261): n is a, c, g, or t
  misc_feature (565)..(565): n is a, c, g, or t
  misc_feature (602)..(602): n is a, c, g, or t
  misc_feature (607)..(607): n is a, c, g, or t
  misc_feature (706)..(706): n is a, c, g, or t
aaattctcaggagggggacctgggccagggcttggccagcatcctgctggcaactccaaggccctgggtgggcttctggaatgagcatgctactgaatcaccaaaggcacgccccacctctctgaagatcttcctatccttttctgggggaatnnnnnnnnnnnnnnnnnnnnnnnnnnnnnnnnnnnnnnnnnnnnnnnnnnnnnnnngnnnnnnnnnnnnnnnnnnnnnnnnnnnnnnnnnnnnnnnnnnnnnnnnnnnaaggtttgacaggtcagtcccttcccacccctcttgcttgtcttacttgtcttatttattctccaacagcactccaggcagcccttgtccacgggctctccttgcatcagccaagcttcttgaaaggcctgtctacacttgctgtcttccttcctcacctccaatttcctcttcaacccactgcttcctgactcgctctactccgtggaagcacgctcacaaagggctaatctcgggccttgtcgaaggaagaggctgcagacgttaatgaggttagctgctggattccagtattcgtcgcatnaaggatccttctttgtctgcgaaggaaaaacacactngatanttcataatgaggcacgtgggcccgtgccccggctggggtcgctgaagaactgcggatgggagctgcggaagaaggccctgatggggcccaacatcccgnacccaagtctctttctgggggccctttcggctctttctggtttgggcggaagccatcacctggatgcctacgggggaagggccccccgaaggtgggaccccaacccct

SEQ ID NO: 249771 - DNA, 1266 bp, Homo Sapiens
aaggacttggaaacgatgacctagtgaggaggcgttgggcattaaggcctaacctatactatgctcatactttgactctatgagtactttcctataagtctttgcttgtgttcacctgctagcaaactggagtgtttccctccccaaggggtcgtcagtctttgtcgactgactctgtcatcacccttatgatgtcctgaatggaaggatccctttggaaattctcaggagggggacctgggccaagggcttggccagcatcctgctggcaactccaaggccctgggtgggcttctggaatgagcatgctactgaatcaccaaaggcacgccccacctctctgaagatcttcctatccttttctgggggaatggggtcgatgagagcaacctcctagggttgttgtgagaattaaatgagataaaagaggcctcaggcaggatctggcatagaggaggtgatcagcaaatgtttgttgaaaaggtttgacaggtcagtcccttcccacccctcttgcttgtcttacttgtcttatttattctccaacagcactccaggcagcccttgtccacgggctctccttgcatcagggctaatctcgggccttgtcgaaggaagaggctgcagacgttaatgaggttagctgctggattccagtattcgtcgcataaggatccttctttgtctgcgaaggaaaaacacactgattatcataatgaggcacgtgggccgtggcccggctgggtcggctgaagaactgcggatggaagctgcggaagaggccctgatggggcccaccatcccggacccaagtcttcttcctggcgggcctctcgtctccttcctggtttgggcggaagccatcacctggatgcctacgtgggaagggacctcgaatgtgggaccccagcccctctccagctcgaaatccctccacagccacggggacaccctgcacctattcccacgggacaggctggacccagagactctggacccggggcctccccttgagtagagacccgccctctgactgatggacgccgctgacctggggtcagacccgtgggctggacccctgcccaccccgcaggaaccctgaggcctaggggagctgttgagccttcagtgtctgcatgtgggaagtgggctccttcacctacctcacagggctgttgtgaggggcgctgtgatgcggttccaaagcacagggcttggcgcaccccactgtgctctcaataaatgtgtatcctgttttaacaaaaa

SEQ ID NO: 249772 - DNA, 1012 bp, Homo Sapiens
  misc_feature (320)..(375): n is a, c, g, or t
  misc_feature (377)..(427): n is a, c, g, or t
  misc_feature (953)..(953): n is a, c, g, or t
tttgctatgctcatactttgactctatgagtactttcctataagtctttgcttgtgttcacctgctagcaaactggagtgtttccctccccaagggggtgtcagtctttgtcgactgactctgtcatcacccttatgatgtcctgaatggaaggatccctttgggaaattctcaggagggggacctgggccaagggcttggccagcatcctgctggcaactccaaggccctgggtgggcttctggaatgagcatgctactgaatcaccaaaggcacgccccacctctctgaagatcttcctatccttttctgggggaatnnnnnnnnnnnnnnnnnnnnnnnnnnnnnnnnnnnnnnnnnnnnnnnnnnnnnnnngnnnnnnnnnnnnnnnnnnnnnnnnnnnnnnnnnnnnnnnnnnnnnnnnnnnaaggtttgacaggtcagtcccttcccacccctcttgcttgtcttacttgtcttatttattctccaacagcactccaggcagcccttgtccacgggctctccttgcatcagggctaatctcgggccttgtcgaaggaagaggctgcagacgttaatgaggttagctgctggattccagtattcgtcgcataaggatccttctttgtctgcgaaggaaaaacacactgattatcataatgaggcacgtgggccgtggccggcttgggtcggctgaagaactgcggatggaagctgcggaagaggccctgatgggcccaaccatcccggacccaagtcttcttcctggcgggcctctcgtctccttcctggtttgggcggaacaattcacctggatgcctacgtgggaagggacctcgaatgtgggaccccagcccctctccagctcgaaatccctccacagccacggggacaccctgcacctattcccacgggacaggctggacccagagactctgggacccggggcntccctttgagtagagacccgccttttgattgatgggacgccgttgactgggggttaaaa

SEQ ID NO: 249773 - DNA, 1073 bp, Homo Sapiens
  misc_feature (26)..(26): n is a, c, g, or t
  misc_feature (857)..(857): n is a, c, g, or t
  misc_feature (1038)..(1039): n is a, c, g, or t
  misc_feature (1061)..(1061): n is a, c, g, or t
agcacagtggggtgcgccaagccctngtgctttggaaccgcatcacagcgcccctcacaacagccctgtgaggtaggtgaaggagcccacttcccacatgcagacactgaaggctcaacagctcccctaggcctcagggttcctgcggggtgggcaggggtccagcccacgggtctgaccccaggtcagcggcgtccatcagtcagagggcgggtctctactcaaggggaggccccgggtccagagtctctgggtccagcctgtcccgtgggaataggtgcagggtgtccccgtggctgtggagggatttcgagctggagaggggctggggtcccacattcgaggtcccttcccacgtaggcatccaggtgatggcttccgcccaaaccaggaaggagacgagaggcccgccaggaagaagacttgggtccgggatggtgggccccatcagggcctcttccgcagcttccatccgcagttcttcagccgacccagccgggccacggcccacgtgcctcattatgataatcagtgtgtttttccttcgcagacaaagaaggatccttatgcgacgaatactggaatccagcagctaacctcattaacgtctgcagcctcttccttcgacaaggcccgagattagccctttgtgagcgtgcttccaccggagtagagcgagtcaggaagcagtgggttgaagaggaaattggaggtgaggaaggaagacagcaagtgtagacaggcctttcaagaagcttggctgatgcaaggagagcccgtggacaagggctgcctggagtgctgttggagaataaataagacaagtaagacaagcaagagggggtgggaagggactnacctgtcaaaccttttcaacaaacatttgctgatcacctcctctatgccagatcctgcctgaagcctctgttatctcatttaattctcacaacaaccctaggagggtgctctcatcgacccattcccccagaaaaggataggaagatcttcagagaggtggggcgtgctttttgtgattanntagcatgctcattcagaagccncccagggccttg

SEQ ID NO: 249774 - DNA, 1265 bp, Homo Sapiens
  misc_feature (435)..(435): n is a, c, g, or t
  misc_feature (459)..(459): n is a, c, g, or t
  misc_feature (636)..(636): n is a, c, g, or t
  misc_feature (699)..(754): n is a, c, g, or t
  misc_feature (756)..(806): n is a, c, g, or t
  misc_feature (1144)..(1144): n is a, c, g, or t
  misc_feature (1193)..(1193): n is a, c, g, or t
  misc_feature (1219)..(1219): n is a, c, g, or t
ggagagcagagagggagcgcgccttggctcgctggccttggcggcggctcctcaggagagctggggcgcccacgagaggatccctcacccgggtctctcctcagggatgacatcatccgtccacctccttgtcttcaaggaccacctcctctccatgctgagctgctgccaaggggcctgctgcccatctacacctcacgagggcactaggagcacggtttcctggatcccaccaacatacaaagcagccactcactgacccccaggaccaggatggcaaaggatgaagaggaccggaactgaccagccagctgtccctcttacctaaagacttaaaccaatgccctagtgagggggcattgggcattaagccctgacctttgctatgctcatactttgactctatgagtactttcctataagtctttgcttgtnttcacctgctagcaaactggagtntttccctccccaagggggtgtcagtctttgtcgactgactctgtcatcacccttatgatgtcctgaatggaaggatccctttgggaaattctcaggagggggacctgggccaagggcttggccagcatcctgctggcaactccaaggccctgggtgggcttctggaatgagcatgcnactgaatcaccaaaggcacgccccacctctctgaagatcttcctatccttttctgggggaatnnnnnnnnnnnnnnnnnnnnnnnnnnnnnnnnnnnnnnnnnnnnnnnnnnnnnnnngnnnnnnnnnnnnnnnnnnnnnnnnnnnnnnnnnnnnnnnnnnnnnnnnnnnaaggtttgacaggtcagtcccttcccacccctcttgcttgtcttacttgtcttatttattctccaacagcactccaggcagcccttgtccacgggctctccttgcatcagccaagcttcttgaaaggcctgtctacacttgctgtcttccttcctcacctccaatttcctcttcaacccactgcttcctgactcgctctactccgtggaagcacgctcacaaagggctaatctcgggccttgtcgaaggaagaggctgcagacgttaatgaggttagctgctggattccagtattcgtcgcataaggatccttctttgtctgcggaggaaaaacacantgattatcataatgaggcacgtggggcctggccgtcttgggttcgggtnaaggaactggcggatgggaaggtgcnggaaggaggccctgatgggcccaaccattcccggacccaagtcttt

SEQ ID NO: 249775 - DNA, 781 bp, Homo Sapiens
  misc_feature (15)..(15): n is a, c, g, or t
  misc_feature (31)..(31): n is a, c, g, or t
  misc_feature (60)..(60): n is a, c, g, or t
  misc_feature (78)..(78): n is a, c, g, or t
  misc_feature (98)..(98): n is a, c, g, or t
  misc_feature (108)..(108): n is a, c, g, or t
  misc_feature (539)..(589): n is a, c, g, or t
  misc_feature (591)..(646): n is a, c, g, or t
ttaaaaggcgggttntctactcaaagggaancccgggttccaaatctctggttccacctntcccttggaaatagttcnagttttccccctggctgtgnaggattttcnaactgaaaagggctgggtcccacattcgaggtcccttcccacgtaggcatcccaggttgaaatgttccgccccaaaccaggaaggagacgagaggcccgcccaggaagaagacttgggtcccgggatggttgggccccatcagggcctcttccgcagcttccatccgcagttcttcagccgacccagaccgccacggcccacgtgcctttgtgagcgtgcttccacggagtagagcgagtcaggaagcagtgggttgaagaggaaattggaggtgaggaaggaagacagcaagtgtagacaggcctttcaagaagcttggctgatgcaaggagagcccgtggacaagggctgcctggagtgctgttggagaataaataagacaagtaagacaagcaagaggggtgggaagggactgacctgtcaaaccttnnnnnnnnnnnnnnnnnnnnnnnnnnnnnnnnnnnnnnnnnnnnnnnnnnncnnnnnnnnnnnnnnnnnnnnnnnnnnnnnnnnnnnnnnnnnnnnnnnnnnnnnnnnattcccccagaaaaggataggaagatcttcagagaggtcgggcgtgcctttggtgattcagtagcatgctcattccagaagcccacccagggccttggagttgccagcaggatgctggccaagcccttggcccag

SEQ ID NO: 249776 - DNA, 523 bp, Homo Sapiens
  misc_feature (365)..(379): n is a, c, g, or t
tatgcaggctccacggatgagaacacggacagtgaggaacaccaggagcctcctgatctgccagtccctgagctcccagatttcttccagggcaagcacttctttctttacggggagttccctggggacgagcggcagaaactcatccgatacgtcacagccttcaatggggagctcgaggactatatgagtgaccgggttcagtttgtgatcacagcacaggaatgggatcccagctttgaggaggccctgatggacaacccctccctggcattcgttcgtccccgatggatctacagttgcaatgagaagcagaagttacttcctcaccagctctatggggtggtgccgcaggcctgaagtannnnnnnnnnnnnnnacgcacatgtgtttataaagataacagctgtaagaatgaatgagattgagggtgggggggtgcgtatgtatgtctatgaaagcctaatcatttctgggcaatgatgaaaaggttttactactgatctttgtaactatgatggtt

SEQ ID NO: 249777 - DNA, 468 bp, Homo Sapiens
  misc_feature (33)..(33): n is a, c, g, or t
  misc_feature (67)..(67): n is a, c, g, or t
  misc_feature (89)..(89): n is a, c, g, or t
  misc_feature (113)..(113): n is a, c, g, or t
  misc_feature (404)..(404): n is a, c, g, or t
aaaaaattcaaagcttcaaaaactccccctaancctcaaggtttcttccgggtttgggcaaggttcnaaccccacgggttttaaccccnagtcaacggcgtccatcaatcaanagggcgggtctctactcaaaggaaggccccgggttccaaaatctctgggtccagcctgtcccgtgggaataggtgccaggttgtccccgtggctgtggagggatttcgaagctggaaaggggctggggtcccacattcgaggtcccttcccacgtaggcatccaggtgaatgttccgcccaaaccaggaaggagacgagaggcccgccaggaagaagacttgggtccgggatggtggccccatcagggcctcttccgcagcttccatccgcagttcttcagccgacccagnccgccacggcccacgtgccagggaacgatcacgaggggtctctgggatgggacaggagtctgct

SEQ ID NO: 249778 - DNA, 847 bp, Homo Sapiens
  misc_feature (32)..(32): n is a, c, g, or t
  misc_feature (39)..(39): n is a, c, g, or t
atgaacaacagggaccctgggaggctcccccngctgccnggcaacagccaaaattcaagaaaatgcaaaagggaggcccttcctggaaggtggcccgggaactgaagaacaggtaacaattccttccctcctaagaactccagggaacaggggttcaatgatccagtggggccccaatctgtggagcctcttgacagcctctgtttccctgggagtggcagtggccggtcctggctcaggacagggagttgtgaggatcaaatgaatggacggttgcaaaaagtgacagaaacattcactaccattactcactgggagcaggactctcgattttacagcccactcgaatctcactggggcctggattttcactgaccataaattattcgtcctgaacattaaggatgtaaaaaaccactggtaaaaagctccctgccagtctctggaagacaaaaggtcccctccctaatagccctggattaactcaaagccagtctccgccccacttcatttgtcaccgtccaagtcatccttgcacctccatttgccacataatccaatcagcccctttcagaggctgggcagctattgtctacactgagctgggcttctctaaagcagcccaagttgtttttgtcttgtccggacaaaactggttggcttaaaacgggacgaaagaaattcctggtcaaatgaggaccccaattaggttccaagagactgttttcattatctttgtatcagatacctagcctggtgcactgggcagattgtcggtgccccagaaaatgtttgttgaattaattcatttttatttattctggaatttcttaattgaacacaaaca

SEQ ID NO: 249779 - DNA, 405 bp, Homo Sapiens
  misc_feature (321)..(321): n is a, c, g, or t
  misc_feature (347)..(347): n is a, c, g, or t
  misc_feature (392)..(392): n is a, c, g, or t
gctctactccgtggaagcacgctcacaaaggtaaagacttttctgtggcttaatccttgtcatgttttcggctcatggacacaaggacacattttcatgccttctctcacagggctctgcgtctccggttcacttctgtgtctttacactcccttcacagagacacttgctcccccttctctcgttcttagcatcccctaggaacttgcacacccaggtctctcgacttctggacctgcttcttaccatgccgtcttaagcagtcaggagtcgctgcctggggttcgagtcctagttaaattacttaggtgctgagacctntggggttaggtaaactttttccaagnccagggtttattctcagtttcaaaatagggtttaaatcgtctttnatcttgggcaggt

SEQ ID NO: 249780 - DNA, 1060 bp, Homo Sapiens
  misc_feature (19)..(19): n is a, c, g, or t
  misc_feature (342)..(342): n is a, c, g, or t
gtggcctcacaggacacangctttcccaggaggcagtctgacacagtatgatgatgaagatcccatggggcagcatcccagtactgatgttgctcctgctcctgggcctaatcgatatctcccaggcccagctcagctgcaccgggcccccagccatccctggcatcccgggtatccctgggacacctggccccgatggccaacctgggaccccagggataaaaggagagaaagggcttccagggctggctggagaccatggtgagttcggagagaagggagacccagggattcctgggaatccaggaaaagtcggccccaagggccccatgggccataaanggtggcccaggggcccctggagcccaggccccaaaggtgaatcgggagactacaaggccacccagaaaatcgccttctctgccacaagaaccatcaacgtccccctgcgccgggaccagaccatccgcttcgaccacgtgatcaccaacatgaacaacaattatgagccccgcagtggcaagttcacctgcaaggtccccggtctctactacttcacctaccacgccagctctcgagggaacctgtgcgtgaacctcatgcgtggccgggagcgtgcacagaaggtggtcaccttctgtgactatgcctacaacaccttccaggtcaccaccggtggcatggtcctcaagctggagcagggggagaacgtcttcctgcaggccaccgacaagaactcactactgggcatggagggtgccaacagcatcttttccgggttcctgctctttccagatatggaggcctgacctgtgggctgcttcacatccaccccggctccccctgccagcaacgctcactctacccccaacaccaccccttgcccagccaatgcacacagtagggcttggtgaatgctgctgagtgaatgagtaaataaactcttcaaggccaagggacagtggtctaattcaactctgtgtcccagcacctggcacaccagaagtgccatgctcagaaatgttggttacatgaatgaatgaaccatgaatgaatgaaa

SEQ ID NO: 249781 - DNA, 512 bp, Homo Sapiens
cctacatctatagcttggcacagagagattcacgcaccctcaagagtgtgggtgagacatatacagcctgttagacctgaaggcagatggctcttcttaaggccaataaggatctcatttccgcagatttgaaggagttcagcgttctgctgaatcagcaggtcttcaatgatcctctcgtctctgaagaagacatggtgactgtggtggaggactggatgaacttctacatcaactattacaggcagcaggtgacaggggagccccaagagcgagacaaggctctgcaggagcttcggcaagagctgaacactcttgccaaccctttcctggccaagtacagggacttcctgaagtctcatgagctcccgagtcacccaccgccctcctcctagctcagggacccagcccctcctctctgagaaactctgaccttcatgtccttaggctgtgctcctgccactctaccctgacacctcaataaagaccagtgctggttttgttgggaaaaa

SEQ ID NO: 249782 - DNA, 2829 bp, Homo Sapiens
acggcagtaaccctagggtttaaggtagcgaggcctgggtggcgaattcggcacgagggtagcaacagcgagcgtgccggtcgctagtcgcgggtccccgagtgagcacgccagggagcaggagaccaaacgacgggggtcggagtcagagtcgcagtgggagtccccggaccggagcacgagcctgagcgggagagcgccgctcgcacgcccgtcgccacccgcgtacccggcgcagccagagccaccagcgcagcgctgccatggagcccagcagcaagaagctgacgggtcgcctcatgctggccgtgggaggagcagtgcttggctccctgcagtttggctacaacactggagtcatcaatgccccccagaaggtgatcgaggagttctacaaccagacatgggtccaccgctatggggagagcatcctgcccaccacgctcaccacgctctggtccctctcagtggccatcttttctgttgggggcatgattggctccttctctgtgggccttttcgttaaccgctttggccggcggaattcaatgctgatgatgaacctgctggccttcgtgtccgccgtgctcatgggcttctcgaaactgggcaagtcctttgagatgctgatcctgggccgcttcatcatcggtgtgtactgcggcctgaccacaggcttcgtgcccatgtatggtgggtgaagtgtcacccacagcccttcgtggggccctgggcaccctgcaccagctgggcatcgtcgtcggcatcctcatcgcccaggtgttcggcctggactccatcatgggcaacaaggacctgtggcccctgctgctgagcatcatcttcatcccggccctgctgcagtgcatcgtgctgcccttctgccccgagagtccccgcttcctgctcatcaaccgcaacgaggagaaccggggccaagagtgtgctaaagaagctgcgcgggacagctgacgtgacccatgacctgcaggagatgaaggaagagagtcggcagatgatgcgggagaagaaggtcaccatcctggagctgttccgctcccccgcctaccgccagcccatcctcatcgctgtggtgctgcagctgtcccagcagctgtctggcatcaacgctgtcttctattactccacgagcatcttcgagaaggcgggggtgcagcagcctgtgtatgccaccattggctccggtatcgtcaacacggccttcactgtcgtgtcgctgtttgtggtggagcgagcaggccggcggaccctgcacctcataggcctcgctggcatggcgggttgtgccatactcatgaccatcgcgctagcactgctggagcagctaccctggatgtcctatctgagcatcgtggccatctttggctttgtggccttctttgaagtgggtcctggccccatcccatggttcatcgtggctgaactcttcagccagggtccacgtccagctgccattgccgttgcaggcttctccaactggacctcaaatttcattgtgggcatgtgcttccagtatgtggagcaactgtgtggtccctacgtcttcatcatcttcactgtgctcctggttctgttcttcatcttcacctacttcaaagttcctgagactaaaggccggaccttcgatgagatcgcttccggcttccggcaggggggagccagccaaagtgacaagacacccgaggagctgttccatcccctgggggctgattcccaagtgtgagtcgccccagatcaccagcccggcctgctcccagcagccctaaggatctctcaggagcacaggcagctggatgagacttccaaacctgacagatgtcagccgagccgggcctggggctcctttctccagccagcaatgatgtccagaagaatattcaggacttaacggctccaggattttaacaaaagcaagactgttgctcaaatctattcagacaagcaacaggttttataatttttttattactgattttgttatttttatatcagcctgagtctcctgtgcccacatcccaggcttcaccctgaatggttccatgcctgagggtggagactaagccctgtcgagacacttgccttcttcacccagctaatctgtagggctggacctatgtcctaaggacacactaatcgaactatgaactacaaagcttctatcccaggaggtggctatggccacccgttctgctggcctggatctccccactctaggggtcaggctccattaggatttgccccttcccatctcttcctacccaaccactcaaattaatctttctttacctgagaccagttgggagcactggagtgcagggaggagaggggaagggccagtctgggctgccgggttctagtctcctttgcactgagggccacactattaccatgagaagagggcctgtgggagcctgcaaactcactgctcaagaagacatggagactcctgccctgttgtgtatagatgcaagatatttatatatatttttggttgtcaatattaaatacagacactaagttatagtatatctggacaagccaacttgtaaatacaccacctcactcctgttacttacctaaacagatataaatggctggtttttagaaacatggttttgaaatgcttgtggattgagggtaggaggtttggatgggagtgagacagaagtaagtggggttgcaaccactgcaacggcttagacttcgactcaggatccagtcccttacacgtacctctcatcagtgtcctcttgctcaaaaatctgtttgatccctgttacccagagaatatatacattctttatcttg

SEQ ID NO: 249783 - DNA, 1047 bp, Homo Sapiens
aattgcacctgggagttatggcaggagtctccatgtcttcttgagcagtgagtttgcaaggctcccacaggccctcttcacatggtaatagtgatggccctcagtagcaaaggagactagaacccggcagcccagactggcccttcccctctccctccctgcactcgagatgctcccaactggtctcaggtaacgaaagattaatttgagtggttgggtacggaagagatgggaaggggcaaatcctaatggagcctgacccctagagtggcggagatccatgccagcagaacgcggtggccatcagccacctcctgggatagaagctttgctagttacatagcttcacattcactgtgtcctcaggacataggtccagccctacagattatgctgggtgaagaaggccaagtgtcgtcgaataagggcttgaggtctccagacctcgaggcataggaaccattcagggctgaacgccatggggatgtggcgcacagggaaactcatggcttgatatccaagattacaccaaaatcacgtgaatccccagtcctacatttagtgacacagcccatgtttggcctatgatcgtgaacctctagaagttttgacggccagcaagatacgtatgggcggccatggttttacgcacataccctggggaatcacggtccaagctccccatgtatctaagttcctctgcattggaaacattcactggcctgggacctggcaagtaaatcgtgagcgcccccaagaaccaggcttcgggcaaataccattcggtgctaacaaggggcctgttgggcaacgtattctcctgttaccacacgttttggcacaattgctgcctaccttggaatcaggaagtctcgtcacaggggcgttgcactggagccaagcagggcctacggctatggtagaaaaacttggtgagggaacacaacgagtatattggcggaaaattcagatcctctcaggggggacctcggtatgcaagagcccttgcgagaatgactgatgggccaccacatttgggtatgggct

SEQ ID NO: 249784 - DNA, 1006 bp, Homo Sapiens
ggggcgaggcctgggtggcgaattcggcacgagggtagcaacagcgagcgtgccggtcgctagtcgcgggtccccgagtgagcacgccagggagcaggagaccaaacgacgggggtcggagtcagagtcgcagtgggagtccccggaccggagcacgagcctgagcgggagagcgccgctcgcacgcccgtcgccacccgcgtacccggcgcagccagagccaccagcgcagcgctgccatggagcccagcagcaagaagctgacgggtcgcctcatgctggccgtgggaggagcagtgcttggctccctgcagtttggctacaacactggagtcatcaatgccccccagaaggtgatcgaggagttctacaaccagacatgggtccaccgctatggggagagcatcctgcccaccacgctcaccacgctctggtccctctcagtggccatcttttctgttgggggcatgattggctccttctctgtgggccttttcgttaaccgctttggccggcggaattcaatgctgatgatgaacctgctggccttcgtgtccgccgtgctcatgggcttctcgaaactgggcaagtcctttgagatgctgatcctgggccgcttcatcatcggtgtgtactgcggcctgaccacaggcttcggccatgatattttggggggggaaagggtcaacccacagccctttcgtgggggcccctggggcacccctgcaccagctggggccattcgtcgtcgggcatcctcattcgccccaagggggtttcgggccttgggacttcaatcatgggggcaaccaaagggaacctggggggccccctgcctggcttgaaccatcatcttttcatcccggggcccctggctggcaaagtggcattccgtgggtggcccctttctgggcccccgaagaaggtcccccggcttttccctgggctcttcaaacccggccaaggggagggaaaaccccggggggccacaaaagaggtgggcctt

SEQ ID NO: 249785 - DNA, 1049 bp, Homo Sapiens
ggctgggtggcgaattcggcacgagggtagcaacagcgagcgtgccggtcgctagtcgcgggtccccgagtgagcacgccagggagcaggagaccaaacgacgggggtcggagtcagagtcgcagtgggagtccccggaccggagcacgagcctgagcgggagagcgccgctcgcacgcccgtcgccacccgcgtacccggcgcagccagagccaccagcgcagcgctgccatggagcccagcagcaagaagctgacgggtcgcctcatgctggccgtgggaggagcagtgcttggctccctgcagtttggctacaacactggagtcatcaatgccccccagaaggtgatcgaggagttctacaaccagacatgggtccaccgctatggggagagcatcctgcccaccacgctcaccacgctctggtccctctcagtggccatcttttctgttgggggcatgattggctccttctctgtgggccttttcgttaaccgctttggccggcggaattcaatgctgatgatgaacctgctggccttcgtgtccgccgtgctcatgggcttctcgaaactgggcaagtcctttgagatgctgatcctgggccgcttcatcatcggtgtgtactgcggcctgaccacaggcttcgtgcccatggtatgggggggtgaaagtgtcacccacacccccttcgtgggggccctggggcacccctgcaccagctggggcatccggcgtccggcatcccccatcgccccagggtgtttcggccctgggactcccattcatgggccaacaaggaaacctggggcccccgtgctgctggagattcatctttcctccccgggccctggcttgcaagggcattccgggcttgcccctttcgggcccccaagaagtccccccgccttccctgctcgcatcaaaccccgcaacggaggaaaacacccggccccaaagagagggcgcctataaaaacacttcgcggcggggaacaaacttgacgccgtgacccctggtacctcctgaggacgtatattgaagagacc

SEQ ID NO: 249786 - DNA, 515 bp, Homo Sapiens
  misc_feature (55)..(55): n is a, c, g, or t
ggacaacacctaatcgaaacttatgaaacttacaaaagcttcctaacccccaggnagggcctaatggcccaacccgttctgctggcccccgggatctcccccaactcctaggggtccaggccccccattaggatttgccccccttccccatctccttccctaccccaacccactcaaattaatcctttcctttaccctgagacccagttgggaagcactggagtgcagggaggagaggggaagggccagtctgggctgccgggttctagtctcctttgcactgagggccacactattaccatgagaagagggcctgtgggagcctgcaaactcactgctcaagaagacatggagactcctgccctgttgtgtatagatgcaagatatttatatatatttttggttgtcaatattaaatacagacactaagttatagtatatctggacaagccaacttgtaaatacaccacctcactcctgttacttacctaaacagatataaatggctggttttt

SEQ ID NO: 249787 - DNA, 538 bp, Homo Sapiens
  misc_feature (67)..(104): n is a, c, g, or t
  misc_feature (304)..(304): n is a, c, g, or t
  misc_feature (307)..(307): n is a, c, g, or t
  misc_feature (505)..(505): n is a, c, g, or t
acttaacggctccaggattttaacaaaagcaagactgttgctcaaatctattcagacaagcaacagnnnnnnnnnnnnnnnnnnnnnnnnnnnnnnnnnnnnnntatcagcctgagtctcctgtgcccacatcccaggcttcaccctgaatggttccatgcctgagggtggagactaagccctgtcgagacacttgccttcttcacccagctaatctgtagggctggacctatgtcctaaggacacactaatcgaactatgaactacaaagcttctatcccagggaggtggctatggcccccgnttnctgctggcctgggatctccccactctaggggtcaggctccattaggatttgccccttcccatctcttcctacccaaccactcaaattaatctttctttaacccgaggaccagttggggagcactgggagtgcaggggagggagaggggggaaggggccagtctggggcttgccggggttctaggtctcctttgcactnaggggccacaatatttaccatgaggaagaaggg

SEQ ID NO: 249788 - DNA, 753 bp, Homo Sapiens
caaaaaatatttcatcccctccgtcactgaaattatctacttcagccacctttcttattctcgtgttaggagggcacgtttatggactttttaatttccatgtgccatattgtccactaccggcagtagccaaagctagctgtttcagtcccacagaagagacagtgctctgccatgatgacagggcactgctagggctggtttttcttgtttttcccttttggcagtgtggacttcaggaactagatgtatatgcacaagggattgagtttacactaaaactaggaaatggagttttcaatctatgttcttgcctcttcatacttttatttattttttgtcatcctgccttatactgggctaacaatgagataaaataaaaatacctttgaatactcttttccctttcatgcatttaaagccatggaggaactagaccattagctgttgccgtcacatgcttaaacaccagtttacttagcgtgttatgaccttcctcacccatactaccaaatttaaatgggtcccgacttcaccctctggaaggaagtaaactcttctctccccatggtttcagagcagtttttacctgcaagcaccatctctgtattgtgctcttactagattatacagttcttgagagggattgcatcttggtgtttttgtatttccacctcacccccagcacatagcccagtctcttgcacaaattaagtacttaatgtgtgttgagctaaattgaataaaggatta

SEQ ID NO: 249789 - DNA, 579 bp, Homo Sapiens
gtctattggccatgaggcatttaggacccttgttgattaaatggctgagatgataaacgagtatccagctcccaagaatccaaccacagcaaatttcgtgaaggtgaacatcgcaaatcgcttcccacagccctcgttgccgcagcacccacagcagtcattgttcttcaggcccaagaacaccagcgcagggaagatcatcaagacaccgcttcctaatattcctccaggaaaaaataacaggatgttagccaggaagccaaaaaaagcaaggggaatgagggtcccccccaggcatctggcacagcccccagtgcacattctggggtggtacgacacaggtcagcaatcaaaagctcctcactgcctccttcacggggcctcttcaagggtggccagagagtccttgtaattgtctccaattcaatcagtatggggctgagaaccaaatttctgtgaactgtgtccttggagttgcttcagcttctcaaaaatagcagaacctcgatggcaatgcacattaaaacattctccctgacctgaagtgctttgttttttctcgtgaaaaatcctgcagcc

SEQ ID NO: 249790 - DNA, 705 bp, Homo Sapiens
tggggcccctttgtggggactgccagtgttgtggcttctgtgggggaaaatggacccggtttacataaaacttctcctcttcttggaaattattaattcccatctgctcccaagctgataagccttagaaaaggcagttattccttctttcccaaccagctttgcccgagttagaattttgttattttcaaataaaaaatagtttggccacttaacaaatttgatttataaatctttcaaattagttcctttttagaatttaccaacaggttcaaagcatacttttcatgatttttttattacaaatgtaaaatgtataaagtcacatgtactgccatactacttctttgtatataaagatgtttatatctttggaagttttacataaatcaaaggaagaaagcacatttaaaatgagaaactaagaccaatttctgtttttaagaggaaaaagaatgattgatgtatcctaagtattgttatttgttgtctttttttgctgccttgcttgagttgcttgtgactgatcttttgaggctgtcatcatggctagggttcttttatgtatgttaaattaaaacctgaattcagaggtaacgtaacaaagattgtgtgtgttttaggaggggggacaaaacgttgaatgaataacaactcatcttttctacaaatgcttcctttgatcaaacaaaaaaaagtttttaa

SEQ ID NO: 249791 - DNA, 1348 bp, Homo Sapiens
  misc_feature (1264)..(1265): n is a, c, g, or t
  misc_feature (1294)..(1294): n is a, c, g, or t
  misc_feature (1296)..(1296): n is a, c, g, or t
  misc_feature (1298)..(1298): n is a, c, g, or t
  misc_feature (1304)..(1304): n is a, c, g, or t
  misc_feature (1316)..(1317): n is a, c, g, or t
  misc_feature (1319)..(1320): n is a, c, g, or t
ctatttttgagaagctgaagcaactccaaggacacagttcacagaaatttggttctcagccccaaaatactgattgaattggagacaattacaaggactctctggccaaaaacccttgaagaggccccgtgaaggaggcagtgaggagcttttgattgctgacctgtgtcgtaccaccccagaatgtgcactgggggctgtgccagatgcctgggggggaccctcattccccttgctttttttggcttcctggctaacatcctgttattttttcctggaggaaaagtgatagatgacaacgaccacctttcccaagagatctggtttttcggaggaatattaggaagcggtgtcttgatgatcttccctgcgctggtgttcttgggcctgaagaacaatgactgctgtgggtgctgcggcaacgagggctgtgggaagcgatttgcgatgttcacctccacgatatttgctgtggttggattcttgggagctggatactcgtttatcatctcagccatttcaatcaacaagggtcctaaatgcctcatggccaatagtacatggggctaccccttccacgacggggattatctcaatgatgaggccttatggaacaagtgccgagagcctctcaatgtggttccctggaatctgaccctcttctccatcctgctggtcgtaggaggaatccagatggttctctgcgccatccaggtggtcaatggcctcctggggaccctctgtggggactgccagtgttgtggctgctgtgggggagatggacccgtttaaacctccgagatgagctgctcagactctacagcatgacgactacaatttcttttcataaaacttcttctcttcttggaattattaattcctatctgcttcctagctgataaagcttagaaaaggcagttattccttctttccaaccagctttgctcgagttagaattttgttattttcaaataaaaaatagtttggccacttaacaaatttgatttataaatctttcaaattagttcctttttagaatttaccaacaggttcaaagcatacttttcatgatttttttattacaaatgtaaaatgtataaagtcacatgtactgccatactacttctttgtatataaagatgtttatatctttggaagttttacataaatcaaaggaagaaagcacatttaaaatgagaaactaagaccaatttctgtttttaagaggaaaaagaatgattgatgtatcctcactcactctccnncctcttctcttttttcgctccctcccttnantncctccngactaatctttnnanntttcatcataactagattcttttttata

SEQ ID NO: 249792 - DNA, 1808 bp, Homo Sapiens
  misc_feature (750)..(750): n is a, c, g, or t
  misc_feature (753)..(753): n is a, c, g, or t
  misc_feature (755)..(824): n is a, c, g, or t
tttgtcctgcacaagaagagagagagtgatatagtgtttgtgtggcggaaggaggggcgatatatctctcgcgtggggcggtgaggagtgttattattatcacccgtgtggggggtgaggtttttaacacaccccgcgcgcctctctctattttgtgcccaccgtgtgtttcattcctaccagcgcgcgcgagtatttttttctcaggggcgccagaaattttgttacaccaggcggtggggggagtaaacatttgttggtgtaagatgccgcgcgcgagggggaaatttcaggggtccccatcaagggcacccccaaggtgttaaggggactaccccctattttggggaagagagaatttcccaaatatttagacattgacaacacactttttatggagctaagagagcgcccaagagggcggggggaaggaaagatcttagaatgcgggggtctctattttgagaaattccccggtggggaggagggcccccgcttaattggccctgtaggaaccttctatgagcggcctttggggtttgccaccccgggaggtttttcccccccgggcgttgtttttcatgcgggggggatttttaacccctgtgttgaatttccaggggtttttttataggaaccgggattttggccaattatcgcgtatcgctcccgggatccgcggggcctcaaagagaattggtttggcaaaatttattgtggggaaaggtttccgaaggaaagaattttttnaanannnnnnnnnnnnnnnnnnnnnnnnnnnnnnnnnnnnnnnnnnnnnnnnnnnnnnnnnnnnnnnnnnnnnncaccatctaaattatttgtttaataacaaaaaaacagccccacagaactattgtaaaacaatattttcagtcggtgatcattgtaatatacaatacaaagcaatttcctcagaaatctgagaagcaccaaacgtgaccattttttaaaatgtctgcttttcaaaaaatagaaacacacgagtggaatcccaccccctaaagtctctggtgactagtaggtgtgcagagaggagcgccctctcctcgccagtgcctcagcctcagccccaggctggatgcagttaagggcgcagtggccgccgatcggtcttgttctccctcagatccggcgaggcgcgttgggggagacccacagagcacgtaattcctcttgccccctggatggctggggtccgccggtccctgggggaggcgcttcagcgacacaagatgcgatcgtccgcaggaacgcatgccgcctcggccgtcagggcgctgatctcgccgttgagggtgctgagcggagcccggaccggcagccctcggcccccgggggttccaacttcggattccgagttcagctccaactgaaggtccctgatgtagtcgatgacgtgctggagaatctccaccttgctcaccttgcggttctggggcagggtgggcaccagctccttgaggcgtgagtaacagccgttcatgtcgtagagcagcacgtttacctgctgctcgtccagcagggcaggcaggcgcgccccggcgcccccggcgcagcgcgagatggccacgctctgctcagacagacagcgcaccacctcgcccgcaccgctcgctgtcttgccggccttcagcgcgcagctggggcccgcggcggcggtggcggtgctgccactggcgactttcatgattcttggcgactggctgaaacagaatgggcaaagcgaaaaaaatgaggtggaagcccgaagcagatacggaaaatggaacagttaagaacgtggaatt

SEQ ID NO: 249793 - DNA, 1028 bp, Homo Sapiens
gccgtgtttgataaagacagctcctcttaggaagaactgtcatccccaaacacatagagagacactctctgtctctcgattacaatcatgatttccagaatggagaagatgacgatgatgatgaagatattgattatgtttgctcttggaatgaactactggtcttgctcaggtttcccagtgtacgactacgatccatcctccttaagggatgccctcagtgcctctgtggtaaaagtgaattcccagtcactgagtccgtatctgtttcgggcattcagaagctcattaaaaagagttgaggtcctagatgagaacaacttggtcatgaatttagagttcagcatccgggagactacatgcaggaaggattctggagaagatcccgctacatgtgccttccagagggactactatgtgtccacagctgtttgcagaagcaccgtgaaggtatctgcccagcaggtgcagggcgtgcatgctcgctgcagctggtcctcctccacgtctgagtcttacagcagcgaagagatgatttttggggacatgttgggatctcataaatggagaaacaattatctatttggtctcatttcagacgagtccataagtgaacaattttatgatcggtcacttgggatcatgagaagggtattgcctcctggaaacagaaggtacccaaaccaccggcacagagcaagaataaatactgactttgagtaacggccttgaggtgtccctcgcccttttggtttgttcaaggagctgctgctttgcatagctgctctagtgtctggtatcatcggatctggttttgaataattcccaggagtcctgggtccctggcctccaaagctggaatgtgaacgcatgccacggtggtctgaccctcacactccttttctcttaacagcaaaatgcaatggaaggaagaaaagttccaacaaagaatgattttgtgaattctgtgatttttcttctgatcagtttcaatctgtaataaatgccttatttttcctgtaaaaaaa

SEQ ID NO: 249794 - DNA, 893 bp, Homo Sapiens
acaggaaaaataaggcatttattacagattgaaactcgatcagaagaaaaatcacagaattcacaaaatcattctttgttggaacttttcttccttccattgcattttgctgttaagagaaaaggagtgtgagggtcagaccaccgtggcatgcgttcacattccagctttggaggccagggacccaggactcctgggaattattcaaaaccagatccgatgataccagacactagagcagctatgcaaagcagcagctccttgaacaaaccaaaagggcgagggacacctgcaggaggaagaacaggtaactgggtctggggagcagatacacaaccccagaaaggaagctcaaatctctcataaagggaagaatcaaagagaccccaagcagaggctgcagccaggtgttgggccccaggcaggtctatgaaggtgtttgtggtgtgaggtaaggaaggaaggaaccaagcaaaagcaaaagagtaggttggccacagctgccaccgtgtgcgggtgtggggctggagatcaggatacgccatccagccattcatccatttatcagttcatctgttcaataaacatgtatgcacttgagcatttgcttgggggttacaaagatcaatgaggcatagttttgacctcaaaaacctcccacaacctagtgaagggggtggaagtagttagagtacagcttgataaatgccaattccagagacgcctatgtgcaggaaacccgaggaaaagggttcctgaagagggcatgtaagctgaactcggaggataagatggggcggggatactgtatcccagcagagggggcctgagagtggaggtgagacccagactgggaccccgggagaacagtcagctgtgtgaggttctcccat

SEQ ID NO: 249795 - DNA, 2153 bp, Homo Sapiens
  misc_feature (732)..(751): n is a, c, g, or t
  misc_feature (1815)..(1973): n is a, c, g, or t
  misc_feature (1976)..(1976): n is a, c, g, or t
  misc_feature (1979)..(1981): n is a, c, g, or t
  misc_feature (1983)..(1988): n is a, c, g, or t
  misc_feature (1997)..(2013): n is a, c, g, or t
tcccgggatcggtgctcagcggtgttggaacttcgttgcttgcttgcctgtgcgcgcgtgccggaacatggcctcaaacgattatacccaacaagcaacccaaagctatggggcctaccccacccagcccgggcagggctattcccagcagagcagtcagccctacggacagcagagttacagtggttatagccagtccacggacacttcaggctatggccagagcagctattcttcttatggccagagccagaacaggctatggaactcagtcaactccccagggatatggctcgactggcggctatggcagtagccagagctcccaatcgtcttacgggcagcagtcctcctatcctggctatggccagcagccagctcccagcagcacctcgggaagttacggtagcagttctcagagcagcagctatgggcagccccagagtgggagctacagccagcagcctagctatggtggacagcagcaaagctatggacagcagcaaagctataatccccctcagggctatggacagcagaaccagtacaacagcagcagtggtggtggaggtggaggtggaggtggaggtaactatggccaagatcaatcctccatgagtagtggtggtggcagtggtggcggttatggcaatcaagaccagagtggtggaggtggcagcggtggctatggacagcaggaccgtggaggccgcggcaggggtggcagtggtnnnnnnnnnnnnnnnnnnnntggtggttacaaccgcagcagtggtggctatgaacccagaggtcgtggaggtggccgtggaggcagaggtggcatgggcggaagtgaccgtggtggcttcaataaatttggtggccctcgggaccaaggatcacgtcatgactccgcagaacaggataattcagacaacaacaccatctttgtgcaaggcctgggtgagaatgttacaattgagtctgtggctgattacttcaagcagattggtattattaagacaaacaagaaaacgggacagcccatgattaatttgtacacagacagggaaactggcaagctgaagggagaggcaacggtctcttttgatgacccaccttcagctaaagcagctattgactggtttgatggtaaagaattctccggaaatcctatcaaggtctcatttgctactcgccgggcagactttaatcggggtggtggcaatggtcgtggaggccgagggcgaggaggacccatgggccgtggaggctatggaggtggtggcagtggtggtggtggccgaggaggatttcccagtggaggtggtggcggtggaggacagcagcgagctggtgactggaagtgtcctaatcccacctgtgagaatatgaacttctcttggaggaatgaatgcaaccagtgtaaggcccctaaaccagatggcccaggagggggaccaggtggctctcacatggggggtaactacggggatgatcgtcgtggtggcagaggaggctatgatcgaggcggctaccggggccgcggcggggaccgtggaggcttccgagggggccggggtggtggggacagaggtggctttggccctggcaagatggattccaggggtgagcacagacaggatcgcagggagaggccgtattaattagcctggctccccaggttctggaacagctttttgtcctgtacccagtgttaccctcgttattttgtaaccttccaattcctgatcacccaagggtttttttgtgtcggactatgtaattgtaactatacctctggttcccattaaaagtgaccattttagttannnnnnnnnnnnnnnnnnnnnnnnnnnnnnnnnnnnnnnnnnnnnnnnnnnnnnnnnnnnnnnnnnnnnnnnnnnnnnnnnnnnnnnnnnnnnnnnnnnnnnnnnnnnnnnnnnnnnnnnnnnnnnnnnnnnnnnnnnnnnnnnnnnnnnnnnnnnnnnaanaannnannnnnntttgggggnnnnnnnnnnnnnnnnnaaaaaaattttttttaaaacccttctttttggggggccgcgcggccccccaagagggaaaaagaaaaacgggggcacaaaaagttttttcttccaagaaaaaaccccgggggaaacaaaaccaaaaggggtgggtttttt

SEQ ID NO: 249796 - DNA, 462 bp, Homo Sapiens
  misc_feature (149)..(149): n is a, c, g, or t
  misc_feature (437)..(437): n is a, c, g, or t
gctagtcctccagcctcggtactcagcggtgttggaacttcgttgcttgcttgcctgtgcgcgcgtggagcacatgagcctcaaacgattatacccaacaagcaacccaaagctatggggcctaccccacccagcccgggcaggtaatntcccagcagagcagtcagccctacggacagcagagttacagtggttatagccagtccacggacacttcaggctatggccaggagcagctattcttcttatggccagagccagaaacagtgagtctttctcagcgggtcacctcttcctactctttctgaatattgcttttctttttcttgttttttgggagacggatttgggtcctgtttgcccaggctgggagttgcagtgggtgctgttttcagcttcacttgcaaacattcaggcctaaccgggtttcaaacganttttcccggcctcagcctcctgagt

SEQ ID NO: 249797 - DNA, 498 bp, Homo Sapiens
  misc_feature (11)..(11): n is a, c, g, or t
  misc_feature (30)..(30): n is a, c, g, or t
  misc_feature (32)..(32): n is a, c, g, or t
  misc_feature (42)..(42): n is a, c, g, or t
  misc_feature (80)..(80): n is a, c, g, or t
  misc_feature (421)..(421): n is a, c, g, or t
ccggacccccntcggaagccttccacggtncncgaccggggnaccggtagccgcctcgatcatagcctcctctgccaccnacagacgatcatccccgtagttaccccccatgtgagagccacctggtccccctcctgggccatctggtttaggggccttacaactggttgcattcattcctccaagagaagttcatattctcacaggtgcttaaggagaaaggaagacaatcagtctggagcgatggggaataggcaagacctagaactaggaagaaactacggtgactttagagatacagtgaggaaactgaagcttcagaaagacaaaacggcttgcttctcagagtcaggaacaaaaatcagtattactgaacccaatccattacctttcccattacatcaaccttacctaggtaagnttttggctaaatctgaccccaacagtgtggccttgacatttacttctttggaaaacacgcacatacctcagtaccaa

SEQ ID NO: 249798 - DNA, 1497 bp, Homo Sapiens
ggggttccgggagggtgcaggcaggagagggaaaggcagcagcggcggcagctggaggatgaagaaggagcatgtgcttcactgccagttctccgcgtggtacccgttcttccgaggcgttaccatcaagagtgtcattcttccacttcctcagaatgtgaaggattatttactcgatgatggaactctggtggtttcaggaagggatgatccaccaacacattctcagccagacagtgatgatgaagcagaagaaatacagtggtctgatgatgagaacacagccacgcttacggcaccagaatttcctgagtttgccactaaagtccaggaagctatcaattccctcgggggcagtgtctttcctaagcttaattggagtgccccaagggatgcgtattggatagcaatgaatagttctctgaaatgtaaaaccctcagcgacatctttctgcttttcaagagttccgatttcatcactcgtgacttcactcagccgtttattcattgtactgatgattctccagatccatgtatagaatatgagctcgttctccgaaaatggtgtgaattgattcctggggctgagtttcgatgttttgtcaaggaaaacaagcttattggtatttctcaaagagactacacacaatactatgatcatatttctaaacaaaaggaagaaattcgcagatgcatacaagactttttcaagaaacacatacagtacaaattcttagatgaagactttgtgttcgatatatacagagacagtaggggggaaggtgtggctcattgactttaatccatttggtgaagtcacagattcactgctgttcacctgggaagaactgatatctgagaacaacttaaacggcgattttagtgaagttgacgctcaagagcaggattccccagctttccgttgcacaaacagtgaagtgacagtccagcccagcccctatttgagttaccggctacccaaggactttgtagacctctctactggggaggacgctcacaagctaatagacttccttaagctgaagagaaatcagcaggaggacgactgatgagcgtgctggaactggagaagaggaggccccgccccaccgctccgggagctgctcatcagccgcaacttcctgccgaccctgatgcgggtgggccgagcagtgtggacatcagccgctttttatattcatgtacattcacctggggaaaaaaacggagggactttgctacttgtaaaaataacataataaatagatcttaaacataggaaaaccatactgttctgataataaaatgctttcttgcgcacgtgtccttttcccccgtcgctatacttgtcggccgccctccggcctccgaaagtcttccaacaccattccctttggccgcccgggccccgtaggctacgcggccttgggccataatccgccttcctaggaacaccctgggcccctgatcaagggcctgggaatcccttccccaaat

SEQ ID NO: 249799 - DNA, 1178 bp, Homo Sapiens
tgggagccttggtcctgagcagccaacacaccagcccagacagctgcaagtcaccatggacgctgaaggcctggcgctgctgctgccgcccgtcaccctggcagccctggtggacagctggctccgagaggactgcccagggctcaactacgcagccttggtcagcggggcaggcccctcgcaggcggcgctgtgggccaaatcccctggggtactggcagggcagcctttcttcgatgccatatttacccaactcaactgccaagtctcctggttcctccccgagggatcgaagctggtgccggtggccagagtggccgaggtccggggccctgcccactgcctgctgctgggggaacgggtggccctcaacacgctggcccgctgcagtggcattgccagtgctgccgccgctgcagtggaggccgccaggggggccggctggactgggcacgtggcaggcacgaggaagaccacgccaggcttccggctggtggagaagtatgggctcctggtgggcggggccgcctcgcaccgctacgacctgggagggctggtgatggtgaaggataaccatgtggtggccgccggtggcgtggagaaggcggtgcgggcggccagacaggcggctgacttcgctctgaaggtggaagtggaatgcagcagcctgcaggaggccgtgcaggcagctgaggctggtgccgaccttgtcctgctggacaacttcaagccagaggagctgcaccccacggccaccgtgctgaaggcccagttcccgagtgtggctgtggaagccagtgggggcatcaccctggacaacctcccccagttctgcgggccgcacatagacgtcatctccatggggatgctgacccaggcggccccagcccttgatttctccctcaagctgtttgccaaagaggtggctccagtgcccaaaatccactagtcctaaaccggaagaggatgacaccggccatgggttaacgtggctcctcaggaccctctgggtcacacatctttagggtcagtggccaatggggcacatttggcactagcttgagcccaacatctggctctgccacctgctgctcctgtgacctgtcagggctgacttcacctctgctcatctcagtttcctaatctgtaaaatgggtctaataaaggatcgaaccgac

SEQ ID NO: 249800 - DNA, 984 bp, Homo Sapiens
cggcagtactcctcacggttaaaggtagcgaggcctgggtggcgaattcggcacgaggtcaccatggacgctgaaggcctggcgctgctgctgccgcccgtcaccctggcagccctggtggacagctggctccgagaggactgcccagggctcaactacgcagccttggtcagcggggcaggcccctcgcaggcggcgctgtgggccaaatcccctggggtactggcagggcagcctttcttcgatgccatatttacccaactcaactgccaagtctcctggttcctccccgagggatcgaagctggtgccggtggccagagtggccgaggtccggggccctgcccactgcctgctgctgggggaacgggtggccctcaacacgctggcccgctgcagtggcattgccagtgctgccgccgctgcagtggaggccgccaggggggccggctggactgggcacgtggcaggcacgaggaagaccacgccaggcttccggctggtggagaagtatgggctcctgggtgggcggggccgcctcgcaccgctacgacctgggagggctggtgatggtgaaggataaccatgtggtggccgccggtggcgtggagaaggcggtgcgggcggccagacaggcgggctgacttcgctctgaaggtggaagtggaatgcagcagcctgcaggaggccgtgcaggcagctgacggctggtgccgaccttgtcctgctggacaacttcaagccagaggagctgcaccccacggccaccgtgctgaaggcccagttcccgagtgggggctgtggaagcccgtggggggcatcaccctgggaaaacctcccccaagttctgcgggccccaacataagacgtcattctcccttggggaatggctgaccccagcgggggcccccaccccctttgaatttctccccctccaacctgctttgggcaaaagaaggggcgctctccgagggacccaaaatct

SEQ ID NO: 249801 - DNA, 1057 bp, Homo Sapiens
  misc_feature (468)..(492): n is a, c, g, or t
  misc_feature (495)..(497): n is a, c, g, or t
  misc_feature (500)..(500): n is a, c, g, or t
  misc_feature (502)..(502): n is a, c, g, or t
  misc_feature (506)..(511): n is a, c, g, or t
  misc_feature (513)..(517): n is a, c, g, or t
  misc_feature (521)..(521): n is a, c, g, or t
  misc_feature (528)..(864): n is a, c, g, or t
  misc_feature (882)..(882): n is a, c, g, or t
  misc_feature (959)..(959): n is a, c, g, or t
  misc_feature (992)..(992): n is a, c, g, or t
  misc_feature (1002)..(1002): n is a, c, g, or t
  misc_feature (1012)..(1012): n is a, c, g, or t
  misc_feature (1015)..(1015): n is a, c, g, or t
  misc_feature (1021)..(1021): n is a, c, g, or t
aaggaagcgaggcctgggtggcgaattcggcacgaggccctggcagccctggtggacagctggctccgagaggactgcccagggctcaactacgcagccttggtcagcggggcaggcccctcgcaggcggcgctgtgggccaaatcccctggggtactggcagggcagcctttcttcgatgccatatttacccaactcaactgccaagtctcctggttcctccccgagggatcgaagctggtgccggtggccagagtggccgaggtccggggccctgcccactgcctgctgctgggggaacgggtggccctcaacacgctggcccgctgcagtggcattgccagtgctgccgccgctgcagtggaggccgccaggggggccggctggactgggcacgtggcaggcacgaggaagaccacgccaggcttccggctggtggagaagtatgggctcctgggtgggcggggnnnnnnnnnnnnnnnnnnnnnnnnnggnnngtngngggnnnnnngnnnnngggnggttttnnnnnnnnnnnnnnnnnnnnnnnnnnnnnnnnnnnnnnnnnnnnnnnnnnnnnnnnnnnnnnnnnnnnnnnnnnnnnnnnnnnnnnnnnnnnnnnnnnnnnnnnnnnnnnnnnnnnnnnnnnnnnnnnnnnnnnnnnnnnnnnnnnnnnnnnnnnnnnnnnnnnnnnnnnnnnnnnnnnnnnnnnnnnnnnnnnnnnnnnnnnnnnnnnnnnnnnnnnnnnnnnnnnnnnnnnnnnnnnnnnnnnnnnnnnnnnnnnnnnnnnnnnnnnnnnnnnnnnnnnnnnnnnnnnnnnnnnnnnnnnnnnnnnnnnnnnnnnnnnnnnnnnnnnnnnnnnnnccggcgtgttcttccgtntgcggcgcgcgtgcgtgctgcgctcgcgtttcgcccttggtcctccccccccttcctctgtgtctgctctctgtctntgcgctgctttcgggccgcctctgtcggtgttntctccggtgnggctgcgcgnctncctctncggctgcgcccggcttgggcgccgctgctgctcctt

SEQ ID NO: 249802 - DNA, 359 bp, Homo Sapiens
cgagggagctcggcctgcgctgcgccacgatgtccggggagtcagccaggagcttggggaagggaagcgcgcccccggggccggtcccggagggctcgatccgcatctacagcatgaggttctgcccgtttgctgagaggacgcgtctagtcctgaaggccaagggaatcaggcatgaagtcatcaatatcaacctgaaaaataagcctgagtggttctttaagatccctttggtctggtgccagttctggatgaagcatacccagggaagaagctgttgccggatgacccctatgaggcttgccagaagatgatcttagagttgttttctaaggtgccatacttggtagggctttttt

SEQ ID NO: 249803 - DNA, 533 bp, Homo Sapiens
ggcgtaagctaccatatccttccccttatggatttttaatcaggaaggaaggaataaattttaaagcactttactacatgtctcagaaatcccctgccccattgcagtgatggagagtagttagtgtaggtatatgacatgcctgggatagtccaagattcccctgtctgcttgttctcattcagaccagttgtattaaatatttcaacttctgttaaaaagaaaggtcaatatatactattccaactgtcatcctaaattatgcacaaaatattcaaataatcttactcatttaacttcattgcttccagccgttcaaaccagggccagatgaggtaatcaatcatagagatagaattgccaccaaagaaggtcgtcttcttattagtcagaacctgaacattaaacagcataaaagtatttcttacttgtgcatgtagtaagactcactagaaatgctgaagggaaataagtagagcaggtgagagaagcagtttttactccgatgtatccgaagttgggtttttttctga

SEQ ID NO: 249804 - DNA, 1014 bp, Homo Sapiens
  misc_feature (889)..(889): n is a, c, g, or t
ggaagcgggggagggaaggagggcgggaaggacgcgccacctacttcctgaatcccctgcaaaccccagaggagctcggcctgcgctgcgccacgatgtccggggagtcagccaggagcttggggaagggaagcgcgcccccggggccggtcccggagggctcgatccgcatctacagcatgaggttctgcccgtttgctgagaggacgcgtctagtcctgaaggccaagggaatcaggcatgaagtcatcaatatcaacctgaaaaataagcctgagtggttctttaagaaaaatccctttggtctggtgccagttctggaaaacagtcagggtcagctgatctacgagtctgccatcacctgtgagtacctggatgaagcatacccagggaagaagctgttgccggatgacccctatgagaaagcttgccagaagatgatcttagagttgttttctaaggtgccatccttggtaggaagctttattagaagccaaaataaagaagactatgctggcctaaaagaagaatttcgtaaagaatttaccaagctagaggaggttctgactaataagaagacgaccttctttggtggcaattctatctctatgattgattacctcatctggccctggtttgaacggctggaagcaatgaagttaaatgagtgtgtagaccacactccaaaactgaaactgtggatggcagccatgaaggaagatcccacagtctcagccctgcttactagtgagaaagactggcaaggtttcctagagctctacttacagaacagccctgaggcctgtgactatgggctctgaagggggcaggagtcagcaataaagctatgtctgatattttccctccctttcgccgaaggcaattgggntataacttcaaggcatctatgtccggggtgcggaacaaaaaggtaatggaaatggggacttgggccttacctggtttcctggaccccgctttcctggaacaagaggggaaaattctgccgcggta

SEQ ID NO: 249805 - DNA, 456 bp, Homo Sapiens
  misc_feature (432)..(432): n is a, c, g, or t
  misc_feature (439)..(439): n is a, c, g, or t
tagtgaaggaaaatatcagacatagctttattgctgactcctgcccctttcagagcccatagtcacaggcctcagggctggttctgtaagtagagctctaggaaaccttgccagtctttctcactagtaagcagggctgagactgtgggatcttccttcatggctgacatccacagtttcagttttggagtgtggggctacacactcatttaacttcattgcttccagccgttcaaaccaggggccagatgagggtaatcaatcatagagataggaattgccaccaaaggaagggtcgtcttcttattaggtcaggaacctcctctaggcttgggtaaattctttacgaaattcttcttttagggccaggcataggtcttctttattttgggcttctaataaaggttcccaccaagggtggggaccctaggnaaacaantttaagggttcattttt

SEQ ID NO: 249806 - DNA, 438 bp, Homo Sapiens
  misc_feature (13)..(13): n is a, c, g, or t
  misc_feature (428)..(428): n is a, c, g, or t
tttcggcacagtnctcggctgcgctgcgccacgatgtccggggagtcagccaggagcttggggaagggaagcgcgcccccgggccggttcccggagctgcgaatccgcatctacagcatgaggttctgcccgtttgctgagaggacgcgtctagtcctgaaggccaagggaatcaggcatgaagtcatcaatatcaacctgaaaaataagcctgagtggttctttaagaaaaatccctttggtctggtgccagttctggaaaacagtcagggtcagctgatctacgagtctgccatcacctggtgaagtacctgggatgaagcatacccaggggaaagaagctggttgccgggatgaacccttatggagaaagctttggccaagaaagattgatctttagaatttgttttttttaaagttggccattnctttggttag

SEQ ID NO: 249807 - DNA, 975 bp, Homo Sapiens
  misc_feature (793)..(811): n is a, c, g, or t
  misc_feature (813)..(818): n is a, c, g, or t
  misc_feature (925)..(925): n is a, c, g, or t
ggggctccgcagccgtctgtgccacccagagccggcgggccgctaggtccccggagaccctgctatggtgcgtgcgggcgccgtgggggctcatctccccgcgtccggcttggatatcttcggggacctgaagaagatgaacaagcgccagctctattaccaggttttaaacttcgccatgatcgtgtcttctgcactcatgatatggaaaggcttgatcgtgctcacaggcagtgagagccccatcgtggtggtgctgagtggcagtatggagccggcctttcacagaggagacctcctgttcctcacaaatttccgggaagacccaatcagagctggtgaaatagttgtttttaaagttgaaggacgagacattccaatagttcacagagtaatcaaagttcatgaaaaagataatggagacatcaaatttctgactaaaggagataataatgaagttgatgatagaggcttgtacaaagaaggccagaactggctggaaaagaaggacgtggtgggaagagcaagagggtttttaccatatgttggtatggtcaccataataatgaatgactatccaaaattcaagtatgctctttttggctgtaatgggtgcatatgtgttactaaaacgtgaatcctaaaatgagaagcagttcctgggaccagattgaaatgaattctgttgaaaaagagaaaaacctaatatatttgagatgttccattttctgtataaaagggaacagtgtggagatgtttttgtcttgtccaaataaaagattccccagcaaannnnnnnnnnnnnnnnnnnannnnnnacatgtcggccggccctcggcccctcgaagaagcttttctagaccattttcctttttgggcgccgccggggcccccaggtaaggggtaaagtggaaaacatggggcnccaataaggcctggttttcccccttaagggaagaattccccctggggacc

SEQ ID NO: 249808 - DNA, 1032 bp, Homo Sapiens
gggaaccggaagcctcgaggtttagtcccgcccccctctcctcgctgcttaggctccgcggcctccaagctgtagctatgacggcgcgcgggactccgagccgcttcttggccagcgttctccacaacggactgggtcgctatgtgcagcagctgcagcgtctgagcttcagcgtcagccgcgacggcgcctcgtctcgcggcgccagggagttcgtggagcgggaggtgatcgacttcgcccgacggaatccaggggtcgtaatatatgtaaactcgcgtccgtgctgcgtgcccagagtagtggccgaataccttaacggggctgtgcgcgaggagagcatccactgcaagtcggtcgaggagatctcgacgctggtgcagaagctggccgaccagtcgggcttggacgtgatccgcatccgcaagcccttccacaccgacaaccctagcatccagggccagtggcaccccttcaccaacaagccgaccacgttccgcgggctacgcccccgagaggttcaggatcctgccccagcccaggtgcaagcacagtgaagagttgccccaccaactgcagccccaggctttggactgttactccggtaaaggtggttcttcccctttgggattccaagcccaggcaaatggaacccatcaatgggcaagttgacagaggttctgcttgggataatgaagagctgcctgtttctttccagtgcctgcttctgggggcagtgaccttgtgaaccactcatttttatgcaagtggcatccctaaaacctggagatgaggaaagacttcaagggttttacggggccccttgtttttttaatccaaattgaaaataatgatctcaaaacacagtgagaggtctgaaggctggcttctgaagaatccctgatgtcttattggaacaaccactgagctacggagagctctgctgtgatgggctaggcactttatatctgtgtgaatacagatttataaaacaggttaataaacttatccaaggtcacatttcagaaaaac

SEQ ID NO: 249809 - DNA, 1097 bp, Homo Sapiens
  misc_feature (6)..(6): n is a, c, g, or t
  misc_feature (17)..(17): n is a, c, g, or t
  misc_feature (29)..(29): n is a, c, g, or t
  misc_feature (31)..(31): n is a, c, g, or t
  misc_feature (46)..(46): n is a, c, g, or t
  misc_feature (53)..(53): n is a, c, g, or t
  misc_feature (59)..(60): n is a, c, g, or t
  misc_feature (73)..(73): n is a, c, g, or t
  misc_feature (82)..(82): n is a, c, g, or t
  misc_feature (103)..(103): n is a, c, g, or t
  misc_feature (107)..(107): n is a, c, g, or t
  misc_feature (117)..(117): n is a, c, g, or t
  misc_feature (119)..(119): n is a, c, g, or t
  misc_feature (198)..(198): n is a, c, g, or t
  misc_feature (240)..(240): n is a, c, g, or t
  misc_feature (344)..(344): n is a, c, g, or t
acattntaccttacaanttgtgggacaananttaccttcttaaacnggatttngagcannggccccatctttngactagctnttaacgttattttccccgctntatntagcacaccnantcccttcactggggacctcaatgagttgtcaactctcttgcccttacatgtggcagttgttttcttgtttgcaggtgcngccgggtgtgtggcaacattacttcatgatgcagccatgaancctgcggaagtggtcaagcagaggatgcagatgtacaactcaccataccaccgggtgacagactgtgtacgggcagtgtggcaaaatgaaggggccgggccttnttaccgcagctacaccacccagctgaccatgaacgttcctttccaagccattcacttcatgacctatgaattcctgcaggagcactttaacccccagagacggtacaacccaagctcccacgtcctctctggagcttgcgcaggagctgtagctgccgcagccacaaccccactggacgtttgcaaaacactgctcaacacccaggagtccttggctttgaactcacacattacaggacatatcacaggcatggctagtgccttcaggacggtatatcaagtaggtggggtgaccgcctatttccgaggggtgcaggccagagtaatttaccagatcccctccacagccatcgcatggtctgtgtatgagttcttcaaatacctaatcactaaaaggcaagaagagtggagggctggcaagtgaagtagcactgaacgaagccaggggttcagatgacactgctgcatcctggtcacattctctgtctcctggaatgctcccacctcaagtggagttagaaggaaggtagaggggctctcccccaggattttggtgttttgactaacaccagttcctgccaacctctgttgccaccacctttccttccaggccctaagcacgtgcagcaaagcacaccacagcacctttgataacctctctccatcctgggcctgatgacctgctctagactgttatagagggataagcagctcattcccctggttcctaataaaaagcctttaaattaaaaa

SEQ ID NO: 249810 - DNA, 730 bp, Homo Sapiens
gcgcagcgagcctctgccggccaccccagcctcctgcctccgcttctggtaccacatgggttttcctgagcacttctacaagggggagctgaaggtactgctgcacagtgctcagggccagctggctgtgtggggcgcaggcgggcatcggcggcaccagtggctggaggcccaggtggaggtagccagtgccaaggagttccagatcgtgtttgaagccactctgggcggccagccagccctggggcccattgccctggatgacgtggagtatctggctgggcagcattgccagcagcctgcccccagcccggggaacacagccgcacccgggtctgtgccagctgtggttggcagtgccctcctattgctcatgctcctggtgctgctgggacttgggggacggcgctggctgcagaagaaggggagctgccccttccagagcaacacagaggccacagcccctggctttgacaacatccttttcaatgcggatggtgtcaccctcccggcatctgtcaccagtgatccgtagaccaccccagacaaggccccgcttcctcacgtgacatccagcacttggtcagaccctagccagggaccggacacctgccccgcccaggctgggacaggctgcaggtctcaggatatgctgaggcctgggcgttccctgccctgtgctgactctgttgctctgtgaataaacaccctggcccatgagggcagccca

SEQ ID NO: 249811 - DNA, 630 bp, Homo Sapiens
  misc_feature (426)..(426): n is a, c, g, or t
  misc_feature (593)..(593): n is a, c, g, or t
ccaagatggcggatgaagccacgcgacgtgttgtgtctgagatcccggtgctgaagactaacgccggaccccgagatcgtgagttgtgggtgcagcgactgaaggaggaatatcagtcccttatccggtatgtggagaacaacaagaatgctgacaacgattggttccgactggagtccaacaaggaaggaactcggtggtttggtgctggtatatccatgacctcctgaaatatgagtttgacatcgagtttgacattcctatcacatatcctactactgccccagaaattgcagttcctgagctggatggagacagcgatgtacaggggtggctttggactagctcatctctggctctggggctgggtccatggctggcagtggaaatccctgatctgattcagaagggcgtcatccaacacanagagaaatgcaaccaatgaagaatcaagccacttgaggcaggcagagggacctttgataggctacgatactattttcctgtgcatcacacttaactcatctaacttgcttccccgacacccttcacctctaagtggtactaagtagctgcagtaggcattgcttggngaagaacaaacacacaccagtacttgtacttgtttct

SEQ ID NO: 249812 - DNA, 1217 bp, Homo Sapiens
  misc_feature (1113)..(1116): n is a, c, g, or t
  misc_feature (1119)..(1119): n is a, c, g, or t
  misc_feature (1121)..(1122): n is a, c, g, or t
ctttttttgccttatgcggtgattttaatgataggtgtcatatataggacggagtaatctgtttacattctgttcttctcgatgcactcacaagcgggtaactaggtgacaagaaaacaaagatcttattcaaaagaggtcttacagcaacccaacgtctcatcttcccatagtaaagatgacggcgccttgaggtaagctacaggcaacaccacttccgcgtttctcttgcgccctggtccaagatggcggatgaagccacgcgacgtgttgtgtctgagatcccggtgctgaagactaacgccggaccccgagatcgtgagttgtgggtgcagcgactgaaggaggaatatcagtcccttatccggtatgtggagaacaacaagaatgctgacaacgattggttccgactggagtccaacaaggaaggaactcggtggtttggaaaatgctggtatatccatgacctcctgaaatatgagtttgacatcgagtttgacattcctatcacatatcctactactgccccagaaattgcagttcctgagctggatggaaagacagcaaagatgtacaggggtggcaaaatatgcctgacggatcatttcaaacctttgtgggccaggaatgtgcccaaatttggactagctcatctcatggctctggggctgggtccatggctggcagtggaaatccctgatctgattcagaagggcgtcatccaacacaaagagaaatgcaaccaatgaagaatcaagccactgaggcagggcagagggacctttgataggctacgatactattttcctgtgcatcacacttaactcatctaactgcttccccggacaccctccacctctagttgttactaagtagctgcagtaggcattgctggggaagaaacaaacacacaccaaacagtactgctacttagtttctaaggctgcacagggaagggaaagactgggctttggacaatctagaggtaatttatatccgcccccaggtggagcaacatgcgattctggaggcacgggggtaactgaaagtgagtacatatagtctttctggtttctggagataacccatcaataaaagctgcttcctctggtnnnnaanannaacacgtggcagagacgtggccaatccgtacgtaagtcaaaaaaccagacgtataaccttttacccgccccggggaaccttattaccatacgccg

SEQ ID NO: 249813 - DNA, 1773 bp, Homo Sapiens
  misc_feature (17)..(17): n is a, c, g, or t
  misc_feature (27)..(27): n is a, c, g, or t
  misc_feature (85)..(239): n is a, c, g, or t
cttatgctcggcaaggncggaggactntcagtcacgcgagccccatgcacaggcttttgcaggtgctccagatgcttatgtcttnnnnnnnnnnnnnnnnnnnnnnnnnnnnnnnnnnnnnnnnnnnnnnnnnnnnnnnnnnnnnnnnnnnnnnnnnnnnnnnnnnnnnnnnnnnnnnnnnnnnnnnnnnnnnnnnnnnnnnnnnnnnnnnnnnnnnnnnnnnnnnnnnnnnnnnnnnnccacagatgcttaaattctgtaaacttctatcttaccttcccccaaaagggcacgaatgcagcacctgggatgcggactgttggcgaggacacacgctgctgcctttgtggtgctctctgcccagtgcctggggtgcagcaggagccctgggccttgctgggtatcgaggtcaccgcccccagcagaacccagactgccactcttggtgcaaaggggcctgagggagctgccccactgccccatagaccacacggaatgtgaggcacagacggcactcaggaagaagggggctggtgcacacatgaacagccctgcgccagcgaggacaaagctgtttgtgcattttgtccttcctcaagggtttagggtggcaatcacaccatggaagcccgccaaaccttcaactccctggcagccctggtgaatggtatcccattcaacagctatagggtggctgagggttgtggcaggggcctgggggactgcatcgcagtgcttcacatggcctcgtcataaagcagggcagccctgggcctggcaggtggctggcagggctgacgagaggtcctgccccccagaggactctccccagagaagccacttacagagtgtcgacggcagcatctctcactgagaggtcaccttgctccattatttgagcaatttcacctgatgttaacacgcagtcagcgccccgggagccatgcaaagcaggggaaggctttcctgaagagcctccagcttcttgtcataacaaggggccacaatgacgtggaaaatcttctctggagacaggttctgctgtctggcgaaataatccttcaccaaagagcccatgacctgctggggggacttggcggtgcagaggtgggcagtgatggggcgacccagcacccgctcggcgtatcggacccagccaggacaggcagaggtcagcatgggcagggtgcgttcctcctcactgtgctggcgatagcgacgcacgaattctttttgactctccaggatactaaaatccgcagctatcgtcgtatcaaatacatagtgcaccccaagacttttgaggaaaccacagagtcttctggatgcatcagttacactgaggttgaatttagcagcaaaataaggcaaagattgaggacacacagacactaccagcactttgtgctttgaggtatcacatttcttgttaaggttcagaacgcggaagaagtccttggcattttgctgggaaagttggactccttcctctgcagtcatacagctgtcacatgccaggcagtcgctcaaaaatatcttggcatcagccaacttgtggaattctcccttctctccattttcctgggctggactcggtgcatcggctgacacattctcttggtcatcagtttttgttttcttactacattccttgcgcgtgcagtgctcacacttcatctggagcgcggcgggcgggaggccgggcgcctcagcctcagggaagcaccgggagactgggacaccactgcccgccgcccgcggccctttgttgtc

SEQ ID NO: 249814 - DNA, 1260 bp, Homo Sapiens
gctgggtggcgaattcggcacgaggcttaacaagaaatgtgatacctcaaagcacaaagtgctggtagtgtctgtgtgtcctcaatctttgccttattttgctgctaaattcaacctcagtgtaactgatgcatccagaagactctgtggtttcctcaaaagtcttggggtgcactatgtatttgatacgacgatagctgcggattttagtatcctggagagtcaaaaagaattcgtgcgtcgctatcgccagcacagtgaggaggaacgcaccctgcccatgctgacctctgcctgtcctggctgggtccgatacgccgagcgggtgctgggtcgccccatcactgcccacctctgcaccgccaagtccccccagcaggtcatgggctctttggtgaaggattatttcgccagacagcagaacctgtctccagagaagattttccacgtcattgtggccccttgttatgacaagaagctggaggctcttcaggaaagccttccccctgctttgcatggctcccggggcgctgactgcgtgttaacatcaggtgaaattgctcaaataatggagcaaggtgacctctcagtgagagatgctgccgtcgacactctgtttggagacttgaaggaggacaaagtgacgcgtcatgatggagccagctcagacgggcacctggcacacatcttcagacatgcggccaaggagctgttcaacgaggatgtggaggaggtcacttaccgagccctgagaaacaaagacttccaagaggtcacccttgagaagaacggagaggtggtgttacgctttgctgcagcctatggctttcgaaacatccagaacatgatcctgaagcttaagaagggcaagttcccattccactttgtggaggtcctcgcctgtgctggaggatgcttaaatggcagaggccaagcccagactccagacggacatgcggataaggccctgctgcggcagatggaaggcatttacgctgacatccctgtgcggcgtccggagtccagtgcacacgtgcaggagctgtaccaggagtggctggaggggatcaactcccccaaggcccgagaggtgctgcataccacgtaccagagccaggagcgtggcacacacagcctggacatcaagtggtgaagtcaggccagggccttccagctgctcttggggccagagccaagagcctctcagtagagggaggggctgccctgagtggagtattaaagacacttaagaaaaccgct

SEQ ID NO: 249815 - DNA, 1659 bp, Homo Sapiens
  misc_feature (228)..(229): n is a, c, g, or t
cgggatctcaggatgtatggaaaaataatctttgtattactattgtcagaaattgtgagcatatcagcatcaagtaccactggtgtggcaatgcacacttcaacctcttcttcagtcacaaagagttacatctcatcacagacaaatggttgtgttattggtaacataatttgctctgacaaaagcaaataaaggaaattttagacctttattattcaactggataannctgaaggttcagaagtgattgccaatattgccaaccaggttttcatgcctctgggattgagattagaggaagaaagcaaagaaaggacatttttttacttcactgttcatggtgtaattgtgtgcctgacggctgtagctactaacttggcttacgttgactggctactaagggactctaggagtcagaaactaaatgctgagtctctcaaaggcgtagagagaatttcagagggccttaccatgacatgaggattaaactccagttctgcccgattctcatcacgaaatccttatcccatgcctcattgtgtttggtgtccccttgcctaggggacagtcctcctgggtaagatcagcaagataactcttcagtcacattccatttgatactttgaatactctggggtccttacccaccaaatggatggaattcagctgctcaatcactgcctttctcagaactcggttgtccaaccacaattccctttcccttaggatagggctatattggcaaaatgccgcccgaacagactgctgacagtaaaccaaatattagtttctctcaccttcttgaaggcatttacagtctttgtaagcttttctcctagattttccctttcctgtgcctgcttagattctaagaatgaagtgcatccttctccttttcttcattaggtgaagtgggatttacccattaccatatattcaccaccaggtcactgacgagagactccagtaaatcgctttccctctgcattcctctccttgtacagactagagggtcacattgtgtaaagcctaacatagccctgcaaagagatctggccccagcagtgaacacaaactcagtaattctctttagagtgaggtggtaatcagtgcctcttggtttcagccgtggtcctagtggctacttatggaagaataggaatagtttcacaacatcctgtaacattggcttacctgtatattatatgccacccgtaaccataaaaacaccaggatttaggttccttgaaggtaatgactatgggtccctctctgtggaagaatactgaatagaagagagaaatcactcaatatgtggaatgactgatatggtttggctgtgttcccactcaaatctcatcttgaattgtagttccaataatccccacatgtcatgggaggaacccagtgggaggtacttgaatcattgcggtggtttcccctgtgctattctcatgatagtgagtaaattctcacataatctgatagttttataaaggagcttcccccttcactcagctctcattcttctccttcctgccactatgtaagaaagatgtgtttgtttcccctttggtcatgattgtaagtatcctgagaccttcccagccatgcaaaactgtagatcaataaaacctctttcctttataaattaacccc

SEQ ID NO: 249816 - DNA, 964 bp, Homo Sapiens
  misc_feature (550)..(592): n is a, c, g, or t
catgagctcaataccctgaactctgtagatgtacctttgctcatctcttggagacattcaaatgaggggaatggcacccaagtgcagtggagtggaggtggaagggcttcttctcagaggcagccaacttggcccctcagctgaatgctcaaagtttcctggagagcacacaaataacagaaaacatcttctctgacacctctcattagtctactcaagggaagagttctaaaacctttctctatttatcagctgataggtaatcagtttacctccaaatcatggagaagacatgatctattgttcctaaactgtctatgttttctcttctcttttaagttcttttctggccttgctctttaacttggcctgccacctgattccatcatgtatgtataaacgattgccatatgaattcaccaaatagcatgcaaaacaattactgaatgtttctaagttgttcagcactcaggtataatggcttttaagataatataaaaaccaatgcttttaaacaataacctggtgatagggattttgaagttcaacnnnnnnnnnnnnnnnnnnnnnnnnnnnnnnnnnnnnnnnnnnncaactaaagtacgtaaaaattatttataaagataactaatgaacaaaaataatccatctctcttaataaatgttagatatgagctttggcttatttctagataatggaatatggaccttctattgtatttttgaaaaggcatacaatctgagtaaaataggtttagctatgaaagtgttgtgaaaatagctagtaaaacaacaagccaaaaaaaatcaaaagtgttaatggccagaagccttaaatgggcatgtaacaataaacttgagatcagcctttggctcagcaacatgggaatacaactggaaaatgcagctggagctctcatccttcactcaggtgtgctcgtcacttccatttctaactttcgac

SEQ ID NO: 249817 - DNA, 695 bp, Homo Sapiens
  misc_feature (96)..(105): n is a, c, g, or t
gtgaaagcaagttagacaaaaacttagggagatctttcattgggaaaatgggggacagacttatatttagaggttccctttaattgggcaaatgcnnnnnnnnnnttctgctagagaaacacagtgacttctatgtgtccagttgaaaaagatggaattttatgcagttctgtttctcttctgagtttaactgaactcagaggaataaaccctcctagagctgttcacactggtatttagagcaaaattaaaaactgaattctcacctttatcagtcggcgaatactgtaagaaattaagaggatcgttccaataataccagccatcacacacaaaataatgagtattatcactacaggagctaaagagagcagcaaaattatgaaagtctgaaataaatgaccacatagcaatagaaaaataagacagataacatcagcataacatcaccttgccttttaatacaaagtacaattaacatactattatgtgtattttgtctttttttaaattgtgtgctttacagtaaccttgtgggaaactgggactgtgagtgatcaagtcttttgtccaaggtcgcaaaatagttgatgacagaactaaggacctgaggcttctgattccagacccagcggttcttcactagtgtaactgtagataagaagctcagtggacgttctcctcagatatgggga

SEQ ID NO: 249818 - DNA, 462 bp, Homo Sapiens
aggagccgctcgtgatctcaggatgtatggaaaaataatctttgtattactattgtcagaaattgtgagcatatcagcatcaagtaccactggtgtggcaatgcacacttcaacctcttcttcagtcacaaagagttacatctcatcacagacaaatgggataacactcattaattggtgggcgatggctcgtgttatttttgaggtgatgcttgttgttgttggaatgatcatcttaatttcttactgtattcgatgactgataaaggcatgaggatgtggcctgcatgctgcctgatcttgcctagaaccagctgcacctgctgttctcttgcttatgcaaactggctgcacctgctattcctttgcttatgccccaacccttggctatcctaactccctgttctcctgcctattactgtattctctacttctaaataaaaataaaacaaaatacaaatt

SEQ ID NO: 249819 - DNA, 522 bp, Homo Sapiens
ttaacggtttgtattttgttttatttttatttagaagtagagaatacagtaatagtgaggcaggagaacagggaattaggatagccaggggtaggggcataagcaaaggaatagcaggtgcagccagtttgcataaacaagagaacagcaggtgcagccggttctaggcaagatcaggcagcatgcaggccacatcctcatgcctgtgataaaaagacaagaagtttccacttcagcctctgcttgaccatgagctaagactccacttcagcctctgattggtcacaggccaatccttcacaggctgtagccaattggaggcttctaaagggtacctaggggtgttgccaagttcttttggttttataaaaaccctaattagggccgggcgcagtggctcacacctgtaatcccagcactttggaggccaagttttaaacatatgtaaatatattattttaaatattttttacactaataggttaaatactataagaagaatcttaatatttcctcaatatc

SEQ ID NO: 249820 - DNA, 553 bp, Homo Sapiens
  misc_feature (12)..(12): n is a, c, g, or t
  misc_feature (25)..(25): n is a, c, g, or t
  misc_feature (44)..(44): n is a, c, g, or t
  misc_feature (100)..(100): n is a, c, g, or t
  misc_feature (124)..(124): n is a, c, g, or t
  misc_feature (163)..(163): n is a, c, g, or t
aacacaatgggncagggaataaggnattcgtgatgagaatcggncagaactggagtttaaccctcagtccaggtaaggccctctgaaaatcctctcctangcctttgagagaactcagccattnagttttctgactccctagagtcccttagtagcccagtcnaacgtaagcccaagtttagtagctacagccgtcaggcacacaattacaccatggaacagtgaagtaaaaaaatgtcctttctttgctttcttcctctaatctcaatcccagaggcatgaaaacctttatcagtcatcgaatacagtaagaaattaagatgatcattccaacaacaacaagcatcacctcaaaaataacacgagccatcgcccaccaattaatgagtgttatcccatttgtctgtgatgagatgtaactctttgtgactgaagaagaggttgaagtgtgcattgccacaccagtggtacttgatgctgatatgctcacaatttctgacaatagtaatacaaagattatttttccatacatcctgagatcacgagctggctc

SEQ ID NO: 249821 - DNA, 430 bp, Homo Sapiens
  misc_feature (23)..(23): n is a, c, g, or t
  misc_feature (35)..(35): n is a, c, g, or t
ccattaaggtcccccactggggnggcaaatgcaanacttcaaccctccttccttcaagtcacaaaagagttacatcctcatccacagacaaagggagaaacggggacaacttgtcccatcgtttcactgtacccagctccctgtagtgataatactcattattttgtgtgtgatggctggtattattggaacgatcctcttaatttcttacagtattcgccgactgataaaggcatgaggatgtggcctgcatgctgcctgatcttgcctagaaccggctgcacctgctgttctcttgtttatgcaaactggctgcacctgctattcctttgcttatgcccctacccctggctatcctaattccctgttctcctgcctcactattactgtattctctacttctaaataaaaataaaacaaaatacaaacc

SEQ ID NO: 249822 - DNA, 487 bp, Homo Sapiens
  misc_feature (40)..(40): n is a, c, g, or t
  misc_feature (72)..(72): n is a, c, g, or t
  misc_feature (384)..(384): n is a, c, g, or t
agttgaccaacaactctcaaaatatgattaagaaaagganacccacagaacagttcgattccaaaatgattnttttttttgtacgtcttacttatttggacttacattgaaatttcgctttataggagaaaggggacaacttgtccatcgtttccctgaagcagatatgttaatatttgacaaagaatcaaaatcattccattttaaactatcccattgcttgtttcaaatgccctaagaaaatgtgtcaatcttaaaacagaagagcatatgttgttaactttattcacacaaaattgtaaaggcaaagaaaatattctctggttaaaagttaaaataggcatttcttatttttaaaaacattttgggggccaggggcagtgnctcatgcctataatcccagaattttcagagccaagcctggctaatcgcttgagccccaggaatatgagaacagcctgggcaatatggcaaaatctatctctac

SEQ ID NO: 249823 - DNA, 1023 bp, Homo Sapiens
aaggtgggcctggaagataacagctagcaggctaaggtcagacactgacacttgcagttgtctttggtagttttttgcactaacttcaggaaccagctcatgatctcaggatgtatggaaaaataatctttgtattactattgtcagcaattgtgagcatatcagcatcaagtaccactggtgtggcaatgcacacttcaacctcttcttcagtcacaaagagttacatctcatcacagacaaatgatacgcacaaacgggacacatatgcagccactcctagagctcatgaagtttcagaaatttctgttagaactgtttaccctccagaagaggaaaccggagaaagggtacaacttgcccatcatttctctgaaccagagataacactcattatttttggggtgatggctggtgttattggaacgatcctcttaatttcttacggtattcgccgactgataaagaaaagcccatctgatgtaaaacctctcccctcacctgacacagacgtgcctttaagttctgttgaaatagaaaatccagagacaagtgatcaatgagaatctgttcaccaaaccaaatgtggaaagaacacaaagaagacataagacttcagtcaagtgaaaaattaacatgtggactggacactccaataaattatatacctgcctaagttgtacaatttcagaatgcaattttcattataatgagttccagtgactcaatgatggggaaaaaaatctctgctcattaatatttcaagataaagaacaaatgtttccttgaatgcttgcttttgtgtgttagcataatttttagaattgtttgagaattctgatccaaaactttagttgaattcatctacgtttgtttaatattaacttaacctattctattgtattataatgatgattctgtcaaatgaaaggcttgaaatacctagatgaagtttagattttcttcctattgtaaacttttgagtctggtttcattgttttaaataaattaaggggacactaa

SEQ ID NO: 249824 - DNA, 502 bp, Homo Sapiens
acgagtcacggaaccagctcatgatctcaggatgtatggaaaaataatctttgtattactattgtcagaaattgtgagcatatcagcattaagtaccactgaggtggcaatgcacacttcaacctcttcttcagtcacaaagagttacatctcatcacagacaaatggagaaacgggacaacttgtccatcgtttcactgtaccagctcctgtagtgataatactcattattttgtgtgtgatggctggtattattggaacgatcctcttaatttcttacagtattcgccgactgataaaggcatgaggatgtggcctgcatgctgcctgatcttgcctagaaccggctgcacctgctgttctcttgtttatgcaaactggctgcacctgctattcctttgcttatgcccctacccctggctatcctaattccctgttctcctgcctcactattactgtattctctacttctaaataaaaataaaacaaaatacaaaccgtt

SEQ ID NO: 249825 - DNA, 622 bp, Homo Sapiens
  misc_feature (43)..(43): n is a, c, g, or t
  misc_feature (57)..(57): n is a, c, g, or t
accgcctcgacagcgcaaaaaccattaaaatagcagagactcnaaggaaaaacttcncaaacccaatctcctaggatctccaacagcagtgctacaggcgccagtccgcttctcgtaacaattatttgattgaaaacagcccttaagttaacagataggaaagtctgggatcccacatcacaaggttgaagagggaaggaggatcactatggaatttgtggcggtaagattaattacagtggaggttagtacctcatagtaccagaggactcgtaggaagatccagggcattacatttgctacaaagccaatacacacgttcctcggccgccttcgtagtaagttattggcatcatttccttttaaaggaaaatgttctgtgatctcgagcacccaaagctacaagctccttcatgtctagtgagacaatgtagtacgggtaacaccgcgaagtaagcatgcatttaccaaatcagacattttatagatacacaagcaaaaacacatgcgcgcgcgcgcacacacaccgaggggcagtttacccacgggtggcacaagcaaacactcaccgcttattcagccacacagtgctttgctgtcatttgacattaactcagaaggg

SEQ ID NO: 249826 - DNA, 373 bp, Homo Sapiens
ccggtgccaagcgcagctagctcagcaggcggcagcggcggcctgagcttcagggcagccagctccctcccggtctcgccttccctcgcggtcagcatgaaagccttcagtcccgtgaggtccgttaggacagcctgtcggaccacagcctgggcatctcccggagctccaagctcaaggagctggtgcccagcatcccccagaacaagaaggtgagcaagatggtcctgcagcacgtcatcgactacatcttggacctgcagatcgccctggactcgcatcccactattgtcagcctgcatcaccagagacccgggcagaaccaggcgtccaggacgccgctgaccaccctccacggatatcagctcctgtc

SEQ ID NO: 249827 - DNA, 711 bp, Homo Sapiens
  misc_feature (614)..(614): n is a, c, g, or t
accattctgagccgagcccggtgccaagcgcagctagctcagcaggcggcagcggcggcctgagcttcagggcagccagctccctcccggtctcgccttccctcgcggtcagcatgaaagccttcagtcccgtgaggtccgttaggaaaaacagcctgtcggaccacagcctgggcatctcccggagcaaaacccctgtggacgacccgatgagcctgctatacaacatgaacgactgctactccaagctcaaggagctggtgcccagcatcccccagaacaagaaggtgagcaagatggaaatcctgcagcacgtcatcgactacatcttggacctgcagatcgccctggactcgcatcccactattgtcagcctgcatcaccagagacccgggcagaaccaggcgtccaggacgccgctgaccaccctcaacacggatatcagcatcctgtccttgcaggtaagacctgctccggggtccccgccccgccgccgcacactcccgcggtcgtctgggctgtcactaggagatccgtagcccagacggtgactttcgtatgagctatttaactttattttcttcagaatctgctgtagattgagctgtgcgtgnaaattgctagtaagttctgacatgttaatgcgtctgtctttaaatctgaattgttaccataaacgtgtttaatggaacttgctggtctgtggactac

SEQ ID NO: 249828 - DNA, 618 bp, Homo Sapiens
  misc_feature (48)..(66): n is a, c, g, or t
gtgaaatggttgaaaaataagttcagcacttaaaagattccgtgaatnnnnnnnnnnnnnnnnnnngcaaagaataaaagaaatcatgaacaccgcttattcagccacacagtgctttgctgtcatttgacattaactcagaagggaattcagaagcctgcaaggacaggatgctgatatccgtgttgagggtggtcagcggcgtcctggacgcctggttctgcccgggtctctggtgatgcaggctgacaatagtgggatgcgagtccagggcgatctgcaggtccaagatgtagtcgatgacgtgctgcaggatttccatcttgctcaccttcttgttctgggggatgctgggcaccagctccttgagcttggagtagcagtcgttcatgttgtatagcaggctcatcgggtcgtccacaggggttttgctccgggagatgcccaggctgtggtccgacaggctgtttttcctaacggacctcacgggactgaaggctttcatgctgaccgcgagggaaggcgagaccgggagggagctggctgccctgaagctcaggccgccgctgccgcctgctgagctagctgcgcttggcaccgggctcggctcagaatccc

SEQ ID NO: 249829 - DNA, 725 bp, Homo Sapiens
  misc_feature (17)..(17): n is a, c, g, or t
  misc_feature (35)..(35): n is a, c, g, or t
  misc_feature (432)..(450): n is a, c, g, or t
  misc_feature (526)..(530): n is a, c, g, or t
  misc_feature (534)..(546): n is a, c, g, or t
  misc_feature (550)..(550): n is a, c, g, or t
  misc_feature (552)..(552): n is a, c, g, or t
  misc_feature (555)..(559): n is a, c, g, or t
  misc_feature (633)..(633): n is a, c, g, or t
agtcccgtgaggtccgntgggaaaaacagcctttnggaccacagcctgggcattctcccggagcaaaaacccctgtggacgacccgatggggccctgctatacaacatgaacgactgctactccaagctcaaggaactggtgcccagcatcccccagaacaagaaggtgagcaagatggaaatcctgcagcacgtcatcgactacatcttggacctgcagatcgccctggactcgcatcccactattgtcagcctgcatcaccagagacccgggcagaacccagggtccaggacgccgctgaccaccctcaacacggatatcagcatcctgtccttgcaggcttctgaattcccttctgagttaatgtcaaatgacagcaaagcactgtgtggctgaataagcggtgttcatgatttcttttattctttgcnnnnnnnnnnnnnnnnnnnattcacggaatcttttaagtgctgaacttatttttcaaccatttcacaaggaggacaagttgaatggacctttttnnnnngaannnnnnnnnnnnnaaananaannnnnccttgtccggccacctcggcccctcgagaaagcttttctagacccattccgtttgggcgcggcgggcccccagntagggtaaggtgaaacatgggtccataagcctggttttccctaaggaaaaactccctgggtccattggaactaagggggctttggggaattt

SEQ ID NO: 249830 - DNA, 463 bp, Homo Sapiens
  misc_feature (426)..(426): n is a, c, g, or t
attcggcactaggagcccggtgccaagcgcacaaagctcagcaggcggcagggcggcctgagcttcagggcagccagctccctcccggtctcgccttccctcgcggtcagatgaaagccttcagtcccgtgagtccgttagaaaaacagcctgtcggaccacagcctgggcatctcccggagcaaaacccctgtggacgacccgatgagcctgctatacaacatgaacgactgctactccaagctcaaggagctggtgcccagcatcccccagaacaagaaggtgagcaagatggaaatcctgcagcacgtcatcgactacatcttgggacctgcagatcgccctgggactcgcatcccactattgttcagcctggcattcaccagaggacccggggcaggaaccaggggcgttccaggggacgcntttggaaccacccttcaacacgggttattcaggcttc

SEQ ID NO: 249831 - DNA, 289 bp, Homo Sapiens
  misc_feature (29)..(29): n is a, c, g, or t
  misc_feature (37)..(37): n is a, c, g, or t
  misc_feature (194)..(212): n is a, c, g, or t
cgctgtcgaggcgagtgtgtgtgttgcanctggacgnccagggtttgcccaatctttgagtgtttggttaaatgttcaaactgtggcttcctcccgcgccagtcgcccgcctctgcccttaggttacattctcttaaacatgcctttctcccccactctttcgcaggtgttcatgatttcttttattctttgcnnnnnnnnnnnnnnnnnnnattcacggaatcttttaagtgctgaacttatttttcaaccatttcacaaggaggacaagttgaatggacctttttaa

SEQ ID NO: 249832 - DNA, 673 bp, Homo Sapiens
aaccctgggctccagacaccccagagtctctttattgaggttcttagaaggcgagtgcaatctcagcctatggtaactgaaggaggtccagttcgtgttaagtctgtgttcaggaagtaggtgcagagctgccctttgcctttcaccttgatgacaccccggctgtagcaggtgtagcccacggactgtaaggcccatgctgtctcctcagtcacttggattttgccaaggactcctgtactctccatgcggctggccacgttcactgcgttgccccaaatgtcatattgcggtttctgggccccaataactccagctactacgggtccatggttcaaccccactcgcaagcggaagttggtgaatgaatgcttgttgatgacgtccagcttagaccccagggccacggcaaattccaccatagtgccaaggtggctgcagctccgttcagcattctggtgtgcattctgttcagaggttgcatttaagcctgtggcttgcatgtatgtgctgccgatggtcttgatcttctccaccccactgaacttgggcttggagagcagctcatcaaaaacagcaattatctcatttgagcagcctaaaacactctaggccctcatgattgatgttggattcagagtagaactccttgaagtctgggactgagcgcaaa

SEQ ID NO: 249833 - DNA, 1781 bp, Homo Sapiens
aggaggcgcagaaaaggaaccaatatttcagaaacaagcttaataggaacagctgcctgtacatcaacatcttctcagaatgacccagaagttatcatcgtgggagctggcgtgcttggctctgctttggcagctgtgctttccagagatggaagaaaggtgacagtcattgagagagacttaaaagagcctgacagaatagttggagaattcctgcagccgggtggttatcatgttctcaaagaccttggtcttggagatacagtggaaggtcttgatgcccaggttgtaaatggttacatgattcatgatcaggaaagcaaatcagaggttcagattccttaccctctgtcagaaaacaatcaagtgcagagtggaagagctttccatcacggaagattcatcatgagtctccggaaagcagctatggcagagcccaatgcaaagtttattgaaggtgttgtgttacagttattagaggaagatgatgttgtgatgggagttcagtacaaggataaagagactggagatatcaaggaactccatgctccactgactgttgttgcagatgggcttttctccaagttcaggaaaagcctggtctccaataaagtttctgtatcatctcattttgttggctttcttatgaagaatgcaccacagtttaaagcaaatcatgctgaacttattttagctaacccgagtccagttctcatctaccagatttcatccagtgaaactcgagtacttgttgacattagaggagaaatgccaaggaatttaagagaatacatggttgaaaaaatttacccacaaatacctgatcacctgaaagaaccattcttagaagccactgacaattctcatctgaggtccatgccagcaagcttccttcctccttcatcagtgaagaaacgaggtgttcttcttttgggagacgcatataatatgaggcatccacttactggtggaggaatgactgttgcttttaaagatataaaactatggagaaaactgctaaagggtatccctgacctttatgatgatgcagctattttcgaggccaaaaaatcattttactgggcaagaaaaacatctcattcctttgtcgtgaatatccttgctcaggctctttatgaattattttctgccacagatgattccctgcatcaactaagaaaagcctgttttctttatttcaaacttggtggcgaatgtgttgcgggtcctgttgggctgctttctgtattgtctcctaaccctctagttttaattggacacttctttgctgttgcaatctatgccgtgtatttttgctttaagtcagaaccttggattacaaaacctcgagcccttctcagtagtggtgctgtattgtacaaagcgtgttctgtaatatttcctctaatttactcagaaatgaagtatatggttcattaagcttaaaggggaaccatttgtgaatgaatatttggaacttaccaagtcctaagagacttttggaagaggatatatatagcatagtaccataccacttataaagtggaaactcttggaccaagatttggattaatttgtttttgaagttttttgtatataaatatgtaaatacatgctttaatttgcaatttaaaatgaaggggttaaataagttagacatttaaaagaaatgattgttaccataaattagtgctaatgctgaggagaactacagtttttcttttgaatttagtatttgagatgagttgttgggacatgcaaataaaatgaagaatgaaaaa

SEQ ID NO: 249834 - DNA, 769 bp, Homo Sapiens
cacattgcctcaacagcttcaaggtgagccagctcaagactttgctctccaccaggcagaagatgacagactgtgaatttggatatatttacaggctggctcaggactatctgcagtgcgtcctacagataccacaacctggatcaggtccaagcaaaacgtccagagtgctacaaaatgttgcgttctcagtccaaaaagaagtggaaaagaatctgaagtcatgcttggacaatgttaatgttgtgtccgtagacactgccagaacactattcaaccaagtgatggaaaaggagtttgaagacggcatcattaactggggaagaattgtaaccatatttgcatttgaaggtattctcatcaagaaacttctacgacagcaaattgccccggatgtggatacctataaggagatttcatattttgttgcggagttcataatgaataacacaggagaatggataaggcaaaacggaggctgggaaaatggctttgtaaagaagtttgaacctaaatctggctggatgacttttctagaagttacaggaaagatctgtgaaatgctatctctcctgaagcaatactgttgaccagaaaggacactccatattgtgaaaccggcctaatttttctgactgatatggaaacgattgccaacacatacttctacttttaaataaacaactttgatgatgtaacttgaccttccagagttatgggaatttttgtccccatgtaatgaaataaattggatggtatttttcctcca

SEQ ID NO: 249835 - DNA, 824 bp, Homo Sapiens
  misc_feature (309)..(365): n is a, c, g, or t
  misc_feature (651)..(651): n is a, c, g, or t
gggggtgggcggagggacggagggaagatggctgcagagaccggatattggcgctgcctccccgaatcccggacctgcgctgaggaggcggttcatctgtggccagcggtgcttcgggacccgcgctgggggaaccctggcgacggggcctggccctgctatatgcgggggcctcggctggagtgagcggcgtggacgcctctttcctccggctcttcccttgttgctgcgagagcgagagggccgcgggcggcggaggcagcggggccgggatggaggacgttaactctaacgtgaacgcggaccaannnnnnnnnnnnnnnnnnnnnnnnnnnnnnnnnnnnnnnnnnnnnnnnnnnnnnnnnaggaaaatggctttgtaaagaagcttgagcctaaatctggctggatgacttttctagaagttacaggaaagatctgtgaaatgctcttctgtcctgaagcaatactgttgaccagaaaggacactctatattgtgaaaccggcctaatttttctgactcttacgaaaacgattgccaacacatacttctacttttaaataaacaactttgatgatgtaacttgaccttccagagttacagaaattttgtccctatttaatgaataaattgtatgtatttttcgccnaaactcccccaaaggattggatgaaaaccttggcgggccgccccgggccccccaaaggtttccagaaccatttgttttgggcggccgggcccagtagggtaagggaaactggggtcataacctgctttcccaaagaaaaaccgcgggcccaggaccaaaggggcttgggatct

SEQ ID NO: 249836 - DNA, 652 bp, Homo Sapiens
  misc_feature (100)..(100): n is a, c, g, or t
ctgggccctgctctctgggacctttaggctcctttgacgtacttttgacatcagcaggtttgggaagaaacaaagccatgcctgctcttgctcttctccnacatgtttccagcaagtagatgcccctgtgtgtgttttcccttgccttgtttcctgccttatatcttgtatttcgacttattacagagttgagggttcttgcttaatttagatcaagtataaaatttgtatgacttcaagtctcattttatctgaaaggtttttttctcatttaatcctgatgtggcattttccgtcatctgaagcatgagtgacaagttgggaatgatgtggtgatttagaatgccagtattggccaagtcccaagttgtcaacttaagcgtctgtttaccaaagaccgggaacaggggcccaaacatgtccagtcctcttcttccctctgctggaacctttggggacactcaagggtacagtttgacactgatctggtccatgaggctgcccagagaaagcactgcttctgtatgtctcttgtggtattggaacaataaacccgtacaacctgccctaaaagaaattctacaagggcaagaaaaacaaaacccctgaacctgcgagactaaaaaaacgcgtgccaatgcgccgacggctc

SEQ ID NO: 249837 - DNA, 688 bp, Homo Sapiens
aagtagcgaggcctgggtggcgaattcggcacgagggctaggtgagccgtgggaagaaaagagggagcagctagggcgcgggtctccctcctcccggagtttggaacggctgaagttcaccttccagcccctagcgccgttcgcgccgctaggcctggcttctgaggcggttgcggtgctcggtcgccgcctaggcggggcagggtgcgagcaggggcttcgggccacgcttctcttggcgacaggattttgctgtgaagtccgtccgggaaacggaggaaaaaaagagttgcgggaggctgtcggctaataacggttcttgatacatatttgccagacttcaagatttcagaaaaggggtgaaagagaagattgcaactttgagtcagacctgtaggcctgatagactgattaaaccacagaaggtgacctgctgagaaaagtggtacaaatactgggaaaaacctgctcttctgcgttaagtgggagacaatgtcacaagttaaaagctcttattcctatgatgccccctcggatttcatcaatttttcatccttggatgatgaaggagatactcaaaacatagattcatggtttgaggagaaggccaatttggagaataagttactggggatggaaatgtgtggcatgcacatgagttgaaattcttttatgcatttttttgaag

SEQ ID NO: 249838 - DNA, 1009 bp, Homo Sapiens
tgttcggcgccccctcaatcctaagcccgaggcctgggtggcgaattcggcacgaggcccaccgagcctattggctttgatttggaaattgagaaaagaatccaggagcgagaatcaaagaagaaaacagaggatgaacactttgaatttcattccagaccttgccctactaagattttggaagatgttgtgggtgttcctgaaaagaaggtacttccaatcaccgtccccaagtcaccagcctttgcattgaagaacagaattcgaatgcccaccaaagaagatgaggaagaggacgaaccggtagtgataaaagctcaacctgtgccacattatggggtgccttttaagccccaaatcccagaggcaagaactgtggaaatatgccctttctcctttgattctcgagacaaagaacgtcagttacagaaggagaagaaaataaaagaactgcagaaaggggaggtgcccaagttcaaggcacttcccttgcctcattttgacaccattaacctgccagagaagaaggtaaagaatgtgacccagattgaacctttctgcttggagactgacaggagaggtgctctgaaggcacagacttggaagcaccagctggaagaagaactgagacagcagaaagaagcagcttgtttcaaggctcgtccaaacaccgtcatctctcaggagccctttgttcccaagaaagagaagaaatcagttgctgagggcctttctggttctctagttcaggaaccttttcagctggctactgagaagagagccaaagagcggcaggagctggagaagagaatggctgaggtagaaacccaaaaagcccagcagttggaggaggccagactacaggaggaagagcagaaaaaaagaggagctggccaaggctacgggagagaactggctgcataaggccaaatccaatacgccaagtacccgggttctgggaaataaaagtcaagggaacccggcctctgaactgtggccctggatctcc

SEQ ID NO: 249839 - DNA, 1814 bp, Homo Sapiens
gggggctcgcgcttcgttgtcagatctgaggcgaggctaggtgagccgtgggaagaaaagagggagcagctagggcgcgggtctccctcctcccggagtttggaacggctgaagttcaccttccagcccctagcgccgttcgcgccgctaggcctggcttctgaggcggttgcggtgctcggtcgccgcctaggcggggcagggtgcgagcaggggcttcgggccacgcttctcttggcgacaggattttgctgtgaagtccgtccgggaaacggaggaaaaaaagagttgcgggaggctgtcggctaataacggttcttgatacatatttgccagacttcaagatttcagaaaaggggtgaaagagaagattgcaactttgagtcagacctgtaggcctgatagactgattaaaccacagaaggtgacctgctgagaaaagtggtacaaatactgggaaaaacctgctcttctgcgttaagtgggagacaatgtcacaagttaaaagctcttattcctatgatgccccctcggatttcatcaatttttcatccttggatgatgaaggagatactcaaaacatagattcatggtttgaggagaaggccaatttggagaataagttactggggaagaatggaactggagggctttttcagggcaaaactcctttgagaaaggctaatcttcagcaagctattgtcacacctttgaaaccagttgacaacacttactacaaagaggcagaaaaagaaaatcttgtggaacaatccattccgtcaaatgcttgttcttccctggaagttgaggcagccatatcaagaaaaactccagcccagcctcagagaagatctcttaggctttctgctcagaaggatttggaacagaaagaaaagcatcatgtaaaaatgaaagccaagagatgtgccactcctgtaatcatcgatgaaattctaccctctaagaaaatgaaagtttctaacaacaaaaagaagccagaggaagaaggcagtgctcatcaagatactgctgaaaagaatgcatcttccccagagaaagccaagggtagacatactgtgccttgtatgccacctgcaaagcagaagtttctaaaaagtactgaggagcaagagctggagaagagtatgaaaatgcagcaagaggtggtggagatgcggaaaaagaatgaagaattcaagaaacttgctctggctggaatagggcaacctgtgaagaaatcagtgagccaggtcaccaaatcagttgacttccacttccgcacagatgagcgaatcaaacaacatcctaagaaccaggaggaatataaggaagtgaactttacatctgaactacgaaagcatccttcatctcctgcccgagtgactaagggatgtaccattgttaagcctttccaacctgtcccaaggaaagaaaagaacatttgatgaaacagtttctacatatgtgcccccttgcacagcaagttgaagacttccataaacgaacccctaacagatatcatttgaggagcaagaaggatgatattaacctgttaccctccaaatcttctgtgaccaagatttgcagagacccacagactcctgtactgcaaaccaaacaccgtgcacgggctgtgacctgcaaaagtacagcagagctggaggctgaggagctcgagaaattgcaacaatacaaattcaaagcacgtgaacttgatcccagaatacttgaaggtgggcccatcttgcccaagaaaccacctgtgaaaccacgccgagccctatgcctcgtgccgctcgtgccgaattctggcc

SEQ ID NO: 249840 - DNA, 2287 bp, Homo Sapiens
ggtaccggtctggaagttcgggatatcgtcgacccacgcgttcgcaatctgtgaagaaatcagtgagccaggtcaccaaatcaggttgacttccacttccgctacagatgagcgaatcaaacaacatcctaagaaccaggaggaatataaggaagtgaactttacatctgaactacgaaagcatccttcatctcctgcccgagtgactaagggatgtaccattgttaagccgtttcaaccgtgtcccaaggaaagaaaagaacatttgatgaaacagtttctacatatgtgccccttgcacagcaagttgaagacttccataaacgaacccctaacagatatcatttgaggagcaagaaggatgatattaacctgttaccctccaaatcttctgtgaccaagatttgcagagacccacagactcctgtactgcaaaccaaacaccgtgcacgggctgtgacctgcaaaagtacagcacgagctggaggctgaggagctcgagaaattgcaacaatacaaattcaaagcacgtgaacttgatcccagaatacttgaaggtgggcccatcttgcccaagaaaccacctgtgaaaccacccaccgagcctattggctttgatttggaaattgagaaaagaatccaggagcgagaatcaaagaagaaaacagaggatgaacactttgaatttcattccagaccttgccctactaagattttggaagatgtcgtgggtgttcctgaaaagaaggtacttccaatcaccgtccccaagtcaccagcctttgcattgaagaacagaattcgaatgcccaccaaagaagatgaggaagaggacgaaccggtagtgataaaagctcaacctgtgccacattatggggtgccttttaagccccaaatcccagaggcaagaactgtggaaatatgccctttctcgtttgattctcgagacaaagaacgtcagttacacgaaggagaagaaagataacaagaactgcagaaaggggaggtgcccaagttcaaggcacttcccattgcctcactttgacaccattaacctgccagagaagaaggtaaagaatgtgacccagattgaacctttctgcttggagactgacagaagaggtgctctgaaggcacagacttggaagcaccagctggaagaagaactgagacagcagaaagaagcagcttgtttcaaggctcgtccaaacaccgtcatctctcaggagccctttgttcccaagaaagagaagaaatcagttgctgagggcctttctggttctctagttcaggaaccttttcagctggctactgagaagagagccaaagagcggcaggagctggagaagagaatggctgaggtagaagcccagaaagcccagcagttggaggaggccagactacaggaggaagagcagaaaaaaagaggagctggccaggctacggagagaactggtgcataaggcaaatccaatacgcaagtaccagggtctggagataaagtcaagtgaccagcctctgactgtgcctgtatctcccaaattctccactcgattccactgctaaactcagctgtgagctgcggataccgcccggcaatgggacctgctcttaacctcaaacctaggaccgtcttgctttgtcattgggcatggagagaacccatttctccagacttttacctacccgtgcctgagaaagcatacttgacaactgtggactccagttttgttgagaattgttttcttacattactaaggctaataatgagatgtaactcatgaatgtctcgattagactccatgtagttacttcctttaaaccatcagccggccttttatatgggtcttcactctgactagaatttagtctctgtgtcagcacagtgtaatctctattgctattgccccttacgactctcaccctctccccactttttttaaaaattttaaccagaaaataaagatagttaaatcctaagatagagattaagtcatggtttaaatgaggaacaatcagtaaatcagattctgtcctcttctctgcataccgtgaatttatagttaaggatccctttgctgtgagggtagaaaacctcaccaactgcaccagtgaggaagaagactgcgtggattcatggggagcctcacagcagccacgcagcaggctctgggtggggctgccgttaaggcacgttctttccttactggtgctgataacaacagggaaccgtgcagtgtgcattttaagacctggcctggaataaatacgttttgtctttccctct

SEQ ID NO: 249841 - DNA, 419 bp, Homo Sapiens
  misc_feature (16)..(16): n is a, c, g, or t
  misc_feature (30)..(30): n is a, c, g, or t
  misc_feature (53)..(53): n is a, c, g, or t
gaatggggtgaccccnggcctcactgattnccttccacaggttggcccctatncccagcccagagcaagtttccttggaaatccttcattcctttttcccgcatctccaaccacccccttgcctgcattttccatactcctcctcccagctcttgctccctcagtacctttttagaaacttccgctttgcaggtggcatacaaggcacagtatgtcctacccttggctttctctggggaagatgcattcttttcagcagtatcttgatgagcactgccttcttcctctggcttctttttgttgttagaaactttcattttcttagagggtagaatttcatcgatgattacaggagtggcacatctcttggctttcatttttacatgatgcttttctttctgttccaaatccttctgagc

SEQ ID NO: 249842 - DNA, 419 bp, Homo Sapiens
  misc_feature (17)..(17): n is a, c, g, or t
  misc_feature (43)..(43): n is a, c, g, or t
ccccctcatgtcccccnggaaaagagcccaaaacgcccgtttnccccattaaaagcaagattgtttgccaacctttgtaaatgaaggggagtggccccagtggaaggatttttaaaattatccttatggatagcctcaagtctctgcccatttgtaatttttggctctaagctccgattggagacgcttctccttgtgcatgtgagttgactgatgttgtgagtgtaaatgcatttggttatttctggtatcggtggccacttggatggatttttttacattctgttccccagttacaggaaggagtccctttggtgtgtgaatatgtgtgcctgtagagggtggggcagggtggggtggggatggaaatgtgtggcatgcacatgagttgaaattcttttatgcatttttttgaagaa

SEQ ID NO: 249843 - DNA, 232 bp, Homo Sapiens
cctatacacccacacacccacatgccaaccaaccaaccaaccagcaactgatcagtaaaacttgttattaaccagggtgactgttcttgataatagattaaccctgctgtagaatgctatgttgcctttaaaaaccaattcaattattatccacaatctgagtatcagtccctaacccaccctcccctaaaaatttgaggtacattcaattattgcatgacttggtcttaat

SEQ ID NO: 249844 - DNA, 1702 bp, Homo Sapiens
  misc_feature (103)..(167): n is a, c, g, or t
attgaacttggttcttcaaaggcaacatagcattctacagcagggttaatctattatcaagaacagtcaccctggttaataacaagttttactgatcagttgnnnnnnnnnnnnnnnnnnnnnnnnnnnnnnnnnnnnnnnnnnnnnnnnnnnnnnnnnnnnnnnnnatttttccccatgagtcctttttttaatcctgtggctttttcacttacaactagcctaaccctgtaattttcctacatccaagaaaacaatcacaaagtagtggtttaaatactttgttgtatttggctaattttgctgtcttaagtgcagcctattaagagttggggttaaaaatcagtaatcagtactttattacatcactgaactaaaatatggagacatcctcattgaaaatggagggcactctatcagtctataactatcaacgtagtgcaacagggtgttttgatacctttgttttcacctcttgacataatgctatttaaaggcttgaatttttccctttatataattttcacctttactttcaaagtgttttgttgtagttggctattgcagagagtgcattgtcctatcattcctaaacctggtctgctttctacattcatggtatggaaaccatgtgattctttgtacagtttatcctgatgttgcttgtaatgcagtagaggctatttcgccttcgcttttctttctcgacctttttgtaaaccctataattatgaagcgattgcttgagaaaataacatataaacatagaatagaatagactgaccaagatggttcacagtttctttttttaactaggttatttataatgtatttctgaaccacttggcagacaaattcacaacacttaatgttcatattttgagtaaaggaagctaaaaccatgtttgctttctggtactacatgcattagcgaaaggttaagtaagttttgttctccactgaagtaatacttaacatctcagaaaaaattttgcatgttctgtagttttgtattaaatcagtcatttcatatgcactatatcaagtacaaacaggtagtttacctgtttatagtagtgtactaacaaagtctcccttgcagcttcagactgttatctataggcttatcgttcaaatacagcacttgaatatcccaagtagttcttctacgcatagctcacctttctaaacccagttaagcatggaagagaggtagtaggtaggtgcagtgtgtggaagctgcaaacaagtaggccttttattcattgatatcttttcccaagtactggattttaaatctgtatgtatctgtttgattttgatctctaatatttcagttgagctgctgttttcttccatgcaatattgtatactcaattgtgtatagaagaagctggtgagagtgccctcctacataaataagcaattgcagtgttttgcatgcaaaatataaaaaatttaaattgtcctgattctattttgtaaatggagaaacaatcatatctttctaagcggtaatggaggaagactagtgctttgtgcattttgatatatttgagttcattttttccacaatgtcatacttttgacgcagttgggtttctcataagtatcctagttcatgtacatccgaatgctaaataatactgtgttttaagttttgtgttgcaagaacaaatggaataaacttgaattgtgctac

SEQ ID NO: 249845 - DNA, 1043 bp, Homo Sapiens; identical to SEQ ID NO: 70515

SEQ ID NO: 249846 - DNA, 797 bp, Homo Sapiens
ggggcttaggtaccagttagcgtcaggggagctgggtcaggcggtcgccgggacaccccgtgtgtggcaggcggcgaagcgctctggagaatcccggacagccctgctccctgcagccaggtgtagtttcgggagccactggggccaaagtgagagtccagcggtcttccagcgcttgggccacggcggcggccctgggagcagaggtggagcgaccccattacgctaaagatgaaaggctggggttggctggccctgcttctgggggccctgctgggaaccgcctgggctcggaggagccaggatctccactgtggagcatgcagggctctggtggatgaactagaatgggaaattgcccaggtggaccccaagaagaccattcagatgggatctttccggatcaatccagatggcagccagtcagtggtggaggtaactgttactgttcccccaaacaaagtagctcactctggctttgggatgaaattcgactgcctaaaaaggaccttggtttaatagaaatgaagaaaaccgactccgaaaaaagatttgggctctgtctcatttggaaaaagctgcaaggcttattccccatgcactttgcttcctggcttgcaaaccttaatacttttgttttcctgctgtaaaaatttgttaagccaaacagggaaggccctggatcaggccccccttctcccccattcaccatggaccggggttttttatgggaaccccctgggggtatttacatggcaaacattcccgtttcaaaaattcggaagttcgggagctct

SEQ ID NO: 249847 - DNA, 1939 bp, Homo Sapiens
  misc_feature (42)..(42): n is a, c, g, or t
  misc_feature (960)..(1000): n is a, c, g, or t
cctttcttcccccatccacaccccacctcacgcccccacccntcctaagtagcgaggcctgggtggcgaattcggcacgaggctggccgccgggcccgggccgagcctgggcgacgaagccatccactgcccgccctgctccgaggagaagctagcgcgctgccgcccccccgtgggctgcgaggagctggtgcgagagccgggctgcggctgttgcgccacttgcgccctgggcttggggatgccctgcggggtgtacaccccccgttgcggctcgggcctgcgctgctacccgccccgaggggtggagaagcccctgcacacactgatgcacgggcaaggcgtgtgcatggagctggcggagatcgaggccatccaggaaagcctgcagccctctgacaaggacgagggtgaccaccccaacaacagcttcagcccctgtagcgcccatgaccgcaggtgcctgcagaagcacttcgccaaaattcgagaccggagcaccagtgggggcaagatgaaggtcaatggggcgccccgggaggatgcccggcctgtgccccagggctcctgccagagcgagctgcaccgggcgctggagcggctggccgcttcacagagccgcacccacgaggacctctacatcatccccatccccaactgcgaccgcaacggcaacttccaccccaagcagtgtcacccagctctggatgggcagcgtggcaagtgctggtgtgtggaccggaagacgggggtgaagcttccggggggcctggagccaaagggggagctggactgccaccagctggctgacagctttcgagagtgaggcctgccagcaggccagggactcagcgtcccctgctactcctgtgctctggaggctgcagagctgacccagagtggagtctgagtctgagtcctgtctctgcctgcggcccagaagtttccctcaaatgcgcnnnnnnnnnnnnnnnnnnnnnnnnnnnnnnnnnnnnnnnnnagcatgggtgtgcccttggggtaagccagagcctggggtgttctctttggtgttacacagcccaagaggactgagactggcacttagcccaagaggtctgagccctggtgtgtttccagatcgatcctggattcactcactcactcattccttcactcatccagccacctaaaaacatttactgaccatgtactacgtgccagctctagttttcagccttgggaggttttattctgacttcctctgattttggcatgtggagacactcctataaggagagttcaagcctgtgggagtagaaaaatctcattcccagagtcagaggagaagagacatgtaccttgaccatcgtccttcctctcaagctagccagagggtgggagcctaaggaagcgtggggtagcagatggagtaatggtcacgaggtccagacccactcccaaagctcagacttgccaggctccctttctcttcttccccaggtccttcctttaggtctggttgttgcaccatctgcttggttggctggcagctgagagccctgctgtgggagagcgaagggggtcaaaggaagacttgaagcacagagggctagggaggtggggtacatttctctgagcagtcagggtgggaagaaagaatgcaagagtggactgaatgtgcctaatggagaagacccacgtgctaggggatgaggggcttcctgggtcctgttccctaccccatttgtggtcacagccatgaagtcaccgggatgaacctatccttccagtggctcgctccctgtagctctgcctccctctccatatctccttcccctacacctccctccccacacctccctactcccctgggcatcttctggcttgactggatggaaggagacttaggaacctaccagttggccatgatgtctttcttcttttctttttttaacaa

SEQ ID NO: 249848 - DNA, 406 bp, Homo Sapiens
cacactcacagctgtcttttattcctgttcattccttgttaagaggctttgactctccagaatccaaggggcagcccctcttttctgcccctccccacacatctctggctgctttctcctctgcagctatgcctgtgtcttttgtgctcataggaaaacaggctggtcagccacagcagtcctccttttctggagagttcctgaccctgttgactcccctgcatcctgcacggcacttccctccaccaaagtccctccgtggcaggcctgggccatagctaaggggagctgataacatgcgccttatttaaaagccacaaaactatcttctcaaagtaatccttctgtgagctgttcaccacatcagcctggcctgatgccccacttggcctcagtcagcatggct

SEQ ID NO: 249849 - DNA, 560 bp, Homo Sapiens
aaccctccgtgccttgtctgctcagttcatccctagaggcagctgctccaggaacagaggtgccatgcagccccgggtactccttgttgttgccctcctggcgctcctggcctctgcccgagcttcagaggccgaggatgcctcccttctcagcttcatgcagggctacatgaagcacgccaccaagaccgccaaggatgcactgagcagcgtgcaggagtcccaggtggcccagcaggccaggggctgggtgaccgatggcttcagttccctgaaagactactggagcaccgttaaggacaagttctctgagttctgggatttggaccctgaggtcagaccaacttcagccgtggctgcctgagacctcaataccccaagtccacctgcctatccatcctgccagctccttgggtcctgcaatctccagggctgcccctgtaggttgcttaaaagggacagtattctcagtgctctcctaccccacctcatgcctggcccccctccaggcatgctggcctcccaataaagctggacaagaagctgctatgacacagacc

SEQ ID NO: 249850 - DNA, 478 bp, Homo Sapiens
aagttggggtaagaaaaacaactgaaaaatactgtcccctttttaaagcaaacctaacaagggcaaagcccctggaaaattgcaaggaaccccaaggaagctggcaaggaatggaataggccaggtggacttggggtattgaggtctcaggcagccacggctgaagttggtctgacctcagggtccaaatcccagaactcagagaacttgtccttaacggtgctccagtagtctttcagggaactgaagccatcggtcacccagccccctgcctgctgggccacctgggactcctgcacgctgctcagtgcatccttggcggtcttggtggcgtgcttcatgtagccctgcatgaagctgagaagggaggcatcctcggcctctgaagctcgggcagaggccaggagcgccaggagggcaacaacaaggagtacccggggctgcatggcacctctgttcctggagcagctgctcctag

SEQ ID NO: 249851 - DNA, 451 bp, Homo Sapiens
ggctgtcgtcccaatgaaattgaaaaggtggtgtggtcctgactggtgtcgtcccagtggggaaaatgggtgtgggtccccatggttgcctacagaggagttctcatgccctgctctgttgcttcccctgactatttaggggctgggtgaccgatggcttcagttccctgaaagactactggagcaccgttaaggacaagttctctgagttctgggatttggaccctgaggtcagaccaacttcagccgtggctgcctgagacctcaataccccaagtccacctgcctatccatcctgccagctccttgggtcctgcaatctccagggctgcccctgtaggttgcttaaaagggacagtattctcagtgctctcctaccccacctcatgcctggcccccctccaggcatgctggcctcccaataaagctggacaagaagctgctatgaaaa

SEQ ID NO: 249852 - DNA, 463 bp, Homo Sapiens
gagctgaaaaattcctgtcacctagtgactttctagccaatataacactgtagcacaatacccattactcatgtgtttgcaagtgatgctgccgtaaacaaaccttactctgctgctcagtgcatccttggcggtccagcaggccaggggctgggtgaccgatggcttcagttccctgaaagactactggagcaccgttaaggacaagttctctgagttctgggatttggaccctgaggtcagaccaacttcagccgtggctgcctgagacctcaataccccaagtccacctgcctatccatcctgccagctccttgggtcctgcaatctccagggctgcccctgtaggttgcttaaaagggacagtattctcagtgctctcctaccccacctcatgcctggcccccctccaggcatgctggcctcccaataaagctggacaagaagctgctatgaaaaaaaa

SEQ ID NO: 249853 - DNA, 620 bp, Homo Sapiens
tttctcgttccccggccatcttagcggctgctgttggttgggggccgtcccgctcctaaggcaggaagatggtggccgcaaagaagacggtgagtgaggcgggccaggcccggaagacgattcacgtggagagatgtcttggccagggcgggcagatgtgagcccacgggggtgacagcatgcctgctggcatttggagggccccagaaggaatcccagtggccctctcaatgacttggggtcctcgacttcggaagtttaaggggctcggcttcaaaaagctgggtccggttttgaggcggttgcaggcgaggcccttaggtccgtatttaatgtttgctttgtagaaaaagtcgctggagtcgatcaactctaggctccaactcgttatgaaaagtgggaagtacgtcctggggtacaagcagactctgaagatgatcagacaaggcaaagcgaaattggtcattctcgctaacaactgcccagctttgaggaaatctgaaatagagtactatgctatgttggctaaaactggtgtccatcactacagtggcaataatattgaactgggcacagcatgcggaaaatactacagagtgtgcacactggctatcattgat

SEQ ID NO: 249854 - DNA, 548 bp, Homo Sapiens
gggagttccggctctgccgtgaagagctttgcattgtgggaagtctttcctttctcgttccccggccatcttagcggctgctgttggttgggggccgtcccgctcctaaggcaggaagatggtggccgcaaagaagacgaaaaagtcgctggagtcgatcaactctaggctccaactcgttatgaaaagtgggaagtacgtcctggggtacaagcagactctgaagatgatcagacaaggcaaagcgaaattggtcattctcgctaacaactgcccagctttgaggaaatctgaaatagagtactatgctatgttggctaaaactggtgtccatcactacagtggcaataatattgaactgggcacagcatgcggaaaatactacagagtgtgcacactggctatcattgatccaggtgactctgacatcattagaagcatgccagaacagactggtgaaaagtaaaccttttcacctacaaaatttcacctgcaaaccttaaacctgcaaaattttcctttaataaaatttgcttgttttaaaaacc

SEQ ID NO: 249855 - DNA, 438 bp, Homo Sapiens
cccgccaaagaagcccgaaaaagtccgcctggagtccggatcaaactcctagggctcccaactccgttatgaaaaagtgggaagtacgcccccggggtacaagccagacctctgaagatgatcagacaaggcaaagccgaaattggtcattcctcgcctaacaactgccccagcctttgaggaaatctgaaatagagtactatgcctatgttggctaaaactggtgtccatcactacagtggcaataatattgaactgggcacagcatgcggaaaatactacagagtgtgcacactggctatcattgatccaggtgactctgacatcattagaagcatgccagaacagactggtgaaaagtaaaccttttcacctacaaaatttcacctgcaaaccttaaacctgcaaaattttcctttaataaaatttgcttgtttt

SEQ ID NO: 249856 - DNA, 768 bp, Homo Sapiens
  misc_feature (567)..(567): n is a, c, g, or t
  misc_feature (570)..(570): n is a, c, g, or t
  misc_feature (574)..(585): n is a, c, g, or t
  misc_feature (628)..(644): n is a, c, g, or t
  misc_feature (646)..(654): n is a, c, g, or t
  misc_feature (662)..(662): n is a, c, g, or t
ggggagtgggctcctaccgaccgaggtttaggcagcgcggggagctttgcgggttgccatttgtaactccggatcctaaaattcctgtcctgttctctgtctcttctaggttgggggccgtcccgctcctaaggcaggaagatggtggccgcaaagaagacgaaaaagtcgctggagtcgatcaactctaggctccaactcgttatgaaaagtgggaagtacgtcctggggtacaagcagactctgaagatgatcagacaaggcaaagcgaaattggtcattctcgctaacaactgcccagctttgaggaaatctgaaatagagtactatgctatgttggctaaaactggtgtccatcactacagtggcaataatattgaactgggcacagcatgcggaaaatactacagagtgtgcacactggctatcattgatccaggtgactctgacatcattagaaccatgccagaacagactggtgaaaagtaaaccttttcacctacaaaatttcacctgcaaaccttaaacctgcaaaattttcctttaataaaatttgcttgttttagnggnaaannnnnnnnnnnntgaaaatgacgaggagggcgcccatatgcgacccccaaaggtnnnnnnnnnnnnnnnnnannnnnnnnnaaaatggngggccggcttcggccctcgaaaagctttcaaaaacatttcgtttggggcgggggccccaaaagggaaagggaaccgggctcatagcgggttcccaaggaaaccggg

SEQ ID NO: 249857 - DNA, 810 bp, Homo Sapiens
ggggcgctcgggctgccgctggctcttcgcacgcggccatggccgactccgagctgcagctggttgagcagcggatccgcagcttccccgacttccccaccccaggcgtggtattcagggacatctcgcccgtcctgaaggaccccgcctccttccgcgccgccatcggcctcctggcgcgacacctgaaggcgacccacgggggccgcatcgactacatcgcaggcctagactcccgaggcttcctctttggcccctccctggcccaggagcttggactgggctgcgtgctcatccgaaagcgggggaagctgccaggccccactctgtgggcctcctattccctggagtacgggaaggctgagctggagattcagaaagacgccctggagccaggacagagggtggtcgtcgtggatgatctgctggccactggtggaaccatgaacgctgcctgtgagctgctgggccgcctgcaggctgaggtcctggagtgcgtgagcctggtggagctgacctcgcttaagggcagggagaagctggcacctgtacccttcttctctctcctgcagtatgagtgaccacagggcctcccagcccaacatctccagctggatcccagggaaatatcagccttgggcaactgcagtgaccagggcaccggctgcccacagggaacacattccctttgctggggttcagcgcctctcctggggctggaagtgccaaagcctggggcaaagctgtgtttcagccacactgaaacccaattacacacagcgggagaacgcagtaaacagctttcccacg
